(19) United States
(12) Patent Application Publication
(10) Pub. No.: US 2023/0357754 A1
(43) Pub. Date: Nov. 9, 2023

(54) RAPID EXTRACELLULAR ANTIBODY PROFILING (REAP) FOR THE DISCOVERY AND USE OF SAID ANTIBODIES

(71) Applicant: YALE UNIVERSITY, New Haven, CT (US)

(72) Inventors: Connor Rosen, New Haven, CT (US); Eric Wang, New Haven, CT (US); Aaron Ring, New Haven, CT (US); Yile Dai, New Haven, CT (US)

(21) Appl. No.: 17/906,759

(22) PCT Filed: Mar. 22, 2021
(86) PCT No.: PCT/US21/23521

§ 371 Date: Sep. 20, 2022

Related U.S. Application Data
(60) Provisional application No. 62/992,484, filed on Mar. 20, 2020.

(51) Int. Cl. C12N 15/10

(52) U.S. Cl. CPC C12N 15/1037; C12N 15/1065

(57) ABSTRACT

The present invention relates to methods for a sensitive and high-throughput detection of various antibodies and targets thereof. For example, in one aspect, methods of the present invention can successfully detect autoantibodies against extracellular and secreted proteins. In various embodiments, the present invention provides methods of diagnosing, assessing prognosis, preventing, and treating diseases or disorders associated with antibodies or targets thereof detected via the high-throughput detection methods of the present invention.

### CROSS REFERENCE TO RELATED APPLICATIONS

[0001] This application claims priority to U.S. Provisional Application No. 62/992,484, filed Mar. 20, 2020 which is hereby incorporated by reference herein in its entirety.

### STATEMENT REGARDING FEDERALLY SPONSORED RESEARCH OR DEVELOPMENT

[0002] This invention was made with government support under CA196530 awarded by National Institutes of Health. The government has certain rights in the invention.

### BACKGROUND OF THE INVENTION

[0003] Antibodies are natural products of the immune system that normally mediate host-defense against foreign pathogens. Auto-reactive antibodies that recognize against self-antigens play a major role in numerous facets of normal health and disease. For instance, autoantibodies underlie a wide range of autoimmune diseases, but they also contribute to anti-tumor immune responses against cancer. The precise targets of autoantibodies have been shown in many cases to determine the pathophysiology of disease, in both exacerbating and mitigating mechanisms. In some cases, autoantibodies of particular specificity may be diagnostic. In others, if the autoantibodies are functional and can exert immunomodulatory effects, they can drive disease pathogenesis or attenuate disease severity. Hence, identifying the precise molecular specificities of autoantibodies is critical for understanding the molecular basis for numerous diseases. Furthermore, knowledge of autoantibody reactivities may reveal new therapeutic disease targets, for instance by revealing anti-cancer antibody targets (e.g., endogenous anti-HER2 responses seen in breast cancer and anti-MUC1 in carcinoma) or immunosuppressive targets in autoimmune disease (e.g., endogenous anti-IFN-α in less severe cases of systemic lupus erythematosus). Autoantibodies themselves may represent therapeutic agents, given that they are fully human, recognize a native human antigen, and exert a desired therapeutic activity that can be inferred from clinical outcomes associated with the seroreactivity.

[0004] One major barrier in the identification of autoantibodies is limitations in modern autoantibody discovery methods. On one hand, current autoantibody detection methods that maximize sensitivity are limited in throughput, which forces autoantibody discovery to be done in a deductive process on the basis of well-known protein targets. On the other hand, current high-throughput autoantibody discovery methods that enable unbiased autoantibody detection, such as protein microarray or phage-based peptide display methods, do not effectively detect antibodies against extracellular and secreted proteins (the “exoproteome”) due to the conformational nature of these antigens. This is a major limitation because the “exoproteome” contains the very proteins that reside topologically outside the cell and are actually accessible to circulating autoantibodies. As such, extracellular proteins constitute the most likely targets of functional autoantibodies.

[0005] Thus, there is a need in the art for a sensitive and high-throughput detection method of antibodies and targets thereof that can successfully detect autoantibodies against extracellular and secreted proteins. The present invention addresses this need.

### BRIEF SUMMARY OF THE INVENTION

[0006] In one embodiment, the invention provides a method of identifying at least one polypeptide which binds to at least one antibody, wherein the method comprises:
[0007] (a) contacting a library of display cells or particles with a sample comprising at least one antibody, wherein the library of display cells comprises a plurality of cells or particles wherein together the plurality of cells or particles comprises nucleic acid molecules for expression of a plurality of extracellular proteins, secreted proteins or a combination thereof,
[0008] wherein each cell or particle of the plurality of cells or particles comprises a barcoded nucleic acid molecule, wherein each nucleic acid molecule comprises
   [0009] i) a nucleotide sequence encoding a polypeptide of interest for display on the surface of the cell or particle; and
   [0010] ii) a unique nucleotide barcode sequence;
[0011] (b) isolating one or more antibody-bound cell or particle;
[0012] (c) isolating at least one barcoded nucleic acid molecule from at least one cell or particle of step (b); and
[0013] (d) identifying the barcoded nucleic acid molecule, thereby identifying the associated encoded polypeptide as an antigen for binding by at least one antibody in the sample.

[0014] In one embodiment, the method of isolating one or more antibody-bound cell or particle comprises high-throughput magnetic separation.

[0015] In one embodiment, the method further comprises the step of:
[0016] (b′) expanding the one or more isolated antibody-bound cell or particle.

[0017] In one embodiment, the method of identifying the barcoded nucleic acid molecule comprises at least one selected from the group consisting of amplifying the barcoded nucleic acid molecule and sequencing the barcoded nucleic acid molecule.

[0018] In one embodiment, the method comprises:
[0019] in step (b), isolating multiple antibody bound cells,
[0020] in step (c), isolating the barcoded nucleic acid molecules from the cells of step (b), and
[0021] in step (d), sequencing the isolated barcoded nucleic acid molecules, and identifying the associated encoded polypeptide as an antigen for binding by the antibody based on an enrichment of the number of reads of the associated barcode in the sequencing data as compared to a threshold level.

[0022] In one embodiment, the threshold level is selected from the group consisting of a predetermined threshold level, a statistically determined threshold, and a threshold level determined using z-scores.

[0023] In one embodiment, the library of display cells or particles comprises a library of barcoded nucleic acid molecules encoding at least one selected from an extracellular domain of a protein, an extracellular protein, and a secreted protein.

[0024] In one embodiment, the library of barcoded nucleic acid molecules comprises a plurality of nucleic acid molecules which together encode the human exoproteome.

[0025] In one embodiment, the library of barcoded nucleic acid molecules comprises at least one nucleic acid molecule encoding at least one polypeptide sequence selected from SEQ ID NO:1-3092.

[0026] In one embodiment, the library of barcoded nucleic acid molecules comprises a plurality of nucleic acid molecules which together encode each of SEQ ID NO:1-3092.

[0027] In one embodiment, the library of barcoded nucleic acid molecules comprises at least one nucleic acid molecule comprising a nucleotide sequence selected from SEQ ID NO:3093-6185.

[0028] In one embodiment, the library of barcoded nucleic acid molecules comprises a plurality of nucleic acid molecules which together comprise each of SEQ ID NO:3093-6185.

[0029] In one embodiment, the sample comprises a biological sample selected from the group consisting of a body fluid, blood, serum, plasma, cerebrospinal fluid, tissue, and any combination thereof.

[0030] In one embodiment, the sample comprises at least one antibody purified from a biological sample selected from the group consisting of a body fluid, blood, serum, plasma, cerebrospinal fluid, tissue, and any combination thereof.

[0031] In one embodiment, the at least one antibody is purified from a biological sample by at least one selected from the group consisting of:
[0032] (a) affinity purification for a specific antibody isotype of interest, and
[0033] (b) contacting the sample with a control cell or particle comprising an empty expression plasmid.

[0034] In one embodiment, the sample is from a subject diagnosed as having a disease or disorder, and whereby the antigen for binding by at least one antibody is a disease-associated antigen.

[0035] In one embodiment, the antibody is an autoantibody.

[0036] In one embodiment, the antibody is associated with an autoimmune disease or disorder, cancer, inflammatory disease or disorder, metabolic disease or disorder, neurodegenerative disease or disorder, organ tissue rejection, organ transplant rejection, or any combination thereof.

[0037] In one embodiment, the invention relates to a method of preventing or treating a disease or disorder in a subject in need thereof; the method comprising administering a therapeutic agent to the subject, wherein the therapeutic agent comprises an agent for modifying the level or reactivity of at least one antibody which interacts with at least one antigen selected from the group consisting of the antigens as set forth in SEQ ID NO:1-3092.

[0038] In one embodiment, the antigen is identified as a target for at least one antibody according to a method comprising:
[0039] (a) contacting a library of display cells or particles with a sample comprising at least one antibody, wherein the library of display cells comprises a plurality of cells or particles wherein together the plurality of cells or particles comprises nucleic acid molecules for expression of a plurality of extracellular proteins, secreted proteins or a combination thereof,
[0040] wherein each cell or particle of the plurality of cells or particles comprises a barcoded nucleic acid molecule, wherein each nucleic acid molecule comprises
   [0041] i) a nucleotide sequence encoding a polypeptide of interest for display on the surface of the cell or particle; and
   [0042] ii) a unique nucleotide barcode sequence;
[0043] (b) isolating one or more antibody-bound cell or particle;
[0044] (c) isolating at least one barcoded nucleic acid molecule from at least one cell or particle of step (b); and
[0045] (d) identifying the barcoded nucleic acid molecule, thereby identifying the associated encoded polypeptide as an antigen for binding by at least one antibody in the sample

[0046] In one embodiment, the at least one antigen is selected from the group consisting of an antigen as set forth in Table 3, and further wherein the disease or disorder is the disease or disorder associated with the antigen as set forth in Table 3.

[0047] In one embodiment, the therapeutic agent comprises an agent for decreasing the level or reactivity of at least one antibody with at least one disease-associated antigen selected from the group consisting of the antigens as set forth in Table 3.

[0048] In one embodiment, the at least one antigen is selected from the group consisting of an antigen as set forth in Table 6, and further wherein the disease or disorder is the disease or disorder associated with the antigen as set forth in Table 6.

[0049] In one embodiment, the therapeutic agent comprises a therapeutically effective amount of at least agent that reduces or eliminates at least one antibody.

[0050] In one embodiment, the therapeutic agent comprises a composition comprising an antigen selected from the group consisiting of an antigen as set forth in SEQ

[0051] ID NO:1-3092 linked to a domain for endocytosis and degradation.

[0052] In one embodiment, the therapeutic agent comprises a composition comprising an antigen selected from the group consisiting of an antigen as set forth in Table 6 linked to a domain for endocytosis and degradation.

[0053] In one embodiment, the domain for endocytosis and degradation comprises an asialoglycoprotein receptor binding domain.

[0054] In one embodiment, the agent that reduces or eliminates at least one antibody comprises a molecule for targeting and destruction of at least one antibody-expressing cell.

[0055] In one embodiment, the agent comprises a chimeric antigen receptor (CAR) T cell expressing an antigen selected from the group consisting of an antigen as set forth in SEQ ID NO:1-3092, or a fragment thereof.

[0056] In one embodiment, the CAR T cell expresses an antigen selected from the group consisting of an antigen as set forth in Table 6.

[0057] In one embodiment, the therapeutic agent comprises an agent for increasing the level or reactivity of at least one antibody with at least one disease-associated antigen selected from the group consisting of the antigens as set forth in Table 3.

[0058] In one embodiment, the at least one antigen is selected from the group consisting of an antigen as set forth in Table 5, and further wherein the disease or disorder is the disease or disorder associated with the antigen as set forth in Table 5.

[0059] In one embodiment, the therapeutic agent comprises a therapeutically effective amount of at least one antibody, or fragment thereof, wherein the antibody specifically binds to a disease-associated antigen.

[0060] In one embodiment, the disease or disorder is selected from the group consisting of an autoimmune disease or disorder, cancer, inflammatory disease or disorder, metabolic disease or disorder, neurodegenerative disease or disorder, organ tissue rejection, organ transplant rejection, or any combination thereof.

[0061] In one embodiment, the disease or disorder is selected from the group consisting of antineutrophil cytoplasmic antibody (ANCA)-associated vasculitis, autoimmune polyendocrinopathy candidiasis ecto-dermal dystrophy, antiphospholipid antibody syndrome, chronic inflammatory demyelinating polyradiculoneuropathy, cutaneous lupus erythematosus, COVID-19, drug-induced lupus, dermatomyositis, glomerulonephritis, a disease or disorder associated with kidney transplant, malaria, mixed connective tissue disease, myasthenia gravis, malignant melanoma, neuromyelitis optica, non-small cell lung cancer, pediatric autoimmune neuropsychiatric disorders associated with streptococcal infections, systemic lupus erythematosus, sjogren's syndrome, scleroderma, susac syndrome, undifferentiated connective tissue disease, and any combination thereof.

[0062] In one embodiment, the invention relates to a method of diagnosing, assessing the prognosis, or assessing the effectiveness of treatment of a disease or disorder in a subject in need thereof, the method comprising assessing the level or reactivity of at least one antibody which interacts with at least one antigen selected from the group consisting of an antigen as set forth in SEQ ID NO:1-3092.

[0063] In one embodiment, the at least one antigen is selected from the group consisting of an antigen as set forth in Table 3, and further wherein the disease or disorder is the disease or disorder associated with the antigen as set forth in Table 3.

[0064] In one embodiment, the at least one antigen is selected from the group consisting of an antigen as set forth in Table 4, and further wherein the disease or disorder is the disease or disorder associated with the antigen as set forth in Table 4.

[0065] In one embodiment, the disease or disorder is selected from the group consisting of an autoimmune disease or disorder, cancer, inflammatory disease or disorder, metabolic disease or disorder, neurodegenerative disease or disorder, organ tissue rejection, organ transplant rejection, or any combination thereof.

[0066] In one embodiment, the disease or disorder is selected from the group consisting of antineutrophil cytoplasmic antibody (ANCA)-associated vasculitis, autoimmune polyendocrinopathy candidiasis ecto-dermal dystrophy, antiphospholipid antibody syndrome, chronic inflammatory demyelinating polyradiculoneuropathy, cutaneous lupus erythematosus, COVID-19, drug-induced lupus, dermatomyositis, glomerulonephritis, a disease or disorder associated with kidney transplant, malaria, mixed connective tissue disease, myasthenia gravis, malignant melanoma, neuromyelitis optica, non-small cell lung cancer, pediatric autoimmune neuropsychiatric disorders associated with streptococcal infections, systemic lupus erythematosus, sjogren's syndrome, scleroderma, susac syndrome, undifferentiated connective tissue disease, and any combination thereof.

[0067] In one embodiment, the invention relates to a composition comprising an antigen selected from the group consisting of an antigen as set forth in SEQ ID NO:1-3092, or a fragment thereof, linked to a domain for endocytosis, degradation, or a combination thereof.

[0068] In one embodiment, the composition comprises an antigen selected from the group consisting of an antigen as set forth in Table 6 linked to a domain for endocytosis, degradation, or a combination thereof.

[0069] In one embodiment, the domain for endocytosis, degradation, or a combination thereof comprises an asialoglycoprotein receptor binding domain.

[0070] In one embodiment, the invention relates to a composition for targeting and destruction of at least one antibody-expressing cell comprising an antigen selected from the group consisting of an antigen as set forth in SEQ ID NO:1-3092, or a fragment thereof.

[0071] In one embodiment, the agent comprises a chimeric antigen receptor (CAR)

[0072] T cell expressing an antigen as set forth in SEQ ID NO:1-3092, or a fragment thereof. In one embodiment, the CAR T cell expresses an antigen selected from the group consisting of an antigen as set forth in Table 6.

### BRIEF DESCRIPTION OF THE DRAWINGS

[0073] The following detailed description of embodiments of the invention will be better understood when read in conjunction with the appended drawings. It should be understood that the invention is not limited to the precise arrangements and instrumentalities of the embodiments shown in the drawings.

[0074] FIG. 1 depicts a REAP schematic. Simplified schematic of REAP. Antibodies are incubated with a genetically-barcoded yeast library displaying members of the exoproteome in 96-well microtiter plates. Antibody bound yeast are enriched by magnetic column-based sorting and enrichment is quantified by next-generation sequencing.

[0075] FIG. 2A and FIG. 2B depict exemplary experimental data demonstrating that REAP detects known targets of monoclonal antibodies. A panel of nine monoclonal antibodies were screened using REAP. FIG. 2A depicts a heatmap of results from REAP screen of nine monoclonal antibodies. Only relevant monoclonal antibody targets (gene names) are displayed. FIG. 2B depicts a representative sample from the screen. Monoclonal antibody target is highlighted in red and labelled. Background subtraction was performed by subtracting the score of a selection performed with beads and secondary alone. Scores below the average background level are not shown.

[0076] FIG. 3 depicts exemplary experimental data demonstrating a REAP screen of APECED patient samples. Reactivities uncovered in a REAP screen of 77 APECED patients and 20 healthy controls. Heatmap of REAP scores is depicted. Antigen groups were manually categorized.

[0077] FIG. 4 depicts exemplary experimental data demonstrating the concordance of REAP results and clinical anti-GIF autoantibody tests in APECED patients. Violin plot of GIF REAP scores in APECED samples stratified by intrinsic factor clinical autoantibody test results.

[0078] FIG. 5A and FIG. 5B depict exemplary experimental data demonstrating a REAP screen with serial dilutions of APECED 19 sample. REAP screen conducted with half log serial dilutions of APECED 19 IgG. Results are composed of technical duplicates. Only results from known autoantibody targets in APECED are depicted. Results are depicted as (FIG. 5A) the uncapped score of reactivities at various concentrations of APECED IgG and as (FIG. 5B) normalized, dose-response curves of reactivities where reactivities are measured by log 2 fold enrichment rather than score. Curves were fit using a sigmoidal 4 parameter logistic curve. Error bars represent standard deviation.

[0079] FIG. 6A and FIG. 6B depict exemplary experimental data demonstrating that REAP sensitivity can exceed that of ELISA. REAP (FIG. 6A) versus ELISA (FIG. 6B) dose-response curve comparison for APECED 19 autoantibodies against four proteins. Results are the averages of technical duplicates. Curves were fit using a sigmoidal 4 parameter logistic curve. Error bars represent standard deviation.

[0080] FIG. 7 depicts exemplary data demonstrating that REAP exhibits high reproducibility. Box plot of Log 2[fold enrichment] R2 coefficient of determination values between technical replicates of APECED patients screened in FIG. 3.

[0081] FIG. 8 depicts exemplary data demonstrating a REAP screen of SLE patient samples. Reactivities uncovered in a REAP screen of a cohort of 106 unique SLE patients spanning 155 samples and 20 healthy controls. Heatmap of REAP scores is depicted where each column is a unique patient. For patients with longitudinal samples, the maximum REAP score for each given reactivity is shown. Antigen groups were manually categorized. Patients are ordered from left to right by increasing SLEDAI score. White stars symbolize detection of a therapeutic antibody. Score was artificially capped at 7 to aid visualization.

[0082] FIG. 9A through FIG. 9E depict exemplary data demonstrating the biochemical and functional validation of novel SLE autoantibodies. FIG. 9A depicts an anti-PD-L2 pan-IgG ELISAs conducted with serial dilutions of SLE or control serum. FIG. 9D depicts an anti-IL-33 pan-IgG ELISAs conducted with serial dilutions of SLE or control serum. FIG. 9B depicts a schematic and FIG. 9C depicts results of PD-L2 blocking assay conducted with serial dilutions of serum from a control and the SLE patient in FIG. 9A. FIG. 9E depicts a schematic and FIG. 9F depicts results of IL-33 neutralization assay conducted with serial dilutions of IgG from a control and the SLE patient in FIG. 9D. All error bars in this figure represent standard deviation.

[0083] FIG. 10 depicts exemplary data demonstrating a REAP screen of immunotherapy-treated NSCLC patients. Reactivities uncovered in a REAP screen of 63 immunotherapy-treated non-small cell lung cancer (NSCLC) patients and 16 healthy donors. Of the 63 patients, longitudinal samples for 57 patients were available. Results are composed of technical duplicates. Longitudinal reactivities for each patient were collapsed and each reactivity was classified as increased, decreased, constant, therapeutic. The maximum reactivity for each protein in the healthy donor group is shown. Only proteins reactivities that developed or regressed in at least one patient are shown. Maximum score is defined as the maximum score of the protein at any time point. Score was not artificially capped. Increased responses are defined as those where the score of the protein increased by 2 or more at any time point after the first screened time point. Decreased responses are defined as those where the maximum score of the protein after the first screened time point was decreased by 2 or more from the initial score. Therapeutic responses are those where the patient was known to be receiving a therapeutic antibody against that protein. Patients are grouped by response to immunotherapy treatment.

[0084] FIG. 11 depicts exemplary data demonstrating that REAP scores can accurately reflect longitudinal changes in autoantibodies. Single point anti-OX40 isotype specific ELISAs conducted with serum from patient 3 at all available time points. REAP reactivity scores are depicted below with score artificially capped at 5. 1:100 serum dilutions were used. Results are averages of technical duplicates.

[0085] FIG. 12 depicts exemplary data demonstrating that unique sample clusters can be identified from REAP data. UMAP analysis of scores from previously described REAP screens of NSCLC, SLE, and UCTD patients. Each dot on the plot represents one patient sample at one time point. UMAP analysis was performed and visualized using a custom R script.

[0086] FIG. 13 depicts a REAP screen of scleroderma patients. Reactivities uncovered in a REAP screen of limited cutaneous systemic sclerosis, diffuse cutaneous systemic sclerosis patients, and healthy controls. Heatmap of REAP scores is depicted where each column is a unique patient. Antigen groups were manually categorized. Patient modified Rodnan skin score (mRSS), disease duration in months, and age in years is displayed below the heatmap.

[0087] FIG. 14 depicts immune-targeting autoantibody reactivities uncovered in COVID-19 patients. Heatmap of REAP scores for autoantibodies against immune-related antigens uncovered in a REAP screen of 194 COVID-19 patients. Antigen groups were manually categorized. Patients were stratified by disease severity. The negative group consists of control samples from uninfected healthcare workers. Abbreviations are as follows: asym: asymptomatic. Score was artificially capped at 7 to aid visualization.

[0088] FIG. 15 depicts tissue-targeting autoantibody reactivities uncovered in COVID-19 patients. Heatmap of REAP scores for autoantibodies against tissue-associated antigens uncovered in a REAP screen of COVID-19 patients. Antigen groups were manually categorized. Patients were stratified by disease severity. The negative group consists of control samples from uninfected healthcare workers. Abbreviations are as follows: asym—asymptomatic. Score was artificially capped at 7 to aid visualization.

[0089] FIG. 16 depicts a REAP screen of immunotherapy-treated melanoma patients. Heatmap of REAP score for autoantibodies identified in a screen of 222 CPI-treated melanoma patients and 62 healthy control samples. Score was artificially capped at 7 to aid visualization.

[0090] FIG. 17 depicts a REAP screen of kidney transplant patients. Heatmap of REAP score for immune-related autoantibodies identified in a screen of 108 kidney transplant patients with pre and post transplantation serum samples. Longitudinal reactivities for each patient were collapsed and each reactivity was classified as increased, decreased, stable. Patients are grouped by rejection and infection status after transplantation.

[0091] FIG. 18 depicts representative ELISA and LIPS validation data. FIG. 18A depicts an anti-OX40 autoantibody enzyme-linked immunosorbent assay (ELISA) titrations of NSCLC patient 3 serum at different time points. Reactivities were considered validated if average optical density (OD) at 1:100 serum dilution was at least 3 healthy donor standard deviations above the average 1:100 healthy donor serum dilution OD. Results are averages of technical duplicates. Error bars represent standard deviation. FIG. 18B depicts an anti-VEGFB autoantibody single-point luciferase immunoprecipitation systems (LIPS) with various NSCLC patient serum and healthy donor serum. 1:100 serum dilutions were used. Reactivities were considered validated if average relative light units (RLU) was at least 3 healthy donor standard deviations above the average healthy donor RLU.

[0092] FIG. 19 depicts an analysis of the sensitivity and specificity of REAP. An ROC curve based on orthogonal validation data of APECED and SLE screen reactivities is shown. Orthogonal validation was performed with LIPS or ELISA. For ELISA and LIPS, valid reactivities were defined as those 3 standard deviations above the healthy donor average for a given protein in each assay. ROC analysis was performed using 247 test pairs across 25 different proteins.

[0093] FIG. 20 depicts a schematic for targeted degradation of autoantigen-specific antibodies. Autoantigens are conjugated with a degradation moiety (e.g., a binding partner of the asialoglycoprotein receptor or other endocytosis promoting receptor). Once pathogenic autoantibodies bind to their respective autoantigen, they will be removed from circulation by endocytosis and degradation in the lysosome or other intracellular compartment.

[0094] FIG. 21 depicts a schematic for removal of autoantigen-specific B/plasma cells. CAR-T or CAR-NK cells are designed such that instead of an scFv targeting domain, instead, an autoantigen identified via REAP is used to direct CAR activity. Once CAR-T/NK cells bind to autoreactive B cells (that present B cell receptors/immunoglobulin on their plasma membrane), the CAR-T/NK cells will initiate cytotoxic programs that kill the corresponding autoreactive B/plasma cell.

[0095] FIG. 22 depicts schematic for autoantigen engineering to remove unwanted interaction with endogenous binding partners. To avoid unwanted interaction with their native binding partners, autoantigens are engineered to maintain autoantibody binding, but avoid interaction with their native binding partners. For example, a type I interferon engineered with decreasing binding to its receptors IFNAR1 and IFNAR2, but with maintained interaction with anti-interferon autoantibodies. The engineered autoantigens can subsequently be used for targeted autoantibody degradation (FIG. 20) or targeted B cell removal (FIG. 21).

[0096] FIG. 23 depicts a summary of validation data. ELISA or LIPS validation data for reactivities identified in REAP.

### DETAILED DESCRIPTION

[0097] The present invention relates to methods for the sensitive and high-throughput detection of various antibodies and targets thereof. For example, in one aspect, methods of the present invention identify target extracellular, secreted, and/or transmembrane proteins that specifically bind to various antibodies of interest. In another aspect, the present invention provides methods of preventing or treating diseases or disorders associated with antibodies and/or targets thereof detected via the high-throughput detection methods of the present invention. In various embodiments, the present invention provides methods of diagnosing, assessing prognosis, and assessing the effectiveness of treatments of diseases or disorders associated with antibodies detected via the high-throughput detection methods of the present invention. In another aspect, the present invention provides methods of predicting a response to a therapy. In another aspect, the present invention provides methods of alleviating toxicity of a cancer treatment.

### Definitions

[0098] Unless defined otherwise, all technical and scientific terms used herein have the same meaning as commonly understood by one of ordinary skill in the art to which this invention belongs.

[0099] As used herein, each of the following terms has the meaning associated with it in this section.

[0100] The articles “a” and “an” are used herein to refer to one or to more than one (i.e., to at least one) of the grammatical object of the article. By way of example, “an element” means one element or more than one element.

[0101] The term “about” as used herein when referring to a measurable value such as an amount, a temporal duration, and the like, is meant to encompass variations of ±20%, ±10%, ±5%, ±1%, or ±0.1% from the specified value, as such variations are appropriate to perform the disclosed methods.

[0102] The term “antibody,” as used herein, refers to an immunoglobulin molecule which is able to specifically bind to a specific epitope of an antigen. Antibodies can be intact immunoglobulins derived from natural sources, or from recombinant sources and can be immunoreactive portions of intact immunoglobulins. The antibodies in the present invention may exist in a variety of forms including, for example, polyclonal antibodies, monoclonal antibodies, intracellular antibodies (“intrabodies”), Fv, Fab, Fab′, F(ab)2 and F(ab′)2, as well as single chain antibodies (scFv), heavy chain antibodies, such as camelid antibodies, and humanized antibodies (Harlow et al., 1999, Using Antibodies: A Laboratory Manual, Cold Spring Harbor Laboratory Press, NY; Harlow et al., 1989, Antibodies: A Laboratory Manual, Cold Spring Harbor, New York; Houston et al., 1988, Proc. Natl. Acad. Sci. USA 85:5879-5883; Bird et al., 1988, Science 242:423-426).

[0103] The term “antibody fragment” refers to at least one portion of an intact antibody, or recombinant variants thereof, and refers to the antigen binding domain, e.g., an antigenic determining variable region of an intact antibody, that is sufficient to confer recognition and specific binding of the antibody fragment to a target, such as an antigen.

[0104] By the term “synthetic antibody” as used herein, is meant an antibody which is generated using recombinant DNA technology, such as, for example, an antibody expressed by a bacteriophage. The term should also be construed to mean an antibody which has been generated by the synthesis of a DNA molecule encoding the antibody and which DNA molecule expresses an antibody protein, or an amino acid sequence specifying the antibody, wherein the DNA or amino acid sequence has been obtained using synthetic DNA or amino acid sequence technology which is available and well known in the art.

[0105] A “humanized antibody” refers to a type of engineered antibody having its CDRs derived from a non-human donor immunoglobulin, the remaining immunoglobulin-derived parts of the molecule being derived from one (or more) human immunoglobulin(s). In addition, framework support residues may be altered to preserve binding affinity (see, e.g., 1989, Queen et al., Proc. Natl. Acad Sci USA, 86:10029-10032; 1991, Hodgson et al., Bio/Technology, 9:421). A suitable human acceptor antibody may be one selected from a conventional database, e.g., the KABAT database, Los Alamos database, and Swiss Protein database, by homology to the nucleotide and amino acid sequences of the donor antibody. A human antibody characterized by a homology to the framework regions of the donor antibody (on an amino acid basis) may be suitable to provide a heavy chain constant region and/or a heavy chain variable framework region for insertion of the donor CDRs. A suitable acceptor antibody capable of donating light chain constant or variable framework regions may be selected in a similar manner. It should be noted that the acceptor antibody heavy and light chains are not required to originate from the same acceptor antibody. The prior art describes several ways of producing such humanized antibodies (see for example EP-A-0239400 and EP-A-054951).

[0106] A “chimeric antibody” refers to a type of engineered antibody which contains a naturally-occurring variable region (light chain and heavy chains) derived from a donor antibody in association with light and heavy chain constant regions derived from an acceptor antibody.

[0107] The term “donor antibody” refers to an antibody (monoclonal, and/or recombinant) which contributes the amino acid sequences of its variable regions, CDRs, or other functional fragments or analogs thereof to a first immunoglobulin partner, so as to provide the altered immunoglobulin coding region and resulting expressed altered antibody with the antigenic specificity and neutralizing activity characteristic of the donor antibody.

[0108] The term “acceptor antibody” refers to an antibody (monoclonal and/or recombinant) heterologous to the donor antibody, which contributes all (or any portion, but in some embodiments all) of the amino acid sequences encoding its heavy and/or light chain framework regions and/or its heavy and/or light chain constant regions to the first immunoglobulin partner. In certain embodiments a human antibody is the acceptor antibody.

[0109] By the term “recombinant antibody” as used herein, is meant an antibody which is generated using recombinant DNA technology, such as, for example, an antibody expressed by a bacteriophage or yeast cell expression system. The term should also be construed to mean an antibody which has been generated by the synthesis of a DNA molecule encoding the antibody and which DNA molecule expresses an antibody protein, or an amino acid sequence specifying the antibody, wherein the DNA or amino acid sequence has been obtained using recombinant DNA or amino acid sequence technology which is available and well known in the art.

[0110] An “antibody heavy chain,” as used herein, refers to the larger of the two types of polypeptide chains present in antibody molecules in their naturally occurring conformations, and which normally determines the class to which the antibody belongs.

[0111] An “antibody light chain,” as used herein, refers to the smaller of the two types of polypeptide chains present in antibody molecules in their naturally occurring conformations. Kappa (κ) and lambda (λ) light chains refer to the two major antibody light chain isotypes.

[0112] As used herein, “antigen-binding domain” means that part of the antibody, recombinant molecule, the fusion protein, or the immunoconjugate of the invention which recognizes the target or portions thereof.

[0113] The term “antigen” or “Ag” as used herein is defined as a molecule that provokes an adaptive immune response. This immune response may involve either antibody production, or the activation of specific immunogenically-competent cells, or both. The skilled artisan will understand that any macromolecule, including virtually all proteins or peptides, can serve as an antigen. Furthermore, antigens can be derived from recombinant or genomic DNA or RNA. A skilled artisan will understand that any DNA or RNA, which comprises a nucleotide sequence or a partial nucleotide sequence encoding a protein that elicits an adaptive immune response therefore encodes an “antigen” as that term is used herein. Furthermore, one skilled in the art will understand that an antigen need not be encoded solely by a full-length nucleotide sequence of a gene. It is readily apparent that the present invention includes, but is not limited to, the use of partial nucleotide sequences of more than one gene and that these nucleotide sequences are arranged in various combinations to elicit the desired immune response. Moreover, a skilled artisan will understand that an antigen need not be encoded by a “gene” at all. It is readily apparent that an antigen can be generated synthesized or can be derived from a biological sample. Such a biological sample can include, but is not limited to a tissue sample, tumor sample, cell, biological fluid, body fluid, blood, serum, plasma, tissue, or any combination thereof.

[0114] As used herein, the terms “targeting domain”, “targeting moiety”, or “targeting group” are used interchangeably and refer to all molecules capable of specifically binding to a particular target molecule and forming a bound complex as described above. Thus, the ligand and its corresponding target molecule form a specific binding pair.

[0115] By the term “specifically binds,” as used herein with respect to an antibody, is meant an antibody which recognizes a specific antigen, but does not substantially recognize or bind other molecules in a sample. For example, an antibody that specifically binds to an antigen from one species may also bind to that antigen from one or more other species. But, such cross-species reactivity does not itself alter the classification of an antibody as specific. In another example, an antibody that specifically binds to an antigen may also bind to different allelic forms of the antigen. However, such cross reactivity does not itself alter the classification of an antibody as specific. In some instances, the terms “specific binding” or “specifically binding,” can be used in reference to the interaction of an antibody, a protein, or a peptide with a second chemical species, to mean that the interaction is dependent upon the presence of a particular structure (e.g., an antigenic determinant or epitope) on the chemical species; for example, an antibody recognizes and binds to a specific protein structure rather than to proteins generally. If an antibody is specific for epitope “A”, the presence of a molecule containing epitope A (or free, unlabeled A), in a reaction containing labeled “A” and the antibody, will reduce the amount of labeled A bound to the antibody.

[0116] The term “transfected” or “transformed” or “transduced” as used herein refers to a process by which exogenous nucleic acid is transferred or introduced into the host cell. A “transfected” or “transformed” or “transduced” cell is one which has been transfected, transformed or transduced with exogenous nucleic acid. The cell includes the primary subject cell and its progeny.

[0117] The phrase “under transcriptional control” or “operatively linked” as used herein means that the promoter is in the correct location and orientation in relation to a polynucleotide to control the initiation of transcription by RNA polymerase and expression of the polynucleotide.

[0118] The term “operably linked” refers to functional linkage between a regulatory sequence and a heterologous nucleic acid sequence resulting in expression of the latter. For example, a first nucleic acid sequence is operably linked with a second nucleic acid sequence when the first nucleic acid sequence is placed in a functional relationship with the second nucleic acid sequence. For instance, a promoter is operably linked to a coding sequence if the promoter affects the transcription or expression of the coding sequence. Generally, operably linked DNA or RNA sequences are contiguous and, where necessary to join two protein coding regions, in the same reading frame.

[0119] The term “adjuvant” as used herein is defined as any molecule to enhance an antigen-specific adaptive immune response.

[0120] “Immunogen” refers to any substance introduced into the body in order to generate an immune response. That substance can a physical molecule, such as a protein, or can be encoded by a vector, such as DNA, mRNA, or a virus.

[0121] “Immune response,” as the term is used herein, means a process involving the activation and/or induction of an effector function in, by way of non-limiting examples, a T cell, B cell, natural killer (NK) cell, and/or an antigen-presenting cell (APC). Thus, an immune response, as would be understood by the skilled artisan, includes, but is not limited to, any detectable antigen-specific activation and/or induction of a helper T cell or cytotoxic T cell activity or response, production of antibodies, antigen presenting cell activity or infiltration, macrophage activity or infiltration, neutrophil activity or infiltration, and the like.

[0122] “Isolated” means altered or removed from the natural state. For example, a nucleic acid or a peptide naturally present in a living animal is not “isolated,” but the same nucleic acid or peptide partially or completely separated from the coexisting materials of its natural state is “isolated.” An isolated nucleic acid or protein can exist in substantially purified form, or can exist in a non-native environment such as, for example, a host cell.

[0123] As used herein, the terms “peptide,” “polypeptide,” and “protein” are used interchangeably, and refer to a compound comprised of amino acid residues covalently linked by peptide bonds. A protein or peptide must contain at least two amino acids, and no limitation is placed on the maximum number of amino acids that can comprise a protein's or peptide's sequence. Polypeptides include any peptide or protein comprising two or more amino acids joined to each other by peptide bonds. As used herein, the term refers to both short chains, which also commonly are referred to in the art as peptides, oligopeptides and oligomers, for example, and to longer chains, which generally are referred to in the art as proteins, of which there are many types. “Polypeptides” include, for example, biologically active fragments, substantially homologous polypeptides, oligopeptides, homodimers, heterodimers, variants of polypeptides, modified polypeptides, derivatives, analogs, fusion proteins, among others. The polypeptides include natural peptides, recombinant peptides, synthetic peptides, or a combination thereof.

[0124] A “nucleic acid” refers to a polynucleotide and includes poly-ribonucleotides and poly-deoxyribonucleotides. Nucleic acids according to the present invention may include any polymer or oligomer of pyrimidine and purine bases, preferably cytosine, thymine, and uracil, and adenine and guanine, respectively. (See Albert L. Lehninger, Principles of Biochemistry, at 793-800 (Worth Pub. 1982) which is herein incorporated in its entirety for all purposes). Indeed, the present invention contemplates any deoxyribonucleotide, ribonucleotide or peptide nucleic acid component, and any chemical variants thereof, such as methylated, hydroxymethylated or glucosylated forms of these bases, and the like. The polymers or oligomers may be heterogeneous or homogeneous in composition, and may be isolated from naturally occurring sources or may be artificially or synthetically produced. In addition, the nucleic acids may be DNA or RNA, or a mixture thereof, and may exist permanently or transitionally in single-stranded or double-stranded form, including homoduplex, heteroduplex, and hybrid states.

[0125] The term “DNA” as used herein is defined as deoxyribonucleic acid.

[0126] The term “recombinant DNA” as used herein is defined as DNA produced by joining pieces of DNA from different sources.

[0127] The term “recombinant polypeptide” as used herein is defined as a polypeptide produced by using recombinant DNA methods.

[0128] The term “RNA” as used herein is defined as ribonucleic acid.

[0129] The term “recombinant RNA” as used herein is defined as RNA produced by joining pieces of RNA from different sources.

[0130] As used herein, “conjugated” refers to covalent attachment of one molecule to a second molecule.

[0131] “Variant” as the term is used herein, is a nucleic acid sequence or a peptide sequence that differs in sequence from a reference nucleic acid sequence or peptide sequence respectively, but retains essential biological properties of the reference molecule. Changes in the sequence of a nucleic acid variant may not alter the amino acid sequence of a peptide encoded by the reference nucleic acid, or may result in amino acid substitutions, additions, deletions, fusions and truncations. Changes in the sequence of peptide variants are typically limited or conservative, so that the sequences of the reference peptide and the variant are closely similar overall and, in many regions, identical. A variant and reference peptide can differ in amino acid sequence by one or more substitutions, additions, deletions in any combination. A variant of a nucleic acid or peptide can be a naturally occurring such as an allelic variant, or can be a variant that is not known to occur naturally. Non-naturally occurring variants of nucleic acids and peptides may be made by mutagenesis techniques or by direct synthesis. In various embodiments, the variant sequence is at least 99%, at least 98%, at least 97%, at least 96%, at least 95%, at least 94%, at least 93%, at least 92%, at least 91%, at least 90%, at least 89%, at least 88%, at least 87%, at least 86%, at least 85% identical to the reference sequence.

[0132] As used herein, the term “identical” refers to two or more sequences or subsequences which are the same.

[0133] In addition, the term “substantially identical,” as used herein, refers to two or more sequences which have a percentage of sequential units which are the same when compared and aligned for maximum correspondence over a comparison window, or designated region as measured using a comparison algorithm or by manual alignment and visual inspection. By way of example only, two or more sequences may be “substantially identical” if the sequential units are about 60% identical, about 65% identical, about 70% identical, about 75% identical, about 80% identical, about 85% identical, about 90% identical, or about 95% identical over a specified region. Such percentages to describe the “percent identity” of two or more sequences. The identity of a sequence can exist over a region that is at least about 75-100 sequential units in length, over a region that is about 50 sequential units in length, or, where not specified, across the entire sequence. This definition also refers to the complement of a test sequence.

[0134] As used herein, “fragment” is defined as at least a portion of a sequence. For example, in one embodiment, the term “fragment” refers to a portion of the variable region of the immunoglobulin molecule which binds to its target, i.e. the antigen binding region. Some of the constant region of the immunoglobulin may be included.

[0135] In the context of the present invention, the following abbreviations for the commonly occurring nucleosides (nucleobase bound to ribose or deoxyribose sugar via N-glycosidic linkage) are used. “A” refers to adenosine, “C” refers to cytidine, “G” refers to guanosine, “T” refers to thymidine, and “U” refers to uridine.

[0136] The term “polynucleotide” as used herein is defined as a chain of nucleotides. Furthermore, nucleic acids are polymers of nucleotides. Thus, nucleic acids and polynucleotides as used herein are interchangeable. One skilled in the art has the general knowledge that nucleic acids are polynucleotides, which can be hydrolyzed into the monomeric “nucleotides.” The monomeric nucleotides can be hydrolyzed into nucleosides. As used herein polynucleotides include, but are not limited to, all nucleic acid sequences which are obtained by any means available in the art, including, without limitation, recombinant means, i.e., the cloning of nucleic acid sequences from a recombinant library or a cell genome, using ordinary cloning technology and PCR™, and the like, and by synthetic means. As used herein, “polynucleotide” includes cDNA, RNA, DNA/RNA hybrid, antisense RNA, ribozyme, genomic DNA, synthetic forms, and mixed polymers, both sense and antisense strands, and may be chemically or biochemically modified to contain non-natural or derivatized, synthetic, or semi-synthetic nucleotide bases. Also, contemplated are alterations of a wild type or synthetic gene, including but not limited to deletion, insertion, substitution of one or more nucleotides, or fusion to other polynucleotide sequences.

[0137] In some instances, the polynucleotide or nucleic acid of the invention is a “nucleoside-modified nucleic acid,” which refers to a nucleic acid comprising at least one modified nucleoside. A “modified nucleoside” refers to a nucleoside with a modification. For example, over one hundred different nucleoside modifications have been identified in RNA (Rozenski, et al., 1999, The RNA Modification Database: 1999 update. Nucl Acids Res 27: 196-197).

[0138] Unless otherwise specified, a “nucleotide sequence encoding an amino acid sequence” includes all nucleotide sequences that are degenerate versions of each other and that encode the same amino acid sequence. The phrase nucleotide sequence that encodes a protein or an RNA may also include introns to the extent that the nucleotide sequence encoding the protein may in some version contain an intron(s).

Unless otherwise specified, a “nucleotide sequence encoding an amino acid sequence” includes all nucleotide sequences that are degenerate versions of each other and that encode the same amino acid sequence. Nucleotide sequences that encode proteins and RNA may include introns. In addition, the nucleotide sequence may contain modified nucleosides that are capable of being translated by translational machinery in a cell. Exemplary modified nucleosides are described elsewhere herein. For example, an mRNA where some or all of the uridines have been replaced with pseudouridine, 1-methyl psuedouridine, or another modified nucleoside, such as those described elsewhere herein. In some embodiments, the nucleotide sequence may contain a sequence where some or all cytodines are replaced with methylated cytidine, or another modified nucleoside, such as those described elsewhere herein.

[0139] “Encoding” refers to the inherent property of specific sequences of nucleotides in a polynucleotide, such as a gene, a cDNA, or an mRNA, to serve as templates for synthesis of other polymers and macromolecules in biological processes having either a defined sequence of nucleotides (i.e., rRNA, tRNA and mRNA) or a defined sequence of amino acids and the biological properties resulting therefrom. Thus, a gene encodes a protein if transcription and translation of mRNA corresponding to that gene produces the protein in a cell or other biological system. Both the coding strand, the nucleotide sequence of which is identical to the mRNA sequence and is usually provided in sequence listings, and the non-coding strand, used as the template for transcription of a gene or cDNA, can be referred to as encoding the protein or other product of that gene or cDNA.

[0140] A “vector” is a composition of matter which comprises an isolated nucleic acid and which can be used to deliver the isolated nucleic acid to the interior of a cell. Numerous vectors are known in the art including, but not limited to, linear polynucleotides, polynucleotides associated with ionic or amphiphilic compounds, plasmids, and viruses. Thus, the term “vector” includes an autonomously replicating plasmid or a virus. The term should also be construed to include non-plasmid and non-viral compounds which facilitate transfer of nucleic acid into cells, such as, for example, polylysine compounds, liposomes, and the like. Examples of viral vectors include, but are not limited to, adenoviral vectors, adeno-associated virus vectors, retroviral vectors, and the like.

[0141] The term “expression” as used herein is defined as the transcription and/or translation of a particular nucleotide sequence driven by its promoter.

[0142] “Expression vector” refers to a vector comprising a recombinant polynucleotide comprising expression control sequences operatively linked to a nucleotide sequence to be expressed. An expression vector comprises sufficient cis-acting elements for expression; other elements for expression can be supplied by the host cell or in an in vitro expression system. Expression vectors include all those known in the art, such as cosmids, plasmids (e.g., naked or contained in liposomes) RNA, and viruses (e.g., lentiviruses, retroviruses, adenoviruses, and adeno-associated viruses) that incorporate the recombinant polynucleotide.

[0143] The term “promoter” as used herein is defined as a DNA sequence recognized by the synthetic machinery of the cell, or introduced synthetic machinery, required to initiate the specific transcription of a polynucleotide sequence. By way of one non-limiting example, a promoter that is recognized by bacteriophage RNA polymerase and is used to generate the mRNA by in vitro transcription.

[0144] The terms “patient,” “subject,” “individual,” and the like are used interchangeably herein, and refer to any animal, or cells thereof whether in vitro or in situ, amenable to the methods described herein. In some non-limiting embodiments, the patient, subject or individual is a human. In various embodiments, the subject is a human subject, and may be of any race, sex, and age.

[0145] A “disease” is a state of health of an animal wherein the animal cannot maintain homeostasis, and wherein if the disease is not ameliorated then the animal's health continues to deteriorate. In contrast, a “disorder” in an animal is a state of health in which the animal is able to maintain homeostasis, but in which the animal's state of health is less favorable than it would be in the absence of the disorder. Left untreated, a disorder does not necessarily cause a further decrease in the animal's state of health.

[0146] “Cancer,” as used herein, refers to the abnormal growth or division of cells. Generally, the growth and/or life span of a cancer cell exceeds, and is not coordinated with, that of the normal cells and tissues around it. Cancers may be benign, pre-malignant or malignant. Cancer occurs in a variety of cells and tissues, including, but not limited to, the oral cavity (e.g., mouth, tongue, pharynx, etc.), digestive system (e.g., esophagus, stomach, small intestine, colon, rectum, liver, bile duct, gall bladder, pancreas, etc.), respiratory system (e.g., larynx, lung, bronchus, etc.), bones, joints, skin (e.g., basal cell, squamous cell, meningioma, etc.), breast, genital system, (e.g., uterus, ovary, prostate, testis, etc.), urinary system (e.g., bladder, kidney, ureter, etc.), eye, nervous system (e.g., brain, etc.), endocrine system (e.g., thyroid, etc.), soft tissues (e.g., muscle, fat, etc.), and hematopoietic system (e.g., lymphoma, myeloma, leukemia, acute lymphocytic leukemia, chronic lymphocytic leukemia, acute myeloid leukemia, chronic myeloid leukemia, etc.).

[0147] A disease or disorder is “alleviated” if the severity of at least one sign or symptom of the disease or disorder, the frequency with which such a sign or symptom is experienced by a patient, or both, is reduced.

[0148] By the term “modulating,” as used herein, is meant mediating a detectable increase or decrease in the level of a response in a subject compared with the level of a response in the subject in the absence of a treatment or compound, and/or compared with the level of a response in an otherwise identical but untreated subject. The term encompasses perturbing and/or affecting a native signal or response thereby mediating a beneficial therapeutic response in a subject, such as, a human.

[0149] The term “inhibit,” as used herein, means to suppress or block an activity or function by at least about ten percent relative to a control value. In various embodiments, the activity is suppressed or blocked by at least 50% compared to a comparator value, or by at least 55%, or by at least 60%, or by at least 65%, or by at least 70%, or by at least 75%, or by at least 80%, or by at least 85%, or by at least 90%, or by at least 95%.

[0150] As used herein, the term “diagnosis” refers to the determination of the presence of a disease or disorder. In various embodiments of the present invention, methods for making a diagnosis are provided which permit determination of the presence of a particular disease or disorder.

[0151] To “treat” a disease as the term is used herein, means to reduce the frequency and/or severity of at least one sign or symptom of a disease or disorder experienced by a subject.

[0152] An “effective amount” as used herein, means an amount which provides a therapeutic or prophylactic benefit.

[0153] The term “therapeutic” as used herein means a treatment and/or prophylaxis. A therapeutic effect is obtained by suppression, diminution, remission, prevention, or eradication of at least one sign or symptom of a disease or disorder.

[0154] The term “therapeutically effective amount” refers to the amount of the subject compound that will elicit the biological or medical response of a tissue, system, or subject that is being sought by the researcher, veterinarian, medical doctor or other clinician. The term “therapeutically effective amount” includes that amount of a compound that, when administered, is sufficient to prevent development of, or alleviate to some extent, one or more of the signs or symptoms of the disorder or disease being treated. The therapeutically effective amount will vary depending on the compound, the disease and its severity and the age, weight, etc., of the subject to be treated.

[0155] As used herein, the term “pharmaceutical composition” refers to a mixture of at least one compound of the invention with other chemical components and entities, such as carriers, stabilizers, diluents, dispersing agents, suspending agents, thickening agents, and/or excipients. The pharmaceutical composition facilitates administration of the compound to an organism. Multiple techniques of administering a compound exist in the art including, but not limited to, intravenous, oral, aerosol, parenteral, ophthalmic, pulmonary and topical administration.

[0156] “Pharmaceutically acceptable” refers to those properties and/or substances which are acceptable to the patient from a pharmacological/toxicological point of view and to the manufacturing pharmaceutical chemist from a physical/chemical point of view regarding composition, formulation, stability, patient acceptance and bioavailability. “Pharmaceutically acceptable carrier” refers to a medium that does not interfere with the effectiveness of the biological activity of the active ingredient(s) and is not toxic to the host to which it is administered.

[0157] As used herein, the term “pharmaceutically acceptable carrier” means a pharmaceutically acceptable material, composition or carrier, such as a liquid or solid filler, stabilizer, dispersing agent, suspending agent, diluent, excipient, thickening agent, solvent or encapsulating material, involved in carrying or transporting a compound useful within the invention within or to the patient such that it may perform its intended function. Typically, such constructs are carried or transported from one organ, or portion of the body, to another organ, or portion of the body. Each carrier must be “acceptable” in the sense of being compatible with the other ingredients of the formulation, including the compound useful within the invention, and not injurious to the patient. Some examples of materials that may serve as pharmaceutically acceptable carriers include: sugars, such as lactose, glucose and sucrose; starches, such as corn starch and potato starch; cellulose, and its derivatives, such as sodium carboxymethyl cellulose, ethyl cellulose and cellulose acetate; powdered tragacanth; malt; gelatin; talc; excipients, such as cocoa butter and suppository waxes; oils, such as peanut oil, cottonseed oil, safflower oil, sesame oil, olive oil, corn oil and soybean oil; glycols, such as propylene glycol; polyols, such as glycerin, sorbitol, mannitol and polyethylene glycol; esters, such as ethyl oleate and ethyl laurate; agar; buffering agents, such as magnesium hydroxide and aluminum hydroxide; surface active agents; alginic acid; pyrogen-free water; isotonic saline; Ringer's solution; ethyl alcohol; phosphate buffer solutions; and other non-toxic compatible substances employed in pharmaceutical formulations. As used herein, “pharmaceutically acceptable carrier” also includes any and all coatings, antibacterial and antifungal agents, and absorption delaying agents, and the like that are compatible with the activity of the compound useful within the invention, and are physiologically acceptable to the patient. Supplementary active compounds may also be incorporated into the compositions. The “pharmaceutically acceptable carrier” may further include a pharmaceutically acceptable salt of the compound useful within the invention. Other additional ingredients that may be included in the pharmaceutical compositions used in the practice of the invention are known in the art and described, for example in Remington's Pharmaceutical Sciences (Genaro, Ed., Mack Publishing Co., 1985, Easton, PA), which is incorporated herein by reference.

[0158] The term “solvate” in accordance with this invention should be understood as meaning any form of the active compound in accordance with the invention in which said compound is bonded by a non-covalent bond to another molecule (normally a polar solvent), including especially hydrates and alcoholates.

[0159] As used herein, an “immunoassay” refers to any binding assay that uses an antibody capable of binding specifically to a target molecule to detect and quantify the target molecule.

[0160] The term “amplification” refers to the operation by which the number of copies of a target nucleotide sequence present in a sample is multiplied.

[0161] The term “next generation sequencing” herein refers to sequencing methods that allow for massively parallel sequencing of clonally amplified molecules and of single nucleic acid molecules. Next generation sequencing is synonymous with “massively parallel sequencing” for most purposes. Non-limiting examples of next generation sequencing include sequencing-by-synthesis using reversible dye terminators, and sequencing-by-ligation.

[0162] Assays for amplification of the known sequence are also disclosed. For example primers for PCR may be designed to amplify regions of the sequence. For RNA, a first reverse transcriptase step may be used to generate double stranded DNA from the single stranded RNA. The array may be designed to detect sequences from an entire genome; or one or more regions of a genome, for example, selected regions of a genome such as those coding for a protein or RNA of interest; or a conserved region from multiple genomes; or multiple genomes, arrays and methods of genetic analysis using arrays is described in Cutler, et al., 2001, Genome Res. 11(11): 1913-1925 and Warrington, et al., 2002, Hum Mutat 19:402-409 and in US Patent Pub No 20030124539, each of which is incorporated herein by reference in its entirety.

[0163] “Instructional material,” as that term is used herein, includes a publication, a recording, a diagram, or any other medium of expression which can be used to communicate the usefulness of the nucleic acid, peptide, and/or compound of the invention in the kit for identifying, diagnosing or alleviating or treating the various diseases or disorders recited herein. Optionally, or alternately, the instructional material may describe one or more methods of identifying, diagnosing or alleviating the diseases or disorders in a cell or a tissue of a subject. The instructional material of the kit may, for example, be affixed to a container that contains one or more components of the invention or be shipped together with a container that contains the one or more components of the invention. Alternatively, the instructional material may be shipped separately from the container with the intention that the recipient uses the instructional material and the components cooperatively.

[0164] Ranges: throughout this disclosure, various aspects of the invention can be presented in a range format. It should be understood that the description in range format is merely for convenience and brevity and should not be construed as an inflexible limitation on the scope of the invention. Accordingly, the description of a range should be considered to have specifically disclosed all the possible subranges as well as individual numerical values within that range. For example, description of a range such as from 1 to 6 should be considered to have specifically disclosed subranges such as from 1 to 3, from 1 to 4, from 1 to 5, from 2 to 4, from 2 to 6, from 3 to 6 etc., as well as individual numbers within that range, for example, 1, 2, 2.7, 3, 4, 5, 5.3, and 6. This applies regardless of the breadth of the range.

### DESCRIPTION

[0165] The present invention relates to methods of detecting various antibodies and targets thereof. In one aspect, the present invention provides methods of identifying a target extracellular, secreted, and/or transmembrane protein that specifically binds to an antibody of interest. In another aspect, the present invention provides methods of preventing or treating diseases or disorders associated with antibodies and/or a targets thereof identified via the methods of the present invention. In another aspect, the present invention provides methods of diagnosing, assessing prognosis, or assessing the effectiveness of treatments of diseases or disorders associated with antibodies and/or a targets thereof identified via the methods of the present invention. In another aspect, the present invention provides methods of predicting a response to a therapy. In another aspect, the present invention provides methods of alleviating toxicity of a cancer treatment.

### Methods of Identifying Antibodies and Targets Thereof

[0166] The present invention relates, in part, to methods of identifying antibodies or binding partners thereof. In one aspect, the method comprises identifying an antigenic polypeptide that specifically binds to an antibody of interest. In one aspect, the method comprises identifying novel antibody-antigen interactions.

[0167] In one embodiment, the invention relates to a screening method for antigen antibody interactions, wherein the method comprises generating a display library of polypeptides that are then screened for interactions with at least one antibody. Therefore, in one embodiment, the invention relates to a polypeptide display library and methods of use thereof for screening for antigen-antibody interactions.

### Display Library

[0168] In various embodiments, the invention relates to methods of screening using a cellular display library. In some embodiments, the cellular display library comprises a plurality of cells, wherein together the plurality of cells displays at least 10, 20, 30, 40, 50, 60, 70, 80, 90, 100, 200, 300, 400, 500, 600, 700, 800, 900, 1000, 2000, 3000, 4000, 5000, 6000, 7000, 8000, 9000, 10,000 or more than 10,000 different polypeptides on the surface of the cells. In one embodiment, the plurality of cells of the display library display proteins or polypeptides of the secretome, representing a plurality of secreted proteins, the exoproteome, representing a plurality of extracellular proteins, or a combination thereof. In one embodiment, the plurality of cells of the display library display a combination of at least 10, 20, 30, 40, 50, 60, 70, 80, 90, 100, 200, 300, 400, 500, 600, 700, 800, 900, 1000, 2000, 3000, 4000, 5000, 6000, or more than 6,000 extracellular and secreted polypeptides or proteins. In one embodiment, together the plurality of cells in the display library, display each of the polypeptide amino acid sequences set forth in SEQ ID NO:1-3092.

[0169] In some embodiments, the polypetides for display are fusion proteins with polypeptides that allow expression and exposure on a cell or particle surface. In one embodiment, nucleic acids encoding the molecules can be cloned into a display vector. The vector is designed to express the fusion molecules and display the encoded antigen on the outer surface of a display cell or partilce containing the vector. For example, antigens can be expressed as fusion proteins with a phage coat protein from the outer surface of the phage. In some embodiments, the polypeptides for display are IgGI Fc fusion molecules. Thereafter, the display cells or particles can be screened for antibody reactivities with the displayed antigens.

[0170] Thus, in various embodiments, the present invention also includes a vector in which a nucleotide sequence encoding a polypeptide for display of the present invention is inserted. The art is replete with suitable vectors that are useful in the present invention.

[0171] In brief summary, the expression of a nucleotide construct is typically achieved by operably linking a nucleic acid sequence comprising a promoter to a nucleic acid sequence encoding an antigen or portions thereof, and incorporating the construct into an expression vector. In one embodiment, the vectors to be used are suitable for replication and, optionally, integration in eukaryotic cells. Typical vectors contain transcription and translation terminators, initiation sequences, and other regulatory sequences useful for regulation of the expression of the desired nucleic acid sequence.

[0172] The recombinant nucleotide sequences encoding an antigen for display of the invention can be cloned into a number of types of vectors. For example, the nucleic acid can be cloned into a vector including, but not limited to a plasmid, a phagemid, a phage derivative, an animal virus, and a cosmid. Vectors of particular interest include expression vectors, replication vectors, probe generation vectors, and sequencing vectors.

[0173] Further, the vector may be provided to a cell in the form of a viral vector. Viral vector technology is well known in the art and is described, for example, in Sambrook et al. (2012, Molecular Cloning: A Laboratory Manual, Cold Spring Harbor Laboratory, New York), and in other virology and molecular biology manuals. Viruses, which are useful as vectors include, but are not limited to, retroviruses, adenoviruses, adeno-associated viruses, herpes viruses, and lentiviruses. In general, a suitable vector contains an origin of replication functional in at least one organism, a promoter sequence, convenient restriction endonuclease sites, and one or more selectable markers, (e.g., WO 01/96584; WO 01/29058; and U.S. Pat. No. 6,326,193).

[0174] A number of viral based systems have been developed for gene transfer into mammalian cells. For example, retroviruses provide a convenient platform for gene delivery systems. A selected gene can be inserted into a vector and packaged in retroviral particles using techniques known in the art. The recombinant virus can then be isolated and delivered to cells of the subject either in vivo or ex vivo. A number of retroviral systems are known in the art. In some embodiments, adenovirus vectors are used. A number of adenovirus vectors are known in the art. In one embodiment, lentivirus vectors are used.

[0175] For example, vectors derived from retroviruses such as the lentivirus are suitable tools to achieve long-term gene transfer since they allow long-term, stable integration of a transgene and its propagation in daughter cells. Lentiviral vectors have the added advantage over vectors derived from onco-retroviruses such as murine leukemia viruses in that they can transduce non-proliferating cells, such as hepatocytes. They also have the added advantage of low immunogenicity. In one embodiment, the composition includes a vector derived from an adeno-associated virus (AAV). Adeno-associated viral (AAV) vectors have become powerful gene delivery tools for the treatment of various disorders. AAV vectors possess a number of features that render them ideally suited for gene therapy, including a lack of pathogenicity, minimal immunogenicity, and the ability to transduce postmitotic cells in a stable and efficient manner. Expression of a particular gene contained within an AAV vector can be specifically targeted to one or more types of cells by choosing the appropriate combination of AAV serotype, promoter, and delivery method

[0176] In certain embodiments, the vector also includes conventional control elements which are operably linked to the encoded antigen sequence in a manner which permits its transcription, translation and/or expression in a cell transfected with the plasmid vector or infected with the virus produced by the invention. As used herein, “operably linked” sequences include both expression control sequences that are contiguous with the reporter molecule and expression control sequences that act in trans or at a distance to control the expression of the reporter molecule. Expression control sequences include appropriate transcription initiation, termination, and enhancer sequences; efficient RNA processing signals such as splicing and polyadenylation (polyA) signals; sequences that stabilize cytoplasmic mRNA; sequences that enhance translation efficiency (i.e., Kozak consensus sequence); sequences that enhance protein stability; and when desired, sequences that enhance secretion of the encoded product. All of the above-described functional elements can be used in any combination to produce a suitable display vector.

[0177] In one embodiment, a display vector comprises an origin of replication capable of initiating DNA synthesis in a suitable host cell. In one embodiment, the origin of replication is selected based on the type of host cell. For instance, it can be eukaryotic (e.g., yeast) or prokaryotic (e.g., bacterial) or a suitable viral origin of replication may be used.

[0178] In one embodiment, a display vector comprises a selection marker gene to facilitate identification and selection of expressing cells from the population of cells sought to be transfected or infected through viral vectors. In other aspects, the selectable marker may be carried on a separate piece of DNA and used in a co-transfection procedure. Selectable marker genes may be flanked with appropriate regulatory sequences to enable expression in the host cells.

[0179] A selection marker sequence can be used to eliminate host cells in which the display vector has not been properly transfected. A selection marker sequence can be a positive selection marker or negative selection marker. Positive selection markers permit the selection for cells in which the gene product of the marker is expressed. This generally comprises contacting cells with an appropriate agent that, but for the expression of the positive selection marker, kills or otherwise selects against the cells.

[0180] Examples of selection markers also include, but are not limited to, proteins conferring resistance to compounds such as antibiotics, proteins conferring the ability to grow on selected substrates, proteins that produce detectable signals such as luminescence, catalytic RNAs and antisense RNAs. A wide variety of such markers are known and available, including, for example, a Zeocin™ resistance marker, a blasticidin resistance marker, a neomycin resistance (neo) marker (Southern & Berg, J. Mol. Appl. Genet. 1: 327-41 (1982)), a puromycin (puro) resistance marker; a hygromycin resistance (hyg) marker (Te Riele et al., Nature 348:649-651 (1990)), thymidine kinase (tk), hypoxanthine phosphoribosyltransferase (hprt), and the bacterial guanine/xanthine phosphoribosyltransferase (gpt), which permits growth on MAX (mycophenolic acid, adenine, and xanthine) medium. See Song et al., Proc. Nat'l Acad. Sci. U.S.A. 84:6820-6824 (1987). Other selection markers include histidinol-dehydrogenase, chloramphenicol-acetyl transferase (CAT), dihydrofolate reductase (DHFR), β-galactosyltransferase and fluorescent proteins such as GFP.

[0181] Expression of a fluorescent protein can be detected using a fluorescent activated cell sorter (FACS). Expression of 3-galactosyltransferase also can be sorted by FACS, coupled with staining of living cells with a suitable substrate for β-galactosidase. A selection marker also may be a cell-substrate adhesion molecule, such as integrins, which normally are not expressed by the host cell. In one embodiment, the cell selection marker is of mammalian origin, for example, thymidine kinase, aminoglycoside phosphotransferase, asparagine synthetase, adenosine deaminase or metallothionien. In one embodiment, the cell selection marker can be neomycin phosphotransferase, hygromycin phosphotransferase or puromycin phosphotransferase, which confer resistance to G418, hygromycin and puromycin, respectively.

[0182] Suitable prokaryotic and/or bacterial selection markers include proteins providing resistance to antibiotics, such as kanamycin, tetracycline, and ampicillin. In one embodiment, a bacterial selection marker includes a protein capable of conferring selectable traits to both a prokaryotic host cell and a mammalian target cell.

[0183] Negative selection markers permit the selection against cells in which the gene product of the marker is expressed. In some embodiments, the presence of appropriate agents causes cells that express “negative selection markers” to be killed or otherwise selected against. Alternatively, the expression of negative selection markers alone kills or selects against the cells.

[0184] Such negative selection markers include a polypeptide or a polynucleotide that, upon expression in a cell, allows for negative selection of the cell. Illustrative of suitable negative selection markers are (i) herpes simplex virusthymidine kinase (HSV-TK) marker, for negative selection in the presence of any of the nucleoside analogs acyclovir, gancyclovir, and 5-fluoroiodoamino-Uracil (FIAU), (ii) various toxin proteins such as the diphtheria toxin, the tetanus toxin, the cholera toxin and the pertussis toxin, (iii) hypoxanthine-guanine phosphoribosyl transferase (HPRT), for negative selection in the presence of 6-thioguanine, (iv) activators of apoptosis, or programmed cell death, such as the bc12-binding protein (BAX), (v) the cytidine deaminase (codA) gene of E. coli, and (vi) phosphotidyl choline phospholipase D. In one embodiment, the negative selection marker requires host genotype modification (e.g. ccdB, tolC, thyA, rpsl and thymidine kinases.)

[0185] In accordance with the present invention, the selection marker usually is selected based on the type of the cell undergoing selection. For instance, it can be eukaryotic (e.g., yeast), prokaryotic (e.g., bacterial) or viral. In such an embodiment, the selection marker sequence is operably linked to a promoter that is suited for that type of cell.

[0186] In one embodiment, the invention provides a plurality of at least 10, 20, 30, 40, 50, 60, 70, 80, 90, 100, 200, 300, 400, 500, 600, 700, 800, 900, 1000, 2000, 3000, 4000, 5000, 6000, 7000, 8000, 9000, 10,000 or more than 10,000 recombinant nucleic acid molecules, wherein together the plurality of recombinant nucleic acid molecules encode at least 10, 20, 30, 40, 50, 60, 70, 80, 90, 100, 200, 300, 400, 500, 600, 700, 800, 900, 1000, 2000, 3000, 4000, 5000, 6000, 7000, 8000, 9000, 10,000 or more than 10,000 different polypeptides for display in a cell display library. In one embodiment, the plurality of cells of the display library display proteins or polypeptides of the secretome, representing a plurality of secreted proteins, the exoproteome, representing a plurality of extracellular proteins, or a combination thereof. In one embodiment, together the plurality of recombinant nucleic acid molecules encodes at least 10, 20, 30, 40, 50, 60, 70, 80, 90, 100, 200, 300, 400, 500, 600, 700, 800, 900, 1000, 2000, 3000, 4000, 5000, 6000, or more than 6,000 extracellular and secreted polypeptides or proteins. In one embodiment, together the plurality of recombinant nucleic acid molecules encodes each of the polypeptide amino acid sequences set forth in SEQ ID NO:1-3092. In one embodiment, together the plurality of recombinant nucleic acid molecules comprises each of the nucleotide sequences set forth in SEQ ID NO:3093-6185.

[0187] In one embodiment, each of the recombinant nucleic acid molecules in the plurality of recombinant nucleic acid molecules encodes a polypeptide sequence for expression on a cell surface, and further comprises a unique nucleotide barcode sequence, which is then associated with the encoded polypeptide sequence. In various embodiments, the unique barcode sequence comprises a nucleotide sequence of at least 4, 5, 6, 7, 8, 9, 10, 11, 12, 13, 14, 15, 16, 17, 18, 19, 20 or more than 20 nucleotides which is non-redundant within the recombinant nucleotide sequences included in the library.

[0188] In some embodiments, the invention relates to methods of generating a display library for expression of a plurality of extracellular or secreted proteins on the surface of a plurality of cells. In some embodiments, the method comprises obtaining or generating a library of barcoded nucleic acid molecules, wherein each nucleic acid molecule comprises i) a nucleotide sequence encoding a polypeptide for display on the surface of a cell; and ii) a unique nucleotide barcode sequence; and introducing the plurality of recombinant nucleic acid molecules into a system for expression and/or display of the recombinant nucleic acid molecules. Display systems that can be used for expression and/or display of the recombinant nucleic acid library of the invention include, but are not limited to, phage display, mRNA display, ribosome display, yeast display, mammalian cell display, and the like.

[0189] Any method known in the art for introducing nucleic acid sequences into cells can be used to generate the display library of the invention. Exemplary methods of introducing nucleic acid molecules into cells include, but are not limited to, electroporation, cell squeezing, sonoporation, optical transfection, protoplast fusion, impalefection, hydrodynamic delivery, fusion, magnetofection, particle bombardment, nucleofection, heat shock, lipofection, viral transduction, nonviral transfection, lithium acetate/PEG chemical transformation, or any combination thereof.

[0190] In one embodiment, the method comprises generating a library of cells for displaying polypeptides which function as epitopes for antigen binding. Thus, in one embodiment, the method comprises generating a library of cells, wherein the library comprises cells comprising barcode-labeled nucleic acid sequences, wherein the barcode-labeled nucleic acid sequences encode polypeptides which function as epitopes for antigen binding.

### Screening Methods

[0191] In some embodiments, the invention provides methods for screening a display library comprising a plurality of proteins or polypeptides of the secretome, representing a plurality of secreted proteins, the exoproteome, representing a plurality of extracellular proteins, or a combination thereof, to identify those proteins or polypeptides which interact with at least one antibody. In one embodiment, the methods comprise contacting the plurality of displayed proteins or polypeptides with a sample comprising at least one antibody.

[0192] In one embodiment, the method comprises the step of contacting a library of display cells with a sample comprising at least one antibody, thus generating one or more antibody-bound cells. In various embodiments, the antibody is a purified antibody. In one embodiment, the antibody is purified from a biological sample. Biological samples may be of any biological tissue or fluid. Frequently the sample will be a “clinical sample” which is a sample derived from a subject. The biological sample may contain any biological material suitable for detecting the desired antibodies or targets thereof, and may comprise cellular and/or non-cellular material obtained from the subject. A biological sample can be obtained by appropriate methods, such as, by way of examples, blood draw, fluid draw, biopsy, or surgical resection. Examples of such samples include but are not limited to serum, blood, lymph, urine, gastrointestinal fluid, cerebrospinal fluid, semen, and samples from biopsies. Samples that are liquid in nature are referred to herein as “bodily fluids.” Body samples may be obtained from a subject by a variety of techniques including, for example, by scraping or swabbing an area or by using a needle to aspirate bodily fluids. Methods for collecting various body samples are well known in the art. Frequently, a sample will be a “clinical sample,” i.e., a sample derived from a subject. Such samples include, but are not limited to, bodily fluids which may or may not contain cells, e.g., blood (e.g., whole blood, serum or plasma), urine, saliva, cerebrospinal fluid, or fine needle biopsy samples, tissue sample obtained during surgical resection, and archival samples with known diagnosis, treatment and/or outcome history.

[0193] In one embodiment, the method comprises contacting the display cells with at least one antibody purified from a biological sample. In one embodiment, the antibody is purified from a biological sample by affinity purification. In some embodiment, the antibody is purified from a biological sample by affinity purification of the desired antibody isotype (e.g., IgG, IgA, IgE, etc.). In some embodiments, the antibody is purified from a biological sample using any method known in the art for the purification of specific antibodies from a biological sample. For example, in one embodiment, the antibody is purified from a serum by affinity purification. In some embodiments, the antibody is purified by a high-throughput and efficient method for antibody isolation from human serum or plasma. In one embodiment, the method comprises an affinity purification of the desired antibody isotype (IgG, IgA, IgE, etc.) in 96-well microtiter plates.

[0194] In one embodiment, the sample comprising at least one antibody is purified by removing at least one human serum component. In one embodiment, the sample comprising at least one antibody is purified by removing at least one antibody that may bind a display cell and interfere with a downstream selection procedure. For example, in one embodiment, the sample comprising at least one antibody of interest is purified by contacting the sample with at least one control cell or particle comprising an empty display vector, and removing any species that bind to the control cell or particle comprising the empty display vector from the sample.

[0195] In one embodiment, the sample goes through a two-step purification process which involves both a) purification or selection of the specific antibody isotype of interest using an affinity purification for the isotype of interest (e.g., IgG, IgA, IgE, etc.), and b) elimination of human serum components and display cell or particle-reactive antibodies that may bind the display cell or particle and interfere with downstream selection procedures by contacting the purified sample with at least one control cell or particle comprising an empty display vector, and removing any species that bind to the control cell or particle.

[0196] In one embodiment, the biological sample is a healthy, normal or control sample. In some embodiments, a healthy, normal or control sample is a sample from a subject who has not been diagnosed with a disease or disorder. In one embodiment, the biological sample is obtained from a subject having a disease or disorder. Thus, in some embodiments, the biological sample comprises at least one antibody associated with a disease or disorder. Exemplary diseases and disorders include, but are not limited to, an autoimmune disease or disorder, cancer, inflammatory disease or disorder, metabolic disease or disorder, neurodegenerative disease or disorder, organ tissue rejection, organ transplant rejection, or any combination thereof. In one embodiment, the antibody is an autoantibody.

[0197] In some embodiments, the sample is from a subject who shows good prognosis of a disease or disorder, has reduced symptoms associated with a disease or disorder, or has a mild form of a disease or disorder. In such an embodiment, the methods of the invention serve to identify therapeutic antibodies or antibody-antigen interactions for the treatment of the disease or disorder. In some embodiments, the disease or disorder is selected from antineutrophil cytoplasmic antibody (ANCA)-associated vasculitis, autoimmune polyendocrinopathy candidiasis ecto-dermal dystrophy, antiphospholipid antibody syndrome, chronic inflammatory demyelinating polyradiculoneuropathy, cutaneous lupus erythematosus, COVID-19, drug-induced lupus, dermatomyositis, glomerulonephritis, a disease or disorder associated with kidney transplant, malaria, mixed connective tissue disease, myasthenia gravis, malignant melanoma, neuromyelitis optica, non-small cell lung cancer, pediatric autoimmune neuropsychiatric disorders associated with streptococcal infections, systemic lupus erythematosus, sjogren's syndrome, scleroderma, susac syndrome, undifferentiated connective tissue disease, or any combination thereof, and therefore the antibody is a therapeutic antibody for the treatment of antineutrophil cytoplasmic antibody (ANCA)-associated vasculitis, autoimmune polyendocrinopathy candidiasis ecto-dermal dystrophy, antiphospholipid antibody syndrome, chronic inflammatory demyelinating polyradiculoneuropathy, cutaneous lupus erythematosus, COVID-19, drug-induced lupus, dermatomyositis, glomerulonephritis, a disease or disorder associated with kidney transplant, malaria, mixed connective tissue disease, myasthenia gravis, malignant melanoma, neuromyelitis optica, non-small cell lung cancer, pediatric autoimmune neuropsychiatric disorders associated with streptococcal infections, systemic lupus erythematosus, sjogren's syndrome, scleroderma, susac syndrome, undifferentiated connective tissue disease, or any combination thereof.

[0198] In some embodiments, the sample is from a subject who shows poor prognosis of a disease or disorder, has increased symptoms associated with a disease or disorder, or has a severe form of a disease or disorder. In such an embodiment, the methods of the invention serve to identify antibodies or antibody-antigen interactions that are therapeutic targets for the treatment or prevention of a disease or disorder. In some embodiments, the disease or disorder is selected from antineutrophil cytoplasmic antibody (ANCA)-associated vasculitis, autoimmune polyendocrinopathy candidiasis ecto-dermal dystrophy, antiphospholipid antibody syndrome, chronic inflammatory demyelinating polyradiculoneuropathy, cutaneous lupus erythematosus, COVID-19, drug-induced lupus, dermatomyositis, glomerulonephritis, a disease or disorder associated with kidney transplant, malaria, mixed connective tissue disease, myasthenia gravis, malignant melanoma, neuromyelitis optica, non-small cell lung cancer, pediatric autoimmune neuropsychiatric disorders associated with streptococcal infections, systemic lupus erythematosus, sjogren's syndrome, scleroderma, susac syndrome, undifferentiated connective tissue disease, or any combination thereof, and therefore the antibody is a therapeutic target for the treatment of antineutrophil cytoplasmic antibody (ANCA)-associated vasculitis, autoimmune polyendocrinopathy candidiasis ecto-dermal dystrophy, antiphospholipid antibody syndrome, chronic inflammatory demyelinating polyradiculoneuropathy, cutaneous lupus erythematosus, COVID-19, drug-induced lupus, dermatomyositis, glomerulonephritis, a disease or disorder associated with kidney transplant, malaria, mixed connective tissue disease, myasthenia gravis, malignant melanoma, neuromyelitis optica, non-small cell lung cancer, pediatric autoimmune neuropsychiatric disorders associated with streptococcal infections, systemic lupus erythematosus, sjogren's syndrome, scleroderma, susac syndrome, undifferentiated connective tissue disease, or any combination thereof.

[0199] In one embodiment, the screening method further comprises a step of isolating or purifying one or more antibody-bound display cell of the invention. Any method known in the art for separating or purifying an antibody-bound display cell can be used including, but not limited to, magnetic cell separation, fluorescent cell separation, affinity purification, bead based cell separation, column separation, or any combination thereof.

[0200] In some embodiments, the methods of the invention comprise a step of staining cells. Examples of stains include, but are not limited to: fluorescent dyes, propidium iodine, ethidium homodimer III, thiazole orange, acridine orange, Bismarck brown, carmine, coomassie blue, cresyl violet, crystal violet, DAPI, eosin, ethidium bromide, acid fuchsine, haematoxylin, Hoechst stains, iodine, malachite green, methyl green, methylene blue, neutral red, nile blue, nile red, osmium tetraoxide, rhodamine, safranine, biotin, or any combination thereof.

[0201] In some embodiments, the methods of the invention comprise a step of identifying cells bound to an antibody by contacting the library of cells with a secondary immunoglobulin binding molecule for recognition of a primary antibody isotype of interest. For example, in some embodiments, the secondary immunoglobulin binding molecule is an antibody, nanobody, VHH antibody, monobody, knottin, anticalin, peptide, cyclic peptide, aptamer, designed ankyrin repeat protein (DARPin), or any combination thereof.

[0202] In one embodiment, a cell bound by an antibody of interest is identified using any appropriate sorting or selection method. Exemplary sorting and selection methods include, but are not limited to, biotinylated labeled anti-immunoglobulin antibody, fluorescence activated cell sorting (FACS), fluorescently labeled anti-immunoglobulin antibody, magnetic bead-based selection, magnetic bead conjugated to an anti-immunoglobulin antibody, or any combination thereof.

[0203] In one embodiment, the method comprises isolating at least one antibody-bound cell or particle from a mixture. In one embodiment, the method comprises isolating at least one antibody-bound cell or particle from at least one non-antibody-bound cell or particle. In one embodiment, the isolating at least one antibody-bound cell or particle comprises washing to remove at least one non-specific binder, centrifuging, cell separation, or any combination thereof. In one embodiment, the isolating at least one antibody-bound cell or particle comprises washing to remove at least one non-specific binder, centrifuging, magnetic cell separation, fluorescent cell separation, high-throughput selection process based on 96-well magnetic columns, or any combination thereof. In one embodiment, the magnetic cell separation comprises magnetic columns for capturing cells. In one embodiment, the magnetic cell separation comprises magnetic columns for capturing antibody-bound cell or particles. In one embodiment, the fluorescent cell separation comprises fluorescence activated cell sorting (FACS). In some embodiments, the high-throughput selection process based on 96-well magnetic columns comprises cell or particle library selections, 96-well magnetic columns, large magnetic columns, FACS, washing, centrifuging, or any combination thereof.

[0204] In one embodiment, the method comprises enriching at least one antibody-bound cell or particle by magnetic column-based sorting. In one embodiment, the method comprises amplifying the barcoded recombinant nucleic acid molecule of the antibody-bound cell or particle. In one embodiment, the enrichment is quantified by sequencing. In one embodiment, the enrichment is quantified by next generation sequencing.

### High Throughput Identification of Autoantibody Reactivities

[0205] In one embodiment, the screening methods of the invention include methods of high throughput identification of antigen or autoantigen interactions with antibodies or autoantibodies (reactivities.) In some embodiments the screening methods of the invention include of high throughput identification of antibody or autoantibody reactivities include methods of contacting a sample comprising at least one antibody or autoantibody with a display library of the invention, isolating those cells or particles expressing polypeptides which interact with at least one antibody or autoantibody, and identifying the expressed antigen or autoantigen on at the isolated cells or particles.

[0206] In one embodiment, the screening methods of the invention include a step of isolating and sequencing the barcoded nucleic acid molecules from a plurality of antibody-bound cells or particles. In one embodiment, a polypeptide is identified to be an antigen or autoantigen of at least one antibody in the sample based on detection of an increased or enriched level of the associated encoding nucleotide sequence or associated barcode in sequencing data over an established threshold level. In some embodiments, the threshold level is a predetermined threshold level, a statistically determined threshold, a threshold level determined using z-scores, or an established cut-point.

[0207] In various embodiments of the methods of the invention, the level of the nucleic acid sequence barcode is determined to be increased when the number of associated sequencing reads from Next-gen sequencing data corresponding to the barcode is increased or enriched relative to a reference value or statistically determined cut-off value. In some embodiments, the level of the nucleic acid sequence barcode is determined to be increased when the number of associated sequencing reads Next-gen sequencing data corresponding to the barcode is increased or enriched by at least 0.01 fold, at least 0.05 fold, at least 0.07 fold, at least 0.076 fold, at least 0.1 fold, at least 0.18 fold, at least 0.19 fold, at least 0.3 fold, at least 0.36 fold, at least 0.37 fold, at least 0.38 fold, at least 0.4 fold, at least 0.43 fold, at least 1 fold, at least 1.1 fold, at least 1.2 fold, at least 1.3 fold, at least 1.4 fold, at least 1.5 fold, at least 1.6 fold, at least 1.7 fold, at least 1.8 fold, at least 1.9 fold, at least 2 fold, at least 2.1 fold, at least 2.2 fold, at least 2.3 fold, at least 2.4 fold, at least 2.5 fold, at least 2.6 fold, at least 2.7 fold, at least 2.8 fold, at least 2.9 fold, at least 3 fold, at least 3.5 fold, at least 4 fold, at least 4.5 fold, at least 5 fold, at least 5.5 fold, at least 6 fold, at least 6.5 fold, at least 7 fold, at least 7.5 fold, at least 8 fold, at least 8.5 fold, at least 9 fold, at least 9.5 fold, at least 10 fold, at least 11 fold, at least 12 fold, at least 13 fold, at least 14 fold, at least 15 fold, at least 16 fold, at least 16.3 fold, at least 16.31 fold, at least 20 fold, at least 25 fold, at least 26 fold, at least 26.7 fold, at least 26.72 fold, at least 30 fold, at least 40 fold, at least 50 fold, at least 75 fold, at least 100 fold, at least 192 fold, at least 192.4 fold, at least 192.44 fold, at least 200 fold, at least 250 fold, at least 500 fold, or at least 1000 fold, or at least 10000 fold, when compared with a comparator (e.g., a statistically determined threshold level or pre-determined cut-off).

[0208] In one embodiment, an increased level of a barcode nucleic acid sequence provides an indication that an associated encoded polypeptide serves as a target for antibody binding, or an antigen. In one embodiment, an increased level of a barcode nucleic acid sequence provides an indication that an associated encoded polypeptide serves as a target for autoantibody binding, or an autoantigen. In various embodiments, the associated encoded polypeptide is an extracellular protein, transmembrane protein, secreted protein, or any combination thereof. In one embodiment, the associated encoded polypeptide is selected from those provided in Table 1, or a fragment thereof For example, in some embodiments, the associated encoded polypeptide is BMPR2, BTN1A1, BTNL8, C1QTNF4, C6, CCL11, CCL15, CCL17, CCL2, CCL22, CCL24, CCL4L1, CD207, CD300E, CD3D, CD44, CD74, CD81, CDH19, CNTN5, COLEC12, CSPG5, CX3CL1, CXCL1, CXCL13, CXCL2, CXCL3, EDIL3, EPYC, EREG, FGF10, FGF21, FGF23, FGF7, FGFBP3, FGFRL1, IFNA13, IFNA14, IFNA17, IFNA2, IFNA5, IFNA6, IFNA8, IFNB1, IFNL2, IFNW1, IGF2, IGFBPL1, IGSF4B, IL15RA, IL16, IL17A, IL17F, IL17F, IL18RAP, IL19, IL1A, IL1F9, IL1RAP, IL20RB, IL22, IL22RA2, IL28B, IL29, IL33, IL34, IL4, IL4R, IL5, IL6, IL6R, ITGA5, JCHAIN, LAG3, LGR6, LIF, LRP11, LRRC3B, LRRC4, LRTM2, LY6G6D, LY6H, MADCAM1, MPZL3, MUC21, NGFR, NOTCH2NL, NTRK3, PDCD1LG2, PDGFB, PGLYRP1, REGlA, REG1B, REG4, RTN4RL1, SCARA3, SDC1, SDC4, STIM2, TGFA, TMEM149, TNF, TNFRSF10C, TNFRSF10D, TNFRSF19L, TNFRSF6, TRAILR4, TREM2, TREML1, TSLP, TSPAN2, TYRO3, VEGFB, VSIG4, VSTM2A, or any combination thereof.

[0209] In one embodiment, the method comprises identifying antibody reactivities based on quantitative next generation sequencing data. In one embodiment, the next generation sequencing can determine the total enrichment of antibody target proteins after selection, how many “antibody target protein clones” were enriched, or a combination thereof.

[0210] In one embodiment, the method comprises an incorporation of clonal enrichment into data analysis to eliminate false positive enrichments. In one embodiment, the method comprises an incorporation of clonal enrichment into data analysis to expedite identification of genuine autoantibody reactivities in samples. Thus, in one embodiment, the method comprises quantifying clonal enrichment for identification of antibody reactivities, elimination of non-specific enrichment of antibody target proteins (e.g., polyreactive cell or particle clones), elimination of stochastic variations in library distribution, or any combination thereof. In one embodiment, the clonal enrichment is a fraction of clones that were enriched above a set cutoff.

[0211] In one embodiment, the methods described herein can utilize next-generation sequencing technologies that allow multiple samples to be sequenced individually as genomic molecules (i.e., singleplex sequencing) or as pooled samples comprising indexed genomic molecules (e.g., multiplex sequencing) on a single sequencing run. These methods can generate up to several hundred million reads of DNA sequences. In various embodiments, the sequences of nucleic acid sequence barcodes can be determined using, for example, the next generation sequencing technologies described herein. In various embodiments, analysis of the massive amount of sequence data obtained using next-generation sequencing can be performed using one or more processors as described herein.

[0212] In some embodiments, the nucleic acid product can be sequenced by next generation sequencing methods. In some embodiments, the next generation sequencing method comprises a method selected from the group consisting of Ion Torrent, Illumina, SOLiD, 454; Massively Parallel Signature Sequencing, solid phase reversible dye terminator sequencing; and DNA nanoball sequencing may be included. In some embodiments, the first and second sequencing primers are compatible with the selected next generation sequencing method.

[0213] In some embodiments, sequencing can be performed by next generation sequencing methods. As used herein, “next generation sequencing” refers to the speeds that were possible with conventional sequencing methods (e.g., Sanger sequencing) by reading thousands of millions of sequencing reactions simultaneously. Means an oligonucleotide sequencing technique that has the ability to sequence oligonucleotides at a greater rate. Non-limiting examples of next generation sequencing methods/platforms include Massively Parallel Signature Sequencing (Lynx Therapeutics); pyrophosphate sequencing/454; 454 Life Sciences/Roche Diagnostics; Solid Phase Reversible Dye Terminator Sequencing (Solexa/illumina): SOLiD technology (Applied Biosystems); ion semiconductor sequencing (ION Torrent.); DNA nanoball sequencing (Complete Genomics); and technologies available from Pacific Biosciences, Intelligen Bio-systems, Oxford Nanopore Technologies, and Helicos Biosciences. In some embodiments, the sequencing primer may comprise a moiety that is compatible with the selected next generation sequencing method.

[0214] Next generation sequencing techniques and related sequencing primer constraints and design parameters are well known in the art (e.g., Shendure et al., 2008, Nature, 26:1135-1145; Mardis, 2007, Trends in Genetics, 24:133-141; Su et al., 2011, Expert. Rev. Mol. Diagn., 11:333-43; Zhang et al., 2011, J. Genet. Genomics, 38:95-109; Nyren P et al. 1993, Anal. Biochem., 208:17175; Bentley et al., 2006, Curr. Opin. Genet. Dev., 16:545-552; Strausberg et al., 2008, Drug Disc. Today, 13:569-577; U.S. Pat. Nos. 7,282,337; 7,279,563; 7,226,720; 7,220,549; 7,169,560; U. S. Patent Application Publication No. 20070070349; U.S. Pat. Nos. 6,818,395; 6,911,345; U.S. Patent Application Publication No. 2006/0252077; No. 2007/0070349).

[0215] Several targeted next generation sequencing methods are described in the literature (for review see e.g., Teer and Mullikin, 2010, Human Mol. Genet. 19:R145-151), all of which can be used in conjunction with the present invention. Many of these methods (described e.g. as genome capture, genome partitioning, genome enrichment etc.) use hybridization techniques and include array-based (e.g., Hodges et al., 2007, Nat. Genet., 39:1522-1527) and liquid based (e.g., Choi et al., 2009, Proc. Natl. Acad. Sci USA, 106:19096-19101) hybridization approaches. Commercial kits for DNA sample preparation are also available: for example, Illumina Inc. (San Diego, California) offers the TruSeq™ DNA Sample Preparation Kit and the Exome Enrichment Kit TruSeq™ Exome Enrichment Kit.

[0216] There are many methods known in the art for the detection, identification, and quantification of specific nucleic acid sequences (e.g., nucleic acid sequence barcodes) and new methods are continually reported. A great majority of the known specific nucleic acid detection, identification, and quantification methods utilize nucleic acid probes in specific hybridization reactions. Preferably, the detection of hybridization to the duplex form is a Southern blot technique. In the Southern blot technique, a nucleic acid sample is separated in an agarose gel based on size (molecular weight) and affixed to a membrane, denatured, and exposed to (admixed with) the labeled nucleic acid probe under hybridizing conditions. If the labeled nucleic acid probe forms a hybrid with the nucleic acid on the blot, the label is bound to the membrane.

[0217] In the Southern blot, the nucleic acid probe is preferably labeled with a tag. That tag can be a radioactive isotope, a fluorescent dye or the other well-known materials. Another type of process for the specific detection of nucleic acids in a biological sample known in the art are the hybridization methods as exemplified by U.S. Pat. Nos. 6,159,693 and 6,270,974, and related patents. To briefly summarize one of those methods, a nucleic acid probe of at least 10 nucleotides, preferably at least 15 nucleotides, more preferably at least 25 nucleotides, having a sequence complementary to a nucleic acid of interest is hybridized in a sample, subjected to depolymerizing conditions, and the sample is treated with an ATP/luciferase system, which will luminesce if the nucleic sequence is present. In quantitative Southern blotting, the level of the nucleic acid of interest can be compared with the level of a second nucleic acid of interest, and/or to one or more comparators nucleic acids (e.g., positive control, negative control, quantity control, etc.).

[0218] Many methods useful for the detection and quantification of nucleic acid takes advantage of the polymerase chain reaction (PCR). The PCR process is well known in the art (U.S. Pat. Nos. 4,683,195, 4,683,202, and 4,800,159). To briefly summarize PCR, nucleic acid primers, complementary to opposite strands of a nucleic acid amplification target sequence, are permitted to anneal to the denatured sample. A DNA polymerase (typically heat stable) extends the DNA duplex from the hybridized primer. The process is repeated to amplify the nucleic acid target. If the nucleic acid primers do not hybridize to the sample, then there is no corresponding amplified PCR product. In this case, the PCR primer acts as a hybridization probe.

[0219] In PCR, the nucleic acid probe can be labeled with a tag as discussed elsewhere herein. Most preferably the detection of the duplex is done using at least one primer directed to the nucleic acid of interest. In yet another embodiment of PCR, the detection of the hybridized duplex comprises electrophoretic gel separation followed by dye-based visualization.

[0220] Typical hybridization and washing stringency conditions depend in part on the size (i.e., number of nucleotides in length) of the oligonucleotide probe, the base composition and monovalent and divalent cation concentrations (Ausubel et al., 1994, eds Current Protocols in Molecular Biology).

[0221] In one embodiment, the process for determining the quantitative and qualitative profile of the nucleic acid of interest according to the present invention is characterized in that the amplifications are real-time amplifications performed using a labeled probe, preferably a labeled hydrolysis-probe, capable of specifically hybridizing in stringent conditions with a segment of the nucleic acid of interest. The labeled probe is capable of emitting a detectable signal every time each amplification cycle occurs, allowing the signal obtained for each cycle to be measured.

[0222] The real-time amplification, such as real-time PCR, is well known in the art, and the various known techniques will be employed in the best way for the implementation of the present process. These techniques are performed using various categories of probes, such as hydrolysis probes, hybridization adjacent probes, or molecular beacons. The techniques employing hydrolysis probes or molecular beacons are based on the use of a fluorescence quencher/reporter system, and the hybridization adjacent probes are based on the use of fluorescence acceptor/donor molecules.

[0223] Hydrolysis probes with a fluorescence quencher/reporter system are available in the market, and are for example commercialized by the Applied Biosystems group (USA). Many fluorescent dyes may be employed, such as FAM dyes (6-carboxy-fluorescein), or any other dye phosphoramidite reagents.

[0224] Among the stringent conditions applied for any one of the hydrolysis-probes of the present invention is the Tm, which is in the range of about 65° C. to 75° C. Preferably, the Tm for any one of the hydrolysis-probes of the present invention is in the range of about 67° C. to about 70° C. Most preferably, the Tm applied for any one of the hydrolysis-probes of the present invention is about 67° C.

[0225] In one aspect, the invention includes a primer that is complementary to a nucleic acid of interest, and more particularly the primer includes 12 or more contiguous nucleotides substantially complementary to the nucleic acid of interest. Preferably, a primer featured in the invention includes a nucleotide sequence sufficiently complementary to hybridize to a nucleic acid sequence of about 12 to 25 nucleotides. More preferably, the primer differs by no more than 1, 2, or 3 nucleotides from the target flanking nucleotide sequence. In another aspect, the length of the primer can vary in length, preferably about 15 to 28 nucleotides in length (e.g., 16, 17, 18, 19, 20, 21, 22, 23, 24, 25, 26, or 27 nucleotides in length).

[0226] In one embodiment, the invention includes detecting one or more barcode-labeled nucleic acid sequences, one or more nucleic acid sequence barcodes, or a combination thereof in the DNA of the antibody-bound cell or particle. Such sequences generally can be measured and detected through a variety of assays, methods and detection systems known to one of skill in the art.

[0227] Various methods include but are not limited to immunoassays, microarray, PCR, RT-PCR, refractive index spectroscopy (RI), ultra-violet spectroscopy (UV), fluorescence analysis, electrochemical analysis, radiochemical analysis, near-infrared spectroscopy (near-IR), infrared (IR) spectroscopy, nuclear magnetic resonance spectroscopy (NMR), light scattering analysis (LS), mass spectrometry, pyrolysis mass spectrometry, nephelometry, dispersive Raman spectroscopy, gas chromatography, liquid chromatography, gas chromatography combined with mass spectrometry, liquid chromatography combined with mass spectrometry, matrix-assisted laser desorption ionization-time of flight (MALDI-TOF) combined with mass spectrometry, ion spray spectroscopy combined with mass spectrometry, capillary electrophoresis, colorimetry and surface plasmon resonance (such as according to systems provided by Biacore Life Sciences). See also PCT Publications WO/2004/056456 and WO/2004/088309. In this regard, the nucleic acid sequence barcodes can be measured using the above-mentioned detection methods, or other methods known to the skilled artisan. Other nucleic acid sequence barcodes can be similarly detected using reagents that are specifically designed or tailored to detect them.

[0228] Different types of antibody targets and their measurements can be combined in the compositions and methods of the present invention. In various embodiments, the nucleic acid sequence encoding one or more antibody target is measured. In various embodiments, the nucleic acid sequence barcode is measured. In exemplary embodiments, the nucleic acid sequence barcode is DNA. In various embodiments, measurements of nucleic acid sequences encoding one or more antibody targets are used in conjunction with measurements of nucleic acid sequence barcodes.

[0229] In various embodiments of the invention, methods of measuring antibody target levels (e.g., the levels of barcode-labeled nucleic acid sequences, levels of nucleic acid sequences encoding one or more antibody targets, levels of the nucleic acid barcodes of the barcode-labeled nucleic acid sequences) include, but are not limited to, an immunochromatography assay, an immunodot assay, a Luminex assay, an ELISA assay, an ELISPOT assay, a protein microarray assay, a ligand-receptor binding assay, displacement of a ligand from a receptor assay, displacement of a ligand from a shared receptor assay, an immunostaining assay, a Western blot assay, a mass spectrophotometry assay, a radioimmunoassay (RIA), a radioimmunodiffusion assay, a liquid chromatography-tandem mass spectrometry assay, an ouchterlony immunodiffusion assay, reverse phase protein microarray, a rocket immunoelectrophoresis assay, an immunohistostaining assay, an immunoprecipitation assay, a complement fixation assay, FACS, an enzyme-substrate binding assay, an enzymatic assay, an enzymatic assay employing a detectable molecule, such as a chromophore, fluorophore, or radioactive substrate, a substrate binding assay employing such a substrate, a substrate displacement assay employing such a substrate, and a protein chip assay (see also, 2007, Van Emon, Immunoassay and Other Bioanalytical Techniques, CRC Press; 2005, Wild, Immunoassay Handbook, Gulf Professional Publishing; 1996, Diamandis and Christopoulos, Immunoassay, Academic Press; 2005, Joos, Microarrays in Clinical Diagnosis, Humana Press; 2005, Hamdan and Righetti, Proteomics Today, John Wiley and Sons; 2007).

[0230] Methods for detecting a nucleic acid sequence (e.g., nucleic acid sequence barcode, such as DNA, nucleic acid sequence encoding one or more antibody targets, and/or a barcode-labeled nucleic acid sequence encoding one or more antibody targets), such as RT-PCR, real time PCR, microarray, branch DNA, NASBA and others, are well known in the art. Using sequence information provided by the database entries for the nucleic acid sequences, expression of the nucleic acid sequences can be detected (if present) and measured using techniques well known to one of ordinary skill in the art. For example, sequences in sequence database entries or sequences disclosed herein can be used to construct probes for detecting nucleic acid sequence barcodes in, e.g., Northern blot hybridization analyses or methods which specifically, and, preferably, quantitatively amplify specific nucleic acid sequences. As another example, the sequences can be used to construct primers for specifically amplifying the nucleic acid sequence barcodes in, e.g., amplification-based detection methods such as reverse-transcription based polymerase chain reaction (RT-PCR). In addition to Northern blot and RT-PCR, the level of nucleic acid sequence barcodes can also be measured using, for example, other target amplification methods (e.g., TMA, SDA, NASBA), signal amplification methods (e.g., bDNA), nuclease protection assays, in situ hybridization and the like.

[0231] In various embodiments, quantitative hybridization methods, such as Southern analysis, Northern analysis, or in situ hybridizations, can be used (see Current Protocols in Molecular Biology, Ausubel, F. et al., eds., John Wiley & Sons, including all supplements). A “nucleic acid probe,” as used herein, can be a DNA probe or an RNA probe. The probe can be, for example, a gene, a gene fragment (e.g., one or more exons), a vector comprising the gene, a probe or primer, etc. For representative examples of use of nucleic acid probes, see, for example, U.S. Pat. Nos. 5,288,611 and 4,851,330. The nucleic acid probe can be, for example, a full-length nucleic acid molecule, or a portion thereof, such as an oligonucleotide of at least 15, 30, 50, 100, 250 or 500 nucleotides in length and sufficient to specifically hybridize under stringent conditions to appropriate target mRNA or cDNA. The hybridization sample is maintained under conditions which are sufficient to allow specific hybridization of the nucleic acid probe to mRNA or cDNA. Specific hybridization can be performed under high stringency conditions or moderate stringency conditions, as appropriate. In a preferred embodiment, the hybridization conditions for specific hybridization are high stringency. Specific hybridization, if present, is then detected using standard methods. If specific hybridization occurs between the nucleic acid probe having a mRNA or cDNA in the test sample, the level of the mRNA or cDNA in the sample can be assessed. More than one nucleic acid probe can also be used concurrently in this method. Specific hybridization of any one of the nucleic acid probes is indicative of the presence of the mRNA or cDNA of interest, as described herein.

[0232] Alternatively, a peptide nucleic acid (PNA) probe can be used instead of a nucleic acid probe in the quantitative hybridization methods described herein. PNA is a DNA mimic having a peptide-like, inorganic backbone, such as N-(2-aminoethyl)glycine units, with an organic base (A, G, C, T or U) attached to the glycine nitrogen via a methylene carbonyl linker (see, for example, 1994, Nielsen et al., Bioconjugate Chemistry 5:1). The PNA probe can be designed to specifically hybridize to a target nucleic acid sequence. Hybridization of the PNA probe to a nucleic acid sequence is used to determine the level of the target nucleic acid in the biological sample.

[0233] In another embodiment, arrays of oligonucleotide probes that are complementary to target nucleic acid sequence barcodes can be used to determine the level of one or more antibody targets. The array of oligonucleotide probes can be used to determine the level of one or more antibody targets alone or the level of the one or more antibody targets in relation to the level of one or more other nucleic acids in the biological sample. Oligonucleotide arrays typically comprise a plurality of different oligonucleotide probes that are coupled to a surface of a substrate in different known locations. These oligonucleotide arrays, also known as “Genechips,” have been generally described in the art, for example, U.S. Pat. No. 5,143,854 and PCT patent publication Nos. WO 90/15070 and 92/10092. These arrays can generally be produced using mechanical synthesis methods or light directed synthesis methods which incorporate a combination of photolithographic methods and solid phase oligonucleotide synthesis methods. See Fodor et al., Science, 251:767-777 (1991), Pirrung et al., U.S. Pat. No. 5,143,854 (see also PCT Application No. WO 90/15070) and Fodor et al., PCT Publication No. WO 92/10092 and U.S. Pat. No. 5,424,186. Techniques for the synthesis of these arrays using mechanical synthesis methods are described in, e.g., U.S. Pat. No. 5,384,261.

[0234] After an oligonucleotide array is prepared, a nucleic acid of interest is hybridized with the array and its level is quantified. Hybridization and quantification are generally carried out by methods described herein and also in, e.g., published PCT Application Nos. WO 92/10092 and WO 95/11995, and U.S. Pat. No. 5,424,186. In brief, a target nucleic acid sequence is amplified by well-known amplification techniques, e.g., PCR. Typically, this involves the use of primer sequences that are complementary to the target nucleic acid. Asymmetric PCR techniques may also be used. Amplified target, generally incorporating a label, is then hybridized with the array under appropriate conditions. Upon completion of hybridization and washing of the array, the array is scanned to determine the quantity of hybridized nucleic acid. The hybridization data obtained from the scan is typically in the form of fluorescence intensities as a function of quantity, or relative quantity, of the target nucleic acid in the biological sample. The target nucleic acid can be hybridized to the array in combination with one or more comparators (e.g., positive control, negative control, quantity control, etc.) to improve quantification of the target nucleic acid in the sample.

[0235] The probes and primers according to the invention can be labeled directly or indirectly with a radioactive or nonradioactive compound, by methods well known to those skilled in the art, in order to obtain a detectable and/or quantifiable signal; the labeling of the primers or of the probes according to the invention is carried out with radioactive elements or with nonradioactive molecules. Among the radioactive isotopes used, mention may be made of ³²P, ³³P, ³⁵S or ³H. The nonradioactive entities are selected from ligands such as biotin, avidin, streptavidin or digoxigenin, haptenes, dyes, and luminescent agents such as radioluminescent, chemoluminescent, bioluminescent, fluorescent or phosphorescent agents.

[0236] Other suitable assays for determining the level of nucleic acid sequence barcode or level of barcode-labeled nucleic acid sequence may include one or more of the following methods, an enzyme assay, an immunoassay, mass spectrometry, chromatography, electrophoresis or an antibody microarray, or any combination thereof. Thus, as would be understood by one skilled in the art, the system and methods of the invention may include any method known in the art to detect a nucleic acid sequence and/or amino acid sequence in a sample.

[0237] In some embodiments, methods of identifying antibody targets, optionally, utilize methods that focus on cellular components (cellular examination), or methods that focus on examining extracellular components (fluid examination). In one embodiment, a cellular or fluid examination is used to detect or measure a variety of molecules including the nucleic acid barcode, RNA, protein, and a number of molecules that are modified as a result of the protein's function. Exemplary methods focusing on nucleic acids include but are not limited to amplification techniques, such as PCR and RT-PCR (including quantitative variants), and hybridization techniques, such as in situ hybridization, microarrays, and blots. Exemplary methods focusing on amino acid sequences (e.g., proteins) include but are not limited to binding techniques, such as ELISA, immunohistochemistry, microarray, and functional techniques, such as enzymatic assays. For example, in some embodiments, methods of identifying antibody targets, optionally, utilize ELISA, LIPS, or a combination thereof.

### Methods of Identifying Antibodies

[0238] In one aspect, the method comprises identifying at least one antibody that specifically binds to an extracellular or secreted protein. Thus, in one embodiment, the method comprises: isolating the antibodies that bound to the display library of the invention; and identifying the sequence of the antibodies that bound to the display library of the invention.

[0239] For example, in various embodiments, the antibody is an anti-BMPR2 antibody, anti-BTN1A1 antibody, anti-BTNL8 antibody, anti-C1QTNF4 antibody, anti-C6 antibody, anti-CCL11 antibody, anti-CCL15 antibody, anti-CCL17 antibody, anti-CCL2 antibody, anti-CCL22 antibody, anti-CCL24 antibody, anti-CCL4L1 antibody, anti-CD207 antibody, anti-CD300E antibody, anti-CD3D antibody, anti-CD44 antibody, anti-CD74 antibody, anti-CD81 antibody, anti-CDH19 antibody, anti-CNTN5 antibody, anti-COLEC12 antibody, anti-CSPG5 antibody, anti-CX3CL1 antibody, anti-CXCL1 antibody, anti-CXCL13 antibody, anti-CXCL2 antibody, anti-CXCL3 antibody, anti-EDIL3 antibody, anti-EPYC antibody, anti-EREG antibody, anti-FGF10 antibody, anti-FGF21 antibody, anti-FGF23 antibody, anti-FGF7 antibody, anti-FGFBP3 antibody, anti-FGFRL1 antibody, anti-IFNA13 antibody, anti-IFNA14 antibody, anti-IFNA17 antibody, anti-IFNA2 antibody, anti-IFNA5 antibody, anti-IFNA6 antibody, anti-IFNA8 antibody, anti-IFNB1 antibody, anti-IFNL2 antibody, anti-IFNW1 antibody, anti-IGF2 antibody, anti-IGFBPL1 antibody, anti-IGSF4B antibody, anti-IL15RA antibody, anti-IL16 antibody, anti-IL17A antibody, anti-IL17F antibody, anti-IL17F antibody, anti-IL18RAP antibody, anti-IL19 antibody, anti-IL1A antibody, anti-IL1F9 antibody, anti-ILIRAP antibody, anti-IL20RB antibody, anti-IL22 antibody, anti-IL22RA2 antibody, anti-IL28B antibody, anti-IL29 antibody, anti-IL33 antibody, anti-IL34 antibody, anti-IL4 antibody, anti-IL4R antibody, anti-IL5 antibody, anti-IL6 antibody, anti-IL6R antibody, anti-ITGA5 antibody, anti-JCHAIN antibody, anti-LAG3 antibody, anti-LGR6 antibody, anti-LIF antibody, anti-LRP11 antibody, anti-LRRC3B antibody, anti-LRRC4 antibody, anti-LRTM2 antibody, anti-LY6G6D antibody, anti-LY6H antibody, anti-MADCAM1 antibody, anti-MPZL3 antibody, anti-MUC21 antibody, anti-NGFR antibody, anti-NOTCH2NL antibody, anti-NTRK3 antibody, anti-PDCD1LG2 antibody, anti-PDGFB antibody, anti-PGLYRP1 antibody, anti-REG1A antibody, anti-REG1B antibody, anti-REG4 antibody, anti-RTN4RL1 antibody, anti-SCARA3 antibody, anti-SDC1 antibody, anti-SDC4 antibody, anti-STIM2 antibody, anti-TGFA antibody, anti-TMEM149 antibody, anti-TNF antibody, anti-TNFRSF10C antibody, anti-TNFRSF10D antibody, anti-TNFRSF19L antibody, anti-TNFRSF6 antibody, anti-TREM2 antibody, anti-TREML1 antibody, anti-TSLP antibody, anti-TSPAN2 antibody, anti-TYRO3 antibody, anti-VEGFB antibody, anti-VSIG4 antibody, anti-VSTM2A antibody, or any combination thereof.

Method of Identifying an Antibody or a Target Thereof Associated with a Disease or Disorder

[0240] The present invention provides, in part, a method of identifying disease associated antigen-antibody interactions. The present invention provides, in part, a method of identifying autoantigens that are targets of disease-associated autoantibodies. In one aspect, the method comprises contacting a display library of the invention with a biological sample from a subject who has been diagnosed as having a disease or disorder. In one embodiment, the disease or disorder is selected from an autoimmune disease or disorder, cancer, inflammatory disease or disorder, metabolic disease or disorder, neurodegenerative disease or disorder, organ tissue rejection, organ transplant rejection, an autoimmune or inflammatory disease or disorder associated with an infectious disease, or any combination thereof. In some embodiments, the disease or disorder is antineutrophil cytoplasmic antibody (ANCA)-associated vasculitis, autoimmune polyendocrinopathy candidiasis ecto-dermal dystrophy, antiphospholipid antibody syndrome, chronic inflammatory demyelinating polyradiculoneuropathy, cutaneous lupus erythematosus, COVID-19, drug-induced lupus, dermatomyositis, glomerulonephritis, a disease or disorder associated with kidney transplant, malaria, mixed connective tissue disease, myasthenia gravis, malignant melanoma, neuromyelitis optica, non-small cell lung cancer, pediatric autoimmune neuropsychiatric disorders associated with streptococcal infections, systemic lupus erythematosus, sjogren's syndrome, scleroderma, susac syndrome, undifferentiated connective tissue disease, or any combination thereof.

[0241] In one embodiment, the antibody is purified from a biological sample obtained from a subject having a disease or disorder.

[0242] In one embodiment, the antigen or autoantigen is identified to be reactive with an antibody or autoantibody associated with a disease or disorder when the level of nucleic acid sequence barcode is statistically different than an expected level based on comparison with a control or a threshold level (e.g., the predetermined threshold level). In one embodiment, the antibody target is identified to be the antibody target associated with the disease or disorder when the level of nucleic acid sequence barcode is higher than the threshold level (e.g., the predetermined threshold level). In some embodiments, the threshold level is obtained from control group samples.

[0243] In various embodiments of the methods of the invention, the level (e.g., activity, amount, concentration, expression, level, etc.) of nucleic acid sequence barcode is determined to be increased or to be higher when the level of nucleic acid sequence barcode is determined to be increased by at least 0.01 fold, at least 0.05 fold, at least 0.07 fold, at least 0.076 fold, at least 0.1 fold, at least 0.18 fold, at least 0.19 fold, at least 0.3 fold, at least 0.36 fold, at least 0.37 fold, at least 0.38 fold, at least 0.4 fold, at least 0.43 fold, at least 1 fold, at least 1.1 fold, at least 1.2 fold, at least 1.3 fold, at least 1.4 fold, at least 1.5 fold, at least 1.6 fold, at least 1.7 fold, at least 1.8 fold, at least 1.9 fold, at least 2 fold, at least 2.1 fold, at least 2.2 fold, at least 2.3 fold, at least 2.4 fold, at least 2.5 fold, at least 2.6 fold, at least 2.7 fold, at least 2.8 fold, at least 2.9 fold, at least 3 fold, at least 3.5 fold, at least 4 fold, at least 4.5 fold, at least 5 fold, at least 5.5 fold, at least 6 fold, at least 6.5 fold, at least 7 fold, at least 7.5 fold, at least 8 fold, at least 8.5 fold, at least 9 fold, at least 9.5 fold, at least 10 fold, at least 11 fold, at least 12 fold, at least 13 fold, at least 14 fold, at least 15 fold, at least 16 fold, at least 16.3 fold, at least 16.31 fold, at least 20 fold, at least 25 fold, at least 26 fold, at least 26.7 fold, at least 26.72 fold, at least 30 fold, at least 40 fold, at least 50 fold, at least 75 fold, at least 100 fold, at least 192 fold, at least 192.4 fold, at least 192.44 fold, at least 200 fold, at least 250 fold, at least 500 fold, or at least 1000 fold, or at least 10000 fold, when compared with a comparator.

[0244] In one embodiment, an antibody target is identified to be the antibody target associated with a disease or disorder when the expression level of nucleic acid sequence barcode is increased or higher as compared to a comparator (e.g., the predetermined threshold level). For example, in some embodiments, an antibody target is identified to be the antibody target associated with a disease or disorder when the level of nucleic acid sequence barcode is increased by at least 0.01 fold, or at least 0.18 fold. In some embodiments, an antibody target is identified to be the antibody target associated with a disease or disorder when the level of nucleic acid sequence barcode is increased in a range from 0.1 fold to 10,000 fold.

[0245] In one embodiment, the antibody target is identified to be the antibody target associated with the disease or disorder when the level of nucleic acid sequence barcode is lower than the threshold level (e.g., the predetermined threshold level).

[0246] In various embodiments of the methods of the invention, the level (e.g., activity, amount, concentration, expression, level, etc.) of nucleic acid sequence barcode is determined to be decreased or to be lower when the level of nucleic acid sequence barcode is determined to be decreased by at least 0.01 fold, at least 0.05 fold, at least 0.07 fold, at least 0.076 fold, at least 0.1 fold, at least 0.18 fold, at least 0.19 fold, at least 0.3 fold, at least 0.36 fold, at least 0.37 fold, at least 0.38 fold, at least 0.4 fold, at least 0.43 fold, at least 1 fold, at least 1.1 fold, at least 1.2 fold, at least 1.3 fold, at least 1.4 fold, at least 1.5 fold, at least 1.6 fold, at least 1.7 fold, at least 1.8 fold, at least 1.9 fold, at least 2 fold, at least 2.1 fold, at least 2.2 fold, at least 2.3 fold, at least 2.4 fold, at least 2.5 fold, at least 2.6 fold, at least 2.7 fold, at least 2.8 fold, at least 2.9 fold, at least 3 fold, at least 3.5 fold, at least 4 fold, at least 4.5 fold, at least 5 fold, at least 5.5 fold, at least 6 fold, at least 6.5 fold, at least 7 fold, at least 7.5 fold, at least 8 fold, at least 8.5 fold, at least 9 fold, at least 9.5 fold, at least 10 fold, at least 11 fold, at least 12 fold, at least 13 fold, at least 14 fold, at least 15 fold, at least 16 fold, at least 16.3 fold, at least 16.31 fold, at least 20 fold, at least 25 fold, at least 26 fold, at least 26.7 fold, at least 26.72 fold, at least 30 fold, at least 40 fold, at least 50 fold, at least 75 fold, at least 100 fold, at least 192 fold, at least 192.4 fold, at least 192.44 fold, at least 200 fold, at least 250 fold, at least 500 fold, or at least 1000 fold, or at least 10000 fold, when compared with a comparator.

[0247] In one embodiment, an antibody target is identified to be the antibody target associated with a disease or disorder when the expression level of nucleic acid sequence barcode is decreased or lower as compared to a comparator (e.g., the predetermined threshold level). For example, in some embodiments, an antibody target is identified to be the antibody target associated with a disease or disorder when the level of nucleic acid sequence barcode is decreased by at least 0.01 fold, or at least 0.18 fold. In some embodiments, an antibody target is identified to be the antibody target associated with a disease or disorder when the level of nucleic acid sequence barcode is decreased in a range from 0.1 fold to 10,000 fold.

[0248] In one aspect, the present invention provides, in part, a method of identifying an antibody associated with a disease or disorder. Thus, in one embodiment, the antibody is identified to be the antibody associated with the disease or disorder when the level of the target nucleic acid sequence barcode is different than the threshold level (e.g., the predetermined threshold level). In one embodiment, the antibody is identified to be the antibody associated with the disease or disorder when the level of the target nucleic acid sequence barcode is higher than the threshold level (e.g., the predetermined threshold level). In some embodiments, the threshold level is obtained from control group samples.

[0249] In one embodiment, an antibody is identified to be the antibody associated with a disease or disorder when the expression level of the target nucleic acid sequence barcode is increased or higher as compared to a comparator (e.g., the predetermined threshold level). For example, in some embodiments, an antibody is identified to be the antibody associated with a disease or disorder when the level of the target nucleic acid sequence barcode is increased by at least 0.01 fold, or at least 0.18 fold. In some embodiments, an antibody is identified to be the antibody associated with a disease or disorder when the level of nucleic acid sequence barcode is increased in a range from 0.1 fold to 10,000 fold.

[0250] In one embodiment, the antibody is identified to be the antibody associated with the disease or disorder when the level of the target nucleic acid sequence barcode is lower than the threshold level (e.g., the predetermined threshold level).

[0251] In one embodiment, an antibody is identified to be the antibody associated with a disease or disorder when the expression level of the target nucleic acid sequence barcode is decreased or lower as compared to a comparator (e.g., the predetermined threshold level). For example, in some embodiments, an antibody is identified to be the antibody associated with a disease or disorder when the level of nucleic acid sequence barcode is decreased by at least 0.01 fold, or at least 0.18 fold. In some embodiments, an antibody is identified to be the antibody associated with a disease or disorder when the level of nucleic acid sequence barcode is decreased in a range from 0.1 fold to 10,000 fold.

[0252] In some embodiments, the disease or disorder is an autoimmune disease or disorder, cancer, inflammatory disease or disorder, metabolic disease or disorder, neurodegenerative disease or disorder, organ tissue rejection, organ transplant rejection, or any combination thereof. In some embodiments, the disease or disorder is antineutrophil cytoplasmic antibody (ANCA)-associated vasculitis, autoimmune polyendocrinopathy candidiasis ecto-dermal dystrophy, antiphospholipid antibody syndrome, chronic inflammatory demyelinating polyradiculoneuropathy, cutaneous lupus erythematosus, COVID-19, drug-induced lupus, dermatomyositis, glomerulonephritis, a disease or disorder associated with kidney transplant, malaria, mixed connective tissue disease, myasthenia gravis, malignant melanoma, neuromyelitis optica, non-small cell lung cancer, pediatric autoimmune neuropsychiatric disorders associated with streptococcal infections, systemic lupus erythematosus, sjogren's syndrome, scleroderma, susac syndrome, undifferentiated connective tissue disease, or any combination thereof.

[0253] In one embodiment, the disease or disorder is a cancer. Examples of cancers include, but are not limited to: acute lymphoblastic; acute myeloid leukemia; adrenocortical carcinoma; adrenocortical carcinoma, childhood; appendix cancer; basal cell carcinoma; bile duct cancer, extrahepatic; bladder cancer; bone cancer; osteosarcoma and malignant fibrous histiocytoma; liposarcoma and anaplastic liposarcoma; brain stem glioma, childhood; brain tumor, adult; brain tumor, brain stem glioma, childhood; brain tumor, central nervous system atypical teratoid/rhabdoid tumor, childhood; central nervous system embryonal tumors; cerebellar astrocytoma; cerebral astrocytotna/malignant glioma; craniopharyngioma; ependymoblastoma; ependymoma; medulloblastoma; medulloepithelioma; pineal parenchymal tumors of intermediate differentiation; supratentorial primitive neuroectodermal tumors and pineoblastoma; visual pathway and hypothalamic glioma; brain and spinal cord tumors; breast cancer; bronchial tumors; Burkitt lymphoma; carcinoid tumor; carcinoid tumor, gastrointestinal; central nervous system atypical teratoid/rhabdoid tumor; central nervous system embryonal tumors; central nervous system lymphoma; cerebellar astrocytoma cerebral astrocytoma/malignant glioma, childhood; cervical cancer; chordoma, childhood; chronic lymphocytic leukemia; chronic myelogenous leukemia; chronic myeloproliferative disorders; colon cancer; colorectal cancer; craniopharyngioma; cutaneous T-cell lymphoma; esophageal cancer; Ewing family of tumors; extragonadal germ cell tumor; extrahepatic bile duct cancer; eye cancer, intraocular melanoma; eye cancer, retinoblastoma; biliary track cancer, cholangiocarcinoma, anal cancer, neuroendocrine tumors, small bowel cancer, gallbladder cancer; gastric (stomach) cancer; gastrointestinal carcinoid tumor; gastrointestinal stromal tumor (gist); germ cell tumor, extracranial; germ cell tumor, extragonadal; germ cell tumor, ovarian; gestational trophoblastic tumor; glioma; glioma, childhood brain stem; glioma, childhood cerebral astrocytoma; glioma, childhood visual pathway and hypothalamic; hairy cell leukemia; head and neck cancer; hepatocellular (liver) cancer; histiocytosis, langerhans cell; Hodgkin lymphoma; hypopharyngeal cancer; hypothalamic and visual pathway glioma; intraocular melanoma; islet cell tumors; kidney (renal cell) cancer; Langerhans cell histiocytosis; laryngeal cancer; leukemia, acute lymphoblastic; leukemia, acute myeloid; leukemia, chronic lymphocytic; leukemia, chronic myelogenous; leukemia, hairy cell; lip and oral cavity cancer; liver cancer; lung cancer, non-small cell; lung cancer, small cell; lymphoma, aids-related; lymphoma, burkitt; lymphoma, cutaneous T-cell; lymphoma, non-Hodgkin lymphoma; lymphoma, primary central nervous system; macroglobulinemia, Waldenstrom; malignant fibrous histiocvtoma of bone and osteosarcoma; medulloblastoma; melanoma; melanoma, intraocular (eye); Merkel cell carcinoma; mesothelioma; metastatic squamous neck cancer with occult primary; mouth cancer; multiple endocrine neoplasia syndrome, (childhood); multiple myeloma/plasma cell neoplasm; mycosis; fungoides; myelodysplastic syndromes; myelodysplastic/myeloproliferative diseases; myelogenous leukemia, chronic; myeloid leukemia, adult acute; myeloid leukemia, childhood acute; myeloma, multiple; myeloproliferative disorders, chronic; nasal cavity and paranasal sinus cancer; nasopharyngeal cancer; neuroblastoma; non-small cell lung cancer; oral cancer; oral cavity cancer; oropharyngeal cancer; osteosarcoma and malignant fibrous histiocytoma of bone; ovarian cancer; ovarian epithelial cancer; ovarian germ cell tumor; ovarian low malignant potential tumor; pancreatic cancer, islet cell tumors; papillomatosis; parathyroid cancer; penile cancer; pharyngeal cancer; pheochromocytoma; pineal parenchymal tumors of intermediate differentiation; pineoblastoma and supratentorial primitive neuroectodermal tumors; pituitary tumor; plasma celt neoplasm/multiple myeloma; pleuropulmonary blastoma; primary central nervous system lymphoma; prostate cancer; rectal cancer; renal cell (kidney) cancer; renal pelvis and ureter, transitional cell cancer; respiratory tract carcinoma involving the nut gene on chromosome 15; retinoblastoma; rhabdomyosarcoma; salivary gland cancer; sarcoma, ewing family of tumors; sarcoma, Kaposi; sarcoma, soft tissue; sarcoma, uterine; sezary syndrome; skin cancer (nonmelanoma); skin cancer (melanoma); skin carcinoma, Merkel cell; small cell lung cancer; small intestine cancer; soft tissue sarcoma; squamous cell carcinoma, squamous neck cancer with occult primary, metastatic; stomach (gastric) cancer; supratentorial primitive neuroectodermal tumors; T-cell lymphoma, cutaneous; testicular cancer; throat cancer; thymoma and thymic carcinoma; thyroid cancer; transitional cell cancer of the renal pelvis and ureter; trophoblastic tumor, gestational; urethral cancer; uterine cancer, endometrial; uterine sarcoma; vaginal cancer; vulvar cancer; Waldenstrom macroglobulinemia; Wilms tumor, and any combination thereof.

[0254] Control group samples may either be from a normal subject, samples from subjects with a known diagnosis of a disease or disorder associated with increased level of the antibody or the target thereof, samples from subjects with a known diagnosis of a disease or disorder associated with decreased level of the antibody or the target thereof, or any combination thereof. As described below, comparison of the expression patterns of the sample to be tested with those of the comparators can be used to assess the risk of developing a disease or disorder associated with decreased antibody level, increased level of the antibody or the target thereof, or any combination thereof in the subject. In some instances, the control groups are only for the purposes of establishing initial cutoffs or thresholds for the assays of the invention. Therefore, in some instances, the systems and methods of the invention can evaluate a treatment of a disease or disorder associated with decreased level of the antibody or target thereof, increased level of the antibody or target thereof, or any combination thereof without the need to compare with a control group.

### Method of Diagnosing a Disease or Disorder

[0255] The present invention further relates, in part, to a method of diagnosing a disease or disorder associated with at least one antibody or target thereof (e.g., an antibody level, antibody target level, antibody activity, or antibody target activity) in a subject in need thereof.

[0256] In one aspect, the present invention provides a method of diagnosing a disease or disorder in a subject, the method comprising assessing the presence of at least one antibody in the subject, wherein the at least one antibody is identified to be associated with the disease or disorder according to the method described above. In one aspect, the present invention provides a method of diagnosing a disease or disorder in a subject, the method comprising assessing the level or activity of at least one antibody in the subject, wherein the at least one antibody is identified to be associated with the disease or disorder according to the method described above.

[0257] In one embodiment, the subject is diagnosed with a disease or disorder when the level or activity of at least one antibody is different than the threshold level (e.g., the predetermined threshold level). In one embodiment, the subject is diagnosed with a disease or disorder when the level or activity of at least one antibody is higher than the threshold level (e.g., the predetermined threshold level). In some embodiments, the threshold level is obtained from control group samples. In one embodiment, the threshold is 0.

[0258] In one embodiment, the subject is diagnosed with a disease or disorder by detecting an altered or increased level of an antibody that binds to at least one antibody target associated with the disease or disorder, relative to a control level. In some embodiments, the control level is a level of a particular marker (i.e., an antibody that binds to at least one antibody target associated with the disease or disorder) in a subject or population known not to have the disease.

[0259] In various embodiments of the methods of the invention, the level (e.g., activity, amount, concentration, expression, level, etc.) of antibody is determined to be increased or to be higher when the level of antibody is determined to be more than 0.

[0260] In various embodiments of the methods of the invention, the level (e.g., activity, amount, concentration, expression, level, etc.) of antibody is determined to be increased or to be higher when the level of antibody is determined to be increased by at least 0.01 fold, at least 0.05 fold, at least 0.07 fold, at least 0.076 fold, at least 0.1 fold, at least 0.18 fold, at least 0.19 fold, at least 0.3 fold, at least 0.36 fold, at least 0.37 fold, at least 0.38 fold, at least 0.4 fold, at least 0.43 fold, at least 1 fold, at least 1.1 fold, at least 1.2 fold, at least 1.3 fold, at least 1.4 fold, at least 1.5 fold, at least 1.6 fold, at least 1.7 fold, at least 1.8 fold, at least 1.9 fold, at least 2 fold, at least 2.1 fold, at least 2.2 fold, at least 2.3 fold, at least 2.4 fold, at least 2.5 fold, at least 2.6 fold, at least 2.7 fold, at least 2.8 fold, at least 2.9 fold, at least 3 fold, at least 3.5 fold, at least 4 fold, at least 4.5 fold, at least 5 fold, at least 5.5 fold, at least 6 fold, at least 6.5 fold, at least 7 fold, at least 7.5 fold, at least 8 fold, at least 8.5 fold, at least 9 fold, at least 9.5 fold, at least 10 fold, at least 11 fold, at least 12 fold, at least 13 fold, at least 14 fold, at least 15 fold, at least 16 fold, at least 16.3 fold, at least 16.31 fold, at least 20 fold, at least 25 fold, at least 26 fold, at least 26.7 fold, at least 26.72 fold, at least 30 fold, at least 40 fold, at least 50 fold, at least 75 fold, at least 100 fold, at least 192 fold, at least 192.4 fold, at least 192.44 fold, at least 200 fold, at least 250 fold, at least 500 fold, or at least 1000 fold, or at least 10000 fold, when compared with a comparator (e.g., the level of antibody in control group samples).

[0261] In one embodiment, the subject is diagnosed with a disease or disorder when the level or activity of at least one antibody associated with the disease or disorder is increased or higher as compared to a comparator (e.g., the predetermined threshold level). For example, in some embodiments, the subject is diagnosed with a disease or disorder when at least one antibody associated with the disease or disorder is present in the subject (i.e., the level or activity of at least one antibody associated with the disease or disorder is more than 0). In some embodiments, the subject is diagnosed with a disease or disorder when the level or activity of at least one antibody associated with the disease or disorder is increased by at least 0.01 fold, or at least 0.18 fold. In some embodiments, the subject is diagnosed with a disease or disorder when the level or activity of at least one antibody associated with the disease or disorder is increased in a range from 0.1 fold to 10,000 fold.

[0262] For example, in some embodiments, the subject is diagnosed with ANCA-associated vasculitis by detecting an altered or increased level of an antibody that binds to EDIL3, LY6H, TREM2, or any combination thereof, relative to a control level.

[0263] In some embodiments, the subject is diagnosed with autoimmune polyendocrinopathy candidiasis ecto-dermal dystrophy by detecting an altered or increased level of an antibody that binds to FGF10, LRRC3B, VSTM2A, IL22, IL17F, IL17A, IL5, IL22RA2, IFNL2, IGSF4B, IL28B, IFNA13, IFNA14, IFNA17, IFNA2, IFNA5, IFNA6, IFNA8, or any combination thereof, relative to a control level.

[0264] In some embodiments, the subject is diagnosed with antiphospholipid antibody syndrome by detecting an altered or increased level of an antibody that binds to IFNA13, IFNA14, IFNA17, IFNA2, IFNA5, IFNA6, IFNA8, IL6R, or any combination thereof, relative to a control level.

[0265] In some embodiments, the subject is diagnosed with chronic inflammatory demyelinating polyradiculoneuropathy by detecting an altered or increased level of an antibody that binds to CXCL1, CXCL2, CXCL3, PDGFB, TMEM149, CD74, CXCL13, or any combination thereof, relative to a control level.

[0266] In some embodiments, the subject is diagnosed with cutaneous lupus erythematosus by detecting an altered or increased level of an antibody that binds to CCL11, CCL24, CD300E, IFNL2, TMEM149, TYRO3, VEGFB, or any combination thereof, relative to a control level.

[0267] In some embodiments, the subject is diagnosed with drug-induced lupus by detecting an altered or increased level of an antibody that binds to CXCL1, TNF, TSLP, or any combination thereof, relative to a control level.

[0268] In some embodiments, the subject is diagnosed with dermatomyositis by detecting an altered or increased level of an antibody that binds to CD81, relative to a control level.

[0269] In some embodiments, the subject is diagnosed with glomerulonephritis by detecting an altered or increased level of an antibody that binds to C1QTNF4, CCL17, CCL4L1, CXCL2, CXCL3, EDIL3, EPYC, IFNL2, IL34, PDGFB, RTN4RL1, TMEM149, TREM2, TSLP, or any combination thereof, relative to a control level.

[0270] In some embodiments, the subject is diagnosed with mixed connective tissue disease by detecting an altered or increased level of an antibody that binds to BTNL8, CXCL3, EPYC, JCHAIN, SDC4, TSPAN2, VEGFB, or any combination thereof, relative to a control level.

[0271] In some embodiments, the subject is diagnosed with myasthenia gravis by detecting an altered or increased level of an antibody that binds to CXCL2, PDGFB, REG4, CCL22, CCL2, or any combination thereof, relative to a control level.

[0272] In some embodiments, the subject is diagnosed with neuromyelitis optica by detecting an altered or increased level of an antibody that binds to CXCL2, CXCL3, IGFBPL1, CCL22, IL1F9, LY6G6D, or any combination thereof, relative to a control level.

[0273] In some embodiments, the subject is diagnosed with non-small cell lung cancer by detecting an altered or increased level of an antibody that binds to CCL17, CCL24, CXCL1, CXCL3, EDIL3, IFNA13, IFNA14, IFNA17, IFNA2, IFNA5, IFNA6, IFNA8, IFNL2, IFNW1, IL28B, IL34, MADCAM1, PDGFB, REG1A, SDC1, BTN1A1, C6, CD207, CD3D, CDH19, COLEC12, EREG, FGF23, FGF7, FGFBP3, IGFBPL1, IL15RA, IL17F, IL1RAP, IL22RA2, IL4, IL4R, ITGA5, LAG3, LRRC4, MPZL3, NOTCH2NL, NTRK3, REG4, SCARA3, STIM2, TNFRSF10C, TNFRSF19L, TREML1, or any combination thereof, relative to a control level.

[0274] In some embodiments, the subject is diagnosed with pediatric autoimmune neuropsychiatric disorders associated with streptococcal infections by detecting an altered or increased level of an antibody that binds to LRP 11, relative to a control level.

[0275] In some embodiments, the subject is diagnosed with sarcoidosis by detecting an altered or increased level of an antibody that binds to CX3CL1, EPYC, PGLYRP1, or any combination thereof, relative to a control level.

[0276] In some embodiments, the subject is diagnosed with systemic lupus erythematosus by detecting an altered or increased level of an antibody that binds to BMPR2, BTNL8, C1QTNF4, CCL11, CCL15, CCL17, CCL24, CCL4L1, CD300E, CD44, CSPG5, CX3CL1, CXCL1, CXCL2, CXCL3, EDIL3, EPYC, FGF21, FGFRL1, IFNA13, IFNA14, IFNA17, IFNA2, IFNA5, IFNA6, IFNA8, IFNB1, IFNL2, IFNW1, IGF2, IGSF4B, IL16, IL18RAP, IL19, IL1A, IL20RB, IL28B, IL29, L33, IL34, IL6, IL6R, JCHAIN, LGR6, LIF, LRTM2, LY6H, MADCAM1, MUC21, NGFR, PDCD1LG2, PDGFB, PGLYRP1, REG1A, REG1B, RTN4RL1, SDC1, SDC4, TGFA, TMEM149, TNF, TNFRSF10D, TNFRSF6, TREM2, TSLP, TSPAN2, TYRO3, VEGFB, or any combination thereof, relative to a control level.

[0277] In some embodiments, the subject is diagnosed with sjogren's syndrome by detecting an altered or increased level of an antibody that binds to CXCL1, CXCL3, PDCD1LG2, or any combination thereof, relative to a control level.

[0278] In some embodiments, the subject is diagnosed with susac syndrome by detecting an altered or increased level of an antibody that binds to CCL24, SDC4, TREML1, VSIG4, or any combination thereof, relative to a control level.

[0279] In some embodiments, the subject is diagnosed with undifferentiated connective tissue disease by detecting an altered or increased level of an antibody that binds to CNTN5, TNF, or any combination thereof, relative to a control level.

[0280] In one aspect, the present invention provides a method of diagnosing a disease or disorder in a subject, the method comprising assessing the presence of at least one antibody or autoantibody in a biological sample from the subject, wherein the at least one antibody or autoantibody is identified to be associated with the disease or disorder according to the methods described elsewhere herein. In one aspect, the present invention provides a method of diagnosing a disease or disorder in a subject, the method comprising detecting the binding of at least one autoantibody with at least one autoantigen as set forth in Table 3, and diagnosing the subject as having or at risk of having the associated disease or disorder as set forth in Table 3. In one aspect, the present invention provides a method of diagnosing a disease or disorder in a subject, the method comprising assessing detecting the binding of at least one autoantibody with at least one autoantigen as set forth in Table 4, and diagnosing the subject as having or at risk of having the associated disease or disorder as set forth in Table 4.

[0281] In one aspect, the present invention provides a method of evaluating the effectiveness of a treatment for a disease or disorder in a subject, the method comprising assessing the presence of at least one antibody or autoantibody in a biological sample from the subject, wherein the at least one antibody or autoantibody is identified to be associated with the disease or disorder according to the methods described elsewhere herein. In one aspect, the present invention provides a method of evaluating the effectiveness of a treatment for a disease or disorder in a subject, the method comprising detecting the binding of at least one autoantibody with at least one autoantigen as set forth in Table 3, in a subject pre administration of a treatment regimen, post administration of a treatment regimen, or both pre- and post-administration of a treatment regimen. For example, in one embodiment, the treatment regimen comprises administration of an antibody, and the method of the invention is used to evaluate the effectiveness of the treatment regimen by detecting the presence of or an increased level of antibody reactivity with a target antigen following treatment. In one embodiment, the treatment regimen comprises administering a therapeutic agent to reduce or eliminate one or more autoantibodies, and the method of the invention is used to evaluate the effectiveness of the treatment regimen by detecting the absence of or a reduced level of antibody reactivity with a target antigen following treatment.

[0282] In one embodiment, the subject is diagnosed with a disease or disorder when the level or activity of at least one antibody target associated with the disease or disorder is different than the threshold level. In one embodiment, the subject is diagnosed with a disease or disorder when the level or activity (e.g., activity, amount, concentration, expression, level, etc.) of at least one antibody target associated with the disease or disorder is higher than the threshold level. In some embodiments, the threshold level is obtained from control group samples.

[0283] In one embodiment, the subject is diagnosed with a disease or disorder by detecting an altered or increased level of an antibody target associated with the disease or disorder, relative to a control level. In some embodiments, the control level is a level of a particular marker (i.e., an antibody that binds to at least one antibody target associated with the disease or disorder) in a subject or population known not to have the disease. In various embodiments of the methods of the invention, the level (e.g., activity, amount, concentration, expression, level, etc.) of antibody target is determined to be increased or to be higher when the level of antibody target is determined to be increased by at least 0.01 fold, at least 0.05 fold, at least 0.07 fold, at least 0.076 fold, at least 0.1 fold, at least 0.18 fold, at least 0.19 fold, at least 0.3 fold, at least 0.36 fold, at least 0.37 fold, at least 0.38 fold, at least 0.4 fold, at least 0.43 fold, at least 1 fold, at least 1.1 fold, at least 1.2 fold, at least 1.3 fold, at least 1.4 fold, at least 1.5 fold, at least 1.6 fold, at least 1.7 fold, at least 1.8 fold, at least 1.9 fold, at least 2 fold, at least 2.1 fold, at least 2.2 fold, at least 2.3 fold, at least 2.4 fold, at least 2.5 fold, at least 2.6 fold, at least 2.7 fold, at least 2.8 fold, at least 2.9 fold, at least 3 fold, at least 3.5 fold, at least 4 fold, at least 4.5 fold, at least 5 fold, at least 5.5 fold, at least 6 fold, at least 6.5 fold, at least 7 fold, at least 7.5 fold, at least 8 fold, at least 8.5 fold, at least 9 fold, at least 9.5 fold, at least 10 fold, at least 11 fold, at least 12 fold, at least 13 fold, at least 14 fold, at least 15 fold, at least 16 fold, at least 16.3 fold, at least 16.31 fold, at least 20 fold, at least 25 fold, at least 26 fold, at least 26.7 fold, at least 26.72 fold, at least 30 fold, at least 40 fold, at least 50 fold, at least 75 fold, at least 100 fold, at least 192 fold, at least 192.4 fold, at least 192.44 fold, at least 200 fold, at least 250 fold, at least 500 fold, or at least 1000 fold, or at least 10000 fold, when compared with a comparator (e.g., the level of antibody target in control group samples).

[0284] In one embodiment, the subject is diagnosed with a disease or disorder when the level or activity of at least one antibody target associated with the disease or disorder is increased or higher as compared to a comparator (e.g., the predetermined threshold level). For example, in some embodiments, the subject is diagnosed with a disease or disorder when at least one antibody target associated with the disease or disorder is present in the subject (i.e., the level or activity of at least one antibody target associated with the disease or disorder is more than 0). In some embodiments, the subject is diagnosed with a disease or disorder when the level or activity of at least one antibody target associated with the disease or disorder is increased by at least 0.01 fold, or at least 0.18 fold. In some embodiments, the subject is diagnosed with a disease or disorder when the level or activity of at least one antibody target associated with the disease or disorder is increased in a range from 0.1 fold to 10,000 fold.

### Method of Preventing or Treating a Disease or Disorder

[0285] The present invention further relates, in part, to methods of preventing or treating a diseases or disorders associated with at least one antibody or target thereof (e.g., an antibody level, antibody target level, antibody activity, or antibody target activity) in a subject in need thereof. In one aspect, the method comprises administering a treatment to the subject comprising eliminating or modifying the level (e.g., activity, amount, concentration, expression, level, etc.) of at least one antibody target that is identified to be the antibody target associated with the disease or disorder according to the method of the present invention.

[0286] In one aspect, the present invention relates to a method of preventing or treating a disease or disorder associated with at least one antibody target in a subject in need thereof. In one embodiment, the method comprises administering a treatment to reduce the level (e.g., activity, amount, concentration, expression, level, etc.) of the antibody target identified to be associated with the disease or disorder according to the method of the present invention in the subject. In one embodiment, the treatment comprises inhibiting at least one antibody target associated with the disease or disorder. In one embodiment, the treatment comprises administering a therapeutically effective amount of an inhibitor of at least one antibody target associated with the disease or disorder. For example, in some embodiments, the inhibitor of the antibody target is an antibody, nucleic acid, peptide, small molecule, antagonist, aptamer, peptidomemetic, or a combination thereof.

[0287] In one aspect, the present invention relates to a method of preventing or treating a disease or disorder associated with an increased level of at least one antibody target in a subject in need thereof. In one embodiment, the method comprises administering a treatment to reduce the level (e.g., activity, amount, concentration, expression, level, etc.) of the antibody target identified to be associated with the disease or disorder according to the method of the present invention in the subject. In one embodiment, the treatment comprises inhibiting at least one antibody target associated with the disease or disorder. In one embodiment, the treatment comprises administering a therapeutically effective amount of an inhibitor of at least one antibody target associated with the disease or disorder. For example, in some embodiments, the inhibitor of the antibody target is an antibody For example, in some embodiments, the inhibitor of the antibody target is an antibody, nucleic acid, peptide, small molecule, antagonist, aptamer, peptidomemetic, or a combination thereof.

[0288] In one aspect, the present invention relates to a method of preventing or treating a disease or disorder associated with a decreased level of at least one antibody target in a subject in need thereof. In one embodiment, the method comprises administering a treatment to increase the level (e.g., activity, amount, concentration, expression, level, etc.) of the antibody target identified to be associated with the disease or disorder according to the method of the present invention in the subject. In one embodiment, the treatment comprises activating at least one antibody target associated with the disease or disorder. For example, in some embodiments, the treatment comprises increasing the level or activity of at least one antibody target associated with the disease or disorder by administering a therapeutically effective amount of at least one antibody target associated with the disease or disorder or a fragment thereof, nucleic acid sequences encoding the antibody target associated with the disease or disorder or a fragment thereof, inhibitor of the antibody that specifically binds to the antibody target, therapeutic agent, or a combination thereof. In some embodiments, the inhibitor of the antibody that specifically binds to the antibody target is an antibody, therapeutic agent, or a combination thereof.

[0289] The present invention also relates, in part, to methods of preventing or treating a disease or disorder associated with at least one antibody (e.g., antibody level or activity) in a subject in need thereof. In one aspect, the method comprises administering a treatment to the subject comprising modifying the level (e.g., activity, amount, concentration, expression, level, etc.) of at least one antibody that binds to an antigen associated with the disease or disorder according to the method of the present invention.

[0290] In one aspect, the present invention relates to a method of preventing or treating a disease or disorder associated with at least one antibody in a subject in need thereof. In one embodiment, the method comprises administering a treatment to reduce the level (e.g., activity, amount, concentration, expression, level, etc.) of the antibody identified to be associated with the disease or disorder according to the method of the present invention in the subject. In one embodiment, the treatment comprises inhibiting at least one antibody associated with the disease or disorder. In one embodiment, the treatment comprises administering a therapeutically effective amount of an inhibitor of at least one antibody associated with the disease or disorder. For example, in some embodiments, the inhibitor of the antibody is a composition comprising an antigen identified according to the methods of the invention, or a fragment thereof, that specifically binds to the antibody associated with the disease or disorder. In some embodiments, the composition comprising the antigen further comprises a therapeutic agent, a nucleic acid, a peptide, an antibody, a small molecule, or a combination thereof.

[0291] In one aspect, the present invention relates to a method of preventing or treating a disease or disorder associated with at least one antibody in a subject in need thereof. In one embodiment, the method comprises administering a therapeutic agent for decreasing the level (e.g., activity, amount, concentration, expression, level, etc.) of at least one antibody identified to be associated with the disease or disorder according to the method of the present invention in the subject. In one embodiment, the method comprises administering a therapeutic agent for inhibiting the reactivity of at least one antibody with at least one antigen identified to be associated with the disease or disorder according to the method of the present invention in the subject. In one embodiment, the method comprises inhibiting the reactivitiy of at least of antibody with at least one antigen for the treatment of the associated disease as set forth in Table 3. In one embodiment, the method comprises modulating the reactivitiy of at least of antibody with at least one antigen for the treatment of the associated disease as set forth in Table 3.

[0292] Exemplary therapeutic autoantigens whose reactivities with autoantibodies can be increased for the treatment of diseases and disorders include, but are not limited to, those autoantigens identified in Table 5, and associated diseases. Therefore, in one embodiment, the methods of the invention include methods of admininstering an autoantibody directed to autoantigen as set forth in Table 5, or a fragment thereof.

[0293] Exemplary autoantigens whose reactivities with autoantibodies can be inhibited or decreased for the treatment of diseases and disorders include, but are not limited to, those autoantigens identified in Table 6, and associated diseases. Therefore, in one embodiment, the methods of the invention include methods of admininstering an agent to decrease the level or activity of an autoantibody directed to autoantigen as set forth in Table 6, or a fragment thereof.

[0294] In one embodiment, the methods of the invention include methods of administering a fusion molecule comprising an antigen identified according to the methods of the invention fused to a domain to support degradation of an antibody. Exemplary domains to promote internalization and degradation of autoantibodies include, but are not limited to, an asialoglycoprotein receptor binding domain. In such an embodiment, binding of the autoantibody to the fusion antigen would result in targeted degradation of the bound autoantibody. Therefore, in some embodiments, the invention relates to fusion molecules comprising the antigens as set forth in Table 3 fused to a molecule for endocytosis and degradation, and their use for treating the associated disease or disorder as set forth in Table 3. In some embodiments, the invention relates to fusion molecules comprising the antigens as set forth in Table 6 fused to a molecule for endocytosis and degradation, and their use for treating the associated disease or disorder as set forth in Table 6.

[0295] In one embodiment, the methods of the invention include methods of directing T cells to B cells expressing autoantibodies. For example, in one embodiment, the invention provides compositions comprising engineered T cells expressing an autoantigen identified according to the methods of the invention, and their use to target auto-antigen expressing B cells for depletion or killing. Therefore, in various embodiments, the invention includes engineered T cells, including but not limited to, CAR-T cells and CAAR-T cells, expressing an antigen as set forth in Table 3, and the use thereof for the treatment of the associated disease or disorder as set forth in Table 3. Therefore, in various embodiments, the invention includes engineered T cells, including but not limited to, CAR-T cells and CAAR-T cells, expressing an antigen as set forth in Table 6, and the use thereof for the treatment of the associated disease or disorder as set forth in Table 6.

[0296] In some embodiments, the method of preventing or treating COVID-19 comprises administering a treatment to the subject for decreasing the level or activity of at least one autoantibody directed to IFITM10, IFNA13, IFNA14, IFNA17, IFNA2, IFNA5, IFNA6, IFNA8, IFNW1, KLRC1, KLRC2, KLRC3, CCR2, CD38, C5A, CCR4, CD3E, TNFRSF9, ADCYAP1, CGA, HCTR2, AZGP1, SCC41A2 or LAIR1 or any combination thereof. In some embodiments, the method of preventing or treating COVID-19 comprises administering a composition comprising at least one of IFITM10, IFNA13, IFNA14, IFNA17, IFNA2, IFNA5, IFNA6, IFNA8, IFNW1, KLRC1, KLRC2, KLRC3, CCR2, CD38, C5A, CCR4, CD3E, TNFRSF9, ADCYAP1, CGA, HCTR2, AZGP1, SCC41A2 and LAIR1, and further comprising a domain for degradation of an autoantibody directed to at least one of IFITM10, IFNA13, IFNA14, IFNA17, IFNA2, IFNA5, IFNA6, IFNA8, IFNW1, KLRC1, KLRC2, KLRC3, CCR2, CD38, C5A, CCR4, CD3E, TNFRSF9, ADCYAP1, CGA, HCTR2, AZGP1, SCC41A2 and LAIR1. In one embodiment, the method of preventing or treating COVID-19 comprises administering a composition comprising a CAR T cell expressing at least one of IFITM10, IFNA13, IFNA14, IFNA17, IFNA2, IFNA5, IFNA6, IFNA8, IFNW1, KLRC1, KLRC2, KLRC3, CCR2, CD38, C5A, CCR4, CD3E, TNFRSF9, ADCYAP1, CGA, HCTR2, AZGP1, SCC41A2 and LAIR1.

[0297] In some embodiments, the method of preventing or treating a disease or disorder associated with kidney transplant comprises administering a treatment to the subject for decreasing the level or activity of at least one autoantibody directed to IL4, EXOC3-AS1, IFNA13, CD99L2, OSTN, SYCN, LYG2, BTN1A1, or any combination thereof. In some embodiments, the method of preventing or treating a disease or disorder associated with kidney transplant comprises administering a composition comprising at least one of IL4, EXOC3-AS1, IFNA13, CD99L2, OSTN, SYCN, LYG2, and BTN1A1, and further comprising a domain for degradation of an autoantibody directed to at least one of IL4, EXOC3-AS1, IFNA13, CD99L2, OSTN, SYCN, LYG2, and BTN1A1. In one embodiment, the method of preventing or treating a disease or disorder associated with kidney transplant comprises administering a composition comprising a CAR T cell expressing at least one of IL4, EXOC3-AS1, IFNA13, CD99L2, OSTN, SYCN, LYG2, and BTN1A1.

[0298] In some embodiments, the method of preventing or treating malignant melanoma comprises administering a treatment to the subject for decreasing the level or activity of at least one autoantibody directed to IFNA13, OBP2B, TMEM108, CELAl, OTOL1, ATP4B, ICOSLG, REG1A, CCL24, TMEM91, LALBA, ITPRIPL1, LCN2, BTN1A1, OS9, FGF17 or any combination thereof. In some embodiments, the method of preventing or treating malignant melanoma comprises administering a composition comprising at least one of IFNA13, OBP2B, TMEM108, CELAl, OTOL1, ATP4B, ICOSLG, REG1A, CCL24, TMEM91, LALBA, ITPRIPL1, LCN2, BTN1A1, OS9, and FGF17, and further comprising a domain for degradation of an autoantibody directed to at least one of IFNA13, OBP2B, TMEM108, CELAl, OTOL1, ATP4B, ICOSLG, REG1A, CCL24, TMEM91, LALBA, ITPRIPL1, LCN2, BTN1A1, OS9, and FGF17. In one embodiment, the method of preventing or treating malignant melanoma comprises administering a composition comprising a CAR T cell expressing at least one of IFNA13, OBP2B, TMEM108, CELAl, OTOL1, ATP4B, ICOSLG, REG1A, CCL24, TMEM91, LALBA, ITPRIPL1, LCN2, BTN1A1, OS9, FGF17.

[0299] In some embodiments, the method of preventing or treating non-small cell lung cancer comprises administering a treatment to the subject for decreasing the level or activity of at least one autoantibody directed to IFNL2, VSTM2A, PDGFB or any combination thereof. In some embodiments, the method of preventing or treating non-small cell lung cancer comprises administering a composition comprising at least one of IFNL2, VSTM2A, and PDGFB, and further comprising a domain for degradation of an autoantibody directed to at least one of IFNL2, VSTM2A, and PDGFB. In one embodiment, the method of preventing or treating non-small cell lung cancer comprises administering a composition comprising a CAR T cell expressing at least one of IFNL2, VSTM2A, and PDGFB.

[0300] In some embodiments, the method of preventing or treating systemic lupus erythematosus comprises administering a treatment to the subject for decreasing the level or activity of at least one autoantibody directed to TMEM102, CCL8, CCL4L1, ACVR2B, FGF21, IGFBP2, RGMB, ACVR1B, ACRV1, SCGB1D1, TFF2, SFN, ANTXRL, SLC41A2, CD248 or any combination thereof. In some embodiments, the method of preventing or treating systemic lupus erythematosus comprises administering a composition comprising at least one of TMEM102, CCL8, CCL4L1, ACVR2B, FGF21, IGFBP2, RGMB, ACVR1B, ACRV1, SCGB1D1, TFF2, SFN, ANTXRL, SLC41A2, and CD248, and further comprising a domain for degradation of an autoantibody directed to at least one of TMEM102, CCL8, CCL4L1, ACVR2B, FGF21, IGFBP2, RGMB, ACVR1B, ACRV1, SCGB1D1, TFF2, SFN, ANTXRL, SLC41A2, and CD248. In one embodiment, the method of preventing or treating systemic lupus erythematosus comprises administering a composition comprising a CAR T cell expressing at least one of TMEM102, CCL8, CCL4L1, ACVR2B, FGF21, IGFBP2, RGMB, ACVR1B, ACRV1, SCGB1D1, TFF2, SFN, ANTXRL, SLC41A2, and CD248.

[0301] In one aspect, the present invention relates to a method of preventing or treating a disease or disorder associated with insufficient level of at least one antibody in a subject in need thereof. In one embodiment, the method comprises administering a treatment for decreasing the level (e.g., activity, amount, concentration, expression, level, etc.) of an antigen identified to be associated with the disease or disorder according to the method of the present invention in the subject. In one embodiment, the treatment comprises administering at least one antibody specific for binding to the antigen. For example, in some embodiments, the treatment comprises decreasing the level or activity of at least one autoantigen associated with a disease or disorder by administering a therapeutically effective amount of at least one antibody, or a fragment thereof, specific for binding to the antigen, a nucleic acid sequence encoding the antibody, or a fragment thereof, a therapeutic agent, nucleic acid, peptide, small molecule, antagonist, aptamer, peptidomemetic, or a combination thereof, or a combination thereof.

[0302] For example, in some embodiments, the method of preventing or treating autoimmune polyendocrinopathy candidiasis ecto-dermal dystrophy comprises administering a treatment to the subject for modulating the level or activity of IL22RA2, or administering an antibody that binds to IL22RA2.

[0303] In some embodiments, the method of preventing or treating cutaneous lupus erythematosus comprises administering a treatment to the subject for modulating the level or activity of CD300E, TYRO3, or any combination thereof, or administering an antibody that binds to CD300E, TYRO3, or any combination thereof.

[0304] In some embodiments, the method of preventing or treating COVID-19 comprises administering a treatment to the subject for modulating the level or activity of IL13, IL18RAP, TNFRSF8, CCR10, CD74, TNFRSF17, CCR9, CRTAM, C6, or any combination thereof, or administering an antibody that binds to IL13, IL18RAP, TNFRSF8, CCR10, CD74, TNFRSF17, CCR9, CRTAM, C6, or any combination thereof.

[0305] In some embodiments, the method of preventing or treating dermatomyositis comprises administering a treatment to the subject for modulating the level or activity of CD81, or administering an antibody that binds to CD81.

[0306] In some embodiments, the method of preventing or treating glomerulonephritis comprises administering a treatment to the subject for modulating the level or activity of IL34, or administering an antibody that binds to IL34.

[0307] In some embodiments, the method of preventing or treating a disease or disorder associated with kidney transplant comprises administering a treatment to the subject for modulating the level or activity of IGFBP1, IL15RA, NXPH1, CST5, C6, or any combination thereof, or administering an antibody that binds to IGFBP1, IL15RA, NXPH1, CST5, C6, or any combination thereof.

[0308] In some embodiments, the method of preventing or treating myasthenia gravis comprises administering a treatment to the subject for modulating the level or activity of CCL22, CCL2, or any combination thereof, or administering an antibody that binds to CCL22, CCL2, or any combination thereof.

[0309] In some embodiments, the method of preventing or treating malignant melanoma comprises administering a treatment to the subject for modulating the level or activity of PSORS1C2, LHFPL1, PTPRR, ZG16B, IGF1, IFLL1, LRIT3, VEGFB, or any combination thereof, or administering an antibody that binds to PSORS1C2, LHFPL1, PTPRR, ZG16B, IGF1, IFLL1, LRIT3, VEGFB, or any combination thereof.

[0310] In some embodiments, the method of preventing or treating neuromyelitis opticas comprises administering a treatment to the subject for modulating the level or activity of CCL22, IL1F9, or any combination thereof, or administering an antibody that binds to CCL22, IL1F9, or any combination thereof.

[0311] In some embodiments, the method of preventing or treating non-small cell lung cancer comprises administering a treatment to the subject for modulating the level or activity of CCL22, FGF23, FGF7, EREG, CXCL1, CXCL2, CXCL3, VEGFB, IL1A, LAG3, IFNA13, IFNA14, IFNA17, IFNA2, IFNA5, IFNA6, IFNA8, IFNL2, IFNW1, IL34, IL22RA2, IGFBPL1 or any combination thereof, or an administering antibody that binds to CCL22, FGF23, FGF7, EREG, CXCL1, CXCL2, CXCL3, VEGFB, IL1A, LAG3, IFNA13, IFNA14, IFNA17, IFNA2, IFNA5, IFNA6, IFNA8, IFNL2, IFNW1, IL34, IL22RA2, IGFBPL1 or any combination thereof.

[0312] In some embodiments, the method of preventing or treating systemic lupus erythematosus comprises administering a treatment to the subject for modulating the level or activity of PDCD1LG2, LIF, IFNA13, IFNA14, IFNA17, IFNA2, IFNA5, IFNA6, IFNA8, IFNB1, IFNL2, IFNW1, IL6, IL6R, IL33, IL34, IL16, IL19, IL20RB, IL18RAP, MADCAM1, TNF, TRAILR4, TYRO3, CD44, CD300E, FGF21, CXCL1, CXCL2, CXCL3, VEGFB, IL1A, LILRB2, LILRB4 or any combination thereof, or administering an antibody that binds to PDCD1LG2, LIF, IFNA13, IFNA14, IFNA17, IFNA2, IFNA5, IFNA6, IFNA8, IFNB1, IFNL2, IFNW1, IL6, TL6R, IL33, IL34, IL16, IL19, IL20RB, IL18RAP, MADCAM1, TNF, TRAILR4, TYRO3, CD44, CD300E, FGF21, CXCL1, CXCL2, CXCL3, VEGFB, IL1A, LILRB2, LILRB4 or any combination thereof.

[0313] In some embodiments, the method of preventing or treating sjogren's syndrome comprises administering a treatment to the subject for modulating the level or activity of PDCD1LG2, or administering an antibody that binds to PDCD1LG2.

[0314] In one embodiment, the invention relates to the use of therapeutic agent to modulate the reactivity of at least one autoantibody with at least one autoantigen of the invention. Examples of therapeutic agents include, but are not limited to, one or more drugs, metabolites, metabolic inhibitors, proteins, amino acids, peptides, antibodies, medical imaging agents, therapeutic moieties, one or more non-therapeutic moieties or a combination to target cancer or atherosclerosis, selected from folic acid, peptides, proteins, aptamers, antibodies, siRNA, poorly water soluble drugs, anti-cancer drugs, antibiotics, analgesics, vaccines, anticonvulsants; anti-diabetic agents, antifungal agents, antineoplastic agents, anti-parkinsonian agents, anti-rheumatic agents, appetite suppressants, biological response modifiers, cardiovascular agents, central nervous system stimulants, contraceptive agents, dietary supplements, vitamins, minerals, lipids, saccharides, metals, amino acids (and precursors), nucleic acids and precursors, contrast agents, diagnostic agents, dopamine receptor agonists, erectile dysfunction agents, fertility agents, gastrointestinal agents, hormones, immunomodulators, antihypercalcemia agents, mast cell stabilizers, muscle relaxants, nutritional agents, ophthalmic agents, osteoporosis agents, psychotherapeutic agents, parasympathomimetic agents, parasympatholytic agents, respiratory agents, sedative hypnotic agents, skin and mucous membrane agents, smoking cessation agents, steroids, sympatholytic agents, urinary tract agents, uterine relaxants, vaginal agents, vasodilator, anti-hypertensive, hyperthyroids, anti-hyperthyroids, anti-asthmatics and vertigo agents, anti-tumor agents, including cytotoxic/antineoplastic agents and anti-angiogenic agents, or any combination thereof.

[0315] Cytotoxic/anti-neoplastic agents are defined as agents which attack and kill cancer cells. Some cytotoxic/anti-neoplastic agents are alkylating agents, which alkylate the genetic material in tumor cells, e.g., cis-platin, cyclophosphamide, nitrogen mustard, trimethylene thiophosphoramide, carmustine, busulfan, chlorambucil, belustine, uracil mustard, chlomaphazin, and dacabazine. Other cytotoxic/anti-neoplastic agents are antimetabolites for tumor cells, e.g., cytosine arabinoside, fluorouracil, methotrexate, mercaptopuirine, azathioprime, and procarbazine. Other cytotoxic/anti-neoplastic agents are antibiotics, e.g., doxorubicin, bleomycin, dactinomycin, daunorubicin, mithramycin, mitomycin, mytomycin C, and daunomycin. There are numerous liposomal formulations commercially available for these compounds. Still other cytotoxic/anti-neoplastic agents are mitotic inhibitors (vinca alkaloids). These include vincristine, vinblastine and etoposide. Miscellaneous cytotoxic/anti-neoplastic agents include taxol and its derivatives, L-asparaginase, anti-tumor antibodies, dacarbazine, azacytidine, amsacrine, melphalan, VM-26, ifosfamide, mitoxantrone, and vindesine.

[0316] Anti-angiogenic agents are well known to those of skill in the art. Suitable anti-angiogenic agents for use in the methods of the present disclosure include anti-VEGF antibodies, including humanized and chimeric antibodies, anti-VEGF aptamers and antisense oligonucleotides. Other known inhibitors of angiogenesis include angiostatin, endostatin, interferons, interleukin 1 (including alpha and beta) interleukin 12, retinoic acid, and tissue inhibitors of metalloproteinase-1 and -2. (TIMP-1 and -2). Small molecules, including topoisomerases such as razoxane, a topoisomerase II inhibitor with anti-angiogenic activity, can also be used.

[0317] Other anti-cancer agents that can be used in combination with the disclosed compounds include, but are not limited to: acivicin; aclarubicin; acodazole hydrochloride; acronine; adozelesin; aldesleukin; altretamine; ambomycin; ametantrone acetate; aminoglutethimide; amsacrine; anastrozole; anthramycin; asparaginase; asperlin; azacitidine; azetepa; azotomycin; batimastat; benzodepa; bicalutamide; bisantrene hydrochloride; bisnafide dimesylate; bizelesin; bleomycin sulfate; brequinar sodium; bropirimine; busulfan; cactinomycin; calusterone; caracemide; carbetimer; carboplatin; carmustine; carubicin hydrochloride; carzelesin; cedefingol; chlorambucil; cirolemycin; cisplatin; cladribine; crisnatol mesylate; cyclophosphamide; cytarabine; dacarbazine; dactinomycin; daunorubicin hydrochloride; decitabine; dexormaplatin; dezaguanine; dezaguanine mesylate; diaziquone; docetaxel; doxorubicin; doxorubicin hydrochloride; droloxifene; droloxifene citrate; dromostanolone propionate; duazomycin; edatrexate; eflornithine hydrochloride; elsamitrucin; enloplatin; enpromate; epipropidine; epirubicin hydrochloride; erbulozole; esorubicin hydrochloride; estramustine; estramustine phosphate sodium; etanidazole; etoposide; etoposide phosphate; etoprine; fadrozole hydrochloride; fazarabine; fenretinide; floxuridine; fludarabine phosphate; fluorouracil; fluorocitabine; fosquidone; fostriecin sodium; gemcitabine; gemcitabine hydrochloride; hydroxyurea; idarubicin hydrochloride; ifosfamide; ilmofosine; interleukin II (including recombinant interleukin II, or rIL2), interferon alfa-2a; interferon alfa-2b; interferon alfa-n1; interferon alfa-n3; interferon beta-I a; interferon gamma-I b; iproplatin; irinotecan hydrochloride; lanreotide acetate; letrozole; leuprolide acetate; liarozole hydrochloride; lometrexol sodium; lomustine; losoxantrone hydrochloride; masoprocol; maytansine; mechlorethamine hydrochloride; megestrol acetate; melengestrol acetate; melphalan; menogaril; mercaptopurine; methotrexate; methotrexate sodium; metoprine; meturedepa; mitindomide; mitocarcin; mitocromin; mitogillin; mitomalcin; mitomycin; mitosper; mitotane; mitoxantrone hydrochloride; mycophenolic acid; nocodazole; nogalamycin; ormaplatin; oxisuran; paclitaxel; pegaspargase; peliomycin; pentamustine; peplomycin sulfate; perfosfamide; pipobroman; piposulfan; piroxantrone hydrochloride; plicamycin; plomestane; porfimer sodium; porfiromycin; prednimustine; procarbazine hydrochloride; puromycin; puromycin hydrochloride; pyrazofurin; riboprine; rogletimide; safingol; safingol hydrochloride; semustine; simtrazene; sparfosate sodium; sparsomycin; spirogermanium hydrochloride; spiromustine; spiroplatin; streptonigrin; streptozocin; sulofenur; talisomycin; tecogalan sodium; tegafur; teloxantrone hydrochloride; temoporfin; teniposide; teroxirone; testolactone; thiamiprine; thioguanine; thiotepa; tiazofurin; tirapazamine; toremifene citrate; trestolone acetate; triciribine phosphate; trimetrexate; trimetrexate glucuronate; triptorelin; tubulozole hydrochloride; uracil mustard; uredepa; vapreotide; verteporfin; vinblastine sulfate; vincristine sulfate; vindesine; vindesine sulfate; vinepidine sulfate; vinglycinate sulfate; vinleurosine sulfate; vinorelbine tartrate; vinrosidine sulfate; vinzolidine sulfate; vorozole; zeniplatin; zinostatin; zorubicin hydrochloride. Other anti-cancer drugs include, but are not limited to: 20-epi-1,25 dihydroxyvitamin D3; 5-ethynyluracil; abiraterone; aclarubicin; acylfulvene; adecypenol; adozelesin; aldesleukin; ALL-TK antagonists; altretamine; ambamustine; amidox; amifostine; aminolevulinic acid; amrubicin; amsacrine; anagrelide; anastrozole; andrographolide; angiogenesis inhibitors; antagonist D; antagonist G; antarelix; anti-dorsalizing morphogenetic protein-1; antiandrogen, prostatic carcinoma; antiestrogen; antineoplaston; antisense oligonucleotides; aphidicolin glycinate; apoptosis gene modulators; apoptosis regulators; apurinic acid; ara-CDP-DL-PTBA; arginine deaminase; asulacrine; atamestane; atrimustine; axinastatin 1; axinastatin 2; axinastatin 3; azasetron; azatoxin; azatyrosine; baccatin III derivatives; balanol; batimastat; BCR/ABL antagonists; benzochlorins; benzoylstaurosporine; beta lactam derivatives; beta-alethine; betaclamycin B; betulinic acid; bFGF inhibitor; bicalutamide; bisantrene; bisaziridinylspermine; bisnafide; bistratene A; bizelesin; breflate; bropirimine; budotitane; buthionine sulfoximine; calcipotriol; calphostin C; camptothecin derivatives; canarypox IL-2; capecitabine; carboxamide-amino-triazole; carboxyamidotriazole; CaRest M3; CARN 700; cartilage derived inhibitor; carzelesin; casein kinase inhibitors (ICOS); castanospermine; cecropin B; cetrorelix; chlorins; chloroquinoxaline sulfonamide; cicaprost; cis-porphyrin; cladribine; clomifene analogues; clotrimazole; collismycin A; collismycin B; combretastatin A4; combretastatin analogue; conagenin; crambescidin 816; crisnatol; cryptophycin 8; cryptophycin A derivatives; curacin A; cyclopentanthraquinones; cycloplatam; cypemycin; cytarabine ocfosfate; cytolytic factor; cytostatin; dacliximab; decitabine; dehydrodidemnin B; deslorelin; dexamethasone; dexifosfamide; dexrazoxane; dexverapamil; diaziquone; didemnin B; didox; diethylnorspermine; dihydro-5-azacytidine; dihydrotaxol, 9-; dioxamycin; diphenyl spiromustine; docetaxel; docosanol; dolasetron; doxifluridine; droloxifene; dronabinol; duocarmycin SA; ebselen; ecomustine; edelfosine; edrecolomab; eflornithine; elemene; emitefur; epirubicin; epristeride; estramustine analogue; estrogen agonists; estrogen antagonists; etanidazole; etoposide phosphate; exemestane; fadrozole; fazarabine; fenretinide; filgrastim; finasteride; flavopiridol; flezelastine; fluasterone; fludarabine; fluorodaunorunicin hydrochloride; forfenimex; formestane; fostriecin; fotemustine; gadolinium texaphyrin; gallium nitrate; galocitabine; ganirelix; gelatinase inhibitors; gemcitabine; glutathione inhibitors; hepsulfam; heregulin; hexamethylene bisacetamide; hypericin; ibandronic acid; idarubicin; idoxifene; idramantone; ilmofosine; ilomastat; imidazoacridones; imiquimod; immunostimulant peptides; insulin-like growth factor-1 receptor inhibitor; interferon agonists; interferons; interleukins; iobenguane; iododoxorubicin; ipomeanol, 4-; iroplact; irsogladine; isobengazole; isohomohalicondrin B; itasetron; jasplakinolide; kahalalide F; lamellarin-N triacetate; lanreotide; leinamycin; lenograstim; lentinan sulfate; leptolstatin; letrozole; leukemia inhibiting factor; leukocyte alpha interferon; leuprolide+estrogen+progesterone; leuprorelin; levamisole; liarozole; linear polyamine analogue; lipophilic disaccharide peptide; lipophilic platinum compounds; lissoclinamide 7; lobaplatin; lombricine; lometrexol; lonidamine; losoxantrone; lovastatin; loxoribine; lurtotecan; lutetium texaphyrin; lysofylline; lytic peptides; maitansine; mannostatin A; marimastat; masoprocol; maspin; matrilysin inhibitors; matrix metalloproteinase inhibitors; menogaril; merbarone; meterelin; methioninase; metoclopramide; MIF inhibitor; mifepristone; miltefosine; mirimostim; mismatched double stranded RNA; mitoguazone; mitolactol; mitomycin analogues; mitonafide; mitotoxin fibroblast growth factor-saporin; mitoxantrone; mofarotene; molgramostim; monoclonal antibody, human chorionic gonadotrophin; monophosphoryl lipid A+myobacterium cell wall sk; mopidamol; multiple drug resistance gene inhibitor; multiple tumor suppressor 1-based therapy; mustard anticancer agent; mycaperoxide B; mycobacterial cell wall extract; myriaporone; N-acetyldinaline; N-substituted benzamides; nafarelin; nagrestip; naloxone+pentazocine; napavin; naphterpin; nartograstim; nedaplatin; nemorubicin; neridronic acid; neutral endopeptidase; nilutamide; nisamycin; nitric oxide modulators; nitroxide antioxidant; nitrullyn; 06-benzylguanine; octreotide; okicenone; oligonucleotides; onapristone; ondansetron; ondansetron; oracin; oral cytokine inducer; ormaplatin; osaterone; oxaliplatin; oxaunomycin; paclitaxel; paclitaxel analogues; paclitaxel derivatives; palauamine; palmitoylrhizoxin; pamidronic acid; panaxytriol; panomifene; parabactin; pazelliptine; pegaspargase; peldesine; pentosan polysulfate sodium; pentostatin; pentrozole; perflubron; perfosfamide; perillyl alcohol; phenazinomycin; phenylacetate; phosphatase inhibitors; picibanil; pilocarpine hydrochloride; pirarubicin; piritrexim; placetin A; placetin B; plasminogen activator inhibitor; platinum complex; platinum compounds; platinum-triamine complex; porfimer sodium; porfiromycin; prednisone; propyl bis-acridone; prostaglandin J2; proteasome inhibitors; protein A-based immune modulator; protein kinase C inhibitor; protein kinase C inhibitors, microalgal; protein tyrosine phosphatase inhibitors; purine nucleoside phosphorylase inhibitors; purpurins; pyrazoloacridine; pyridoxylated hemoglobin polyoxyethylene conjugate; raf antagonists; raltitrexed; ramosetron; ras farnesyl protein transferase inhibitors; ras inhibitors; ras-GAP inhibitor; retelliptine demethylated; rhenium Re 186 etidronate; rhizoxin; ribozymes; RII retinamide; rogletimide; rohitukine; romurtide; roquinimex; rubiginone B1; ruboxyl; safingol; saintopin; SarCNU; sarcophytol A; sargramostim; Sdi 1 mimetics; semustine; senescence derived inhibitor 1; sense oligonucleotides; signal transduction inhibitors; signal transduction modulators; single chain antigen binding protein; sizofuran; sobuzoxane; sodium borocaptate; sodium phenylacetate; solverol; somatomedin binding protein; sonermin; sparfosic acid; spicamycin D; spiromustine; splenopentin; spongistatin 1; squalamine; stem cell inhibitor; stem-cell division inhibitors; stipiamide; stromelysin inhibitors; sulfinosine; superactive vasoactive intestinal peptide antagonist; suradista; suramin; swainsonine; synthetic glycosaminoglycans; tallimustine; tamoxifen methiodide; tauromustine; tazarotene; tecogalan sodium; tegafur; tellurapyrylium; telomerase inhibitors; temoporfin; temozolomide; teniposide; tetrachlorodecaoxide; tetrazomine; thaliblastine; thiocoraline; thrombopoietin; thrombopoietin mimetic; thymalfasin; thymopoietin receptor agonist; thymotrinan; thyroid stimulating hormone; tin ethyl etiopurpurin; tirapazamine; titanocene bichloride; topsentin; toremifene; totipotent stem cell factor; translation inhibitors; tretinoin; triacetyluridine; triciribine; trimetrexate; triptorelin; tropisetron; turosteride; tyrosine kinase inhibitors; tyrphostins; UBC inhibitors; ubenimex; urogenital sinus-derived growth inhibitory factor; urokinase receptor antagonists; vapreotide; variolin B; vector system, erythrocyte gene therapy; velaresol; veramine; verdins; verteporfin; vinorelbine; vinxaltine; vitaxin; vorozole; zanoterone; zeniplatin; zilascorb; and zinostatin stimalamer. In one embodiment, the anti-cancer drug is 5-fluorouracil, taxol, or leucovorin.

[0318] In some embodiments, the anti-cancer agent may be a prodrug form of an anti-cancer agent. As used herein, the term “prodrug form” and its derivatives is used to refer to a drug that has been chemically modified to add and/or remove one or more substituents in such a manner that, upon introduction of the prodrug form into a subject, such a modification may be reversed by naturally occurring processes, thus reproducing the drug. The use of a prodrug form of an anti-cancer agent in the compositions, among other things, may increase the concentration of the anti-cancer agent in the compositions of the present disclosure. In certain embodiments, an anti-cancer agent may be chemically modified with an alkyl or acyl group or some form of lipid. The selection of such a chemical modification, including the substituent(s) to add and/or remove to create the prodrug, may depend upon a number of factors including, but not limited to, the particular drug and the desired properties of the prodrug. One of ordinary skill in the art, with the benefit of this disclosure, will recognize suitable chemical modifications.

[0319] In one embodiment, the treatment comprises administering a therapeutically effective amount of at least one agent for modulating the reactivity of at least one antibody with at least one antigen.

[0320] In some embodiments, the treatment comprises decreasing or eliminating the level of at least one antibody associated with the disease or disorder by administering a therapeutically effective amount of an inhibitor of at least one antibody associated with the disease or disorder. For example, in one embodiment, the inhibitor of the antibody comprises an autoantigen identified using the methods of the invention.

[0321] Any drug or any combination of drugs disclosed herein may be administered to a subject to treat the disease or disorder. The drugs herein can be formulated in any number of ways, often according to various known formulations in the art or as disclosed or referenced herein.

[0322] In various embodiments, any drug or any combination of drugs disclosed herein is not administered to a subject to treat a disease. In these embodiments, the practitioner may refrain from administering the drug or any combination of drugs, may recommend that the subject not be administered the drug or any combination of drugs or may prevent the subject from being administered the drug or any combination of drugs.

[0323] In various embodiments, one or more additional drugs may be optionally administered in addition to those that are recommended or have been administered. An additional drug will typically not be any drug that is not recommended or that should be avoided.

[0324] In one aspect, the present invention also provides a method of alleviating toxicity of the treatment. In one embodiment, the method of alleviating toxicity of the treatment alleviates the toxicity of a cancer treatment. For example, in one embodiment, the method of alleviating toxicity of the treatment alleviates the toxicity of an immune-modifying checkpoint blockage therapies.

### Method of Assessing the Prognosis, Assessing the Effectiveness, or Alleviating the Toxicity of Treatment of a Disease or Disorder

[0325] The present invention further relates, in part, to a method of assessing the prognosis or assessing the effectiveness of treatment of a disease or disorder associated with at least one antibody or target thereof (e.g., an antibody level, antibody target level, antibody activity, or antibody target activity) in a subject in need thereof.

[0326] In one aspect, the present invention provides a method of assessing the prognosis or assessing the effectiveness of treatment of a disease or disorder in a subject, the method comprising assessing the presence of at least one antibody target in the subject, wherein the at least one antibody target is identified to be associated with the disease or disorder according to the method described above. In one aspect, the present invention provides a method of assessing the prognosis or assessing the effectiveness of treatment of a disease or disorder in a subject, the method comprising assessing the level or activity of at least one antibody target in the subject, wherein the at least one antibody target is identified to be associated with the disease or disorder according to the method described above.

[0327] In one embodiment, the method of assessing the prognosis or assessing the effectiveness of treatment of a disease or disorder comprises comparing the level of at least one antibody target, that is identified to be associated with the disease or disorder according to the method described above, to the threshold level. In some embodiments, the threshold level is obtained from control group samples.

[0328] The present invention further relates, in part, to a method of assessing the prognosis or assessing the effectiveness of treatment of a disease or disorder associated with at least one antibody in a subject in need thereof. In one aspect, the present invention provides a method of assessing the prognosis or assessing the effectiveness of treatment of a disease or disorder in a subject, the method comprising assessing the presence of at least one antibody in the subject, wherein the at least one antibody is identified to be associated with the disease or disorder according to the method described above. In one aspect, the present invention provides a method of assessing the prognosis or assessing the effectiveness of treatment of a disease or disorder in a subject, the method comprising assessing the level or activity of at least one antibody in the subject, wherein the at least one antibody is identified to be associated with the disease or disorder according to the method described above.

[0329] In one embodiment, the method of assessing the prognosis or assessing the effectiveness of treatment of a disease or disorder comprises comparing the level of at least one antibody, that is identified to be associated with the disease or disorder according to the method described above, to the threshold level. In some embodiments, the threshold level is obtained from control group samples. In one embodiment, the threshold is 0.

[0330] In another aspect, the present invention provides a method of predicting a response to the treatment.

[0331] Information obtained from the methods of the invention described herein can be used alone, or in combination with other information (e.g., age, family history, disease status, disease history, vital signs, blood chemistry, PSA level, Gleason score, primary tumor staging, lymph node staging, metastasis staging, expression of other gene signatures relevant to outcomes of a disease or disorder, such as autoimmune disease or disorder, cancer, inflammatory disease or disorder, metabolic disease or disorder, neurodegenerative disease or disorder, organ tissue rejection, organ transplant rejection, or any combination thereof, etc.) from the subject or from the biological sample obtained from the subject.

### Compositions

[0332] The present invention also provides various compositions comprising the antibodies or targets thereof identified by methods of the present invention. In one embodiment, the compositions modulate a reactivity between an autoantibody and at least one antigen. In one embodiment, the antigen is an antigen set forth in Table 1.

[0333] In some embodiments, the composition of the invention increases the reactivity of at least one antigen of the invention with an antibody. In some embodiments, the composition of the invention comprises at least one autoantibody directed to at least one antigen set forth in Table 1.

[0334] In some embodiments, the composition of the invention decreases the reactivity of at least one antigen of the invention with an antibody. In one embodiment, the invention provides compositions comprising at least one antigen of the invention linked to at least one domain for endocytosis, degradation, or a combination thereof. In one embodiment, the invention provides a composition comprising an antigen selected from the antigens set forth in Table 3, or a fragment thereof, linked to a domain for endocytosis, degradation, or a combination thereof. In one embodiment, the invention provides a composition comprising an antigen selected from the antigens set forth in Table 6, or a fragment thereof, linked to a domain for endocytosis, degradation, or a combination thereof.

[0335] In one embodiment, the invention provides a composition comprising a nucleic acid molecule encoding an antigen selected from the antigens set forth in Table 3, or a fragment thereof, linked to a domain for endocytosis, degradation, or a combination thereof. In one embodiment, the invention provides a composition comprising a nucleic acid molecule encoding an antigen selected from the antigens set forth in Table 6, or a fragment thereof, linked to a domain for endocytosis, degradation, or a combination thereof.

[0336] In one embodiment, the invention provides compositions comprising a cell or particle expressing at least one antigen of the invention, for example, a CAR T-cell expressing at least one antigen of the invention as described elsewhere herein.

[0337] In various aspects, the composition comprises: one or more antibodies or targets thereof of the present invention and one or more stabilizers. In various embodiments, the stabilizer to compound weight ratio is less than 50%. In one embodiment, the stabilizer comprises a biocompatible polymer. Examples of stabilizers include, but are not limited to, biocompatible polymer, a biodegradable polymer, a multifunctional linker, starch, modified starch, and starch derivatives, gums, including but not limited to polymers, polypeptides, albumin, amino acids, thiols, amines, carboxylic acid and combinations or derivatives thereof, citric acid, xanthan gum, alginic acid, other alginates, benitoniite, veegum, agar, guar, locust bean gum, gum arabic, quince psyllium, flax seed, okra gum, arabinoglactin, pectin, tragacanth, scleroglucan, dextran, amylose, amylopectin, dextrin, etc., cross-linked polyvinylpyrrolidone, ion-exchange resins, potassium polymethacrylate, carrageenan (and derivatives), gum karaya and biosynthetic gum, polycarbonates (linear polyesters of carbonic acid); microporous materials (bisphenol, a microporous poly(vinylchloride), micro-porous polyamides, microporous modacrylic copolymers, microporous styrene-acrylic and its copolymers); porous polysulfones, halogenated poly(vinylidene), polychloroethers, acetal polymers, polyesters prepared by esterification of a dicarboxylic acid or anhydride with an alkylene polyol, poly(alkylenesulfides), phenolics, polyesters, asymmetric porous polymers, cross-linked olefin polymers, hydrophilic microporous homopolymers, copolymers or interpolymers having a reduced bulk density, and other similar materials, poly(urethane), cross-linked chain-extended poly(urethane), poly(imides), poly(benzimidazoles), collodion, regenerated proteins, semi-solid cross-linked poly(vinylpyrrolidone), monomeric, dimeric, oligomeric or long-chain, copolymers, block polymers, block co-polymers, polymers, PEG, dextran, modified dextran, polyvinylalcohol, polyvinylpyrollidone, polyacrylates, polymethacrylates, polyanhydrides, polypeptides, albumin, alginates, amino acids, thiols, amines, carboxylic acids, or combinations thereof.

[0338] The compositions may be formulated in a pharmaceutically acceptable excipient, such as wetting agents, buffers, disintegrants, binders, fillers, flavoring agents and liquid carrier media such as sterile water, water/ethanol etc. The compositions should be suitable for administration either by topical administration or injection or inhalation or catheterization or instillation or transdermal introduction into any of the various body cavities including the alimentary canal, the vagina, the rectum, the bladder, the ureter, the urethra, the mouth, etc. For oral administration, the pH of the composition is preferably in the acid range (e.g., 2 to 7) and buffers or pH adjusting agents may be used. The contrast media may be formulated in conventional pharmaceutical administration forms, such as tablets, capsules, powders, solutions, dispersion, syrups, suppositories etc.

[0339] The compositions of the invention can be formulated and administered to a subject, as now described. The invention encompasses the preparation and use of pharmaceutical compositions comprising the compositions of the invention useful for the delivery of a therapeutic agent to a cell. The invention also encompasses the preparation and use of pharmaceutical compositions comprising the compositions of the invention useful for the treatment of a disease or disorder. The invention also encompasses the preparation and use of pharmaceutical compositions comprising the compositions of the invention useful for improved cell penetration.

[0340] Such a pharmaceutical composition may consist of the active ingredient alone, in a form suitable for administration to a subject, or the pharmaceutical composition may comprise the active ingredient and one or more pharmaceutically acceptable carriers, one or more additional ingredients, or some combination of these. The active ingredient may be present in the pharmaceutical composition in the form of a physiologically acceptable ester or salt, such as in combination with a physiologically acceptable cation or anion, as is well known in the art.

[0341] In various embodiments, the pharmaceutical compositions useful in the methods of the invention may be administered, by way of example, systemically, parenterally, or topically, such as, in oral formulations, inhaled formulations, including solid or aerosol, and by topical or other similar formulations. In addition to the appropriate therapeutic composition, such pharmaceutical compositions may contain pharmaceutically acceptable carriers and other ingredients known to enhance and facilitate drug administration. Other possible formulations, such as nanoparticles, liposomes, resealed erythrocytes, and immunologically based systems may also be used to administer an appropriate modulator thereof, according to the methods of the invention.

[0342] The formulations of the pharmaceutical compositions described herein may be prepared by any method known or hereafter developed in the art of pharmacology. In general, such preparatory methods include the step of bringing the active ingredient into association with a carrier or one or more other accessory ingredients, and then, if necessary or desirable, shaping or packaging the product into a desired single- or multi-dose unit.

[0343] Pharmaceutical compositions that are useful in the methods of the invention may be prepared, packaged, or sold in formulations suitable for oral, rectal, vaginal, parenteral, topical, pulmonary, intranasal, buccal, intravenous, ophthalmic, intrathecal and other known routes of administration. Other contemplated formulations include projected nanoparticles, liposomal preparations, resealed erythrocytes containing the active ingredient, and immunologically-based formulations.

[0344] A pharmaceutical composition of the invention may be prepared, packaged, or sold in bulk, as a single unit dose, or as a plurality of single unit doses. As used herein, a “unit dose” is discrete amount of the pharmaceutical composition comprising a predetermined amount of the active ingredient. The amount of the active ingredient is generally equal to the dosage of the active ingredient which would be administered to a subject or a convenient fraction of such a dosage such as, for example, one-half or one-third of such a dosage.

[0345] The relative amounts of the active ingredient, the pharmaceutically acceptable carrier, and any additional ingredients in a pharmaceutical composition of the invention will vary, depending upon the identity, size, and condition of the subject treated and further depending upon the route by which the composition is to be administered. By way of example, the composition may comprise between 0.1% and 100% (w/w) active ingredient. In various embodiments, the composition comprises at least about 1%, at least about 2%, at least about 3%, at least about 4%, at least about 5%, at least about 6%, at least about 7%, at least about 8%, at least about 9%, at least about 10%, at least about 11%, at least about 12%, at least about 13%, at least about 14%, at least about 15%, at least about 16%, at least about 17%, at least about 18%, at least about 19%, at least about 20%, at least about 21%, at least about 22%, at least about 23%, at least about 24%, at least about 25%, at least about 26%, at least about 27%, at least about 28%, at least about 29%, at least about 30%, at least about 31%, at least about 32%, at least about 33%, at least about 34%, at least about 35%, at least about 36%, at least about 37%, at least about 38%, at least about 39%, at least about 40%, at least about 41%, at least about 42%, at least about 43%, at least about 44%, at least about 45%, at least about 46%, at least about 47%, at least about 48%, at least about 49%, at least about 50%, at least about 51%, at least about 52%, at least about 53%, at least about 54%, at least about 55%, at least about 56%, at least about 57%, at least about 58%, at least about 59%, at least about 60%, at least about 61%, at least about 62%, at least about 63%, at least about 64%, at least about 65%, at least about 66%, at least about 67%, at least about 68%, at least about 69%, at least about 70%, at least about 71%, at least about 72%, at least about 73%, at least about 74%, at least about 75%, at least about 76%, at least about 77%, at least about 78%, at least about 79%, at least about 80%, at least about 81%, at least about 82%, at least about 83%, at least about 84%, at least about 85%, at least about 86%, at least about 87%, at least about 88%, at least about 89%, at least about 90%, at least about 91%, at least about 92%, at least about 93%, at least about 94%, at least about 95%, at least about 96%, at least about 97%, at least about 98%, at least about 99%, or at least about 100% (w/w) active ingredient.

[0346] In addition to the active ingredient, a pharmaceutical composition of the invention may further comprise one or more additional pharmaceutically active agents.

[0347] Controlled- or sustained-release formulations of a pharmaceutical composition of the invention may be made using conventional technology.

[0348] A formulation of a pharmaceutical composition of the invention suitable for oral administration may be prepared, packaged, or sold in the form of a discrete solid dose unit including, but not limited to, a tablet, a hard or soft capsule, a cachet, a troche, or a lozenge, each containing a predetermined amount of the active ingredient. Other formulations suitable for oral administration include, but are not limited to, a powdered or granular formulation, an aqueous or oily suspension, an aqueous or oily solution, or an emulsion.

[0349] A tablet comprising the active ingredient may, for example, be made by compressing or molding the active ingredient, optionally with one or more additional ingredients. Compressed tablets may be prepared by compressing, in a suitable device, the active ingredient in a free-flowing form such as a powder or granular preparation, optionally mixed with one or more of a binder, a lubricant, an excipient, a surface active agent, and a dispersing agent. Molded tablets may be made by molding, in a suitable device, a mixture of the active ingredient, a pharmaceutically acceptable carrier, and at least sufficient liquid to moisten the mixture. Pharmaceutically acceptable excipients used in the manufacture of tablets include, but are not limited to, inert diluents, granulating and disintegrating agents, binding agents, and lubricating agents. Known dispersing agents include, but are not limited to, potato starch and sodium starch glycolate. Known surface active agents include, but are not limited to, sodium lauryl sulphate. Known diluents include, but are not limited to, calcium carbonate, sodium carbonate, lactose, microcrystalline cellulose, calcium phosphate, calcium hydrogen phosphate, and sodium phosphate. Known granulating and disintegrating agents include, but are not limited to, corn starch and alginic acid. Known binding agents include, but are not limited to, gelatin, acacia, pre-gelatinized maize starch, polyvinylpyrrolidone, and hydroxypropyl methylcellulose. Known lubricating agents include, but are not limited to, magnesium stearate, stearic acid, silica, and talc.

[0350] Tablets may be non-coated or they may be coated using known methods to achieve delayed disintegration in the gastrointestinal tract of a subject, thereby providing sustained release and absorption of the active ingredient. By way of example, a material such as glyceryl monostearate or glyceryl distearate may be used to coat tablets. Further by way of example, tablets may be coated using methods described in U.S. Pat. Nos. 4,256,108; 4,160,452; and U.S. Pat. No. 4,265,874 to form osmotically-controlled release tablets. Tablets may further comprise a sweetening agent, a flavoring agent, a coloring agent, a preservative, or some combination of these in order to provide pharmaceutically elegant and palatable preparation.

[0351] Hard capsules comprising the active ingredient may be made using a physiologically degradable composition, such as gelatin. Such hard capsules comprise the active ingredient, and may further comprise additional ingredients including, for example, an inert solid diluent such as calcium carbonate, calcium phosphate, or kaolin.

[0352] Soft gelatin capsules comprising the active ingredient may be made using a physiologically degradable composition, such as gelatin. Such soft capsules comprise the active ingredient, which may be mixed with water or an oil medium such as peanut oil, liquid paraffin, or olive oil.

[0353] Liquid formulations of a pharmaceutical composition of the invention which are suitable for oral administration may be prepared, packaged, and sold either in liquid form or in the form of a dry product intended for reconstitution with water or another suitable vehicle prior to use.

[0354] Liquid suspensions may be prepared using conventional methods to achieve suspension of the active ingredient in an aqueous or oily vehicle. Aqueous vehicles include, for example, water and isotonic saline. Oily vehicles include, for example, almond oil, oily esters, ethyl alcohol, vegetable oils such as arachis, olive, sesame, or coconut oil, fractionated vegetable oils, and mineral oils such as liquid paraffin. Liquid suspensions may further comprise one or more additional ingredients including, but not limited to, suspending agents, dispersing or wetting agents, emulsifying agents, demulcents, preservatives, buffers, salts, flavorings, coloring agents, and sweetening agents. Oily suspensions may further comprise a thickening agent.

[0355] Known suspending agents include, but are not limited to, sorbitol syrup, hydrogenated edible fats, sodium alginate, polyvinylpyrrolidone, gum tragacanth, gum acacia, and cellulose derivatives such as sodium carboxymethylcellulose, methylcellulose, and hydroxypropylmethylcellulose. Known dispersing or wetting agents include, but are not limited to, naturally-occurring phosphatides such as lecithin, condensation products of an alkylene oxide with a fatty acid, with a long chain aliphatic alcohol, with a partial ester derived from a fatty acid and a hexitol, or with a partial ester derived from a fatty acid and a hexitol anhydride (e.g. polyoxyethylene stearate, heptadecaethyleneoxycetanol, polyoxyethylene sorbitol monooleate, and polyoxyethylene sorbitan monooleate, respectively). Known emulsifying agents include, but are not limited to, lecithin and acacia. Known preservatives include, but are not limited to, methyl, ethyl, or n-propyl-para-hydroxybenzoates, ascorbic acid, and sorbic acid. Known sweetening agents include, for example, glycerol, propylene glycol, sorbitol, sucrose, and saccharin. Known thickening agents for oily suspensions include, for example, beeswax, hard paraffin, and cetyl alcohol.

[0356] Liquid solutions of the active ingredient in aqueous or oily solvents may be prepared in substantially the same manner as liquid suspensions, the primary difference being that the active ingredient is dissolved, rather than suspended in the solvent. Liquid solutions of the pharmaceutical composition of the invention may comprise each of the components described with regard to liquid suspensions, it being understood that suspending agents will not necessarily aid dissolution of the active ingredient in the solvent. Aqueous solvents include, for example, water and isotonic saline. Oily solvents include, for example, almond oil, oily esters, ethyl alcohol, vegetable oils such as arachis, olive, sesame, or coconut oil, fractionated vegetable oils, and mineral oils such as liquid paraffin.

[0357] Powdered and granular formulations of a pharmaceutical preparation of the invention may be prepared using known methods. Such formulations may be administered directly to a subject, used, for example, to form tablets, to fill capsules, or to prepare an aqueous or oily suspension or solution by addition of an aqueous or oily vehicle thereto. Each of these formulations may further comprise one or more of dispersing or wetting agent, a suspending agent, and a preservative. Additional excipients, such as fillers and sweetening, flavoring, or coloring agents, may also be included in these formulations.

[0358] A pharmaceutical composition of the invention may also be prepared, packaged, or sold in the form of oil-in-water emulsion or a water-in-oil emulsion. The oily phase may be a vegetable oil such as olive or arachis oil, a mineral oil such as liquid paraffin, or a combination of these. Such compositions may further comprise one or more emulsifying agents such as naturally occurring gums such as gum acacia or gum tragacanth, naturally-occurring phosphatides such as soybean or lecithin phosphatide, esters or partial esters derived from combinations of fatty acids and hexitol anhydrides such as sorbitan monooleate, and condensation products of such partial esters with ethylene oxide such as polyoxyethylene sorbitan monooleate. These emulsions may also contain additional ingredients including, for example, sweetening or flavoring agents.

[0359] Methods for impregnating or coating a material with a chemical composition are known in the art, and include, but are not limited to methods of depositing or binding a chemical composition onto a surface, methods of incorporating a chemical composition into the structure of a material during the synthesis of the material (i.e., such as with a physiologically degradable material), and methods of absorbing an aqueous or oily solution or suspension into an absorbent material, with or without subsequent drying.

[0360] Parenteral administration of a pharmaceutical composition includes any route of administration characterized by physical breaching of a tissue of an individual and administration of the pharmaceutical composition through the breach in the tissue. Parental administration can be local, regional or systemic. Parenteral administration thus includes, but is not limited to, administration of a pharmaceutical composition by injection of the composition, by application of the composition through a surgical incision, by application of the composition through a tissue-penetrating non-surgical wound, and the like. In particular, parenteral administration is contemplated to include, but is not limited to, intravenous, intraocular, intravitreal, subcutaneous, intraperitoneal, intramuscular, intradermal, intrasternal injection, and intratumoral.

[0361] Formulations of a pharmaceutical composition suitable for parenteral administration comprise the active ingredient combined with a pharmaceutically acceptable carrier, such as sterile water or sterile isotonic saline. Such formulations may be prepared, packaged, or sold in a form suitable for bolus administration or for continuous administration. Injectable formulations may be prepared, packaged, or sold in unit dosage form, such as in ampules or in multi-dose containers containing a preservative. Formulations for parenteral administration include, but are not limited to, suspensions, solutions, emulsions in oily or aqueous vehicles, pastes, and implantable sustained-release or biodegradable formulations. Such formulations may further comprise one or more additional ingredients including, but not limited to, suspending, stabilizing, or dispersing agents. In one embodiment of a formulation for parenteral administration, the active ingredient is provided in dry (i.e., powder or granular) form for reconstitution with a suitable vehicle (e.g., sterile pyrogen-free water) prior to parenteral administration of the reconstituted composition.

[0362] The pharmaceutical compositions may be prepared, packaged, or sold in the form of a sterile injectable aqueous or oily suspension or solution. This suspension or solution may be formulated according to the known art, and may comprise, in addition to the active ingredient, additional ingredients such as the dispersing agents, wetting agents, or suspending agents described herein. Such sterile injectable formulations may be prepared using a non-toxic parenterally-acceptable diluent or solvent, such as water or 1,3-butane diol, for example. Other acceptable diluents and solvents include, but are not limited to, Ringer's solution, isotonic sodium chloride solution, and fixed oils such as synthetic mono-or di-glycerides. Other parentally-administrable formulations which are useful include those which comprise the active ingredient in microcrystalline form, in a liposomal preparation, or as a component of a biodegradable polymer systems. Compositions for sustained release or implantation may comprise pharmaceutically acceptable polymeric or hydrophobic materials such as an emulsion, an ion exchange resin, a sparingly soluble polymer, or a sparingly soluble salt.

[0363] Formulations suitable for topical administration include, but are not limited to, liquid or semi-liquid preparations such as liniments, lotions, oil-in-water or water-in-oil emulsions such as creams, ointments or pastes, and solutions or suspensions. Topically-administrable formulations may, for example, comprise from about 1% to about 10% (w/w) active ingredient, although the concentration of the active ingredient may be as high as the solubility limit of the active ingredient in the solvent Formulations for topical administration may further comprise one or more of the additional ingredients described herein.

[0364] A pharmaceutical composition of the invention may be prepared, packaged, or sold in a formulation suitable for pulmonary administration via the buccal cavity. Such a formulation may comprise dry particles which comprise the active ingredient and which have a diameter in the range from about 0.5 to about 7 nanometers, and preferably from about 1 to about 6 nanometers. Such compositions are conveniently in the form of dry powders for administration using a device comprising a dry powder reservoir to which a stream of propellant may be directed to disperse the powder or using a self-propelling solvent/powder-dispensing container such as a device comprising the active ingredient dissolved or suspended in a low-boiling propellant in a sealed container. Preferably, such powders comprise particles wherein at least 98% of the particles by weight have a diameter greater than 0.5 nanometers and at least 95% of the particles by number have a diameter less than 7 nanometers. More preferably, at least 95% of the particles by weight have a diameter greater than 1 nanometer and at least 90% of the particles by number have a diameter less than 6 nanometers. In some embodiments, dry powder compositions include a solid fine powder diluent such as sugar and are conveniently provided in a unit dose form.

[0365] Low boiling propellants generally include liquid propellants having a boiling point of below 65° F. at atmospheric pressure. Generally, the propellant may constitute 50 to 99.9% (w/w) of the composition, and the active ingredient may constitute 0.1 to 20% (w/w) of the composition. The propellant may further comprise additional ingredients such as a liquid non-ionic or solid anionic surfactant or a solid diluent (in some embodiments having a particle size of the same order as particles comprising the active ingredient).

[0366] Pharmaceutical compositions of the invention formulated for pulmonary delivery may also provide the active ingredient in the form of droplets of a solution or suspension. Such formulations may be prepared, packaged, or sold as aqueous or dilute alcoholic solutions or suspensions, optionally sterile, comprising the active ingredient, and may conveniently be administered using any nebulization or atomization device. Such formulations may further comprise one or more additional ingredients including, but not limited to, a flavoring agent such as saccharin sodium, a volatile oil, a buffering agent, a surface active agent, or a preservative such as methylhydroxybenzoate. The droplets provided by this route of administration preferably have an average diameter in the range from about 0.1 to about 200 nanometers.

[0367] The formulations described herein as being useful for pulmonary delivery are also useful for intranasal delivery of a pharmaceutical composition of the invention.

[0368] Another formulation suitable for intranasal administration is a coarse powder comprising the active ingredient and having an average particle from about 0.2 to 500 micrometers.

[0369] Such a formulation is administered in the manner in which snuff is taken i.e. by rapid inhalation through the nasal passage from a container of the powder held close to the nares. Formulations suitable for nasal administration may, for example, comprise from about as little as 0.1% (w/w) and as much as 100% (w/w) of the active ingredient, and may further comprise one or more of the additional ingredients described herein.

[0370] A pharmaceutical composition of the invention may be prepared, packaged, or sold in a formulation suitable for buccal administration. Such formulations may, for example, be in the form of tablets or lozenges made using conventional methods, and may, for example, contain 0.1 to 20% (w/w) active ingredient, the balance comprising an orally dissolvable or degradable composition and, optionally, one or more of the additional ingredients described herein. Alternately, formulations suitable for buccal administration may comprise a powder or an aerosolized or atomized solution or suspension comprising the active ingredient. Such powdered, aerosolized, or aerosolized formulations, when dispersed, preferably have an average particle or droplet size in the range from about 0.1 nanomaters to about 2000 micrometers, and may further comprise one or more of the additional ingredients described herein.

[0371] A pharmaceutical composition of the invention may be prepared, packaged, or sold in a formulation suitable for ophthalmic administration. Such formulations may, for example, be in the form of eye drops including, for example, a 0.1-1.0% (w/w) solution or suspension of the active ingredient in an aqueous or oily liquid carrier. Such drops may further comprise buffering agents, salts, or one or more other of the additional ingredients described herein. Other opthalmically-administrable formulations which are useful include those which comprise the active ingredient in microcrystalline form or in a liposomal preparation.

[0372] As used herein, “additional ingredients” include, but are not limited to, one or more of the following: excipients; surface active agents; dispersing agents; inert diluents; granulating and disintegrating agents; binding agents; lubricating agents; sweetening agents; flavoring agents; coloring agents; preservatives; physiologically degradable compositions such as gelatin; aqueous vehicles and solvents; oily vehicles and solvents; suspending agents; dispersing or wetting agents; emulsifying agents, demulcents; buffers; salts; thickening agents; fillers; emulsifying agents; antioxidants; antibiotics; antifungal agents; stabilizing agents; and pharmaceutically acceptable polymeric or hydrophobic materials. Other “additional ingredients” which may be included in the pharmaceutical compositions of the invention are known in the art and described, for example in Genaro, ed., 1985, Remington's Pharmaceutical Sciences, Mack Publishing Co., Easton, Pa.

[0373] Administration of the compounds of the present invention or the compositions thereof may be continuous or intermittent, depending, for example, upon the recipient's physiological condition, whether the purpose of the administration is therapeutic or prophylactic, and other factors known to skilled practitioners. The administration of the agents of the invention may be essentially continuous over a preselected period of time or may be in a series of spaced doses. Both local and systemic administration is contemplated. The amount administered will vary depending on various factors including, but not limited to, the composition chosen, the particular disease, the weight, the physical condition, and the age of the mammal, and whether prevention or treatment is to be achieved. Such factors can be readily determined by the clinician employing animal models or other test systems which are well known to the art.

[0374] One or more suitable unit dosage forms having the therapeutic agent(s) of the invention, which, as discussed below, may optionally be formulated for sustained release (for example using microencapsulation, see WO 94/07529, and U.S. Pat. No. 4,962,091 the disclosures of which are incorporated by reference herein), can be administered by a variety of routes including parenteral, including by intravenous and intramuscular routes, as well as by direct injection into the diseased tissue. For example, the therapeutic agent may be directly injected into the muscle. The formulations may, where appropriate, be conveniently presented in discrete unit dosage forms and may be prepared by any of the methods well known to pharmacy. Such methods may include the step of bringing into association the therapeutic agent with liquid carriers, solid matrices, semi-solid carriers, finely divided solid carriers or combinations thereof, and then, if necessary, introducing or shaping the product into the desired delivery system.

[0375] When the therapeutic agents of the invention are prepared for administration, they are preferably combined with a pharmaceutically acceptable carrier, diluent or excipient to form a pharmaceutical formulation, or unit dosage form. The total active ingredients in such formulations include from 0.1 to 99.9% by weight of the formulation. A “pharmaceutically acceptable” is a carrier, diluent, excipient, and/or salt that is compatible with the other ingredients of the formulation, and not deleterious to the recipient thereof. The active ingredient for administration may be present as a powder or as granules; as a solution, a suspension or an emulsion.

[0376] Pharmaceutical formulations containing the therapeutic agents of the invention can be prepared by procedures known in the art using well known and readily available ingredients. The therapeutic agents of the invention can also be formulated as solutions appropriate for parenteral administration, for instance by intramuscular, subcutaneous or intravenous routes.

[0377] The pharmaceutical formulations of the therapeutic agents of the invention can also take the form of an aqueous or anhydrous solution or dispersion, or alternatively the form of an emulsion or suspension.

[0378] Thus, the therapeutic agent may be formulated for parenteral administration (e.g., by injection, for example, bolus injection or continuous infusion) and may be presented in unit dose form in ampules, pre-filled syringes, small volume infusion containers or in multi-dose containers with an added preservative. The active ingredients may take such forms as suspensions, solutions, or emulsions in oily or aqueous vehicles, and may contain formulatory agents such as suspending, stabilizing and/or dispersing agents. Alternatively, the active ingredients may be in powder form, obtained by aseptic isolation of sterile solid or by lyophilization from solution, for constitution with a suitable vehicle, e.g., sterile, pyrogen-free water, before use.

[0379] It will be appreciated that the unit content of active ingredient or ingredients contained in an individual aerosol dose of each dosage form need not in itself constitute an effective amount for treating the particular indication or disease since the necessary effective amount can be reached by administration of a plurality of dosage units. Moreover, the effective amount may be achieved using less than the dose in the dosage form, either individually, or in a series of administrations.

[0380] The pharmaceutical formulations of the present invention may include, as optional ingredients, pharmaceutically acceptable carriers, diluents, solubilizing or emulsifying agents, and salts of the type that are well-known in the art. Specific non-limiting examples of the carriers and/or diluents that are useful in the pharmaceutical formulations of the present invention include water and physiologically acceptable buffered saline solutions, such as phosphate buffered saline solutions pH 7.0-8.0.

[0381] In general, water, suitable oil, saline, aqueous dextrose (glucose), and related sugar solutions and glycols such as propylene glycol or polyethylene glycols are suitable carriers for parenteral solutions. Solutions for parenteral administration contain the active ingredient, suitable stabilizing agents and, if necessary, buffer substances. Antioxidizing agents such as sodium bisulfate, sodium sulfite or ascorbic acid, either alone or combined, are suitable stabilizing agents. Also used are citric acid and its salts and sodium Ethylenediaminetetraacetic acid (EDTA). In addition, parenteral solutions can contain preservatives such as benzalkonium chloride, methyl- or propyl-paraben and chlorobutanol. Suitable pharmaceutical carriers are described in Remington's Pharmaceutical Sciences, a standard reference text in this field.

[0382] The active ingredients of the invention may be formulated to be suspended in a pharmaceutically acceptable composition suitable for use in mammals and in particular, in humans. Such formulations include the use of adjuvants such as muramyl dipeptide derivatives (MDP) or analogs that are described in U.S. Pat. Nos. 4,082,735; 4,082,736; 4,101,536; 4,185,089; 4,235,771; and 4,406,890. Other adjuvants, which are useful, include alum (Pierce Chemical Co.), lipid A, trehalose dimycolate and dimethyldioctadecylammonium bromide (DDA), Freund's adjuvant, and IL-12. Other components may include a polyoxypropylene-polyoxyethylene block polymer (Pluronic®), a non-ionic surfactant, and a metabolizable oil such as squalene (U.S. Pat. No. 4,606,918).

[0383] Additionally, standard pharmaceutical methods can be employed to control the duration of action. These are well known in the art and include control release preparations and can include appropriate macromolecules, for example polymers, polyesters, polyamino acids, polyvinyl, pyrolidone, ethylenevinylacetate, methyl cellulose, carboxymethyl cellulose or protamine sulfate. The concentration of macromolecules as well as the methods of incorporation can be adjusted in order to control release. Additionally, the agent can be incorporated into particles of polymeric materials such as polyesters, polyamino acids, hydrogels, poly (lactic acid) or ethylenevinylacetate copolymers. In addition to being incorporated, these agents can also be used to trap the compound in microcapsules.

[0384] Accordingly, the composition of the present invention may be delivered via various routes and to various sites in a mammal body to achieve a particular effect (see, e.g., Rosenfeld et al., 1991; Rosenfeld et al., 1991a; Jaffe et al., supra; Berkner, supra). One skilled in the art will recognize that although more than one route can be used for administration, a particular route can provide a more immediate and more effective reaction than another route. In one embodiment, the composition described above is administered to the subject by subretinal injection. In other embodiments, the composition is administered by intravitreal injection. Other forms of administration that may be useful in the methods described herein include, but are not limited to, direct delivery to a desired organ (e.g., the eye), oral, inhalation, intranasal, intratracheal, intravenous, intramuscular, subcutaneous, intradermal, and other parental routes of administration. Additionally, routes of administration may be combined, if desired. In another embodiments, route of administration is subretinal injection or intravitreal injection.

[0385] The active ingredients of the present invention can be provided in unit dosage form wherein each dosage unit, e.g., a teaspoonful, tablet, solution, or suppository, contains a predetermined amount of the composition, alone or in appropriate combination with other active agents. The term “unit dosage form” as used herein refers to physically discrete units suitable as unitary dosages for human and mammal subjects, each unit containing a predetermined quantity of the compositions of the present invention, alone or in combination with other active agents, calculated in an amount sufficient to produce the desired effect, in association with a pharmaceutically acceptable diluent, carrier, or vehicle, where appropriate. The specifications for the unit dosage forms of the present invention depend on the particular effect to be achieved and the particular pharmacodynamics associated with the composition in the particular host.

[0386] The pharmaceutical compositions useful for practicing the invention may be administered to deliver a dose of at least about 1 ng/kg, at least about 5 ng/kg, at least about 10 ng/kg, at least about 25 ng/kg, at least about 50 ng/kg, at least about 100 ng/kg, at least about 500 ng/kg, at least about 1 μg/kg, at least about 5 μg/kg, at least about 10 μg/kg, at least about 25 μg/kg, at least about 50 μg/kg, at least about 100 μg/kg, at least about 500 μg/kg, at least about 1 mg/kg, at least about 5 mg/kg, at least about 10 mg/kg, at least about 25 mg/kg, at least about 50 mg/kg, at least about 100 mg/kg, at least about 200 mg/kg, at least about 300 mg/kg, at least about 400 mg/kg, and at least about 500 mg/kg of body weight of the subject.

[0387] In some embodiments, the pharmaceutical compositions useful for practicing the invention may be administered to deliver a dose of no more than about 1 ng/kg, no more than about 5 ng/kg, no more than about 10 ng/kg, no more than about 25 ng/kg, no more than about 50 ng/kg, no more than about 100 ng/kg, no more than about 500 ng/kg, no more than about 1 μg/kg, no more than about 5 μg/kg, no more than about 10 μg/kg, no more than about 25 μg/kg, no more than about 50 μg/kg, no more than about 100 μg/kg, no more than about 500 μg/kg, no more than about 1 mg/kg, no more than about 5 mg/kg, no more than about 10 mg/kg, no more than about 25 mg/kg, no more than about 50 mg/kg, no more than about 100 mg/kg, no more than about 200 mg/kg, no more than about 300 mg/kg, no more than about 400 mg/kg, and no more than about 500 mg/kg of body weight of the subject. Also contemplated are dosage ranges between any of the doses disclosed herein.

[0388] Typically, dosages which may be administered in a method of the invention to a subject, in some embodiments a human, range in amount from 0.5 μg to about 100 g per kilogram of body weight of the subject. While the precise dosage administered will vary depending upon any number of factors, including but not limited to, the type of subject and type of disease state being treated, the age of the subject and the route of administration. In some embodiments, the dosage of the compound will vary from about 1 μg to about 10 mg per kilogram of body weight of the subject. In other embodiments, the dosage will vary from about 3 μg to about 1 mg per kilogram of body weight of the subject.

[0389] The compositions may be administered to a subject as frequently as several times daily, or it may be administered less frequently, such as once a day, twice a day, thrice a day, once a week, twice a week, thrice a week, once every two weeks, twice every two weeks, thrice every two weeks, once a month, twice a month, thrice a month, or even less frequently, such as once every several months or even once or a few times a year or less. The frequency of the dose will be readily apparent to the skilled artisan and will depend upon any number of factors, such as, but not limited to, the type and severity of the disease being treated, the type and age of the subject, etc. The formulations of the pharmaceutical compositions may be prepared by any method known or hereafter developed in the art of pharmacology. In general, such preparatory methods include the step of bringing the active ingredient into association with a carrier or one or more other accessory ingredients, and then, if necessary or desirable, shaping or packaging the product into a desired single- or multi-dose unit.

[0390] Individuals to which administration of the pharmaceutical compositions of the invention is contemplated include, but are not limited to, humans and other primates, mammals including commercially relevant mammals such as non-human primates, cattle, pigs, horses, sheep, cats, and dogs.

[0391] These compositions described herein are by no means all-inclusive, and further modifications to suit the specific application will be apparent to the ordinary skilled artisan. Moreover, the effective amount of the compositions can be further approximated through analogy to compounds known to exert the desired effect.

### Kits

[0392] The present invention also pertains to kits useful in the methods of the invention. Such kits comprise various combinations of components useful in any of the methods described elsewhere herein, including for example, materials for identifying at least one antibody target, quantitatively analyzing at least one antibody or a target thereof (e.g., quantitatively analyzing a nucleic acid sequence barcode), materials for diagnosing or assessing the prognosis of a disease or disorder associated with the antibody or target thereof, materials for preventing or treating a disease or disorder associated with the antibody or target thereof, materials for alleviating toxicity of the treatment, and instructional material. For example, in one embodiment, the kit comprises components useful for the identification of a desired antibody target in a biological sample. In another embodiment, the kit comprises components useful for the quantification of a desired antibody or a desired antibody target (e.g., quantification of a desired nucleic acid sequence barcode). In a further embodiment, the kit comprises components useful for diagnosing or assessing the prognosis of a disease or disorder associated with the antibody or target thereof In a further embodiment, the kit comprises components useful for preventing or treating a disease or disorder associated with the antibody or target thereof. In a further embodiment, the kit comprises components useful for alleviating toxicity of the treatment.

[0393] In a further embodiment, the kit comprises the components of an assay for monitoring the effectiveness of a treatment administered to a subject in need thereof, containing instructional material and the components for determining whether the level of an antibody or a target thereof of the invention in a biological sample obtained from the subject is modulated during or after administration of the treatment. In various embodiments, to determine whether the level of an antibody or a target thereof of the invention is modulated in a biological sample obtained from the subject, the level of the antibody or the target thereof is compared with the level of at least one comparator contained in the kit, such as a positive control, a negative control, a historical control, a historical norm, or the level of another reference molecule in the biological sample. In certain embodiments, the ratio of the antibody or the target thereof and a reference molecule is determined to aid in the monitoring of the treatment.

### EXPERIMENTAL EXAMPLES

[0394] The invention is further described in detail by reference to the following experimental examples. These examples are provided for purposes of illustration only, and are not intended to be limiting unless otherwise specified. Thus, the invention should in no way be construed as being limited to the following examples, but rather should be construed to encompass any and all variations which become evident as a result of the teaching provided herein.

[0395] Without further description, it is believed that one of ordinary skill in the art can, using the preceding description and the following illustrative examples, make and utilize the present invention and practice the claimed methods. The following working examples therefore are not to be construed as limiting in any way the remainder of the disclosure.

### Example 1: Rapid Extracellular Antibody Profiling (REAP)

[0396] Current high-throughput autoantibody discovery techniques have limited sensitivity towards extracellular and secreted proteins largely due to the biochemical challenges associated with producing these proteins in a high-throughput manner. In this regard, yeast cell surface display offers several important advantages over other common systems. Unlike in vitro translation or peptide-array-based approaches, yeast cell surface display can express full-length proteins in folded three-dimensional conformations, allowing for the identification of non-linear binding epitopes. Compared to phage or bacterial expression systems, yeast cell produced extracellular proteins in a eukaryotic cell system that included ER chaperones, glycosylation machinery, and disulfide “proofreading.” While mammalian systems may offer even superior quality control owing to more native glycosylation machinery and chaperones, a yeast cell surface display library is far more economical to maintain and expand. These advantages combine to make a yeast-displayed exoproteome library a robust solution that can maximize the sensitivity and throughput of extracellular autoantibody discovery.

[0397] The present study generated, characterized, and applied a high-quality yeast-display based platform to identify extracellular proteins that are targets of autoantibodies. The system was benchmarked using a well-characterized autoimmune syndrome with pathognomonic autoantibody targets and showed that it has high sensitivity and specificity. The method was additionally applied to a cohort of immunotherapy-treated NSCLC patients and another cohort of patients with SLE, UCTD, and sarcoidosis. In both cohorts several novel autoantibody reactivities were identified and validated.

[0398] REAP as a Novel Autoantibody Discovery Platform

[0399] In order to leverage the power of yeast cell surface display systems for autoantibody discovery, a yeast-displayed “exoproteome” library of approximately 1400 human extracellular or secreted proteins, where each protein in the library was paired with unique DNA barcodes, was used. Using this library, REAP, a platform that allowed for sensitive high throughput identification of autoantibody reactivities against extracellular proteins, was developed. In it, purified patient antibodies were incubated with the library. Autoantibodies, if present, bound to yeast cell clones displaying their target antigen. These autoantibody-coated yeast cells were enriched by magnetic bead-based selection and enrichment was quantified through next generation sequencing of the unique DNA barcodes (FIG. 1).

[0400] In developing REAP, a number of novel methodologies had to be established. These include advances in antigen library preparation as well as advances in methodology for preparation of patient biological samples, high-throughput selection, and downstream data analysis. First, a necessary component of REAP was the defined linkage between a genetically encoded barcode that may be read out by next-generation sequencing and an associated gene. While multiple barcodes may be associated with the same gene, no barcode may be associated with multiple genes for the REAP assay to function. Additionally, REAP required a library composed of native, properly-folded proteins comprising individual extracellular domains (“ectodomains”). Therefore, approaches, such as peptide tiling, shotgun DNA cloning, or whole-cDNA cloning approaches, which have previously been used to generate libraries for autoantibody screening, did not offer the same specificity or coverage as the curated library since they did not present the full, properly folded tertiary structure of the secreted or ectodomain antigen. As such, these technologies cannot readily detect antibodies recognizing discontinuous, three-dimensional epitopes. These difficulties were overcome and generated a curated library of full-length ectodomains that were individually cloned, normalized during a pooling step, and confidently associated with multiple unique genetic barcodes.

[0401] Second, a high-throughput and efficient method for antibody isolation from human serum or plasma were developed. This method involved affinity purification of the desired antibody isotype (IgG, IgA, IgE, etc.) in 96-well microtiter plates. This allowed for the isolation of antibodies from hundreds of patient samples in a day. Importantly, after the antibodies were isolated, they were incubated with empty vector yeast. Since yeast cell contained conserved epitopes that may be targeted by endogenous anti-saccharomyces antibodies and proteins, such as complement/MBL, this step removed human serum components and yeast-reactive antibodies that may bind yeast cell and interfere with downstream selection procedures. Ultimately, the antibody isolation method allowed to rapidly process patient samples while generating antibody inputs that lead to minimal background in the REAP selection process.

[0402] Third, a novel high-throughput selection process based on 96-well magnetic columns were developed. Traditionally, yeast cell library selections for directed evolution purposes have been conducted with either large magnetic columns designed for capturing cells or fluorescence activated cell sorting (FACS). While this process was effective, it was entirely low-throughput. Using these large magnetic columns, only a few dozen selections can be performed at a time. Use of FACS was similarly limiting, as one FACS machine can only sort one sample at a time at a maximum speed of ˜17 minutes per 100 million cells. In order to achieve the desired level of throughput, 96-well magnetic columns designed for analytical scale isolations of proteins and nucleic acids were repurposed. Through optimization, a standard protocol for use of these columns that involved washing to remove non-specific binders as well as centrifugation for maximum elution efficiency was developed. Using this novel selection method, the entire selection process for 96 samples consisting of 100 million cells per sample can be completed in ˜40 minutes, while comparable sorting using FACS would take ˜27 hours.

[0403] Finally, a custom scoring algorithm was developed to identify genuine autoantibody reactivities based on quantitative next generation sequencing data. The data analysis method relied on the fact that each protein in the library was displayed on multiple yeast cell clones and each clone carried a unique DNA barcode. In other words, each protein in the library consisted of multiple “protein clones”. Through next generation sequencing, not only can the total enrichment of a protein after selection be determined, but also how many “protein clones” were enriched. This allows for quantifying “clonal enrichment”, which was defined as the fraction of clones that were enriched above a set cutoff. Incorporation of clonal enrichment in REAP data analysis was essential for identification of true reactivities because it allowed for the elimination of non-specific enrichment of proteins due to polyreactive “sticky” yeast cell clones or stochastic variations in library distribution. These factors may result in enrichment of a single protein clone, but it was extremely unlikely that they would result in enrichment of all of the “protein clones” for a protein. On the other hand, genuine enrichment of a protein due to the presence of autoantibodies targeting it would result in enrichment of many if not all protein clones. Thus, incorporation of clonal enrichment into data analysis allowed for elimination of false positive enrichments, expediting identification of genuine autoantibody reactivities in samples.

[0404] REAP Allows for Specific and Sensitive High-Throughput Autoantibody Discovery

[0405] To validate that this method can accurately detect antibody targets, REAP was performed on a panel of 9 commercial monoclonal antibodies with known targets (FIG. 2). All antibody targets in this panel were detect accurately and specifically. Next, the assay was benchmarked using samples from patients with autoimmune-polyendocrinopathy-candidiasis-ectodermal dystrophy (APECED), an autoimmune disease characterized by near universal presence of high titer autoantibodies against type 1 interferons and IL22 and rarer autoantibodies against other cytokines. IgG was purified from the serum of twelve APECED patients along with 16 healthy donor samples and conducted REAP on them. This REAP screen revealed that all APECED samples exhibited robust enrichment of type 1 interferons (IFNA & IFNW1) and 1L22 and several exhibited enrichment of other known autoantibody targets in APECED such as IL17, IL5, and IL28 at frequencies comparable to previously described autoantibody distributions in the APECED patient population (FIG. 3). Little to no enrichment of these proteins was seen in the 20 healthy donor samples. Autoantibodies were identified against gastric intrinsic factor (GIF), lipocalin-1 (LCN1), IL-5, IL-6, protein disulfide-isomerase-like protein of the testis (PDILT), and BPI fold containing family member 1 and 2 (BPIFA1/2), which have been previously described in APECED. With respect to GIF reactivities, the results seen with REAP demonstrated strong concordance with clinical anti-GIF ELISA results from the same patients (FIG. 4). To quantify the sensitivity of the assay, REAP screens were conducted using serial dilutions of antibody from an APECED patient (FIG. 5) and compared the results to that of enzyme-linked immunosorbent assays (ELISAs), the “gold-standard” assay for autoantibody detection (FIG. 6). For the four protein targets tested, REAP exhibited higher sensitivity than ELISA, as seen by the left-shifted dose response curves in the REAP assay. To investigate the reproducibility of REAP, log 2[fold enrichment] was compared between technical (intra-assay) replicates across all APECED patient samples and strong positive correlations were found between replicates (median R2=0.914; FIG. 7). Together, these data show that REAP is a sensitive and specific assay for high-throughput autoantibody identification from patient serum.

[0406] REAP Identifies Novel Autoantibodies in a Wide Variety of Disease Contexts

[0407] Using REAP, a cohort of patients with systemic lupus erythematosus (SLE) was screened (FIG. 8). THe screen identified autoantibody reactivities that are known to be present in SLE patients, such as those against TNF, IL6, and type I interferons. Importantly, many previously undescribed autoantibody reactivities were identified against proteins with a wide range of biological functions. For example, autoantibody reactivities were identified targeting cytokines (e.g., IL4, IL33), chemokines (e.g., CXCL3, CCL8), growth factors (e.g., VEGFB, FGF21), immunoregulatory proteins (e.g., PD-L2, B7H4), and extracellular matrix proteins (e.g., EPYC, CD248).

[0408] Two notable autoantibody reactivities uncovered in SLE patients were those against PD-L2 and IL-33. These were biochemically validated using ELISAs and the function of these autoantibodies was characterized. As the primary biological function of PD-L2 is mediated by its binding to its receptor PD-1, it was tested whether autoantibodies against PD-L2 could block this interaction. Serum samples from an SLE patient with anti-PD-L2 autoantibodies were present at titers >1:100 and inhibited the interaction between PD-L2 and PD-1 in a dose-dependent manner, while serum from a control patient without anti-PD-L2 autoantibodies did not (FIG. 9A-9C). To test the functional effects of anti-IL-33 autoantibodies, a HEK-Blue IL-33 reporter cell line was used, which produces secreted alkaline phosphatase downstream of an NFκB promoter that is activated by the IL-33 pathway. Bulk IgG (isolated via protein G) from the SLE patient harboring anti-IL-33 autoantibodies potently neutralized IL-33 signaling with an IC50 less than 0.01 mg/mL, while IgG from a control patient without anti-IL-33 autoantibodies had no neutralizing effect (FIG. 9D-9F). These findings underscore the ability of REAP to discover novel autoantibodies with functional biological effects.

[0409] In addition, a longitudinal cohort of 63 non-small cell lung cancer (NSCLC) patients treated primarily with anti-PD-L1 and anti-PD-1 checkpoint inhibition along with a variety of other antibody immunotherapies (FIG. 10) was screened. From this screen, novel autoantibody reactivities against proteins that have not yet been described in the context of cancer and that could potentially have disease-modifying effects were identified. These include autoantibodies targeting chemokines (e.g., CXCL1/2/3), type 1 interferons, growth factors (e.g., VEGFB), and adhesion receptors (e.g., MADCAM1).

[0410] Using REAP, many of the therapeutic antibodies administered to these patients were accurately detected, which served as internal positive controls. The assay was able to detect therapeutic antibody presence with high sensitivity. In one patient, patient 9, bevacizumab (anti-VEGFA therapeutic antibody) was detected 6 months after their last dose. The assay was also able to accurately detect longitudinal changes in therapeutic antibody titer. For example, REAP score accurately reflected changes in therapeutic anti-OX40 antibody titers in one patient, as measured by ELISA (FIG. 11).

[0411] Combining these data with the SLE REAP data, the heterogeneity in REAP data was analyzed between different diseases by performing UMAP analysis on the NSCLC, SLE, and UCTD patient data (FIG. 12). While some NSCLC and SLE patients clustered together, some subsets of patients formed distinct disease-specific clusters.

[0412] A cohort of patients was screened with systemic sclerosis, a chronic autoimmune rheumatic disorder (FIG. 13). Similar to the screen of SLE patients, numerous novel autoantibody reactivities targeting proteins involved in a wide variety of biological functions were found. Of note, many reactivities against NK cell related proteins (LILRA3, LILRB2, RAETIL, ULBP2) were identified and multiple patients had autoantibody reactivities against PD-1, an immune checkpoint receptor that plays an important role in inhibiting immune responses.

[0413] Finally, a longitudinal cohort of 194 COVID-19 patients were screened. It was found that autoantibodies in COVID-19 patients targeted proteins involved in diverse immunological functions such as acute phase response, type II immunity, leukocyte trafficking, interferon responses, and lymphocyte function/activation (FIG. 14). Cytokine autoantibody targets included type 1 and type 3 interferons, IL-1α/β, IL-6, IL-21, IL-22, GM-CSF (CSF2), IL-18Rβ (IL18RAP), and Leptin (LEP). Chemokine autoantibody targets included CXCL1, CXCL7 (PPBP), CCL2, CCL15, CCL16, and the chemokine decoy receptor ACKR1 (Duffy blood group antigen). Immunomodulatory cell surface autoantibody targets included NKG2D ligands (e.g., RAET1E/L, ULBP1/2), NK cell receptors NKG2A/C/E (e.g., KLRC1/2/3), B cell expressed proteins (e.g., CD38, FCMR, FCRL3, CXCR5), T cell expressed proteins (e.g., CD3E, CXCR3, CCR4), and myeloid expressed proteins (e.g., CCR2, CD300E).

[0414] In addition to immune-targeting autoantibodies, a high prevalence of tissue-associated autoantibodies in COVID-19 patients (FIG. 15) was observed. A list of tissue associated antigens with significant differences in REAP signals was manually curated between uninfected controls and symptomatic patients, and a heatmap organized by COVID-19 disease severity was generated. Broadly, a high frequency of autoantibodies were found directed against vascular cell types (e.g., endothelial adhesion molecule PLVAP, regulator of angiogenesis RSPO3); against coagulation factors (e.g., coagulation factor II receptor F2R, SERPINEl and 2) and platelets (e.g., glycoprotein VI GP6); and against connective tissue and extracellular matrix targets (e.g., suspected regulator of cartilage maintenance OTOR, matrix metalloproteinases MMP7 and MMP9). In addition, REAP hits were observed against various organ systems including lung (e.g., ectodysplasin A2 Receptor EDA2R and mesothelin MSLN), the CNS compartment (e.g., orexin receptor HCRTR2, metabotropic glutamate receptor GRM5, neuronal injury marker NINJ1), skin (e.g., dermcidin DCD), gastrointestinal tract (e.g., regenerating family member 4 REG4, guanylate cyclase activator 2A GUCA2A), and other tissues.

[0415] To explore the correlation of autoantibodies with disease progression/adverse events in cancer patients treated with immunotherapy, 1,454 longitudinal samples were screened from 222 CPI-treated melanoma patients (FIG. 16). Anti-CTLA4/PD1/PDL1 drugs were detected in most treated patients. Beyond these “controls”, more than 400 hits with significant REAP scores were observed across the samples. Many hits like ICOSLG, IL6, TNFa, and ILlA are present in multiple patients and these antibodies could have a modulation role in drug response and immune-related adverse events.

[0416] The broad autoantibody reactivity is also observed in kidney transplant patients (FIG. 17). 108 patients with pre and post transplantation serum samples were screened. Around 320 autoantibodies and 70/320 are immune-related hits were detected. Patients treated with Belatacept (CTLA-4 Fc) were accurately captured, with high CD80 scores. Patients are grouped by rejection and infection status after transplantation. Some hits like IFITM10, IL4, EXOC3-AS1 are highly associated with post-transplantation rejection while anti-IGFBP1 shows a potential protective role. Anti-IFNa family/CD99L2/OSTN/SYCN/LYG2/BTN1A1 autoantibodies are enriched in the infection group, suggesting a protective role of these proteins in virus infection. Anti-NXPH1/CST5 autoantibodies are observed in the non-infection group, indicates the potential immune-inhibitory role of these proteins. The existence of these autoantibodies is an opportunity to modulate patients' responses with kidney transplantation.

[0417] Custom Scoring Algorithm has High Sensitivity and Specificity

[0418] To validate the autoantibody reactivities that were discovered, two parallel and orthogonal assays were used. Luciferase Immunoprecipitation Systems (LIPS) offers a highly sensitive, higher-throughput validation process, but relies on luciferase fusions that may interfere with protein folding or lead to higher noise and variability between proteins. ELISA requires larger amounts of purified recombinant protein but is a “gold-standard” assay that is widely used. In both assays, valid autoantibody reactivities were defined as those with signals 3 standard deviations above the average healthy donor signal. Representative ELISA and LIPS validation plots can be seen in FIG. 18A and FIG. 18B. Using orthogonal validation data from APECED and SLE patients (247 test pairs across 25 different proteins), a receiver operating characteristic analysis was conducted and it was found that using the current scoring algorithm, REAP could distinguish autoantibody reactivities with an area under the curve of 0.892 (FIG. 19). A list of all REAP reactivities that have been orthogonally validated is provided in FIG. 23.

[0419] Pathogenic Autoantibodies Identified by REAP could be Specifically Targeted for Degradation in Clinical Settings

[0420] Autoantibodies that are identified in REAP screens and are further demonstrated to have pathogenic effects could be targeted for degradation in clinical settings using existing therapeutic modalities. For example, pathogenic autoantibodies could be removed from circulation in patients through the use of recombinant biologics in the form of autoantigens conjugated to endocytosis-promoting protein tags. Upon injection of these autoantigen conjugates into circulation, pathogenic autoantibodies will bind to their respective autoantigen, be trafficked to endosomal pathways, and ultimately be degraded intracellularly (FIG. 20). Chimeric autoantigen receptor (CAAR) T cells, a recently developed drug modality, could also be used to eliminate the B cells responsible for pathogenic autoantibody production. CAAR T cells display autoantigens on their cell surfaces that are connected to intracellular T cell activation domains. Inside a patient, CAAR T cells can bind to the B cell receptors of autoreactive B cells and initiate cytotoxic pathways that lead to lysis of the target autoreactive B cell (FIG. 21). In some cases, when autoantigens are proteins that have potentially harmful physiological effects when administered systemically and in large quantities (e.g., cytokines, chemokines, growth factors) or have native binding partners that are widely expressed, autoantigens could be engineered so that they do not interact with their native partner (FIG. 22). For example, if depletion of anti-IFNα autoantibodies was clinically indicated, IFNα could be engineered so that it does not bind to IFNAR1/2 and this engineered protein could be used as the autoantigen in the previously described therapeutic modalities.

[0421] The materials and methods employed in this experiment are now described.

[0422] Library Design:

[0423] An initial library of 3093 human extracellular proteins was assembled based on protein domains, immunological functions, and yeast-display compatibility. The extracellular portion of each protein was identified by manual inspection of topological domains annotated in the SwissProt database (January 2018). For proteins with uncertain topology, full sequences were run through SignalP 4, Topcons, and GPTPred to identify most likely topologies. For proteins with multiple extracellular portions, in general the longest individual region was chosen for initial amplification. cDNAs for chosen proteins were purchased from GE Dharmacon or DNASU. The protein sequences were further modified to match isoforms available in purchased cDNAs. An inventory of antigens included in the library are compiled in Table 1.

TABLE 1
Representative list of DNA and protein sequences
amplified for the initial and expanded libraries.

| Seq. Id. | Seq. Id. | Uniprot | Gene |
|---|---|---|---|
| No. (protein) | No. (DNA) | ID | Symbol |
| 1 | 3093 | P04217 | A1BG |
| 2 | 3094 | P01023 | A2M |
| 3 | 3095 | Q7Z7G0 | ABI3BP |
| 4 | 3096 | P16112 | ACAN |
| 5 | 3097 | Q9BYF1 | ACE2 |
| 6 | 3098 | O75078 | ADAM11 |
| 7 | 3099 | O43184 | ADAM12 |
| 8 | 3100 | Q13444 | ADAM15 |
| 9 | 3101 | Q9Y3Q7 | ADAM18 |
| 10 | 3102 | Q9H013 | ADAM19 |
| 11 | 3103 | Q99965 | ADAM2 |
| 12 | 3104 | O43506 | ADAM20 |
| 13 | 3105 | Q9UKJ8 | ADAM21 |
| 14 | 3106 | Q9P0K1 | ADAM22 |
| 15 | 3107 | O75077 | ADAM23 |
| 16 | 3108 | QOUKQ2 | ADAM28 |
| 17 | 3109 | Q9UKF5 | ADAM29 |
| 18 | 3110 | Q9UKF2 | ADAM30 |
| 19 | 3111 | Q8TC27 | ADAM32 |
| 20 | 3112 | Q9BZ11 | ADAM33 |
| 21 | 3113 | P78325 | ADAM8 |
| 22 | 3114 | Q13443 | ADAM9 |
| 23 | 3115 | P82987 | ADAMTSL3 |
| 24 | 3116 | Q9UHX3 | ADGRE2 |
| 25 | 3117 | Q9BY15 | ADGRE3 |
| 26 | 3118 | Q86SQ3 | ADGRE4P |
| 27 | 3119 | P48960 | ADGRE5 |
| 28 | 3120 | P35318 | ADM |
| 29 | 3121 | Q7Z4H4 | ADM2 |
| 30 | 3122 | Q15109 | AGER |
| 31 | 3123 | O00468 | AGRN |
| 32 | 3124 | Q13740 | ALCAM |
| 33 | 3125 | Q86YT9 | AMICA1 |
| 34 | 3126 | Q86WK6 | AMIGO1 |
| 35 | 3127 | Q86SJ2 | AMIGO2 |
| 36 | 3128 | Q86WK7 | AMIGO3 |
| 37 | 3129 | Q15389 | ANGPT1 |
| 38 | 3130 | O15123 | ANGPT2 |
| 39 | 3131 | Q9Y264 | ANGPT4 |
| 40 | 3132 | Q9UKU9 | ANGPTL2 |
| 41 | 3133 | Q9Y5C1 | ANGPTL3 |
| 42 | 3134 | Q9BY76 | ANGPTL4 |
| 43 | 3135 | Q9H6X2 | ANTXR1 |
| 44 | 3136 | P58335 | ANTXR2 |
| 45 | 3137 | A6NF34 | ANTXRL |
| 46 | 3138 | P15514 | AREG |
| 47 | 3139 | Q9H6B4 | ASAM |
| 48 | 3140 | P07306 | ASGR1 |
| 49 | 3141 | P07307 | ASGR2 |
| 50 | 3142 | Q9BXN1 | ASPN |
| 51 | 3143 | O14525 | ASTN1 |
| 52 | 3144 | O75129 | ASTN2 |
| 53 | 3145 | Q6UW56 | ATRAID |
| 54 | 3146 | O75882 | ATRN |
| 55 | 3147 | Q5VV63 | ATRNL1 |
| 56 | 3148 | P30530 | AXL |
| 57 | 3149 | P25311 | AZGP1 |
| 58 | 3150 | P61769 | B2M |
| 59 | 3151 | P50895 | BCAM |
| 60 | 3152 | Q96GW7 | BCAN |
| 61 | 3153 | P21810 | BGN |
| 62 | 3154 | P13497 | BMP1 |
| 63 | 3155 | O95393 | BMP10 |
| 64 | 3156 | O95972 | BMP15 |
| 65 | 3157 | P12643 | BMP2 |
| 66 | 3158 | P12645 | BMP3 |
| 67 | 3159 | P12644 | BMP4 |
| 68 | 3160 | P22003 | BMP5 |
| 69 | 3161 | P18075 | BMP7 |
| 70 | 3162 | Q7Z5Y6 | BMP8A |
| 71 | 3163 | P34820 | BMP8B |
| 72 | 3164 | P36894 | BMPR1A |
| 73 | 3165 | O00238 | BMPR1B |
| 74 | 3166 | Q13873 | BMPR2 |
| 75 | 3167 | Q9BWV1 | BOC |
| 76 | 3168 | P35613 | BSG |
| 77 | 3169 | Q075Z2 | BSPH1 |
| 78 | 3170 | P35070 | BTC |
| 79 | 3171 | Q7Z6A9 | BTLA |
| 80 | 3172 | Q13410 | BTN1A1 |
| 81 | 3173 | Q7KYR7 | BTN2A1 |
| 82 | 3174 | Q8WVV5 | BTN2A2 |
| 83 | 3175 | Q96KV6 | BTN2A3P |
| 84 | 3176 | O00481 | BTN3A1 |
| 85 | 3177 | P78410 | BTN3A2 |
| 86 | 3178 | O00478 | BTN3A3 |
| 87 | 3179 | A8MVZ5 | BTNL10 |
| 88 | 3180 | Q9UIR0 | BTNL2 |
| 89 | 3181 | Q6UXE8 | BTNL3 |
| 90 | 3182 | Q6UX41 | BTNL8 |
| 91 | 3183 | Q6UXG8 | BTNL9 |
| 92 | 3184 | O95971 | BY55 |
| 93 | 3185 | Q9H7M9 | C10orf54 |
| 94 | 3186 | Q5VYX0 | C10orf59 |
| 95 | 3187 | Q6UX52 | C17orf99 |
| 96 | 3188 | Q969H8 | C19orf10 |
| 97 | 3189 | F2Z333 | C1orf233 |
| 98 | 3190 | Q71H61 | C1orf32 |
| 99 | 3191 | O75973 | C1QL1 |
| 100 | 3192 | Q7Z5L3 | C1QL2 |
| 101 | 3193 | Q9NPY3 | C1QR1 |
| 102 | 3194 | Q9BXJ5 | C1QTNF2 |
| 103 | 3195 | Q9BXJ3 | C1QTNF4 |
| 104 | 3196 | Q9BXJ0 | C1QTNF5 |
| 105 | 3197 | P00736 | C1R |
| 106 | 3198 | P09871 | C1S |
| 107 | 3199 | P01024 | C3 |
| 108 | 3200 | P0C0L4 | C4A |
| 109 | 3201 | P01031 | C5 |
| 110 | 3202 | P13671 | C6 |
| 111 | 3203 | O95866 | C6orf25 |
| 112 | 3204 | P10643 | C7 |
| 113 | 3205 | P07357 | C8A |
| 114 | 3206 | P07358 | C8B |
| 115 | 3207 | P02748 | C9 |
| 116 | 3208 | Q9BY67 | CADM1 |
| 117 | 3209 | Q8N3J6 | CADM2 |
| 118 | 3210 | Q6UXH8 | CCBE1 |
| 119 | 3211 | P22362 | CCL1 |
| 120 | 3212 | P51671 | CCL11 |
| 121 | 3213 | Q99616 | CCL13 |
| 122 | 3214 | Q16627 | CCL14 |
| 123 | 3215 | Q16663 | CCL15 |
| 124 | 3216 | O15467 | CCL16 |
| 125 | 3217 | Q92583 | CCL17 |
| 126 | 3218 | P55774 | CCL18 |
| 127 | 3219 | Q99731 | CCL19 |
| 128 | 3220 | P13500 | CCL2 |
| 129 | 3221 | P78556 | CCL20 |
| 130 | 3222 | O00585 | CCL21 |
| 131 | 3223 | O00626 | CCL22 |
| 132 | 3224 | P55773 | CCL23 |
| 133 | 3225 | O00175 | CCL24 |
| 134 | 3226 | O15444 | CCL25 |
| 135 | 3227 | Q9Y258 | CCL26 |
| 136 | 3228 | Q9Y4X3 | CCL27 |
| 137 | 3229 | Q9NRJ3 | CCL28 |
| 138 | 3230 | P10147 | CCL3 |
| 139 | 3231 | P16619 | CCL3L3 |
| 140 | 3232 | P13236 | CCL4 |
| 141 | 3233 | Q8NHW4 | CCL4L1 |
| 142 | 3234 | P13501 | CCL5 |
| 143 | 3235 | P80098 | CCL7 |
| 144 | 3236 | P80075 | CCL8 |
| 145 | 3237 | P08571 | CD14 |
| 146 | 3238 | P48509 | CD151 |
| 147 | 3239 | Q86VB7 | CD163 |
| 148 | 3240 | Q9NR16 | CD163L1 |
| 149 | 3241 | Q99467 | CD180 |
| 150 | 3242 | P15391 | CD19 |
| 151 | 3243 | P06126 | CD1A |
| 152 | 3244 | P29016 | CD1B |
| 153 | 3245 | P29017 | CD1C |
| 154 | 3246 | P15813 | CD1D |
| 155 | 3247 | P15812 | CD1E |
| 156 | 3248 | P06729 | CD2 |
| 157 | 3249 | P41217 | CD200 |
| 158 | 3250 | Q8TD46 | CD200R1 |
| 159 | 3251 | Q6Q8B3 | CD200R1L |
| 160 | 3252 | Q9UJ71 | CD207 |
| 161 | 3253 | Q9NNX6 | CD209 |
| 162 | 3254 | P20273 | CD22 |
| 163 | 3255 | Q15762 | CD226 |
| 164 | 3256 | Q9BZW8 | CD244 |
| 165 | 3257 | Q9HCU0 | CD248 |
| 166 | 3258 | Q9NZQ7 | CD274 |
| 167 | 3259 | Q5ZPR3 | CD276 |
| 168 | 3260 | P10747 | CD28 |
| 169 | 3261 | Q9UGN4 | CD300A |
| 170 | 3262 | Q08708 | CD300C |
| 171 | 3263 | Q496F6 | CD300E |
| 172 | 3264 | A8K4G0 | CD300LB |
| 173 | 3265 | Q6UXZ3 | CD300LD |
| 174 | 3266 | Q8TDQ1 | CD300LF |
| 175 | 3267 | Q6UXG3 | CD300LG |
| 176 | 3268 | Q8IX05 | CD302 |
| 177 | 3269 | Q9NPF0 | CD320 |
| 178 | 3270 | P20138 | CD33 |
| 179 | 3271 | P28906 | CD34 |
| 180 | 3272 | P16671 | CD36 |
| 181 | 3273 | P11049 | CD37 |
| 182 | 3274 | P28907 | CD38 |
| 183 | 3275 | P04234 | CD3D |
| 184 | 3276 | P07766 | CD3E |
| 185 | 3277 | P09693 | CD3G |
| 186 | 3278 | P01730 | CD4 |
| 187 | 3279 | P29965 | CD40LG |
| 188 | 3280 | P16070 | CD44 |
| 189 | 3281 | Q08722 | CD47 |
| 190 | 3282 | P09326 | CD48 |
| 191 | 3283 | P06127 | CD5 |
| 192 | 3284 | P19397 | CD53 |
| 193 | 3285 | P08174 | CD55 |
| 194 | 3286 | P19256 | CD58 |
| 195 | 3287 | P13987 | CD59 |
| 196 | 3288 | P30203 | CD6 |
| 197 | 3289 | P08962 | CD63 |
| 198 | 3290 | Q07108 | CD69 |
| 199 | 3291 | P09564 | CD7 |
| 200 | 3292 | P32970 | CD70 |
| 201 | 3293 | P21854 | CD72 |
| 202 | 3294 | P04233 | CD74 |
| 203 | 3295 | P11912 | CD79A |
| 204 | 3296 | P40259 | CD79B |
| 205 | 3297 | P33681 | CD80 |
| 206 | 3298 | P60033 | CD81 |
| 207 | 3299 | P27701 | CD82 |
| 208 | 3300 | Q01151 | CD83 |
| 209 | 3301 | Q9UIB8 | CD84 |
| 210 | 3302 | P42081 | CD86 |
| 211 | 3303 | P01732 | CD8A |
| 212 | 3304 | P10966 | CD8B |
| 213 | 3305 | A6NJW9 | CD8B2 |
| 214 | 3306 | P21926 | CD9 |
| 215 | 3307 | P40200 | CD96 |
| 216 | 3308 | P14209 | CD99 |
| 217 | 3309 | P12830 | CDH1 |
| 218 | 3310 | Q9Y6N8 | CDH10 |
| 219 | 3311 | P55287 | CDH11 |
| 220 | 3312 | P55289 | CDH12 |
| 221 | 3313 | P55290 | CDH13 |
| 222 | 3314 | P55291 | CDH15 |
| 223 | 3315 | O75309 | CDH16 |
| 224 | 3316 | Q12864 | CDH17 |
| 225 | 3317 | Q13634 | CDH18 |
| 226 | 3318 | Q9H159 | CDH19 |
| 227 | 3319 | P19022 | CDH2 |
| 228 | 3320 | Q9HBT6 | CDH20 |
| 229 | 3321 | Q9UJ99 | CDH22 |
| 230 | 3322 | Q9H251 | CDH23 |
| 231 | 3323 | Q86UP0 | CDH24 |
| 232 | 3324 | Q8IXH8 | CDH26 |
| 233 | 3325 | P22223 | CDH3 |
| 234 | 3326 | P55283 | CDH4 |
| 235 | 3327 | P33151 | CDH5 |
| 236 | 3328 | P55285 | CDH6 |
| 237 | 3329 | Q9ULB5 | CDH7 |
| 238 | 3330 | P55286 | CDH8 |
| 239 | 3331 | Q9ULB4 | CDH9 |
| 240 | 3332 | Q4KMG0 | CDON |
| 241 | 3333 | O43827 | CDT6 |
| 242 | 3334 | P13688 | CEACAM1 |
| 243 | 3335 | Q2WEN9 | CEACAM16 |
| 244 | 3336 | A8MTB9 | CEACAM18 |
| 245 | 3337 | Q7Z692 | CEACAM19 |
| 246 | 3338 | Q6UY09 | CEACAM20 |
| 247 | 3339 | Q3KPI0 | CEACAM21 |
| 248 | 3340 | P40198 | CEACAM3 |
| 249 | 3341 | O75871 | CEACAM4 |
| 250 | 3342 | P06731 | CEACAM5 |
| 251 | 3343 | P40199 | CEACAM6 |
| 252 | 3344 | Q14002 | CEACAM7 |
| 253 | 3345 | P31997 | CEACAM8 |
| 254 | 3346 | P0CG37 | CFC1 |
| 255 | 3347 | P0CG36 | CFC1B |
| 256 | 3348 | P00746 | CFD |
| 257 | 3349 | P08603 | CFH |
| 258 | 3350 | Q92496 | CFHR4 |
| 259 | 3351 | P05156 | CFI |
| 260 | 3352 | O15335 | CHAD |
| 261 | 3353 | Q6NUI6 | CHADL |
| 262 | 3354 | O00533 | CHL1 |
| 263 | 3355 | Q9H9P2 | CHODL |
| 264 | 3356 | O75339 | CILP |
| 265 | 3357 | Q8IUL8 | CILP2 |
| 266 | 3358 | QOUQC9 | CLCA2 |
| 267 | 3359 | Q14CN2 | CLCA4 |
| 268 | 3360 | Q8WXI8 | CLEC-6 |
| 269 | 3361 | Q8IUN9 | CLEC10A |
| 270 | 3362 | Q9Y240 | CLEC11A |
| 271 | 3363 | Q5QGZ9 | CLEC12A |
| 272 | 3364 | Q2HXU8 | CLEC12B |
| 273 | 3365 | Q86T13 | CLEC14A |
| 274 | 3366 | Q6ZS10 | CLEC17A |
| 275 | 3367 | Q6UXF7 | CLEC18A |
| 276 | 3368 | A5D8T8 | CLEC18A |
| 277 | 3369 | Q6UXS0 | CLEC19A |
| 278 | 3370 | Q8NC01 | CLEC1A |
| 279 | 3371 | Q9P126 | CLEC1B |
| 280 | 3372 | Q92478 | CLEC2B |
| 281 | 3373 | Q9UHP7 | CLEC2D |
| 282 | 3374 | O75596 | CLEC3A |
| 283 | 3375 | Q9UMR7 | CLEC4A |
| 284 | 3376 | Q8WTT0 | CLEC4C |
| 285 | 3377 | Q9ULY5 | CLEC4E |
| 286 | 3378 | Q8N1N0 | CLEC4F |
| 287 | 3379 | Q6UXB4 | CLEC4G |
| 288 | 3380 | Q9H2X3 | CLEC4M |
| 289 | 3381 | Q9NY25 | CLEC5A |
| 290 | 3382 | Q6EIG7 | CLEC6A |
| 291 | 3383 | Q9BXN2 | CLEC7A |
| 292 | 3384 | Q6UXN8 | CLEC9A |
| 293 | 3385 | Q8IZS7 | CLECL1 |
| 294 | 3386 | P26992 | CNTFR |
| 295 | 3387 | Q12860 | CNTN1 |
| 296 | 3388 | Q02246 | CNTN2 |
| 297 | 3389 | Q9P232 | CNTN3 |
| 298 | 3390 | Q8IWV2 | CNTN4 |
| 299 | 3391 | O94779 | CNTN5 |
| 300 | 3392 | Q9UQ52 | CNTN6 |
| 301 | 3393 | P78357 | CNTNAP1 |
| 302 | 3394 | Q9UHC6 | CNTNAP2 |
| 303 | 3395 | Q9BZ76 | CNTNAP3 |
| 304 | 3396 | Q9C0A0 | CNTNAP4 |
| 305 | 3397 | Q8WYK1 | CNTNAP5 |
| 306 | 3398 | Q05707 | COL14A1 |
| 307 | 3399 | Q9P218 | COL20A1 |
| 308 | 3400 | Q9Y6Z7 | COLEC10 |
| 309 | 3401 | Q9BWP8 | COLEC11 |
| 310 | 3402 | Q5KU26 | COLEC12 |
| 311 | 3403 | P49747 | COMP |
| 312 | 3404 | Q8IZJ3 | CPAMD8 |
| 313 | 3405 | P22792 | CPN2 |
| 314 | 3406 | P82279 | CRB1 |
| 315 | 3407 | Q96HD1 | CRELD1 |
| 316 | 3408 | Q6UXH1 | CRELD2 |
| 317 | 3409 | O75462 | CRLF1 |
| 318 | 3410 | Q9HC73 | CRLF2 |
| 319 | 3411 | Q9NQ79 | CRTAC1 |
| 320 | 3412 | O95727 | CRTAM |
| 321 | 3413 | P07333 | CSF1R |
| 322 | 3414 | P04141 | CSF2 |
| 323 | 3415 | P15509 | CSF2RA |
| 324 | 3416 | P32927 | CSF2RB |
| 325 | 3417 | P09919 | CSF3 |
| 326 | 3418 | Q99062 | CSF3R |
| 327 | 3419 | O95196 | CSPG5 |
| 328 | 3420 | P16410 | CTLA4 |
| 329 | 3421 | P78423 | CX3CL1 |
| 330 | 3422 | P78310 | CXADR |
| 331 | 3423 | P09341 | CXCL1 |
| 332 | 3424 | P02778 | CXCL10 |
| 333 | 3425 | O14625 | CXCL11 |
| 334 | 3426 | P48061 | CXCL12 |
| 335 | 3427 | O43927 | CXCL13 |
| 336 | 3428 | O95715 | CXCL14 |
| 337 | 3429 | Q9H2A7 | CXCL16 |
| 338 | 3430 | Q6UXB2 | CXCL17 |
| 339 | 3431 | P19875 | CXCL2 |
| 340 | 3432 | P19876 | CXCL3 |
| 341 | 3433 | P42830 | CXCL5 |
| 342 | 3434 | P80162 | CXCL6 |
| 343 | 3435 | Q07325 | CXCL9 |
| 344 | 3436 | Q14118 | DAG1 |
| 345 | 3437 | Q8N907 | DAND5 |
| 346 | 3438 | P07585 | DCN |
| 347 | 3439 | Q5T197 | DCST1 |
| 348 | 3440 | Q9H295 | DCSTAMP |
| 349 | 3441 | P59665 | DEFA1 |
| 350 | 3442 | B2R9L8 | Delta |
| 351 | 3443 | P98153 | DGCR2 |
| 352 | 3444 | Q68D85 | DKFZp686O24166 |
| 353 | 3445 | P80370 | DLK1 |
| 354 | 3446 | Q6UY11 | DLK2 |
| 355 | 3447 | O00548 | DLL1 |
| 356 | 3448 | Q9NYJ7 | DLL3 |
| 357 | 3449 | Q9NR61 | DLL4 |
| 358 | 3450 | Q8NFT8 | DNER |
| 359 | 3451 | Q02487 | DSC2 |
| 360 | 3452 | Q14574 | DSC3 |
| 361 | 3453 | Q14126 | DSG2 |
| 362 | 3454 | P32926 | DSG3 |
| 363 | 3455 | Q86SJ6 | DSG4 |
| 364 | 3456 | Q14213 | EBI3 |
| 365 | 3457 | O94769 | ECM2 |
| 366 | 3458 | Q92838 | EDA |
| 367 | 3459 | Q9HAV5 | EDA2R |
| 368 | 3460 | Q9UNE0 | EDAR |
| 369 | 3461 | O43854 | EDIL3 |
| 370 | 3462 | Q12805 | EFEMP1 |
| 371 | 3463 | O95967 | EFEMP2 |
| 372 | 3464 | P20827 | EFNA1 |
| 373 | 3465 | O43921 | EFNA2 |
| 374 | 3466 | P52797 | EFNA3 |
| 375 | 3467 | P52803 | EFNA5 |
| 376 | 3468 | P98172 | EFNB1 |
| 377 | 3469 | P52799 | EFNB2 |
| 378 | 3470 | Q15768 | EFNB3 |
| 379 | 3471 | P01133 | EGF |
| 380 | 3472 | O75095 | EGFL3 |
| 381 | 3473 | Q8IUX8 | EGFL6 |
| 382 | 3474 | Q9UHF1 | EGFL7 |
| 383 | 3475 | Q63HQ2 | EGFLAM |
| 384 | 3476 | P00533 | EGFR |
| 385 | 3477 | P0C7U0 | ELFN1 |
| 386 | 3478 | Q5R3F8 | ELFN2 |
| 387 | 3479 | Q96BH3 | ELSPBP1 |
| 388 | 3480 | Q9HBW9 | ELTD1 |
| 389 | 3481 | Q6PCB8 | EMB |
| 390 | 3482 | Q9ULC0 | EMCN |
| 391 | 3483 | Q14246 | EMR1 |
| 392 | 3484 | P22413 | ENPP1 |
| 393 | 3485 | P49961 | ENTPD1 |
| 394 | 3486 | O75355 | ENTPD3 |
| 395 | 3487 | Q6UW88 | EPGN |
| 396 | 3488 | P21709 | EPHA1 |
| 397 | 3489 | Q5JZY3 | EPHA10 |
| 398 | 3490 | P29317 | EPHA2 |
| 399 | 3491 | P29320 | EPHA3 |
| 400 | 3492 | P54764 | EPHA4 |
| 401 | 3493 | P54756 | EPHA5 |
| 402 | 3494 | Q9UF33 | EPHA6 |
| 403 | 3495 | Q15375 | EPHA7 |
| 404 | 3496 | P29322 | EPHA8 |
| 405 | 3497 | P54762 | EPHB1 |
| 406 | 3498 | P29323 | EPHB2 |
| 407 | 3499 | P54753 | EPHB3 |
| 408 | 3500 | P54760 | EPHB4 |
| 409 | 3501 | O15197 | EPHB6 |
| 410 | 3502 | P01588 | EPO |
| 411 | 3503 | P19235 | EPOR |
| 412 | 3504 | Q99645 | EPYC |
| 413 | 3505 | P04626 | ERBB2 |
| 414 | 3506 | P21860 | ERBB3 |
| 415 | 3507 | Q15303 | ERBB4 |
| 416 | 3508 | O14944 | EREG |
| 417 | 3509 | Q96PL5 | ERMAP |
| 418 | 3510 | Q96AP7 | ESAM |
| 419 | 3511 | Q5T1H1 | EYS |
| 420 | 3512 | P00742 | F10 |
| 421 | 3513 | Q9Y624 | F11R |
| 422 | 3514 | P00748 | F12 |
| 423 | 3515 | P00488 | F13A1 |
| 424 | 3516 | P13726 | F3 |
| 425 | 3517 | P08709 | F7 |
| 426 | 3518 | P00740 | F9 |
| 427 | 3519 | Q4G0M1 | FAM132B |
| 428 | 3520 | Q5VUB5 | FAM171A1 |
| 429 | 3521 | A6NFU0 | FAM187A |
| 430 | 3522 | Q17R55 | FAM187B |
| 431 | 3523 | Q8IXL6 | FAM20C |
| 432 | 3524 | Q9NYQ8 | FAT2 |
| 433 | 3525 | P23142 | FBLN1 |
| 434 | 3526 | P98095 | FBLN2 |
| 435 | 3527 | Q9UBX5 | FBLN5 |
| 436 | 3528 | Q53RD9 | FBLN7 |
| 437 | 3529 | P35556 | FBN2 |
| 438 | 3530 | Q75N90 | FBN3 |
| 439 | 3531 | Q8WWV6 | FCAMR |
| 440 | 3532 | P24071 | FCAR |
| 441 | 3533 | P12319 | FCER1A |
| 442 | 3534 | P06734 | FCER2 |
| 443 | 3535 | P12314 | FCGR1A |
| 444 | 3536 | Q92637 | FCGR1B |
| 445 | 3537 | P12318 | FCGR2A |
| 446 | 3538 | P31994 | FCGR2B |
| 447 | 3539 | P31994 | FCGR2C |
| 448 | 3540 | P31995 | FCGR2C |
| 449 | 3541 | P08637 | FCGR3A |
| 450 | 3542 | P08637 | FCGR3A |
| 451 | 3543 | P55899 | FCGRT |
| 452 | 3544 | O60667 | FCMR |
| 453 | 3545 | Q96LA6 | FCRL1 |
| 454 | 3546 | Q96LA5 | FCRL2 |
| 455 | 3547 | Q96P31 | FCRL3 |
| 456 | 3548 | Q96PJ5 | FCRL4 |
| 457 | 3549 | Q96RD9 | FCRL5 |
| 458 | 3550 | Q6DN72 | FCRL6 |
| 459 | 3551 | Q6BAA4 | FCRLB |
| 460 | 3552 | Q7L513 | FCRLM1 |
| 461 | 3553 | P05230 | FGF1 |
| 462 | 3554 | O15520 | FGF10 |
| 463 | 3555 | O43320 | FGF16 |
| 464 | 3556 | O60258 | FGF17 |
| 465 | 3557 | O76093 | FGF18 |
| 466 | 3558 | O95750 | FGF19 |
| 467 | 3559 | Q9NP95 | FGF20 |
| 468 | 3560 | Q9NSA1 | FGF21 |
| 469 | 3561 | Q9GZV9 | FGF23 |
| 470 | 3562 | P11487 | FGF3 |
| 471 | 3563 | P12034 | FGF5 |
| 472 | 3564 | P10767 | FGF6 |
| 473 | 3565 | P21781 | FGF7 |
| 474 | 3566 | P31371 | FGF9 |
| 475 | 3567 | Q14512 | FGFBP1 |
| 476 | 3568 | Q8TAT2 | FGFBP3 |
| 477 | 3569 | P11362 | FGFR1 |
| 478 | 3570 | P21802 | FGFR2 |
| 479 | 3571 | P22607 | FGFR3 |
| 480 | 3572 | P22455 | FGFR4 |
| 481 | 3573 | Q8N441 | FGFRL1 |
| 482 | 3574 | O43915 | FIGF |
| 483 | 3575 | Q6NSJ5 | FLJ23420 |
| 484 | 3576 | Q9NZU1 | FLRT1 |
| 485 | 3577 | O43155 | FLRT2 |
| 486 | 3578 | Q9NZU0 | FLRT3 |
| 487 | 3579 | P17948 | FLT1 |
| 488 | 3580 | P36888 | FLT3 |
| 489 | 3581 | Q06828 | FMOD |
| 490 | 3582 | P02751 | FN1 |
| 491 | 3583 | Q9H6D8 | FNDC4 |
| 492 | 3584 | Q8NAU1 | FNDC5 |
| 493 | 3585 | Q5VTL7 | FNDC7 |
| 494 | 3586 | Q5H8C1 | FREM1 |
| 495 | 3587 | P23945 | FSHR |
| 496 | 3588 | Q6MZW2 | FSTL4 |
| 497 | 3589 | Q8N475 | FSTL5 |
| 498 | 3590 | P05161 | G1P2 |
| 499 | 3591 | Q14393 | GAS6 |
| 500 | 3592 | P55107 | GDF10 |
| 501 | 3593 | O95390 | GDF11 |
| 502 | 3594 | Q99988 | GDF15 |
| 503 | 3595 | Q9UK05 | GDF2 |
| 504 | 3596 | Q9NR23 | GDF3 |
| 505 | 3597 | P43026 | GDF5 |
| 506 | 3598 | Q6KF10 | GDF6 |
| 507 | 3599 | O14793 | GDF8 |
| 508 | 3600 | O60383 | GDF9 |
| 509 | 3601 | P39905 | GDNF |
| 510 | 3602 | P56159 | GFRA1 |
| 511 | 3603 | O00451 | GFRA2 |
| 512 | 3604 | O60609 | GFRA3 |
| 513 | 3605 | Q9GZZ7 | GFRA4 |
| 514 | 3606 | P10912 | GHR |
| 515 | 3607 | Q9Y5U5 | GITR |
| 516 | 3608 | Q99445 | GML |
| 517 | 3609 | P22749 | GNLY |
| 518 | 3610 | P07359 | GP1BA |
| 519 | 3611 | P13224 | GP1BB |
| 520 | 3612 | P55259 | GP2 |
| 521 | 3613 | P40197 | GP5 |
| 522 | 3614 | Q9HCN6 | GP6 |
| 523 | 3615 | P14770 | GP9 |
| 524 | 3616 | Q99795 | GPA33 |
| 525 | 3617 | P06744 | GPI |
| 526 | 3618 | Q8IV16 | GPIHBP1 |
| 527 | 3619 | Q14956 | GPNMB |
| 528 | 3620 | P08236 | GUSB |
| 529 | 3621 | Q14520 | HABP2 |
| 530 | 3622 | P81172 | HAMP |
| 531 | 3623 | P10915 | HAPLN1 |
| 532 | 3624 | Q9GZV7 | HAPLN2 |
| 533 | 3625 | Q96S86 | HAPLN3 |
| 534 | 3626 | Q86UW8 | HAPLN4 |
| 535 | 3627 | Q96D42 | HAVCR1 |
| 536 | 3628 | Q8TDQ0 | HAVCR2 |
| 537 | 3629 | Q99075 | HBEGF |
| 538 | 3630 | Q14CZ8 | HEPACAM |
| 539 | 3631 | A8MVW5 | HEPACAM2 |
| 540 | 3632 | Q30201 | HFE |
| 541 | 3633 | P14210 | HGF |
| 542 | 3634 | Q04756 | HGFAC |
| 543 | 3635 | Q96QV1 | HHIP |
| 544 | 3636 | Q9UM44 | HHLA2 |
| 545 | 3637 | P01893 | HLA |
| 546 | 3638 | P01889 | HLA |
| 547 | 3639 | P01891 | HLA |
| 548 | 3640 | P01892 | HLA |
| 549 | 3641 | P30685 | HLA |
| 550 | 3642 | P04439 | HLA-A |
| 551 | 3643 | P01889 | HLA-B |
| 552 | 3644 | P10321 | HLA-C |
| 553 | 3645 | P28067 | HLA-DMA |
| 554 | 3646 | P28068 | HLA-DMB |
| 555 | 3647 | P06340 | HLA-DOA |
| 556 | 3648 | P13765 | HLA-DOB |
| 557 | 3649 | P20036 | HLA-DPA1 |
| 558 | 3650 | P04440 | HLA-DPB1 |
| 559 | 3651 | P01909 | HLA-DQA1 |
| 560 | 3652 | P01920 | HLA-DQB1 |
| 561 | 3653 | P01903 | HLA-DRA |
| 562 | 3654 | P01911 | HLA-DRB1 |
| 563 | 3655 | P13747 | HLA-E |
| 564 | 3656 | P30511 | HLA-F |
| 565 | 3657 | P17693 | HLA-G |
| 566 | 3658 | P09429 | HMGB1 |
| 567 | 3659 | P26583 | HMGB2 |
| 568 | 3660 | Q12794 | HYAL1 |
| 569 | 3661 | Q12891 | HYAL2 |
| 570 | 3662 | O43820 | HYAL3 |
| 571 | 3663 | P05362 | ICAM1 |
| 572 | 3664 | P13598 | ICAM2 |
| 573 | 3665 | P32942 | ICAM3 |
| 574 | 3666 | Q14773 | ICAM4 |
| 575 | 3667 | Q9UMF0 | ICAM5 |
| 576 | 3668 | Q9Y6W8 | ICOS |
| 577 | 3669 | O75144 | ICOSLG |
| 578 | 3670 | A6NMD0 | IFITM10 |
| 579 | 3671 | P01566 | IFNA10 |
| 580 | 3672 | P01562 | IFNA13 |
| 581 | 3673 | P01570 | IFNA14 |
| 582 | 3674 | P05015 | IFNA16 |
| 583 | 3675 | P01571 | IFNA17 |
| 584 | 3676 | P01571 | IFNA17 |
| 585 | 3677 | P01563 | IFNA2 |
| 586 | 3678 | P01568 | IFNA21 |
| 587 | 3679 | P01567 | IFNA4 |
| 588 | 3680 | P01569 | IFNA5 |
| 589 | 3681 | P05013 | IFNA6 |
| 590 | 3682 | P32881 | IFNA8 |
| 591 | 3683 | P17181 | IFNAR1 |
| 592 | 3684 | P48551 | IFNAR2 |
| 593 | 3685 | P01574 | IFNB1 |
| 594 | 3686 | Q86WN2 | IFNE |
| 595 | 3687 | P01579 | IFNG |
| 596 | 3688 | P15260 | IFNGR1 |
| 597 | 3689 | P38484 | IFNGR2 |
| 598 | 3690 | Q9P0W0 | IFNK |
| 599 | 3691 | Q8IZJ0 | IFNL2 |
| 600 | 3692 | P05000 | IFNW1 |
| 601 | 3693 | Q8IVU1 | IGDCC3 |
| | 3694 | P08069 | IGF1R |
| 602 | 3695 | P01344 | IGF2 |
| 603 | 3696 | P11717 | IGF2R |
| 604 | 3697 | P35858 | IGFALS |
| 605 | 3698 | Q16270 | IGFBP7 |
| 606 | 3699 | Q8WX77 | IGFBPL1 |
| 607 | 3700 | Q6UW32 | IGFL1 |
| 608 | 3701 | Q6UWQ7 | IGFL2 |
| 609 | 3702 | Q6UXB1 | IGFL3 |
| 610 | 3703 | A6NJ69 | IGIP |
| 611 | 3704 | P15814 | IGLL1 |
| 612 | 3705 | B9A064 | IGLL5 |
| 613 | 3706 | A6NGN9 | IGLON5 |
| 614 | 3707 | Q8N6C5 | IGSF1 |
| 615 | 3708 | Q6WRI0 | IGSF10 |
| 616 | 3709 | Q5DX21 | IGSF11 |
| 617 | 3710 | Q96ID5 | IGSF21 |
| 618 | 3711 | O75054 | IGSF3 |
| 619 | 3712 | Q8N126 | IGSF4B |
| 620 | 3713 | Q8NFZ8 | IGSF4C |
| 621 | 3714 | Q9NSI5 | IGSF5 |
| 622 | 3715 | O95976 | IGSF6 |
| 623 | 3716 | Q969P0 | IGSF8 |
| 624 | 3717 | Q9P212 | IGSF9 |
| 625 | 3718 | P22301 | IL10 |
| 626 | 3719 | Q13651 | IL10RA |
| 627 | 3720 | Q08334 | IL10RB |
| 628 | 3721 | P20809 | IL11 |
| 629 | 3722 | Q14626 | IL11RA |
| 630 | 3723 | P29459 | IL12A |
| 631 | 3724 | P29460 | IL12B |
| 632 | 3725 | P42701 | IL12RB1 |
| 633 | 3726 | Q99665 | IL12RB2 |
| 634 | 3727 | P35225 | IL13 |
| 635 | 3728 | P78552 | IL13RA1 |
| 636 | 3729 | Q14627 | IL13RA2 |
| 637 | 3730 | P40933 | IL15 |
| 638 | 3731 | Q13261 | IL15RA |
| 639 | 3732 | Q14005 | IL16 |
| 640 | 3733 | Q16552 | IL17A |
| 641 | 3734 | Q9UHF5 | IL17B |
| 642 | 3735 | Q9NRM6 | IL17BR |
| 643 | 3736 | Q9P0M4 | IL17C |
| 644 | 3737 | Q8TAD2 | IL17D |
| 645 | 3738 | Q96PD4 | IL17F |
| 646 | 3739 | Q96F46 | IL17RA |
| 647 | 3740 | Q8NAC3 | IL17RC |
| 648 | 3741 | Q8NFM7 | IL17RD |
| 649 | 3742 | Q8NFR9 | IL17RE |
| 650 | 3743 | Q14116 | IL18 |
| 651 | 3744 | O95998 | IL18BP |
| 652 | 3745 | Q13478 | IL18R1 |
| 653 | 3746 | O95256 | IL18RAP |
| 654 | 3747 | Q9UHD0 | IL19 |
| 655 | 3748 | P01583 | IL1A |
| 656 | 3749 | P01584 | IL1B |
| 657 | 3750 | Q8WWZ1 | IL1F10 |
| 658 | 3751 | Q9UBH0 | IL1F5 |
| 659 | 3752 | Q9UHA7 | ILIF6 |
| 660 | 3753 | Q9NZH6 | IL1F7 |
| 661 | 3754 | Q9NZH8 | IL1F9 |
| 662 | 3755 | P14778 | ILIR1 |
| 663 | 3756 | P27930 | ILIR2 |
| 664 | 3757 | Q9NPH3 | IL1RAP |
| 665 | 3758 | Q9NZN1 | IL1RAPL1 |
| 666 | 3759 | Q9NP60 | IL1RAPL2 |
| 667 | 3760 | Q01638 | IL1RL1 |
| 668 | 3761 | Q9HB29 | IL1RL2 |
| 669 | 3762 | P18510 | IL1RN |
| 670 | 3763 | P60568 | IL2 |
| 671 | 3764 | Q9NYY1 | IL20 |
| 672 | 3765 | Q9UHF4 | IL20RA |
| 673 | 3766 | Q6UXL0 | IL20RB |
| 674 | 3767 | Q9HBE4 | IL21 |
| 675 | 3768 | Q9HBE5 | IL21R |
| 676 | 3769 | Q9GZX6 | IL22 |
| 677 | 3770 | Q8N6P7 | IL22RA1 |
| 678 | 3771 | Q969J5 | IL22RA2 |
| 679 | 3772 | Q9NPF7 | IL23A |
| 680 | 3773 | Q5VWK5 | IL23R |
| 681 | 3774 | Q13007 | IL24 |
| 682 | 3775 | Q9H293 | IL25 |
| 683 | 3776 | Q9NPH9 | IL26 |
| 684 | 3777 | Q8NEV9 | IL27 |
| 685 | 3778 | Q6UWB1 | IL27RA |
| 686 | 3779 | Q8IZI9 | IL28B |
| 687 | 3780 | Q8IU57 | IL28RA |
| 688 | 3781 | Q8IU54 | IL29 |
| 689 | 3782 | P01589 | IL2RA |
| 690 | 3783 | P14784 | IL2RB |
| 691 | 3784 | P31785 | IL2RG |
| 692 | 3785 | P08700 | IL3 |
| 693 | 3786 | Q6EBC2 | IL31 |
| 694 | 3787 | Q8NI17 | IL31RA |
| 695 | 3788 | P24001 | IL32 |
| 696 | 3789 | O95760 | IL33 |
| 697 | 3790 | Q6ZMJ4 | IL34 |
| 698 | 3791 | Q9NZH7 | IL36B |
| 699 | 3792 | P26951 | IL3RA |
| 700 | 3793 | P05112 | IL4 |
| 701 | 3794 | P24394 | IL4R |
| 702 | 3795 | P05113 | IL5 |
| 703 | 3796 | Q01344 | IL5RA |
| 704 | 3797 | P05231 | IL6 |
| 705 | 3798 | P08887 | IL6R |
| 706 | 3799 | P40189 | IL6ST |
| 707 | 3800 | P13232 | IL7 |
| 708 | 3801 | P16871 | IL7R |
| 709 | 3802 | P10145 | IL8 |
| 710 | 3803 | P25025 | IL8RB |
| 711 | 3804 | P15248 | IL9 |
| 712 | 3805 | Q01113 | IL9R |
| 713 | 3806 | Q86SU0 | ILDR1 |
| 714 | 3807 | Q9BZV3 | IMPG2 |
| 715 | 3808 | K9M1U5 | INFL4 |
| 716 | 3809 | P01308 | INS |
| 717 | 3810 | P51460 | INSL3 |
| 718 | 3811 | Q9Y5Q6 | INSL5 |
| 719 | 3812 | Q9Y581 | INSL6 |
| 720 | 3813 | P06213 | INSR |
| 721 | 3814 | O14498 | ISLR |
| 722 | 3815 | Q6UXK2 | ISLR2 |
| 723 | 3816 | P56199 | ITGA1 |
| 724 | 3817 | P17301 | ITGA2 |
| 725 | 3818 | P08514 | ITGA2B |
| 726 | 3819 | P26006 | ITGA3 |
| 727 | 3820 | P13612 | ITGA4 |
| 728 | 3821 | P08648 | ITGA5 |
| 729 | 3822 | P23229 | ITGA6 |
| 730 | 3823 | Q13683 | ITGA7 |
| 731 | 3824 | P53708 | ITGA8 |
| 732 | 3825 | Q13797 | ITGA9 |
| 733 | 3826 | P38570 | ITGAE |
| 734 | 3827 | P20701 | ITGAL |
| 735 | 3828 | P11215 | ITGAM |
| 736 | 3829 | P06756 | ITGAV |
| 737 | 3830 | P20702 | ITGAX |
| 738 | 3831 | P05556 | ITGB1 |
| 739 | 3832 | P05107 | ITGB2 |
| 740 | 3833 | P05106 | ITGB3 |
| 741 | 3834 | P18084 | ITGB5 |
| 742 | 3835 | P18564 | ITGB6 |
| 743 | 3836 | P26010 | ITGB7 |
| 744 | 3837 | P26012 | ITGB8 |
| 745 | 3838 | O95965 | ITGBL1 |
| 746 | 3839 | Q8IYV9 | IZUMO |
| 747 | 3840 | P78504 | JAG1 |
| 748 | 3841 | Q9Y219 | JAG2 |
| 749 | 3842 | P57087 | JAM2 |
| 750 | 3843 | Q9BX67 | JAM3 |
| 751 | 3844 | P01591 | JCHAIN |
| 752 | 3845 | P23352 | KAL1 |
| 753 | 3846 | Q96I82 | KAZALD1 |
| 754 | 3847 | Q6UW63 | KDELC1 |
| 755 | 3848 | Q7ZAH8 | KDELC2 |
| 756 | 3849 | P35968 | KDR |
| 757 | 3850 | O60938 | KERA |
| 758 | 3851 | Q5VV43 | KIAA0319 |
| 759 | 3852 | Q8IZA0 | KIAA0319L |
| 760 | 3853 | P43626 | KIR2DL2 |
| 761 | 3854 | P43627 | KIR2DL3 |
| 762 | 3855 | P43628 | KIR2DL3 |
| 763 | 3856 | Q99706 | KIR2DL4 |
| 764 | 3857 | Q8NHK3 | KIR2DL5B |
| 765 | 3858 | Q8N109 | KIR2DL5B |
| 766 | 3859 | P43631 | KIR2DS2 |
| 767 | 3860 | Q14952 | KIR2DS3 |
| 768 | 3861 | Q14954 | KIR2DS4 |
| 769 | 3862 | P43632 | KIR2DS4 |
| 770 | 3863 | Q14953 | KIR2DS5 |
| 771 | 3864 | P43629 | KIR3DL1 |
| 772 | 3865 | P43630 | KIR3DL2 |
| 773 | 3866 | Q8N743 | KIR3DL3 |
| 774 | 3867 | A8MWS1 | KIR3DP1 |
| 775 | 3868 | Q14943 | KIR3DS1 |
| 776 | 3869 | Q9H7L2 | KIR3DX1 |
| 777 | 3870 | Q96J84 | KIRREL |
| 778 | 3871 | Q6UWL6 | KIRREL2 |
| 779 | 3872 | Q8IZU9 | KIRREL3 |
| 780 | 3873 | P10721 | KIT |
| 781 | 3874 | P21583 | KITLG |
| 782 | 3875 | Q12918 | KLRB1 |
| 783 | 3876 | P26715 | KLRC1 |
| 784 | 3877 | P26717 | KLRC2 |
| 785 | 3878 | Q07444 | KLRC3 |
| 786 | 3879 | Q13241 | KLRD1 |
| 787 | 3880 | Q9NZS2 | KLRF1 |
| 788 | 3881 | D3W0D1 | KLRF2 |
| 789 | 3882 | Q96E93 | KLRG1 |
| 790 | 3883 | P26718 | KLRK1 |
| 791 | 3884 | Q9BYJ0 | KSP37 |
| 792 | 3885 | P32004 | LICAM |
| 793 | 3886 | P18627 | LAG3 |
| 794 | 3887 | Q6GTX8 | LAIR1 |
| 795 | 3888 | Q6ISS4 | LAIR2 |
| 796 | 3889 | P25391 | LAMA1 |
| 797 | 3890 | Q16787 | LAMA3 |
| 798 | 3891 | P07942 | LAMB1 |
| 799 | 3892 | Q13751 | LAMB3 |
| 800 | 3893 | A4D0S4 | LAMB4 |
| 801 | 3894 | P11047 | LAMC1 |
| 802 | 3895 | Q13753 | LAMC2 |
| 803 | 3896 | Q6UX15 | LAYN |
| 804 | 3897 | P01130 | LDLR |
| 805 | 3898 | P48357 | LEPR |
| 806 | 3899 | O95970 | LGI1 |
| 807 | 3900 | Q8N0V4 | LGI2 |
| 808 | 3901 | Q8N145 | LGI3 |
| 809 | 3902 | Q8N135 | LGI4 |
| 810 | 3903 | Q9BXB1 | LGR4 |
| 811 | 3904 | O75473 | LGR5 |
| 812 | 3905 | Q9HBX8 | LGR6 |
| 813 | 3906 | Q8WXD0 | LGR8 |
| 814 | 3907 | P22888 | LHCGR |
| 815 | 3908 | P15018 | LIF |
| 816 | 3909 | P42702 | LIFR |
| 817 | 3910 | O75019 | LILRA1 |
| 818 | 3911 | Q8N149 | LILRA2 |
| 819 | 3912 | Q8N6C8 | LILRA3 |
| 820 | 3913 | P59901 | LILRA4 |
| 821 | 3914 | A6NI73 | LILRA5 |
| 822 | 3915 | Q8NHL6 | LILRB1 |
| 823 | 3916 | Q8N423 | LILRB2 |
| 824 | 3917 | O75022 | LILRB3 |
| 825 | 3918 | Q8NHJ6 | LILRB4 |
| 826 | 3919 | O75023 | LILRB5 |
| 827 | 3920 | Q6PI73 | LILRB6 |
| 828 | 3921 | Q96FE5 | LINGO1 |
| 829 | 3922 | Q7L985 | LINGO2 |
| 830 | 3923 | P0C6S8 | LINGO3 |
| 831 | 3924 | Q6UY18 | LINGO4 |
| 832 | 3925 | Q8NCF0 | LOC348174 |
| 833 | 3926 | P28300 | LOX |
| 834 | 3927 | Q08397 | LOXL1 |
| 835 | 3928 | Q96II8 | LRCH3 |
| 836 | 3929 | Q9P244 | LRFN1 |
| 837 | 3930 | Q9ULH4 | LRFN2 |
| 838 | 3931 | Q9BTN0 | LRFN3 |
| 839 | 3932 | Q6PJG9 | LRFN4 |
| 840 | 3933 | Q96NI6 | LRFN5 |
| 841 | 3934 | P02750 | LRG1 |
| 842 | 3935 | Q96JA1 | LRIG1 |
| 843 | 3936 | O94898 | LRIG2 |
| 844 | 3937 | Q6UXM1 | LRIG3 |
| 845 | 3938 | A6NDA9 | LRIT2 |
| 846 | 3939 | Q3SXY7 | LRIT3 |
| 847 | 3940 | Q86VZ4 | LRP11 |
| 848 | 3941 | O75096 | LRP4 |
| 849 | 3942 | O75197 | LRP5 |
| 850 | 3943 | O75581 | LRP6 |
| 851 | 3944 | Q14114 | LRP8 |
| 852 | 3945 | Q8TF66 | LRRC15 |
| 853 | 3946 | Q8N6Y2 | LRRC17 |
| 854 | 3947 | Q9H756 | LRRC19 |
| 855 | 3948 | Q9P2V4 | LRRC21 |
| 856 | 3949 | Q50LG9 | LRRC24 |
| 857 | 3950 | Q8N386 | LRRC25 |
| 858 | 3951 | Q2I0M4 | LRRC26 |
| 859 | 3952 | Q9BY71 | LRRC3 |
| 860 | 3953 | Q14392 | LRRC32 |
| 861 | 3954 | A6NMS7 | LRRC37A |
| 862 | 3955 | O60309 | LRRC37A3 |
| 863 | 3956 | Q96QE4 | LRRC37B |
| 864 | 3957 | Q5VT99 | LRRC38 |
| 865 | 3958 | Q96PB8 | LRRC3B |
| 866 | 3959 | A6NJW4 | LRRC3C |
| 867 | 3960 | Q9HBW1 | LRRC4 |
| 868 | 3961 | Q9NT99 | LRRC4B |
| 869 | 3962 | Q9HCJ2 | LRRC4C |
| 870 | 3963 | Q8N7C0 | LRRC52 |
| 871 | 3964 | Q6ZSA7 | LRRC55 |
| 872 | 3965 | Q7Z2Q7 | LRRC70 |
| 873 | 3966 | Q8IWT6 | LRRC8A |
| 874 | 3967 | Q6P9F7 | LRRC8B |
| 875 | 3968 | Q8TDW0 | LRRC8C |
| 876 | 3969 | Q7L1W4 | LRRC8D |
| 877 | 3970 | Q6UXK5 | LRRN1 |
| 878 | 3971 | Q9H3W5 | LRRN3 |
| 879 | 3972 | Q8WUT4 | LRRN4 |
| 880 | 3973 | Q8ND94 | LRRN4CL |
| 881 | 3974 | O75325 | LRRN5 |
| 882 | 3975 | Q86UE6 | LRRTM1 |
| 883 | 3976 | O43300 | LRRTM2 |
| 884 | 3977 | Q86VH5 | LRRTM3 |
| 885 | 3978 | Q86VH4 | LRRTM4 |
| 886 | 3979 | Q9HBL6 | LRTM1 |
| 887 | 3980 | Q8N967 | LRTM2 |
| 888 | 3981 | Q13449 | LSAMP |
| 889 | 3982 | Q86X29 | LSR |
| 890 | 3983 | P01374 | LTA |
| 891 | 3984 | Q06643 | LTB |
| 892 | 3985 | Q14766 | LTBP1 |
| 893 | 3986 | P36941 | LTBR |
| 894 | 3987 | P02788 | LTF |
| 895 | 3988 | P29376 | LTK |
| 896 | 3989 | P51884 | LUM |
| 897 | 3990 | Q14210 | LY6D |
| 898 | 3991 | Q16553 | LY6E |
| 899 | 3992 | Q8NDX9 | LY6G5B |
| 900 | 3993 | Q5SRR4 | LY6G5C |
| 901 | 3994 | O95867 | LY6G6C |
| 902 | 3995 | O95868 | LY6G6D |
| 903 | 3996 | Q5SQ64 | LY6G6F |
| 904 | 3997 | O94772 | LY6H |
| 905 | 3998 | Q17RY6 | LY6K |
| 906 | 3999 | H3BQJ8 | Ly6L |
| 907 | 4000 | O60449 | LY75 |
| 908 | 4001 | Q9HBG7 | LY9 |
| 909 | 4002 | Q9BZG9 | LYNX1 |
| 910 | 4003 | Q8N2G4 | LYPD1 |
| 911 | 4004 | Q6UXB3 | LYPD2 |
| 912 | 4005 | O95274 | LYPD3 |
| 913 | 4006 | Q6UWN0 | LYPD4 |
| 914 | 4007 | Q6UWN5 | LYPD5 |
| 915 | 4008 | Q86Y78 | LYPD6 |
| 916 | 4009 | Q8NI32 | LYPD6B |
| 917 | 4010 | Q6UX82 | LYPD8 |
| 918 | 4011 | Q13477 | MADCAM1 |
| 919 | 4012 | P20916 | MAG |
| 920 | 4013 | O00462 | MANBA |
| 921 | 4014 | P48740 | MASP1 |
| 922 | 4015 | P21941 | MATN1 |
| 923 | 4016 | O00339 | MATN2 |
| 924 | 4017 | O15232 | MATN3 |
| 925 | 4018 | O95460 | MATN4 |
| 926 | 4019 | P11226 | MBL2 |
| 927 | 4020 | P43121 | MCAM |
| 928 | 4021 | P15529 | MCP |
| 929 | 4022 | Q8NFP4 | MDGA1 |
| 930 | 4023 | Q7Z553 | MDGA2 |
| 931 | 4024 | Q96KG7 | MEGF10 |
| 932 | 4025 | A6BM72 | MEGF11 |
| 933 | 4026 | Q9H1U4 | MEGF9 |
| 934 | 4027 | Q16819 | MEP1A |
| 935 | 4028 | Q16820 | MEP1B |
| 936 | 4029 | Q12866 | MERTK |
| 937 | 4030 | P08581 | MET |
| 938 | 4031 | P55082 | MFAP3 |
| 939 | 4032 | O75121 | MFAP3L |
| 940 | 4033 | Q08431 | MFGE8 |
| 941 | 4034 | P08582 | MFI2 |
| 942 | 4035 | Q29983 | MICA |
| 943 | 4036 | Q29980 | MICB |
| 944 | 4037 | P14174 | MIF |
| 945 | 4038 | Q7Z6M3 | MILR1 |
| 946 | 4039 | P51511 | MMP15 |
| 947 | 4040 | P51512 | MMP16 |
| 948 | 4041 | Q9ULZ9 | MMP17 |
| 949 | 4042 | P08253 | MMP2 |
| 950 | 4043 | Q9Y5R2 | MMP24 |
| 951 | 4044 | Q9H239 | MMP28 |
| 952 | 4045 | P14780 | MMP9 |
| 953 | 4046 | Q13201 | MMRN1 |
| 954 | 4047 | Q16653 | MOG |
| 955 | 4048 | P40238 | MPL |
| 956 | 4049 | P25189 | MPZ |
| 957 | 4050 | O95297 | MPZL1 |
| 958 | 4051 | O60487 | MPZL2 |
| 959 | 4052 | Q6UWV2 | MPZL3 |
| 960 | 4053 | Q95460 | MR1 |
| 961 | 4054 | P22897 | MRC1 |
| 962 | 4055 | Q9UBG0 | MRC2 |
| 963 | 4056 | P21757 | MSR1 |
| 964 | 4057 | P26927 | MST1 |
| 965 | 4058 | P15941 | MUC1 |
| 966 | 4059 | Q9H3R2 | MUC13 |
| 967 | 4060 | Q685J3 | MUC17 |
| 968 | 4061 | Q8N307 | MUC20 |
| 969 | 4062 | Q5SSG8 | MUC21 |
| 970 | 4063 | P98088 | MUC5AC |
| 971 | 4064 | O15146 | MUSK |
| 972 | 4065 | Q9BRK3 | MXRA8 |
| 973 | 4066 | Q9UK23 | NAGPA |
| 974 | 4067 | P13591 | NCAM1 |
| 975 | 4068 | O15394 | NCAM2 |
| 976 | 4069 | O14594 | NCAN |
| 977 | 4070 | O76036 | NCR1 |
| 978 | 4071 | O95944 | NCR2 |
| 979 | 4072 | O14931 | NCR3 |
| 980 | 4073 | Q8TB73 | NDNF |
| 981 | 4074 | Q7Z3B1 | NEGR1 |
| 982 | 4075 | Q92832 | NELL1 |
| 983 | 4076 | Q99435 | NELL2 |
| 984 | 4077 | Q92859 | NEO1 |
| 985 | 4078 | Q8NET5 | NFAM1 |
| 986 | 4079 | O94856 | NFASC |
| 987 | 4080 | P01138 | NGFB |
| 988 | 4081 | P08138 | NGFR |
| 989 | 4082 | P14543 | NID1 |
| 990 | 4083 | Q14112 | NID2 |
| 991 | 4084 | Q8NFZ3 | NLGN4Y |
| 992 | 4085 | Q8NFZ3 | NLGN4Y |
| 993 | 4086 | Q96P20 | NLRP3 |
| 994 | 4087 | Q8TDY8 | NOPE |
| 995 | 4088 | Q04721 | NOTCH2 |
| 996 | 4089 | Q7Z3S9 | NOTCH2NL |
| 997 | 4090 | Q99466 | NOTCH4 |
| 998 | 4091 | O60500 | NPHS1 |
| 999 | 4092 | Q6UXI9 | NPNT |
| 1000 | 4093 | Q9Y639 | NPTN |
| 1001 | 4094 | Q92823 | NRCAM |
| 1002 | 4095 | Q02297 | NRG1 |
| 1003 | 4096 | Q02297 | NRGI |
| 1004 | 4097 | O14511 | NRG2 |
| 1005 | 4098 | P56975 | NRG3 |
| 1006 | 4099 | Q8WWG1 | NRG4 |
| 1007 | 4100 | O14786 | NRP1 |
| 1008 | 4101 | O60462 | NRP2 |
| 1009 | 4102 | Q86YC3 | NRROS |
| 1010 | 4103 | P58400 | NRXN1 |
| 1011 | 4104 | Q9HDB5 | NRXN3 |
| 1012 | 4105 | P21589 | NT5E |
| 1013 | 4106 | P20783 | NTF3 |
| 1014 | 4107 | P34130 | NTF5 |
| 1015 | 4108 | Q9P121 | NTM |
| 1016 | 4109 | O95631 | NTN1 |
| 1017 | 4110 | O00634 | NTN3 |
| 1018 | 4111 | Q9HB63 | NTN4 |
| 1019 | 4112 | Q8WTR8 | NTN5 |
| 1020 | 4113 | Q9Y212 | NTNG1 |
| 1021 | 4114 | Q96CW9 | NTNG2 |
| 1022 | 4115 | P04629 | NTRK1 |
| 1023 | 4116 | Q16620 | NTRK2 |
| 1024 | 4117 | Q16288 | NTRK3 |
| 1025 | 4118 | Q8N323 | NXPE1 |
| 1026 | 4119 | Q969Y0 | NXPE3 |
| 1027 | 4120 | Q6UWF7 | NXPE4 |
| 1028 | 4121 | Q9GZU5 | NYX |
| 1029 | 4122 | P20774 | OGN |
| 1030 | 4123 | Q8WWZ8 | OIT3 |
| 1031 | 4124 | P78380 | OLR1 |
| 1032 | 4125 | Q99983 | OMD |
| 1033 | 4126 | P23515 | OMG |
| 1034 | 4127 | Q14982 | OPCML |
| 1035 | 4128 | Q9UBM4 | OPTC |
| 1036 | 4129 | Q8IYS5 | OSCAR |
| 1037 | 4130 | Q99650 | OSMR |
| 1038 | 4131 | Q6UXH9 | PAMR1 |
| 1039 | 4132 | Q06141 | PAP |
| 1040 | 4133 | O95428 | PAPLN |
| 1041 | 4134 | Q13219 | PAPPA |
| 1042 | 4135 | Q8WXA2 | PATE1 |
| 1043 | 4136 | Q6UY27 | PATE2 |
| 1044 | 4137 | B3GLJ2 | PATE3 |
| 1045 | 4138 | P0C8F1 | PATE4 |
| 1046 | 4139 | Q9P2E7 | PCDH10 |
| 1047 | 4140 | Q9NPG4 | PCDH12 |
| 1048 | 4141 | Q8N6Y1 | PCDH20 |
| 1049 | 4142 | Q9HC56 | PCDH9 |
| 1050 | 4143 | Q9Y5H5 | PCDHA9 |
| 1051 | 4144 | Q9Y5F3 | PCDHB1 |
| 1052 | 4145 | Q9Y5F2 | PCDHB11 |
| 1053 | 4146 | Q9UN66 | PCDHB13 |
| 1054 | 4147 | Q9Y5E8 | PCDHB15 |
| 1055 | 4148 | Q9NRJ7 | PCDHB16 |
| 1056 | 4149 | Q9Y5E6 | PCDHB3 |
| 1057 | 4150 | Q9Y5E4 | PCDHB5 |
| 1058 | 4151 | Q9Y5E3 | PCDHB6 |
| 1059 | 4152 | Q9Y5E2 | PCDHB7 |
| 1060 | 4153 | Q9Y5E1 | PCDHB9 |
| 1061 | 4154 | Q9Y5G9 | PCDHGA4 |
| 1062 | 4155 | Q9Y5G1 | PCDHGB3 |
| 1063 | 4156 | Q9Y5F9 | PCDHGB6 |
| 1064 | 4157 | Q9UN70 | PCDHGC3 |
| 1065 | 4158 | Q9UHG2 | PCSK1N |
| 1066 | 4159 | Q8NBP7 | PCSK9 |
| 1067 | 4160 | Q15116 | PDCD1 |
| 1068 | 4161 | Q9BQ51 | PDCD1LG2 |
| 1069 | 4162 | P04085 | PDGFA |
| 1070 | 4163 | P01127 | PDGFB |
| 1071 | 4164 | Q9NRA1 | PDGFC |
| 1072 | 4165 | Q9GZP0 | PDGFD |
| 1073 | 4166 | P16234 | PDGFRA |
| 1074 | 4167 | P09619 | PDGFRB |
| 1075 | 4168 | Q15198 | PDGFRL |
| 1076 | 4169 | P16284 | PECAM1 |
| 1077 | 4170 | P02776 | PF4 |
| 1078 | 4171 | P49763 | PGF |
| 1079 | 4172 | O75594 | PGLYRP1 |
| 1080 | 4173 | P01833 | PIGR |
| 1081 | 4174 | Q96FE7 | PIK3IP1 |
| 1082 | 4175 | Q9UKJ1 | PILRA |
| 1083 | 4176 | Q9UKJ0 | PILRB |
| 1084 | 4177 | A6NC86 | PINLYP |
| 1085 | 4178 | P12273 | PIP |
| 1086 | 4179 | Q504Y2 | PKDCC |
| 1087 | 4180 | P00750 | PLAT |
| 1088 | 4181 | P00749 | PLAU |
| 1089 | 4182 | Q03405 | PLAUR |
| 1090 | 4183 | Q9HCM2 | PLXNA4 |
| 1091 | 4184 | Q7Z5L7 | PODN |
| 1092 | 4185 | Q6PEZ8 | PODNL1 |
| 1093 | 4186 | P02775 | PPBP |
| 1094 | 4187 | Q99944 | PPT2 |
| 1095 | 4188 | P51888 | PRELP |
| 1096 | 4189 | P14222 | PRF1 |
| 1097 | 4190 | P13727 | PRG2 |
| 1098 | 4191 | Q9Y2Y8 | PRG3 |
| 1099 | 4192 | P16471 | PRLR |
| 1100 | 4193 | P04070 | PROC |
| 1101 | 4194 | Q9UNN8 | PROCR |
| 1102 | 4195 | P07225 | PROS1 |
| 1103 | 4196 | P22891 | PROZ |
| 1104 | 4197 | Q2VWP7 | PRTG |
| 1105 | 4198 | Q8N6Q3 | PRV1 |
| 1106 | 4199 | O43653 | PSCA |
| 1107 | 4200 | Q9UQ74 | PSG1 |
| 1108 | 4201 | P11464 | PSG1 |
| 1109 | 4202 | Q9UQ72 | PSG2 |
| 1110 | 4203 | P11465 | PSG2 |
| 1111 | 4204 | Q16557 | PSG4 |
| 1112 | 4205 | Q00888 | PSG4 |
| 1113 | 4206 | Q15238 | PSG5 |
| 1114 | 4207 | Q00889 | PSG6 |
| 1115 | 4208 | Q13046 | PSG8 |
| 1116 | 4209 | Q00887 | PSG9 |
| 1117 | 4210 | O60542 | PSPN |
| 1118 | 4211 | P23219 | PTGS1 |
| 1119 | 4212 | P35354 | PTGS2 |
| 1120 | 4213 | Q13308 | PTK7 |
| 1121 | 4214 | Q9H106 | PTPNS1L2 |
| 1122 | 4215 | P23467 | PTPRB |
| 1123 | 4216 | P08575 | PTPRC |
| 1124 | 4217 | P23468 | PTPRD |
| 1125 | 4218 | P10586 | PTPRF |
| 1126 | 4219 | P23470 | PTPRG |
| 1127 | 4220 | Q9HD43 | PTPRH |
| 1128 | 4221 | Q12913 | PTPRJ |
| 1129 | 4222 | Q15262 | PTPRK |
| 1130 | 4223 | Q16849 | PTPRN |
| 1131 | 4224 | Q16827 | PTPRO |
| 1132 | 4225 | Q15256 | PTPRR |
| 1133 | 4226 | Q13332 | PTPRS |
| 1134 | 4227 | P26022 | PTX3 |
| 1135 | 4228 | P15151 | PVR |
| 1136 | 4229 | Q15223 | PVRL1 |
| 1137 | 4230 | Q92692 | PVRL2 |
| 1138 | 4231 | Q9NQS3 | PVRL3 |
| 1139 | 4232 | Q96NY8 | PVRL4 |
| 1140 | 4233 | P20742 | PZP |
| 1141 | 4234 | P05451 | REG1A |
| 1142 | 4235 | P48304 | REG1B |
| 1143 | 4236 | Q6UW15 | REG3G |
| 1144 | 4237 | Q9BYZ8 | REG4 |
| 1145 | 4238 | Q9HCK4 | ROBO2 |
| 1146 | 4239 | Q8WZ75 | ROBO4 |
| 1147 | 4240 | Q01973 | ROR1 |
| 1148 | 4241 | Q01974 | ROR2 |
| 1149 | 4242 | P08922 | ROS1 |
| 1150 | 4243 | Q9BZR6 | RTN4R |
| 1151 | 4244 | Q86UN2 | RTN4RL1 |
| 1152 | 4245 | Q86UN3 | RTN4RL2 |
| 1153 | 4246 | Q9HBX9 | RXFP1 |
| 1154 | 4247 | Q6AZY7 | SCARA3 |
| 1155 | 4248 | Q14162 | SCARF1 |
| 1156 | 4249 | Q96GP6 | SCARF2 |
| 1157 | 4250 | Q07699 | SCN1B |
| 1158 | 4251 | O60939 | SCN2B |
| 1159 | 4252 | Q9NY72 | SCN3B |
| 1160 | 4253 | Q8IWT1 | SCN4B |
| 1161 | 4254 | Q8IWY4 | SCUBE1 |
| 1162 | 4255 | Q9NQ36 | SCUBE2 |
| 1163 | 4256 | Q8IX30 | SCUBE3 |
| 1164 | 4257 | P18827 | SDC1 |
| 1165 | 4258 | P34741 | SDC2 |
| 1166 | 4259 | P31431 | SDC4 |
| 1167 | 4260 | Q58EX2 | SDK2 |
| 1168 | 4261 | Q8WVN6 | SECTM1 |
| 1169 | 4262 | P16581 | SELE |
| 1170 | 4263 | P14151 | SELL |
| 1171 | 4264 | P16109 | SELP |
| 1172 | 4265 | Q14563 | SEMA3A |
| 1173 | 4266 | Q13214 | SEMA3B |
| 1174 | 4267 | Q99985 | SEMA3C |
| 1175 | 4268 | O95025 | SEMA3D |
| 1176 | 4269 | O15041 | SEMA3E |
| 1177 | 4270 | Q13275 | SEMA3F |
| 1178 | 4271 | Q9NS98 | SEMA3G |
| 1179 | 4272 | Q9H3S1 | SEMA4A |
| 1180 | 4273 | Q9NPR2 | SEMA4B |
| 1181 | 4274 | Q9C0C4 | SEMA4C |
| 1182 | 4275 | Q92854 | SEMA4D |
| 1183 | 4276 | O95754 | SEMA4F |
| 1184 | 4277 | Q9NTN9 | SEMA4G |
| 1185 | 4278 | Q9P283 | SEMA5B |
| 1186 | 4279 | Q9H2E6 | SEMA6A |
| 1187 | 4280 | Q9H3T3 | SEMA6B |
| 1188 | 4281 | Q9H3T2 | SEMA6C |
| 1189 | 4282 | O75326 | SEMA7A |
| 1190 | 4283 | Q8IWL2 | SFTPA1 |
| 1191 | 4284 | Q8IWL1 | SFTPA2 |
| 1192 | 4285 | P35247 | SFTPD |
| 1193 | 4286 | Q6IA17 | SIGIRR |
| 1194 | 4287 | Q96LC7 | SIGLEC10 |
| 1195 | 4288 | Q96RL6 | SIGLEC11 |
| 1196 | 4289 | Q96PQ1 | SIGLEC12 |
| 1197 | 4290 | Q08ET2 | SIGLEC14 |
| 1198 | 4291 | Q6ZMC9 | SIGLEC15 |
| 1199 | 4292 | A6NMB1 | SIGLEC16 |
| 1200 | 4293 | O15389 | SIGLEC5 |
| 1201 | 4294 | O43699 | SIGLEC6 |
| 1202 | 4295 | Q9Y286 | SIGLEC7 |
| 1203 | 4296 | Q9NYZ4 | SIGLEC8 |
| 1204 | 4297 | Q9Y336 | SIGLEC9 |
| 1205 | 4298 | P78324 | SIRPA |
| 1206 | 4299 | O00241 | SIRPB1 |
| 1207 | 4300 | Q5JXA9 | SIRPB2 |
| 1208 | 4301 | Q9P1W8 | SIRPG |
| 1209 | 4302 | Q13291 | SLAMF1 |
| 1210 | 4303 | Q96DU3 | SLAMF6 |
| 1211 | 4304 | Q9NQ25 | SLAMF7 |
| 1212 | 4305 | Q9P0V8 | SLAMF8 |
| 1213 | 4306 | Q96A28 | SLAMF9 |
| 1214 | 4307 | O94813 | SLIT2 |
| 1215 | 4308 | O75094 | SLIT3 |
| 1216 | 4309 | Q96PX8 | SLITRK1 |
| 1217 | 4310 | Q9H156 | SLITRK2 |
| 1218 | 4311 | O94933 | SLITRK3 |
| 1219 | 4312 | Q8IW52 | SLITRK4 |
| 1220 | 4313 | O94991 | SLITRK5 |
| 1221 | 4314 | Q9H5Y7 | SLITRK6 |
| 1222 | 4315 | P55000 | SLURP1 |
| 1223 | 4316 | Q8TER0 | SNED1 |
| 1224 | 4317 | Q8TDM5 | SPACA4 |
| 1225 | 4318 | W5XKT8 | SPACA6P |
| 1226 | 4319 | O43278 | SPINT1 |
| 1227 | 4320 | P78539 | SRPX |
| 1228 | 4321 | O60687 | SRPX2 |
| 1229 | 4322 | Q8WTU2 | SSC4D |
| 1230 | 4323 | Q13586 | STIM1 |
| 1231 | 4324 | Q9P246 | STIM2 |
| 1232 | 4325 | Q6UWL2 | SUSD1 |
| 1233 | 4326 | Q9UGT4 | SUSD2 |
| 1234 | 4327 | Q5VX71 | SUSD4 |
| 1235 | 4328 | Q86UU9 | TAC4 |
| 1236 | 4329 | B6A8C7 | TARM1 |
| 1237 | 4330 | P13385 | TDGF1 |
| 1238 | 4331 | Q02763 | TEK |
| 1239 | 4332 | Q9UKZ4 | TENM1 |
| 1240 | 4333 | Q9BY14 | TEX101 |
| 1241 | 4334 | P02787 | TF |
| 1242 | 4335 | Q9UP52 | TFR2 |
| 1243 | 4336 | P02786 | TFRC |
| 1244 | 4337 | P01135 | TGFA |
| 1245 | 4338 | P01137 | TGFB1 |
| 1246 | 4339 | P61812 | TGFB2 |
| 1247 | 4340 | P10600 | TGFB3 |
| 1248 | 4341 | Q15582 | TGFBI |
| 1249 | 4342 | P36897 | TGFBR1 |
| 1250 | 4343 | P37173 | TGFBR2 |
| 1251 | 4344 | Q03167 | TGFBR3 |
| 1252 | 4345 | P07204 | THBD |
| 1253 | 4346 | P07996 | THBS1 |
| 1254 | 4347 | P35442 | THBS2 |
| 1255 | 4348 | P49746 | THBS3 |
| 1256 | 4349 | P35443 | THBS4 |
| 1257 | 4350 | P04216 | THY1 |
| 1258 | 4351 | P35590 | TIE1 |
| 1259 | 4352 | Q495A1 | TIGIT |
| 1260 | 4353 | Q96H15 | TIMD4 |
| 1261 | 4354 | O43897 | TLL1 |
| 1262 | 4355 | Q9Y6L7 | TLL2 |
| 1263 | 4356 | Q15399 | TLR1 |
| 1264 | 4357 | Q9BXR5 | TLR10 |
| 1265 | 4358 | O60603 | TLR2 |
| 1266 | 4359 | O15455 | TLR3 |
| 1267 | 4360 | O00206 | TLR4 |
| 1268 | 4361 | O60602 | TLR5 |
| 1269 | 4362 | Q9Y2C9 | TLR6 |
| 1270 | 4363 | Q9NYK1 | TLR7 |
| 1271 | 4364 | Q9NR97 | TLR8 |
| 1272 | 4365 | Q9NR96 | TLR9 |
| 1273 | 4366 | O43657 | TM4SF6 |
| 1274 | 4367 | Q8IYR6 | TMEFF1 |
| 1275 | 4368 | Q9UIK5 | TMEFF2 |
| 1276 | 4369 | Q8N3G9 | TMEM130 |
| 1277 | 4370 | Q9H665 | TMEM149 |
| 1278 | 4371 | Q86YD3 | TMEM25 |
| 1279 | 4372 | Q9HCN3 | TMEM8 |
| 1280 | 4373 | Q6P7N7 | TMEM81 |
| 1281 | 4374 | A6NDV4 | TMEM8B |
| 1282 | 4375 | Q6UXZ0 | TMIGD1 |
| 1283 | 4376 | Q96BF3 | TMIGD2 |
| 1284 | 4377 | P05452 | TNA |
| 1285 | 4378 | P01375 | TNF |
| 1286 | 4379 | O00220 | TNFRSF10A |
| 1287 | 4380 | O14763 | TNFRSF10B |
| 1288 | 4381 | O14798 | TNFRSF10C |
| 1289 | 4382 | Q9UBN6 | TNFRSF10D |
| 1290 | 4383 | Q9Y6Q6 | TNFRSF11A |
| 1291 | 4384 | O00300 | TNFRSF11B |
| 1292 | 4385 | Q9NP84 | TNFRSF12A |
| 1293 | 4386 | O14836 | TNFRSF13B |
| 1294 | 4387 | Q96RJ3 | TNFRSF13C |
| 1295 | 4388 | Q92956 | TNFRSF14 |
| 1296 | 4389 | Q02223 | TNFRSF17 |
| 1297 | 4390 | Q9NS68 | TNFRSF19 |
| 1298 | 4391 | Q969Z4 | TNFRSF19L |
| 1299 | 4392 | P19438 | TNFRSF1A |
| 1300 | 4393 | P20333 | TNFRSF1B |
| 1301 | 4394 | O75509 | TNFRSF21 |
| 1302 | 4395 | Q93038 | TNFRSF25 |
| 1303 | 4396 | P43489 | TNFRSF4 |
| 1304 | 4397 | P25942 | TNFRSF5 |
| 1305 | 4398 | P25445 | TNFRSF6 |
| 1306 | 4399 | O95407 | TNFRSF6B |
| 1307 | 4400 | P26842 | TNFRSF7 |
| 1308 | 4401 | P28908 | TNFRSF8 |
| 1309 | 4402 | Q07011 | TNFRSF9 |
| 1310 | 4403 | P50591 | TNFSF10 |
| 1311 | 4404 | O14788 | TNFSF11 |
| 1312 | 4405 | O43508 | TNFSF12 |
| 1313 | 4406 | O75888 | TNFSF13 |
| 1314 | 4407 | Q9Y275 | TNFSF13B |
| 1315 | 4408 | O43557 | TNFSF14 |
| 1316 | 4409 | O95150 | TNFSF15 |
| 1317 | 4410 | Q9UNG2 | TNFSF18 |
| 1318 | 4411 | P23510 | TNFSF4 |
| 1319 | 4412 | P48023 | TNFSF6 |
| 1320 | 4413 | P32971 | TNFSF8 |
| 1321 | 4414 | P41273 | TNFSF9 |
| 1322 | 4415 | Q9UQP3 | TNN |
| 1323 | 4416 | Q92752 | TNR |
| 1324 | 4417 | P22105 | TNXB |
| 1325 | 4418 | Q13641 | TPBG |
| 1326 | 4419 | P0DKB5 | TPBGL |
| 1327 | 4420 | P07202 | TPO |
| 1328 | 4421 | Q86V40 | TRABD2A |
| 1329 | 4422 | Q9NP99 | TREM1 |
| 1330 | 4423 | Q9NZC2 | TREM2 |
| 1331 | 4424 | Q86YW5 | TREML1 |
| 1332 | 4425 | Q5T2D2 | TREML2 |
| 1333 | 4426 | Q6UXN2 | TREML4 |
| 1334 | 4427 | Q7L0X0 | TRIL |
| 1335 | 4428 | P16473 | TSHR |
| 1336 | 4429 | Q8WUA8 | TSKU |
| 1337 | 4430 | Q969D9 | TSLP |
| 1338 | 4431 | O60635 | TSPAN1 |
| 1339 | 4432 | O95859 | TSPAN12 |
| 1340 | 4433 | O95857 | TSPAN13 |
| 1341 | 4434 | O95858 | TSPAN15 |
| 1342 | 4435 | Q96FV3 | TSPAN17 |
| 1343 | 4436 | Q96SJ8 | TSPAN18 |
| 1344 | 4437 | O60636 | TSPAN2 |
| 1345 | 4438 | O60637 | TSPAN3 |
| 1346 | 4439 | Q12999 | TSPAN31 |
| 1347 | 4440 | Q86UF1 | TSPAN33 |
| 1348 | 4441 | O14817 | TSPAN4 |
| 1349 | 4442 | P62079 | TSPAN5 |
| 1350 | 4443 | P41732 | TSPAN7 |
| 1351 | 4444 | P19075 | TSPAN8 |
| 1352 | 4445 | O75954 | TSPAN9 |
| 1353 | 4446 | Q06418 | TYRO3 |
| 1354 | 4447 | O43914 | TYROBP |
| 1355 | 4448 | P07911 | UMOD |
| 1356 | 4449 | Q6ZN44 | UNC5A |
| 1357 | 4450 | Q8IZJ1 | UNC5B |
| 1358 | 4451 | O95185 | UNC5C |
| 1359 | 4452 | Q6UXZ4 | UNC5D |
| 1360 | 4453 | O00322 | UPK1A |
| 1361 | 4454 | O75841 | UPK1B |
| 1362 | 4455 | Q6EMK4 | VASN |
| 1363 | 4456 | P19320 | VCAM1 |
| 1364 | 4457 | P15692 | VEGFA |
| 1365 | 4458 | P49765 | VEGFB |
| 1366 | 4459 | P49767 | VEGFC |
| 1367 | 4460 | P98155 | VLDLR |
| 1368 | 4461 | Q86XK7 | VSIG1 |
| 1369 | 4462 | Q8N0Z9 | VSIG10 |
| 1370 | 4463 | Q96IQ7 | VSIG2 |
| 1371 | 4464 | Q9Y279 | VSIG4 |
| 1372 | 4465 | Q5VU13 | VSIG8 |
| 1373 | 4466 | Q6UX27 | VSTM1 |
| 1374 | 4467 | Q8TAG5 | VSTM2A |
| 1375 | 4468 | A6NLU5 | VSTM2B |
| 1376 | 4469 | Q96N03 | VSTM2L |
| 1377 | 4470 | Q8IW00 | VSTM4 |
| 1378 | 4471 | A8MXK1 | VSTM5 |
| 1379 | 4472 | Q7Z7D3 | VTCN1 |
| 1380 | 4473 | Q6PCB0 | VWA1 |
| 1381 | 4474 | Q5GFL6 | VWA2 |
| 1382 | 4475 | Q96DN2 | VWCE |
| 1383 | 4476 | Q96NZ8 | WFIKKN1 |
| 1384 | 4477 | Q8TEU8 | WFIKKN2 |
| 1385 | 4478 | Q9Y5W5 | WIF1 |
| 1386 | 4479 | P47992 | XCL1 |
| 1387 | 4480 | Q9UBD3 | XCL2 |
| 1388 | 4481 | Q9BS86 | ZPBP |
| 1389 | 4482 | Q6X784 | ZPBP2 |
| 1390 | 4483 | Q96GS6 | ABHD17A |
| 1391 | 4484 | Q5VST6 | ABHD17B |
| 1392 | 4485 | Q0P651 | ABHD18 |
| 1393 | 4486 | Q9C0K3 | ACTR3C |
| 1394 | 4487 | O15204 | ADAMDEC1 |
| 1395 | 4488 | Q6ZMM2 | ADAMTSL5 |
| 1396 | 4489 | Q9UKB5 | AJAP1 |
| 1397 | 4490 | Q6UX46 | ALKAL2 |
| 1398 | 4491 | P03971 | AMH |
| 1399 | 4492 | Q9BXJ7 | AMN |
| 1400 | 4493 | P04746 | AMY2A |
| 1401 | 4494 | P19961 | AMY2B |
| 1402 | 4495 | O95841 | ANGPTL1 |
| 1403 | 4496 | Q86XS5 | ANGPTL5 |
| 1404 | 4497 | Q8NI99 | ANGPTL6 |
| 1405 | 4498 | Q6UXH0 | ANGPTL8 |
| 1406 | 4499 | A6NMY6 | ANXA2P2 |
| 1407 | 4500 | P28039 | AOAH |
| 1408 | 4501 | Q8NCL9 | APCDD1L |
| 1409 | 4502 | P06727 | APOA4 |
| 1410 | 4503 | P15848 | ARSB |
| 1411 | 4504 | Q5T4W7 | ARTN |
| 1412 | 4505 | Q16515 | ASIC2 |
| 1413 | 4506 | Q86Y30 | BAGE2 |
| 1414 | 4507 | Q86Y29 | BAGE3 |
| 1415 | 4508 | P23560 | BDNF |
| 1416 | 4509 | P22004 | BMP6 |
| 1417 | 4510 | Q9BQP9 | BPIFA3 |
| 1418 | 4511 | Q86YQ2 | BPIFA4P |
| 1419 | 4512 | Q8NFQ6 | BPIFC |
| 1420 | 4513 | A6NE02 | BTBD17 |
| 1421 | 4514 | Q8N8P7 | C11orf44 |
| 1422 | 4515 | C9JXX5 | C11orf94 |
| 1423 | 4516 | Q9H972 | C14orf93 |
| 1424 | 4517 | A6NNL5 | C15orf61 |
| 1425 | 4518 | Q96HA4 | C1orf159 |
| 1426 | 4519 | P02745 | C1QA |
| 1427 | 4520 | P02746 | C1QB |
| 1428 | 4521 | P02747 | C1QC |
| 1429 | 4522 | Q5VWW1 | C1QL3 |
| 1430 | 4523 | Q5T7M4 | C1QTNF12 |
| 1431 | 4524 | Q9NYP8 | C21orf62 |
| 1432 | 4525 | C9J442 | C22orf46 |
| 1433 | 4526 | Q8N8R5 | C2orf69 |
| 1434 | 4527 | Q7Z4R8 | C6orf120 |
| 1435 | 4528 | Q5VTT2 | C9orf135 |
| 1436 | 4529 | Q6ZRZ4 | C9orf47 |
| 1437 | 4530 | P23280 | CA6 |
| 1438 | 4531 | Q9NYX4 | CALY |
| 1439 | 4532 | Q8IUK8 | CBLN2 |
| 1440 | 4533 | Q6UW01 | CBLN3 |
| 1441 | 4534 | P0C854 | CECR9 |
| 1442 | 4535 | Q8N7Q2 | CELF2-AS1 |
| 1443 | 4536 | Q9UKY3 | CES1P1 |
| 1444 | 4537 | Q5XG92 | CES4A |
| 1445 | 4538 | Q6NT32 | CES5A |
| 1446 | 4539 | P01215 | CGA |
| 1447 | 4540 | A6NKQ9 | CGB1 |
| 1448 | 4541 | Q6NT52 | CGB2 |
| 1449 | 4542 | P0DN86 | CGB3 |
| 1450 | 4543 | P0DN87 | CGB7 |
| 1451 | 4544 | Q9BZP6 | CHIA |
| 1452 | 4545 | P02708 | CHRNA1 |
| 1453 | 4546 | Q15822 | CHRNA2 |
| 1454 | 4547 | Q04844 | CHRNE |
| 1455 | 4548 | P07510 | CHRNG |
| 1456 | 4549 | Q9Y6N3 | CLCA3P |
| 1457 | 4550 | Q6UVW9 | CLEC2A |
| 1458 | 4551 | Q6UWE3 | CLPSL2 |
| 1459 | 4552 | Q9HBJ8 | CLTRN |
| 1460 | 4553 | Q15846 | CLUL1 |
| 1461 | 4554 | O43405 | COCH |
| 1462 | 4555 | Q96A83 | COL26A1 |
| 1463 | 4556 | Q2VPA4 | CR1L |
| 1464 | 4557 | P54107 | CRISP1 |
| 1465 | 4558 | O76096 | CST7 |
| 1466 | 4559 | Q5W188 | CST9LP1 |
| 1467 | 4560 | Q5H943 | CT83 |
| 1468 | 4561 | Q16619 | CTF1 |
| 1469 | 4562 | Q9UBX1 | CTSF |
| 1470 | 4563 | P25774 | CTSS |
| 1471 | 4564 | P56202 | CTSW |
| 1472 | 4565 | O60888 | CUTA |
| 1473 | 4566 | A0A087X1C5 | CYP2D7 |
| 1474 | 4567 | P81605 | DCD |
| 1475 | 4568 | Q9BYW3 | DEFB126 |
| 1476 | 4569 | Q7Z7B8 | DEFB128 |
| 1477 | 4570 | Q6IED9 | DGAT2L7P |
| 1478 | 4571 | Q6UWP2 | DHRS11 |
| 1479 | 4572 | Q6UX07 | DHRS13 |
| 1480 | 4573 | Q6PKH6 | DHRS4L2 |
| 1481 | 4574 | Q9BPW9 | DHRS9 |
| 1482 | 4575 | Q9H7Y0 | DIPK2B |
| 1483 | 4576 | Q9H4A9 | DPEP2 |
| 1484 | 4577 | Q8NBI3 | DRAXIN |
| 1485 | 4578 | Q8N1N2 | DYNAP |
| 1486 | 4579 | P52798 | EFNA4 |
| 1487 | 4580 | O94919 | ENDOD1 |
| 1488 | 4581 | P21128 | ENDOU |
| 1489 | 4582 | Q5NDL2 | EOGT |
| 1490 | 4583 | P60507 | ERVFC1 |
| 1491 | 4584 | M5A8F1 | ERVH48-1 |
| 1492 | 4585 | O42043 | ERVK-18 |
| 1493 | 4586 | P61566 | ERVK-24 |
| 1494 | 4587 | P61567 | ERVK-7 |
| 1495 | 4588 | Q9NX77 | ERVK13-1 |
| 1496 | 4589 | B6SEH8 | ERVV-1 |
| 1497 | 4590 | B6SEH9 | ERVV-2 |
| 1498 | 4591 | P22794 | EVI2A |
| 1499 | 4592 | Q8N2X6 | EXOC3-AS1 |
| 1500 | 4593 | A1KXE4 | FAM168B |
| 1501 | 4594 | Q7Z5A7 | FAM19A5 |
| 1502 | 4595 | A6NFZ4 | FAM24A |
| 1503 | 4596 | P98173 | FAM3A |
| 1504 | 4597 | Q15485 | FCN2 |
| 1505 | 4598 | Q9UGM5 | FETUB |
| 1506 | 4599 | Q9HCT0 | FGF22 |
| 1507 | 4600 | P08620 | FGF4 |
| 1508 | 4601 | P55075 | FGF8 |
| 1509 | 4602 | A5D6W6 | FITM1 |
| 1510 | 4603 | Q86VR8 | FJX1 |
| 1511 | 4604 | Q71RG6 | FP248 |
| 1512 | 4605 | O95633 | FSTL3 |
| 1513 | 4606 | Q14332 | FZD2 |
| 1514 | 4607 | P14867 | GABRA1 |
| 1515 | 4608 | P47869 | GABRA2 |
| 1516 | 4609 | P78334 | GABRE |
| 1517 | 4610 | Q99928 | GABRG3 |
| 1518 | 4611 | A8MPY1 | GABRR3 |
| 1519 | 4612 | P54826 | GAS1 |
| 1520 | 4613 | Q9UFP1 | GASKIA |
| 1521 | 4614 | P27539 | GDF1 |
| 1522 | 4615 | Q7Z4P5 | GDF7 |
| 1523 | 4616 | Q8N9F7 | GDPD1 |
| 1524 | 4617 | Q7L5L3 | GDPD3 |
| 1525 | 4618 | Q3B7J2 | GFOD2 |
| 1526 | 4619 | Q6UXV0 | GFRAL |
| 1527 | 4620 | A6NGU5 | GGT3P |
| 1528 | 4621 | Q8N2G8 | GHDC |
| 1529 | 4622 | P0CG01 | GKN3P |
| 1530 | 4623 | Q6ZMI3 | GLDN |
| 1531 | 4624 | Q5JXX5 | GLRA4 |
| 1532 | 4625 | Q96MS3 | GLT1D1 |
| 1533 | 4626 | Q86YW7 | GPHB5 |
| 1534 | 4627 | Q9NPR9 | GPR108 |
| 1535 | 4628 | Q6UXU4 | GSG1L |
| 1536 | 4629 | A8MUP6 | GSG1L2 |
| 1537 | 4630 | Q8N7I0 | GVQW1 |
| 1538 | 4631 | Q9BXW7 | HDHD5 |
| 1539 | 4632 | C9JL84 | HHLA1 |
| 1540 | 4633 | A8MTL9 | HMSD |
| 1541 | 4634 | P22626 | HNRNPA2B1 |
| 1542 | 4635 | P00738 | HP |
| 1543 | 4636 | P00739 | HPR |
| 1544 | 4637 | P02790 | HPX |
| 1545 | 4638 | Q7Z5J1 | HSD11B1L |
| 1546 | 4639 | Q70Z44 | HTR3D |
| 1547 | 4640 | Q92743 | HTRA1 |
| 1548 | 4641 | P22304 | IDS |
| 1549 | 4642 | P05019 | IGF1 |
| 1550 | 4643 | Q6B9Z1 | IGFL4 |
| 1551 | 4644 | Q14623 | IHH |
| 1552 | 4645 | P09529 | INHBB |
| 1553 | 4646 | B1AKI9 | ISM1 |
| 1554 | 4647 | Q8IWB1 | ITPRIP |
| 1555 | 4648 | Q6GPH6 | ITPRIPL1 |
| 1556 | 4649 | Q6PHW0 | IYD |
| 1557 | 4650 | A6ND01 | IZUMO1R |
| 1558 | 4651 | Q6UXV1 | IZUMO2 |
| 1559 | 4652 | Q5VZ72 | IZUMO3 |
| 1560 | 4653 | P17658 | KCNA6 |
| 1561 | 4654 | Q8WWG9 | KCNE4 |
| 1562 | 4655 | Q16558 | KCNMB1 |
| 1563 | 4656 | Q9UBX7 | KLK11 |
| 1564 | 4657 | Q9UKR0 | KLK12 |
| 1565 | 4658 | O60259 | KLK8 |
| 1566 | 4659 | Q8NCW0 | KREMEN2 |
| 1567 | 4660 | Q8IYD9 | LAS2 |
| 1568 | 4661 | P04180 | LCAT |
| 1569 | 4662 | P31025 | LCN1 |
| 1570 | 4663 | Q6JVE6 | LCN10 |
| 1571 | 4664 | Q6JVE5 | LCN12 |
| 1572 | 4665 | Q5VSP4 | LCN1P1 |
| 1573 | 4666 | Q5SZI1 | LDLRAD2 |
| 1574 | 4667 | Q86YD5 | LDLRAD3 |
| 1575 | 4668 | Q6P5S2 | LEG1 |
| 1576 | 4669 | P01229 | LHB |
| 1577 | 4670 | Q7Z4B0 | LINC00305 |
| 1578 | 4671 | Q9UJ94 | LINC00527 |
| 1579 | 4672 | Q5VYY2 | LIPM |
| 1580 | 4673 | Q5VXI9 | LIPN |
| 1581 | 4674 | Q96L11 | LLCFC1 |
| 1582 | 4675 | Q16609 | LPAL2 |
| 1583 | 4676 | A6NCL2 | LRCOL1 |
| 1584 | 4677 | Q5XG99 | LYSMD4 |
| 1585 | 4678 | A6NHS7 | MANSC4 |
| 1586 | 4679 | Q9BUN1 | MENT |
| 1587 | 4680 | Q9UJH8 | METRN |
| 1588 | 4681 | Q641Q3 | METRNL |
| 1589 | 4682 | Q5JXM2 | METTL24 |
| 1590 | 4683 | Q6UX53 | METTL7B |
| 1591 | 4684 | Q9BY79 | MFRP |
| 1592 | 4685 | P08493 | MGP |
| 1593 | 4686 | P24347 | MMP11 |
| 1594 | 4687 | Q8N119 | MMP21 |
| 1595 | 4688 | Q9NPA2 | MMP25 |
| 1596 | 4689 | A6NHM9 | MOXD2P |
| 1597 | 4690 | Q1L6U9 | MSMP |
| 1598 | 4691 | Q3MIW9 | MUCL3 |
| 1599 | 4692 | Q02083 | NAAA |
| 1600 | 4693 | P41271 | NBL1 |
| 1601 | 4694 | Q8TDF5 | NETO1 |
| 1602 | 4695 | Q9NPE2 | NGRN |
| 1603 | 4696 | Q0D2K0 | NIPAL4 |
| 1604 | 4697 | Q6P988 | NOTUM |
| 1605 | 4698 | Q9HBY0 | NOX3 |
| 1606 | 4699 | A6NHN6 | NPIPB15 |
| 1607 | 4700 | O75200 | NPIPB7 |
| 1608 | 4701 | P16860 | NPPB |
| 1609 | 4702 | P17342 | NPR3 |
| 1610 | 4703 | Q9NPD7 | NRN1 |
| 1611 | 4704 | Q99748 | NRTN |
| 1612 | 4705 | Q02818 | NUCB1 |
| 1613 | 4706 | P80303 | NUCB2 |
| 1614 | 4707 | P00973 | OAS1 |
| 1615 | 4708 | Q9NY56 | OBP2A |
| 1616 | 4709 | Q02509 | OC90 |
| 1617 | 4710 | A1E959 | ODAM |
| 1618 | 4711 | Q17RF5 | ODAPH |
| 1619 | 4712 | A8MZH6 | OOSP1 |
| 1620 | 4713 | Q86WS3 | OOSP2 |
| 1621 | 4714 | A6NHN0 | OTOL1 |
| 1622 | 4715 | Q8NHW6 | OTOS |
| 1623 | 4716 | Q7RTZ1 | OVCH2 |
| 1624 | 4717 | Q9UBL9 | P2RX2 |
| 1625 | 4718 | Q8NBM8 | PCYOX1L |
| 1626 | 4719 | Q15084 | PDIA6 |
| 1627 | 4720 | Q96S96 | PEBP4 |
| 1628 | 4721 | P0DJD8 | PGA3 |
| 1629 | 4722 | P20142 | PGC |
| 1630 | 4723 | Q96PD5 | PGLYRP2 |
| 1631 | 4724 | Q96LB8 | PGLYRP4 |
| 1632 | 4725 | Q6UXB8 | PI16 |
| 1633 | 4726 | Q8NCC3 | PLA2G15 |
| 1634 | 4727 | Q5R387 | PLA2G2C |
| 1635 | 4728 | Q6P4A8 | PLBD1 |
| 1636 | 4729 | Q8NHP8 | PLBD2 |
| 1637 | 4730 | Q6UQ28 | PLET1 |
| 1638 | 4731 | Q15195 | PLGLA |
| 1639 | 4732 | Q02325 | PLGLB1 |
| 1640 | 4733 | Q6GTS8 | PM20D1 |
| 1641 | 4734 | P54315 | PNLIPRP1 |
| 1642 | 4735 | Q86SH4 | PRNT |
| 1643 | 4736 | Q99946 | PRRT1 |
| 1644 | 4737 | O95084 | PRSS23 |
| 1645 | 4738 | Q9BQR3 | PRSS27 |
| 1646 | 4739 | P35030 | PRSS3 |
| 1647 | 4740 | Q8NHM4 | PRSS3P2 |
| 1648 | 4741 | Q7RTY9 | PRSS41 |
| 1649 | 4742 | E7EML9 | PRSS44 |
| 1650 | 4743 | A8MTI9 | PRSS47 |
| 1651 | 4744 | Q6UWB4 | PRSS55 |
| 1652 | 4745 | Q8IYP2 | PRSS58 |
| 1653 | 4746 | Q6NUJ1 | PSAPL1 |
| 1654 | 4747 | Q9UIG4 | PSORS1C2 |
| 1655 | 4748 | P01270 | PTH |
| 1656 | 4749 | Q96A99 | PTX4 |
| 1657 | 4750 | Q6H3X3 | RAET1G |
| 1658 | 4751 | Q5VY80 | RAET1L |
| 1659 | 4752 | Q5W5W9 | RESP18 |
| 1660 | 4753 | Q86XS8 | RNF130 |
| 1661 | 4754 | Q8N7C7 | RNF148 |
| 1662 | 4755 | Q9H6Y7 | RNF167 |
| 1663 | 4756 | Q96EX2 | RNFT2 |
| 1664 | 4757 | Q6UXX9 | RSPO2 |
| 1665 | 4758 | P80511 | S100A12 |
| 1666 | 4759 | Q6ZMJ2 | SCARA5 |
| 1667 | 4760 | Q8TD33 | SCGB1C1 |
| 1668 | 4761 | O75056 | SDC3 |
| 1669 | 4762 | P0C7V7 | SEC11B |
| 1670 | 4763 | P04279 | SEMG1 |
| 1671 | 4764 | Q6UXR4 | SERPINA13P |
| 1672 | 4765 | P20848 | SERPINA2 |
| 1673 | 4766 | P36952 | SERPINB5 |
| 1674 | 4767 | P01008 | SERPINC1 |
| 1675 | 4768 | A8MV23 | SERPINE3 |
| 1676 | 4769 | Q99574 | SERPINI1 |
| 1677 | 4770 | P0C7M3 | SFTA3 |
| 1678 | 4771 | Q13326 | SGCG |
| 1679 | 4772 | Q96LD1 | SGCZ |
| 1680 | 4773 | Q8N114 | SHISA5 |
| 1681 | 4774 | Q6ZSJ9 | SHISA6 |
| 1682 | 4775 | A6NL88 | SHISA7 |
| 1683 | 4776 | B8ZZ34 | SHISA8 |
| 1684 | 4777 | B4DS77 | SHISA9 |
| 1685 | 4778 | Q5TFQ8 | SIRPB1 |
| 1686 | 4779 | Q63ZE4 | SLC22A10 |
| 1687 | 4780 | Q9Y226 | SLC22A13 |
| 1688 | 4781 | O15244 | SLC22A2 |
| 1689 | 4782 | A6NK97 | SLC22A20P |
| 1690 | 4783 | Q6T423 | SLC22A25 |
| 1691 | 4784 | A6NKX4 | SLC22A31 |
| 1692 | 4785 | P11168 | SLC2A2 |
| 1693 | 4786 | Q8N130 | SLC34A3 |
| 1694 | 4787 | Q969I6 | SLC38A4 |
| 1695 | 4788 | A6NLE4 | SMIM23 |
| 1696 | 4789 | Q92485 | SMPDL3B |
| 1697 | 4790 | Q2M3V2 | SOWAHA |
| 1698 | 4791 | Q96QH8 | SPACA5 |
| 1699 | 4792 | Q96KW9 | SPACA7 |
| 1700 | 4793 | Q6PDA7 | SPAG11A |
| 1701 | 4794 | Q08648 | SPAG11B |
| 1702 | 4795 | P09486 | SPARC |
| 1703 | 4796 | P0C7L1 | SPINK8 |
| 1704 | 4797 | Q6UDR6 | SPINT4 |
| 1705 | 4798 | Q9BUD6 | SPON2 |
| 1706 | 4799 | Q13103 | SPP2 |
| 1707 | 4800 | Q7Z2R9 | SSBP3-AS1 |
| 1708 | 4801 | A6NDD5 | SYNDIG1L |
| 1709 | 4802 | H3BTG2 | TEX46 |
| 1710 | 4803 | P10646 | TFPI |
| 1711 | 4804 | H3BV60 | TGFBR3L |
| 1712 | 4805 | Q8WUY1 | THEM6 |
| 1713 | 4806 | Q86YJ6 | THNSL2 |
| 1714 | 4807 | P40225 | THPO |
| 1715 | 4808 | Q9NS93 | TM7SF3 |
| 1716 | 4809 | Q9HD45 | TM9SF3 |
| 1717 | 4810 | Q4V9L6 | TMEM119 |
| 1718 | 4811 | Q9BXJ8 | TMEM120A |
| 1719 | 4812 | Q8N614 | TMEM156 |
| 1720 | 4813 | Q8WZ71 | TMEM158 |
| 1721 | 4814 | Q8NBL3 | TMEM178A |
| 1722 | 4815 | H3BS89 | TMEM178B |
| 1723 | 4816 | Q9H813 | TMEM206 |
| 1724 | 4817 | Q86XT9 | TMEM219 |
| 1725 | 4818 | A6NFC5 | TMEM235 |
| 1726 | 4819 | Q9P0T7 | TMEM9 |
| 1727 | 4820 | Q6ZNR0 | TMEM91 |
| 1728 | 4821 | Q8N816 | TMEM99 |
| 1729 | 4822 | Q6ZWK6 | TMPRSS11F |
| 1730 | 4823 | Q9H1E5 | TMX4 |
| 1731 | 4824 | Q9H2S6 | TNMD |
| 1732 | 4825 | Q8N2E6 | TOR2A |
| 1733 | 4826 | Q8NBR0 | TP53I13 |
| 1734 | 4827 | Q15661 | TPSAB1 |
| 1735 | 4828 | Q9BZJ3 | TPSD1 |
| 1736 | 4829 | A6NFA1 | TRABD2B |
| 1737 | 4830 | O00294 | TULP1 |
| 1738 | 4831 | O75386 | TULP3 |
| 1739 | 4832 | P10599 | TXN |
| 1740 | 4833 | Q8WVF2 | UCMA |
| 1741 | 4834 | Q9Y4X1 | UGT2A1 |
| 1742 | 4835 | P36537 | UGT2B10 |
| 1743 | 4836 | Q9BY64 | UGT2B28 |
| 1744 | 4837 | Q16880 | UGT8 |
| 1745 | 4838 | Q9BZM4 | ULBP3 |
| 1746 | 4839 | Q6UY13 | UNQ5830/ |
| | | | PRO19650/ |
| | | | PRO19816 |
| 1747 | 4840 | Q6UXV3 | UNQ6126/ |
| | | | PRO20091 |
| 1748 | 4841 | Q6UXQ8 | UNQ6190/ |
| | | | PRO20217 |
| 1749 | 4842 | Q6UXR6 | UNQ6494/ |
| | | | PRO21346 |
| 1750 | 4843 | Q6UXU0 | UNQ9165/ |
| | | | PRO28630 |
| 1751 | 4844 | Q9N2K0 | ENH3 |
| 1752 | 4845 | Q9N2J8 | ENH1 |
| 1753 | 4846 | Q8N1Y9 | FLJ37218 |
| 1754 | 4847 | Q6ZRU5 | FLJ46089 |
| 1755 | 4848 | Q8N9W7 | FLJ36131 |
| 1756 | 4849 | A6NDX4 | ENSP00000320207 |
| 1757 | 4850 | A8MUN3 | ENSP00000381830 |
| 1758 | 4851 | Q8TAT8 | LOC644613 |
| 1759 | 4852 | B0FP48 | UPK3BL1 |
| 1760 | 4853 | Q86V25 | VASH2 |
| 1761 | 4854 | Q9NY84 | VNN3 |
| 1762 | 4855 | Q8IUB5 | WFDC13 |
| 1763 | 4856 | Q8IUA0 | WFDC8 |
| 1764 | 4857 | O95388 | WISP1 |
| 1765 | 4858 | P56703 | WNT3 |
| 1766 | 4859 | Q9Y6F9 | WNT6 |
| 1767 | 4860 | Q9H1J5 | WNT8A |
| 1768 | 4861 | O14905 | WNT9B |
| 1769 | 4862 | P21754 | ZP3 |
| 1770 | 4863 | Q12836 | ZP4 |
| 1771 | 4864 | A1L453 | PRSS38 |
| 1772 | 4865 | A2RUU4 | CLPSL1 |
| 1773 | 4866 | A4D0V7 | CPED1 |
| 1774 | 4867 | A4D1T9 | PRSS37 |
| 1775 | 4868 | A5X5Y0 | HTR3E |
| 1776 | 4869 | A6NNS2 | DHRS7C |
| 1777 | 4870 | A8K7I4 | CLCA1 |
| 1778 | 4871 | A8MVS5 | HIDE1 |
| 1779 | 4872 | B2RNN3 | C1QTNF9B |
| 1780 | 4873 | B2RUY7 | VWC2L |
| 1781 | 4874 | C9JUS6 | ADM5 |
| 1782 | 4875 | O00115 | DNASE2 |
| 1783 | 4876 | O00144 | FZD9 |
| 1784 | 4877 | O00180 | KCNK1 |
| 1785 | 4878 | O00182 | LGALS9 |
| 1786 | 4879 | O00253 | AGRP |
| 1787 | 4880 | O00292 | LEFTY2 |
| 1788 | 4881 | O00295 | TULP2 |
| 1789 | 4882 | O00515 | LAD1 |
| 1790 | 4883 | O00560 | SDCBP |
| 1791 | 4884 | O00584 | RNASET2 |
| 1792 | 4885 | O00590 | ACKR2 |
| 1793 | 4886 | O00591 | GABRP |
| 1794 | 4887 | O00592 | PODXL |
| 1795 | 4888 | O00602 | FCN1 |
| 1796 | 4889 | O00622 | CYR61 |
| 1797 | 4890 | O00744 | WNT10B |
| 1798 | 4891 | O00748 | CES2 |
| 1799 | 4892 | O00754 | MAN2B1 |
| 1800 | 4893 | O00755 | WNT7A |
| 1801 | 4894 | O14493 | CLDN4 |
| 1802 | 4895 | O14638 | ENPP3 |
| 1803 | 4896 | O14656 | TOR1A |
| 1804 | 4897 | O14657 | TOR1B |
| 1805 | 4898 | O14668 | PRRG1 |
| 1806 | 4899 | O14756 | HSD17B6 |
| 1807 | 4900 | O14764 | GABRD |
| 1808 | 4901 | O14773 | TPP1 |
| 1809 | 4902 | O14791 | APOL1 |
| 1810 | 4903 | O14792 | HS3ST1 |
| 1811 | 4904 | O14904 | WNT9A |
| 1812 | 4905 | O14958 | CASQ2 |
| 1813 | 4906 | O14960 | LECT2 |
| 1814 | 4907 | O15120 | AGPAT2 |
| 1815 | 4908 | O15245 | SLC22A1 |
| 1816 | 4909 | O15321 | TM9SF1 |
| 1817 | 4910 | O15393 | TMPRSS2 |
| 1818 | 4911 | O15431 | SLC31A1 |
| 1819 | 4912 | O15460 | P4HA2 |
| 1820 | 4913 | O15496 | PLA2G10 |
| 1821 | 4914 | O15537 | RS1 |
| 1822 | 4915 | O15547 | P2RX6 |
| 1823 | 4916 | O15551 | CLDN3 |
| 1824 | 4917 | O43240 | KLK10 |
| 1825 | 4918 | O43280 | TREH |
| 1826 | 4919 | O43291 | SPINT2 |
| 1827 | 4920 | O43323 | DHH |
| 1828 | 4921 | O43493 | TGOLN2 |
| 1829 | 4922 | O43555 | GNRH2 |
| 1830 | 4923 | O43556 | SGCE |
| 1831 | 4924 | O43570 | CA12 |
| 1832 | 4925 | O43614 | HCRTR2 |
| 1833 | 4926 | O43692 | PI15 |
| 1834 | 4927 | O43852 | CALU |
| 1835 | 4928 | O43866 | CD5L |
| 1836 | 4929 | O43908 | KLRC4 |
| 1837 | 4930 | O60218 | AKR1B10 |
| 1838 | 4931 | O60235 | TMPRSS11D |
| 1839 | 4932 | O60565 | GREM1 |
| 1840 | 4933 | O60568 | PLOD3 |
| 1841 | 4934 | O60575 | SPINK4 |
| 1842 | 4935 | O60656 | UGT1A9 |
| 1843 | 4936 | O60676 | CST8 |
| 1844 | 4937 | O60844 | ZG16 |
| 1845 | 4938 | O60882 | MMP20 |
| 1846 | 4939 | O60894 | RAMP1 |
| 1847 | 4940 | O60895 | RAMP2 |
| 1848 | 4941 | O60896 | RAMP3 |
| 1849 | 4942 | O60911 | CTSV |
| 1850 | 4943 | O75084 | FZD7 |
| 1851 | 4944 | O75106 | AOC2 |
| 1852 | 4945 | O75185 | ATP2C2 |
| 1853 | 4946 | O75310 | UGT2B11 |
| 1854 | 4947 | O75311 | GLRA3 |
| 1855 | 4948 | O75356 | ENTPD5 |
| 1856 | 4949 | O75398 | DEAF1 |
| 1857 | 4950 | O75487 | GPC4 |
| 1858 | 4951 | O75493 | CA11 |
| 1859 | 4952 | O75503 | CLN5 |
| 1860 | 4953 | O75508 | CLDN11 |
| 1861 | 4954 | O75556 | SCGB2A1 |
| 1862 | 4955 | O75610 | LEFTY1 |
| 1863 | 4956 | O75629 | CREG1 |
| 1864 | 4957 | O75636 | FCN3 |
| 1865 | 4958 | O75711 | SCRG1 |
| 1866 | 4959 | O75715 | GPX5 |
| 1867 | 4960 | O75718 | CRTAP |
| 1868 | 4961 | O75787 | ATP6AP2 |
| 1869 | 4962 | O75795 | UGT2B17 |
| 1870 | 4963 | O75830 | SERPINI2 |
| 1871 | 4964 | O75951 | LYZL6 |
| 1872 | 4965 | O76038 | SCGN |
| 1873 | 4966 | O76061 | STC2 |
| 1874 | 4967 | O76076 | WISP2 |
| 1875 | 4968 | O76082 | SLC22A5 |
| 1876 | 4969 | O76095 | JTB |
| 1877 | 4970 | O94907 | DKK1 |
| 1878 | 4971 | O94956 | SLCO2B1 |
| 1879 | 4972 | O94985 | CLSTN1 |
| 1880 | 4973 | O95156 | NXPH2 |
| 1881 | 4974 | O95157 | NXPH3 |
| 1882 | 4975 | O95158 | NXPH4 |
| 1883 | 4976 | O95264 | HTR3B |
| 1884 | 4977 | O95302 | FKBP9 |
| 1885 | 4978 | O95389 | WISP3 |
| 1886 | 4979 | O95436 | SLC34A2 |
| 1887 | 4980 | O95445 | APOM |
| 1888 | 4981 | O95471 | CLDN7 |
| 1889 | 4982 | O95484 | CLDN9 |
| 1890 | 4983 | O95497 | VNN1 |
| 1891 | 4984 | O95498 | VNN2 |
| 1892 | 4985 | O95500 | CLDN14 |
| 1893 | 4986 | O95502 | NPTXR |
| 1894 | 4987 | O95528 | SLC2A10 |
| 1895 | 4988 | O95622 | ADCY5 |
| 1896 | 4989 | O95711 | LY86 |
| 1897 | 4990 | O95813 | CER1 |
| 1898 | 4991 | O95832 | CLDN1 |
| 1899 | 4992 | O95881 | TXNDC12 |
| 1900 | 4993 | O95897 | OLFM2 |
| 1901 | 4994 | O95925 | EPPIN |
| 1902 | 4995 | O95968 | SCGB1D1 |
| 1903 | 4996 | O95969 | SCGB1D2 |
| 1904 | 4997 | O95994 | AGR2 |
| 1905 | 4998 | O96005 | CLPTM1 |
| 1906 | 4999 | O96009 | NAPSA |
| 1907 | 5000 | O96014 | WNT11 |
| 1908 | 5001 | P00450 | CP |
| 1909 | 5002 | P00709 | LALBA |
| 1910 | 5003 | P00734 | F2 |
| 1911 | 5004 | P00751 | CFB |
| 1912 | 5005 | P00797 | REN |
| 1913 | 5006 | P00995 | SPINK1 |
| 1914 | 5007 | P01009 | SERPINA1 |
| 1915 | 5008 | P01011 | SERPINA3 |
| 1916 | 5009 | P01019 | AGT |
| 1917 | 5010 | P01033 | TIMP1 |
| 1918 | 5011 | P01034 | CST3 |
| 1919 | 5012 | P01036 | CST4 |
| 1920 | 5013 | P01037 | CST1 |
| 1921 | 5014 | P01148 | GNRH1 |
| 1922 | 5015 | P01178 | OXT |
| 1923 | 5016 | P01185 | AVP |
| 1924 | 5017 | P01189 | POMC |
| 1925 | 5018 | P01222 | TSHB |
| 1926 | 5019 | P01225 | FSHB |
| 1927 | 5020 | P01236 | PRL |
| 1928 | 5021 | P01241 | GH1 |
| 1929 | 5022 | P01275 | GCG |
| 1930 | 5023 | P01350 | GAST |
| 1931 | 5024 | P02647 | APOA1 |
| 1932 | 5025 | P02649 | APOE |
| 1933 | 5026 | P02652 | APOA2 |
| 1934 | 5027 | P02654 | APOC1 |
| 1935 | 5028 | P02655 | APOC2 |
| 1936 | 5029 | P02656 | APOC3 |
| 1937 | 5030 | P02675 | FGB |
| 1938 | 5031 | P02679 | FGG |
| 1939 | 5032 | P02724 | GYPA |
| 1940 | 5033 | P02741 | CRP |
| 1941 | 5034 | P02743 | APCS |
| 1942 | 5035 | P02749 | APOH |
| 1943 | 5036 | P02753 | RBP4 |
| 1944 | 5037 | P02760 | AMBP |
| 1945 | 5038 | P02763 | ORM1 |
| 1946 | 5039 | P02765 | AHSG |
| 1947 | 5040 | P02766 | TTR |
| 1948 | 5041 | P02768 | ALB |
| 1949 | 5042 | P02771 | AFP |
| 1950 | 5043 | P02774 | GC |
| 1951 | 5044 | P02810 | PRH1; |
| 1952 | 5045 | P02814 | SMR3B |
| 1953 | 5046 | P02818 | BGLAP |
| 1954 | 5047 | P03950 | ANG |
| 1955 | 5048 | P03951 | F11 |
| 1956 | 5049 | P03952 | KLKB1 |
| 1957 | 5050 | P03956 | MMP1 |
| 1958 | 5051 | P03973 | SLP1 |
| 1959 | 5052 | P04001 | OPN1MW |
| 1960 | 5053 | P04003 | C4BPA |
| 1961 | 5054 | P04004 | VTN |
| 1962 | 5055 | P04054 | PLA2G1B |
| 1963 | 5056 | P04062 | GBA |
| 1964 | 5057 | P04066 | FUCA1 |
| 1965 | 5058 | P04083 | ANXA1 |
| 1966 | 5059 | P04090 | RLN2 |
| 1967 | 5060 | P04118 | CLPS |
| 1968 | 5061 | P04155 | TFF1 |
| 1969 | 5062 | P04156 | PRNP |
| 1970 | 5063 | P04196 | HRG |
| 1971 | 5064 | P04278 | SHBG |
| 1972 | 5065 | P04628 | WNT1 |
| 1973 | 5066 | P04745 | AMY1A |
| 1974 | 5067 | P04808 | RLN1 |
| 1975 | 5068 | P04920 | SLC4A2 |
| 1976 | 5069 | P04921 | GYPC |
| 1977 | 5070 | P05023 | ATP1A1 |
| 1978 | 5071 | P05026 | ATP1B1 |
| 1979 | 5072 | P05060 | CHGB |
| 1980 | 5073 | P05067 | APP |
| 1981 | 5074 | P05090 | APOD |
| 1982 | 5075 | P05109 | S100A8 |
| 1983 | 5076 | P05111 | INHA |
| 1984 | 5077 | P05120 | SERPINB2 |
| 1985 | 5078 | P05121 | SERPINE1 |
| 1986 | 5079 | P05154 | SERPINA5 |
| 1987 | 5080 | P05155 | SERPING1 |
| 1988 | 5081 | P05160 | F13B |
| 1989 | 5082 | P05164 | MPO |
| 1990 | 5083 | P05186 | ALPL |
| 1991 | 5084 | P05187 | ALPP |
| 1992 | 5085 | P05408 | SCG5 |
| 1993 | 5086 | P05543 | SERPINA7 |
| 1994 | 5087 | P05546 | SERPIND1 |
| 1995 | 5088 | P05814 | CSN2 |
| 1996 | 5089 | P05981 | HPN |
| 1997 | 5090 | P06133 | UGT2B4 |
| 1998 | 5091 | P06276 | BCHE |
| 1999 | 5092 | P06280 | GLA |
| 2000 | 5093 | P06307 | CCK |
| 2001 | 5094 | P06396 | GSN |
| 2002 | 5095 | P06681 | C2 |
| 2003 | 5096 | P06702 | S100A9 |
| 2004 | 5097 | P06858 | LPL |
| 2005 | 5098 | P06865 | HEXA |
| 2006 | 5099 | P06870 | KLK1 |
| 2007 | 5100 | P07093 | SERPINE2 |
| 2008 | 5101 | P07098 | LIPF |
| 2009 | 5102 | P07237 | P4HB |
| 2010 | 5103 | P07288 | KLK3 |
| 2011 | 5104 | P07339 | CTSD |
| 2012 | 5105 | P07355 | ANXA2 |
| 2013 | 5106 | P07360 | C8G |
| 2014 | 5107 | P07477 | PRSS1 |
| 2015 | 5108 | P07478 | PRSS2 |
| 2016 | 5109 | P07498 | CSN3 |
| 2017 | 5110 | P07602 | PSAP |
| 2018 | 5111 | P07686 | HEXB |
| 2019 | 5112 | P07711 | CTSL |
| 2020 | 5113 | P07949 | RET |
| 2021 | 5114 | P07988 | SFTPB |
| 2022 | 5115 | P07998 | RNASE1 |
| 2023 | 5116 | P08118 | MSMB |
| 2024 | 5117 | P08185 | SERPINA6 |
| 2025 | 5118 | P08217 | CELA2A |
| 2026 | 5119 | P08218 | CELA2B |
| 2027 | 5120 | P08246 | ELANE |
| 2028 | 5121 | P08254 | MMP3 |
| 2029 | 5122 | P08294 | SOD3 |
| 2030 | 5123 | P08311 | CTSG |
| 2031 | 5124 | P08473 | MME |
| 2032 | 5125 | P08476 | INHBA |
| 2033 | 5126 | P08572 | COL4A2 |
| 2034 | 5127 | P08697 | SERPINF2 |
| 2035 | 5128 | P08833 | IGFBP1 |
| 2036 | 5129 | P08861 | CELA3B |
| 2037 | 5130 | P08910 | ABHD2 |
| 2038 | 5131 | P09093 | CELA3A |
| 2039 | 5132 | P09228 | CST2 |
| 2040 | 5133 | P09237 | MMP7 |
| 2041 | 5134 | P09238 | MMP10 |
| 2042 | 5135 | P09382 | LGALS1 |
| 2043 | 5136 | P09466 | PAEP |
| 2044 | 5137 | P09544 | WNT2 |
| 2045 | 5138 | P09668 | CTSH |
| 2046 | 5139 | P09758 | TACSTD2 |
| 2047 | 5140 | P09923 | ALPI |
| 2048 | 5141 | P09958 | FURIN |
| 2049 | 5142 | P0C862 | C1QTNF9 |
| 2050 | 5143 | P0DJD7 | PGA4 |
| 2051 | 5144 | P0DJD9 | PGA5 |
| 2052 | 5145 | P0DJI8 | SAA1 |
| 2053 | 5146 | P0DJI9 | SAA2 |
| 2054 | 5147 | P0DML2 | CSH |
| 2055 | 5148 | P0DML3 | CSH2 |
| 2056 | 5149 | P0DMR2 | SCGB1C2 |
| 2057 | 5150 | P10124 | SRGN |
| 2058 | 5151 | P10144 | GZMB |
| 2059 | 5152 | P10153 | RNASE2 |
| 2060 | 5153 | P10253 | GAA |
| 2061 | 5154 | P10323 | ACR |
| 2062 | 5155 | P10451 | SPP1 |
| 2063 | 5156 | P10619 | CTSA |
| 2064 | 5157 | P10645 | CHGA |
| 2065 | 5158 | P10696 | ALPPL2 |
| 2066 | 5159 | P10720 | PF4V1 |
| 2067 | 5160 | P10909 | CLU |
| 2068 | 5161 | P11021 | HSPA5 |
| 2069 | 5162 | P11150 | LIPC |
| 2070 | 5163 | P11230 | CHRNB1 |
| 2071 | 5164 | P11597 | CETP |
| 2072 | 5165 | P11684 | SCGB1A1 |
| 2073 | 5166 | P12018 | VPREB1 |
| 2074 | 5167 | P12110 | COL6A2 |
| 2075 | 5168 | P12259 | F5 |
| 2076 | 5169 | P12272 | PTHLH |
| 2077 | 5170 | P12544 | GZMA |
| 2078 | 5171 | P12724 | RNASE3 |
| 2079 | 5172 | P12872 | MLN |
| 2080 | 5173 | P13284 | IFI30 |
| 2081 | 5174 | P13521 | SCG2 |
| 2082 | 5175 | P13637 | ATP1A3 |
| 2083 | 5176 | P13667 | PDIA4 |
| 2084 | 5177 | P13674 | P4HA1 |
| 2085 | 5178 | P13686 | ACP5 |
| 2086 | 5179 | P13725 | OSM |
| 2087 | 5180 | P13762 | HLA-DRB4 |
| 2088 | 5181 | P13866 | SLC5A1 |
| 2089 | 5182 | P14091 | CTSE |
| 2090 | 5183 | P14207 | FOLR2 |
| 2091 | 5184 | P14384 | CPM |
| 2092 | 5185 | P14415 | ATP1B2 |
| 2093 | 5186 | P14555 | PLA2G2A |
| 2094 | 5187 | P14625 | HSP90B1 |
| 2095 | 5188 | P14735 | IDE |
| 2096 | 5189 | P15085 | CPA1 |
| 2097 | 5190 | P15086 | CPB1 |
| 2098 | 5191 | P15088 | CPA3 |
| 2099 | 5192 | P15169 | CPN1 |
| 2100 | 5193 | P15289 | ARSA |
| 2101 | 5194 | P15309 | ACPP |
| 2102 | 5195 | P15328 | FOLR1 |
| 2103 | 5196 | P15586 | GNS |
| 2104 | 5197 | P16035 | TIMP2 |
| 2105 | 5198 | P16150 | SPN |
| 2106 | 5199 | P16233 | PNLIP |
| 2107 | 5200 | P16278 | GLB1 |
| 2108 | 5201 | P16422 | EPCAM |
| 2109 | 5202 | P16444 | DPEP1 |
| 2110 | 5203 | P16519 | PCSK2 |
| 2111 | 5204 | P16562 | CRISP2 |
| 2112 | 5205 | P16662 | UGT2B7 |
| 2113 | 5206 | P16870 | CPE |
| 2114 | 5207 | P17050 | NAGA |
| 2115 | 5208 | P17213 | BPI |
| 2116 | 5209 | P17787 | CHRNB2 |
| 2117 | 5210 | P17813 | ENG |
| 2118 | 5211 | P17900 | GM2A |
| 2119 | 5212 | P17931 | LGALS3 |
| 2120 | 5213 | P17936 | IGFBP3 |
| 2121 | 5214 | P18065 | IGFBP2 |
| 2122 | 5215 | P18433 | PTPRA |
| 2123 | 5216 | P18505 | GABRB1 |
| 2124 | 5217 | P18507 | GABRG2 |
| 2125 | 5218 | P18509 | ADCYAP1 |
| 2126 | 5219 | P19224 | UGT1A6 |
| 2127 | 5220 | P19440 | GGT1 |
| 2128 | 5221 | P19652 | ORM2 |
| 2129 | 5222 | P19883 | FST |
| 2130 | 5223 | P19957 | PI3 |
| 2131 | 5224 | P20023 | CR2 |
| 2132 | 5225 | P20061 | TCN1 |
| 2133 | 5226 | P20062 | TCN2 |
| 2134 | 5227 | P20151 | KLK2 |
| 2135 | 5228 | P20160 | AZU1 |
| 2136 | 5229 | P20231 | TPSB2 |
| 2137 | 5230 | P20382 | PMCH |
| 2138 | 5231 | P20396 | TRH |
| 2139 | 5232 | P20718 | GZMH |
| 2140 | 5233 | P20851 | C4BPB |
| 2141 | 5234 | P20933 | AGA |
| 2142 | 5235 | P21246 | PTN |
| 2143 | 5236 | P21741 | MDK |
| 2144 | 5237 | P21815 | IBSP |
| 2145 | 5238 | P21964 | COMT |
| 2146 | 5239 | P22309 | UGT1A1 |
| 2147 | 5240 | P22310 | UGT1A4 |
| 2148 | 5241 | P22692 | IGFBP4 |
| 2149 | 5242 | P22748 | CA4 |
| 2150 | 5243 | P22894 | MMP8 |
| 2151 | 5244 | P23141 | CES1 |
| 2152 | 5245 | P23276 | KEL |
| 2153 | 5246 | P23284 | PPIB |
| 2154 | 5247 | P23327 | HRC |
| 2155 | 5248 | P23415 | GLRA1 |
| 2156 | 5249 | P23416 | GLRA2 |
| 2157 | 5250 | P23435 | CBLN1 |
| 2158 | 5251 | P23582 | NPPC |
| 2159 | 5252 | P23946 | CMA1 |
| 2160 | 5253 | P23975 | SLC6A2 |
| 2161 | 5254 | P24046 | GABRR1 |
| 2162 | 5255 | P24158 | PRTN3 |
| 2163 | 5256 | P24387 | CRHBP |
| 2164 | 5257 | P24592 | IGFBP6 |
| 2165 | 5258 | P24593 | IGFBP5 |
| 2166 | 5259 | P24855 | DNASE1 |
| 2167 | 5260 | P25092 | GUCY2C |
| 2168 | 5261 | P26436 | ACRV1 |
| 2169 | 5262 | P26885 | FKBP2 |
| 2170 | 5263 | P27037 | ACVR2A |
| 2171 | 5264 | P27169 | PON1 |
| 2172 | 5265 | P27352 | GIF |
| 2173 | 5266 | P27658 | COL8A1 |
| 2174 | 5267 | P27797 | CALR |
| 2175 | 5268 | P27918 | CFP |
| 2176 | 5269 | P28325 | CST5 |
| 2177 | 5270 | P28472 | GABRB3 |
| 2178 | 5271 | P28476 | GABRR2 |
| 2179 | 5272 | P28799 | GRN |
| 2180 | 5273 | P29120 | PCSK1 |
| 2181 | 5274 | P29279 | CTGF |
| 2182 | 5275 | P29622 | SERPINA4 |
| 2183 | 5276 | P29973 | CNGA1 |
| 2184 | 5277 | P30040 | ERP29 |
| 2185 | 5278 | P30101 | PDIA3 |
| 2186 | 5279 | P30531 | SLC6A1 |
| 2187 | 5280 | P30532 | CHRNA5 |
| 2188 | 5281 | P30533 | LRPAP1 |
| 2189 | 5282 | P30926 | CHRNB4 |
| 2190 | 5283 | P30990 | NTS |
| 2191 | 5284 | P31151 | S100A7 |
| 2192 | 5285 | P31415 | CASQ1 |
| 2193 | 5286 | P31644 | GABRA5 |
| 2194 | 5287 | P31947 | SFN |
| 2195 | 5288 | P32297 | CHRNA3 |
| 2196 | 5289 | P32455 | GBP1 |
| 2197 | 5290 | P34059 | GALNS |
| 2198 | 5291 | P34096 | RNASE4 |
| 2199 | 5292 | P34810 | CD68 |
| 2200 | 5293 | P34903 | GABRA3 |
| 2201 | 5294 | P34910 | EVI2B |
| 2202 | 5295 | P34925 | RYK |
| 2203 | 5296 | P35052 | GPC1 |
| 2204 | 5297 | P35503 | UGT1A3 |
| 2205 | 5298 | P35542 | SAA4 |
| 2206 | 5299 | P35625 | TIMP3 |
| 2207 | 5300 | P36222 | CHI3L1 |
| 2208 | 5301 | P36269 | GGT5 |
| 2209 | 5302 | P36896 | ACVR1B |
| 2210 | 5303 | P36955 | SERPINF1 |
| 2211 | 5304 | P36980 | CFHR2 |
| 2212 | 5305 | P37023 | ACVRL1 |
| 2213 | 5306 | P37840 | SNCA |
| 2214 | 5307 | P38567 | SPAM1 |
| 2215 | 5308 | P38571 | LIPA |
| 2216 | 5309 | P39086 | GRIK1 |
| 2217 | 5310 | P39877 | PLA2G5 |
| 2218 | 5311 | P39900 | MMP12 |
| 2219 | 5312 | P40313 | CTRL |
| 2220 | 5313 | P41159 | LEP |
| 2221 | 5314 | P41221 | WNT5A |
| 2222 | 5315 | P41222 | PTGDS |
| 2223 | 5316 | P41439 | FOLR3 |
| 2224 | 5317 | P42127 | ASIP |
| 2225 | 5318 | P42261 | GRIA1 |
| 2226 | 5319 | P42263 | GRIA3 |
| 2227 | 5320 | P42658 | DPP6 |
| 2228 | 5321 | P42785 | PRCP |
| 2229 | 5322 | P42892 | ECE1 |
| 2230 | 5323 | P43005 | SLC1A1 |
| 2231 | 5324 | P43007 | SLC1A4 |
| 2232 | 5325 | P43234 | CTSO |
| 2233 | 5326 | P43235 | CTSK |
| 2234 | 5327 | P43251 | BTD |
| 2235 | 5328 | P43490 | NAMPT |
| 2236 | 5329 | P43652 | AFM |
| 2237 | 5330 | P43681 | CHRNA4 |
| 2238 | 5331 | P45452 | MMP13 |
| 2239 | 5332 | P45844 | ABCG1 |
| 2240 | 5333 | P46059 | SLC15A1 |
| 2241 | 5334 | P46098 | HTR3A |
| 2242 | 5335 | P46695 | IER3 |
| 2243 | 5336 | P47710 | CSN1S1 |
| 2244 | 5337 | P47870 | GABRB2 |
| 2245 | 5338 | P47929 | LGALS7 |
| 2246 | 5339 | P47972 | NPTX2 |
| 2247 | 5340 | P48029 | SLC6A8 |
| 2248 | 5341 | P48052 | CPA2 |
| 2249 | 5342 | P48060 | GLIPR1 |
| 2250 | 5343 | P48065 | SLC6A12 |
| 2251 | 5344 | P48066 | SLC6A11 |
| 2252 | 5345 | P48067 | SLC6A9 |
| 2253 | 5346 | P48167 | GLRB |
| 2254 | 5347 | P48169 | GABRA4 |
| 2255 | 5348 | P48307 | TFPI2 |
| 2256 | 5349 | P48723 | HSPA13 |
| 2257 | 5350 | P48745 | NOV |
| 2258 | 5351 | P48995 | TRPC1 |
| 2259 | 5352 | P49184 | DNASE1L1 |
| 2260 | 5353 | P49662 | CASP4 |
| 2261 | 5354 | P49771 | FLT3LG |
| 2262 | 5355 | P49862 | KLK7 |
| 2263 | 5356 | P49863 | GZMK |
| 2264 | 5357 | P50281 | MMP14 |
| 2265 | 5358 | P50443 | SLC26A2 |
| 2266 | 5359 | P50454 | SERPINH1 |
| 2267 | 5360 | P50897 | PPT1 |
| 2268 | 5361 | P51124 | GZMM |
| 2269 | 5362 | P51164 | ATP4B |
| 2270 | 5363 | P51168 | SCNN1B |
| 2271 | 5364 | P51170 | SCNN1G |
| 2272 | 5365 | P51575 | P2RX1 |
| 2273 | 5366 | P51654 | GPC3 |
| 2274 | 5367 | P51674 | GPM6A |
| 2275 | 5368 | P51686 | CCR9 |
| 2276 | 5369 | P51688 | SGSH |
| 2277 | 5370 | P51689 | ARSD |
| 2278 | 5371 | P51690 | ARSE |
| 2279 | 5372 | P51693 | APLP1 |
| 2280 | 5373 | P51811 | XK |
| 2281 | 5374 | P51841 | GUCY2F |
| 2282 | 5375 | P52823 | STC1 |
| 2283 | 5376 | P52961 | ART1 |
| 2284 | 5377 | P53634 | CTSC |
| 2285 | 5378 | P53801 | PTTG1IP |
| 2286 | 5379 | P54108 | CRISP3 |
| 2287 | 5380 | P54317 | PNLIPRP2 |
| 2288 | 5381 | P54709 | ATP1B3 |
| 2289 | 5382 | P54793 | ARSF |
| 2290 | 5383 | P54803 | GALC |
| 2291 | 5384 | P54855 | UGT2B15 |
| 2292 | 5385 | P55001 | MFAP2 |
| 2293 | 5386 | P55056 | APOC4 |
| 2294 | 5387 | P55058 | PLTP |
| 2295 | 5388 | P55083 | MFAP4 |
| 2296 | 5389 | P55103 | INHBC |
| 2297 | 5390 | P55145 | MANF |
| 2298 | 5391 | P55808 | XG |
| 2299 | 5392 | P56373 | P2RX3 |
| 2300 | 5393 | P56704 | WNT3A |
| 2301 | 5394 | P56705 | WNT4 |
| 2302 | 5395 | P56706 | WNT7B |
| 2303 | 5396 | P56748 | CLDN8 |
| 2304 | 5397 | P56749 | CLDN12 |
| 2305 | 5398 | P56750 | CLDN17 |
| 2306 | 5399 | P56817 | BACE1 |
| 2307 | 5400 | P56851 | EDDM3B |
| 2308 | 5401 | P56856 | CLDN18 |
| 2309 | 5402 | P56880 | CLDN20 |
| 2310 | 5403 | P56937 | HSD17B7 |
| 2311 | 5404 | P57727 | TMPRSS3 |
| 2312 | 5405 | P57739 | CLDN2 |
| 2313 | 5406 | P58062 | SPINK7 |
| 2314 | 5407 | P58166 | INHBE |
| 2315 | 5408 | P58294 | PROK1 |
| 2316 | 5409 | P58417 | NXPH1 |
| 2317 | 5410 | P58499 | FAM3B |
| 2318 | 5411 | P58658 | EVA1C |
| 2319 | 5412 | P59666 | DEFA3 |
| 2320 | 5413 | P59826 | BPIFB3 |
| 2321 | 5414 | P60153 | RNASE9 |
| 2322 | 5415 | P60508 | ERVFRD-1 |
| 2323 | 5416 | P60827 | C1QTNF8 |
| 2324 | 5417 | P60985 | KRTDAP |
| 2325 | 5418 | P61366 | OSTN |
| 2326 | 5419 | P61626 | LYZ |
| 2327 | 5420 | P61916 | NPC2 |
| 2328 | 5421 | P62502 | LCN6 |
| 2329 | 5422 | P62937 | PPIA |
| 2330 | 5423 | P67809 | YBX1 |
| 2331 | 5424 | P78333 | GPC5 |
| 2332 | 5425 | P78348 | ASIC1 |
| 2333 | 5426 | P78369 | CLDN10 |
| 2334 | 5427 | P78562 | PHEX |
| 2335 | 5428 | P79483 | HLA-DRB3 |
| 2336 | 5429 | P80108 | GPLD1 |
| 2337 | 5430 | P80188 | LCN2 |
| 2338 | 5431 | P83105 | HTRA4 |
| 2339 | 5432 | P83110 | HTRA3 |
| 2340 | 5433 | P98066 | TNFAIP6 |
| 2341 | 5434 | Q00604 | NDP |
| 2342 | 5435 | Q01459 | CTBS |
| 2343 | 5436 | Q01523 | DEFA5 |
| 2344 | 5437 | Q02383 | SEMG2 |
| 2345 | 5438 | Q02413 | DSG1 |
| 2346 | 5439 | Q02747 | GUCA2A |
| 2347 | 5440 | Q02809 | PLOD1 |
| 2348 | 5441 | Q02846 | GUCY2D |
| 2349 | 5442 | Q02985 | CFHR3 |
| 2350 | 5443 | Q03403 | TFF2 |
| 2351 | 5444 | Q03591 | CFHR1 |
| 2352 | 5445 | Q03692 | COL10A1 |
| 2353 | 5446 | Q04771 | ACVR1 |
| 2354 | 5447 | Q04900 | CD164 |
| 2355 | 5448 | Q05901 | CHRNB3 |
| 2356 | 5449 | Q05996 | ZP2 |
| 2357 | 5450 | Q06033 | ITIH3 |
| 2358 | 5451 | Q06481 | APLP2 |
| 2359 | 5452 | Q06495 | SLC34A1 |
| 2360 | 5453 | Q07001 | CHRND |
| 2361 | 5454 | Q07021 | C1QBP |
| 2362 | 5455 | Q07075 | ENPEP |
| 2363 | 5456 | Q07507 | DPT |
| 2364 | 5457 | Q07837 | SLC3A1 |
| 2365 | 5458 | Q08345 | DDR1 |
| 2366 | 5459 | Q08380 | LGALS3BP |
| 2367 | 5460 | Q08554 | DSC1 |
| 2368 | 5461 | Q08629 | SPOCK1 |
| 2369 | 5462 | Q08830 | FGL1 |
| 2370 | 5463 | Q0P5P2 | C17orf67 |
| 2371 | 5464 | Q0VAF6 | SYCN |
| 2372 | 5465 | Q10588 | BST1 |
| 2373 | 5466 | Q10589 | BST2 |
| 2374 | 5467 | Q12841 | FSTL1 |
| 2375 | 5468 | Q12884 | FAP |
| 2376 | 5469 | Q12889 | OVGP1 |
| 2377 | 5470 | Q12904 | AIMP1 |
| 2378 | 5471 | Q13003 | GRIK3 |
| 2379 | 5472 | Q13087 | PDIA2 |
| 2380 | 5473 | Q13093 | PLA2G7 |
| 2381 | 5474 | Q13145 | BAMBI |
| 2382 | 5475 | Q13162 | PRDX4 |
| 2383 | 5476 | Q13217 | DNAJC3 |
| 2384 | 5477 | Q13231 | CHIT1 |
| 2385 | 5478 | Q13253 | NOG |
| 2386 | 5479 | Q13296 | SCGB2A2 |
| 2387 | 5480 | Q13316 | DMP1 |
| 2388 | 5481 | Q13361 | MFAP5 |
| 2389 | 5482 | Q13421 | MSLN |
| 2390 | 5483 | Q13438 | OS9 |
| 2391 | 5484 | Q13445 | TMED1 |
| 2392 | 5485 | Q13467 | FZD5 |
| 2393 | 5486 | Q13507 | TRPC3 |
| 2394 | 5487 | Q13508 | ART3 |
| 2395 | 5488 | Q13530 | SERINC3 |
| 2396 | 5489 | Q13563 | PKD2 |
| 2397 | 5490 | Q13609 | DNASE1L3 |
| 2398 | 5491 | Q13705 | ACVR2B |
| 2399 | 5492 | Q13790 | APOF |
| 2400 | 5493 | Q13822 | ENPP2 |
| 2401 | 5494 | Q14050 | COL9A3 |
| 2402 | 5495 | Q14242 | SELPLG |
| 2403 | 5496 | Q14257 | RCN2 |
| 2404 | 5497 | Q14314 | FGL2 |
| 2405 | 5498 | Q14406 | CSHL1 |
| 2406 | 5499 | Q14507 | EDDM3A |
| 2407 | 5500 | Q14508 | WFDC2 |
| 2408 | 5501 | Q14515 | SPARCL1 |
| 2409 | 5502 | Q14696 | MESD |
| 2410 | 5503 | Q14714 | SSPN |
| 2411 | 5504 | Q14832 | GRM3 |
| 2412 | 5505 | Q14993 | COL19A1 |
| 2413 | 5506 | Q14C87 | TMEM132D |
| 2414 | 5507 | Q15043 | SLC39A14 |
| 2415 | 5508 | Q15046 | KARS |
| 2416 | 5509 | Q15063 | POSTN |
| 2417 | 5510 | Q15113 | PCOLCE |
| 2418 | 5511 | Q15165 | PON2 |
| 2419 | 5512 | Q15166 | PON3 |
| 2420 | 5513 | Q15293 | RCN1 |
| 2421 | 5514 | Q15465 | SHH |
| 2422 | 5515 | Q15517 | CDSN |
| 2423 | 5516 | Q15726 | KISS1 |
| 2424 | 5517 | Q15758 | SLC1A5 |
| 2425 | 5518 | Q15782 | CHI3L2 |
| 2426 | 5519 | Q15818 | NPTX1 |
| 2427 | 5520 | Q15825 | CHRNA6 |
| 2428 | 5521 | Q15828 | CST6 |
| 2429 | 5522 | Q15848 | ADIPOQ |
| 2430 | 5523 | Q15884 | FAM189A2 |
| 2431 | 5524 | Q15904 | ATP6AP1 |
| 2432 | 5525 | Q16281 | CNGA3 |
| 2433 | 5526 | Q16378 | PRR4 |
| 2434 | 5527 | Q16445 | GABRA6 |
| 2435 | 5528 | Q16549 | PCSK7 |
| 2436 | 5529 | Q16568 | CARTPT |
| 2437 | 5530 | Q16570 | ACKR1 |
| 2438 | 5531 | Q16585 | SGCB |
| 2439 | 5532 | Q16586 | SGCA |
| 2440 | 5533 | Q16610 | ECM1 |
| 2441 | 5534 | Q16651 | PRSS8 |
| 2442 | 5535 | Q16671 | AMHR2 |
| 2443 | 5536 | Q16674 | MIA |
| 2444 | 5537 | Q16769 | QPCT |
| 2445 | 5538 | Q16790 | CA9 |
| 2446 | 5539 | Q16832 | DDR2 |
| 2447 | 5540 | Q16853 | AOC3 |
| 2448 | 5541 | Q17R60 | IMPG1 |
| 2449 | 5542 | Q17RR3 | PNLIPRP3 |
| 2450 | 5543 | Q19T08 | ECSCR |
| 2451 | 5544 | Q1HG43 | DUOXA1 |
| 2452 | 5545 | Q1HG44 | DUOXA2 |
| 2453 | 5546 | Q1W4C9 | SPINK13 |
| 2454 | 5547 | Q1ZYL8 | IZUMO4 |
| 2455 | 5548 | Q24JP5 | TMEM132A |
| 2456 | 5549 | Q2I0M5 | RSPO4 |
| 2457 | 5550 | Q2M2E5 | C5orf64 |
| 2458 | 5551 | Q2M385 | MPEG1 |
| 2459 | 5552 | Q2M3T9 | HYAL4 |
| 2460 | 5553 | Q2MKA7 | RSPO1 |
| 2461 | 5554 | Q2MV58 | TCTN1 |
| 2462 | 5555 | Q2TAL6 | VWC2 |
| 2463 | 5556 | Q30154 | HLA-DRB5 |
| 2464 | 5557 | Q30KP8 | DEFB136 |
| 2465 | 5558 | Q30KP9 | DEFB135 |
| 2466 | 5559 | Q30KQ4 | DEFB116 |
| 2467 | 5560 | Q30KQ5 | DEFB115 |
| 2468 | 5561 | Q30KQ7 | DEFB113 |
| 2469 | 5562 | Q30KQ8 | DEFB112 |
| 2470 | 5563 | Q32M45 | ANO4 |
| 2471 | 5564 | Q3KNT9 | TMEM95 |
| 2472 | 5565 | Q3SXP7 | SHISAL1 |
| 2473 | 5566 | Q3SY77 | UGT3A2 |
| 2474 | 5567 | Q401N2 | ZACN |
| 2475 | 5568 | Q496H8 | NRN1L |
| 2476 | 5569 | Q496J9 | SV2C |
| 2477 | 5570 | Q49AH0 | CDNF |
| 2478 | 5571 | Q4G0G5 | SCGB2B2 |
| 2479 | 5572 | Q4KMQ2 | ANO6 |
| 2480 | 5573 | Q4U2R8 | SLC22A6 |
| 2481 | 5574 | Q4W5P6 | TMEM155 |
| 2482 | 5575 | Q504Y0 | SLC39A12 |
| 2483 | 5576 | Q53EL9 | SEZ6 |
| 2484 | 5577 | Q53H76 | PLA1A |
| 2485 | 5578 | Q53RT3 | ASPRV1 |
| 2486 | 5579 | Q5DT21 | SPINK9 |
| 2487 | 5580 | Q5EBL8 | PDZD11 |
| 2488 | 5581 | Q5FWE3 | PRRT3 |
| 2489 | 5582 | Q5FYB0 | ARSJ |
| 2490 | 5583 | Q5FYB1 | ARSI |
| 2491 | 5584 | Q5GAN3 | RNASE13 |
| 2492 | 5585 | Q5GAN4 | RNASE12 |
| 2493 | 5586 | Q5GAN6 | RNASE10 |
| 2494 | 5587 | Q5J5C9 | DEFB121 |
| 2495 | 5588 | Q5JS37 | NHLRC3 |
| 2496 | 5589 | Q5JTB6 | PLAC9 |
| 2497 | 5590 | Q5MY95 | ENTPD8 |
| 2498 | 5591 | Q5PT55 | SLC10A5 |
| 2499 | 5592 | Q5T742 | C10orf25 |
| 2500 | 5593 | Q5TF21 | SOGA3 |
| 2501 | 5594 | Q5UCC4 | EMC10 |
| 2502 | 5595 | Q5VXJ0 | LIPK |
| 2503 | 5596 | Q5VXM1 | CDCP2 |
| 2504 | 5597 | Q5W186 | CST9 |
| 2505 | 5598 | Q68BL8 | OLFML2B |
| 2506 | 5599 | Q68DH5 | LMBRD2 |
| 2507 | 5600 | Q68DV7 | RNF43 |
| 2508 | 5601 | Q695T7 | SLC6A19 |
| 2509 | 5602 | Q6E0U4 | DMKN |
| 2510 | 5603 | Q6FHJ7 | SFRP4 |
| 2511 | 5604 | Q6GPI1 | CTRB2 |
| 2512 | 5605 | Q6H9L7 | ISM2 |
| 2513 | 5606 | Q6HA08 | ASTL |
| 2514 | 5607 | Q6IE38 | SPINK14 |
| 2515 | 5608 | Q6ISU1 | PTCRA |
| 2516 | 5609 | Q6J4K2 | SLC8B1 |
| 2517 | 5610 | Q6MZM9 | PRR27 |
| 2518 | 5611 | Q6NSJ0 | MYORG |
| 2519 | 5612 | Q6NSX1 | CCDC70 |
| 2520 | 5613 | Q6NUM9 | RETSAT |
| 2521 | 5614 | Q6NUS6 | TCTN3 |
| 2522 | 5615 | Q6NUS8 | UGT3A1 |
| 2523 | 5616 | Q6NVV3 | NIPAL1 |
| 2524 | 5617 | Q6NW40 | RGMB |
| 2525 | 5618 | Q6P093 | AADACL2 |
| 2526 | 5619 | Q6P4Q7 | CNNM4 |
| 2527 | 5620 | Q6P5W5 | SLC39A4 |
| 2528 | 5621 | Q6P995 | FAM171B |
| 2529 | 5622 | Q6P9G4 | TMEM154 |
| 2530 | 5623 | Q6PB30 | CSAG1 |
| 2531 | 5624 | Q6PL45 | BRICD5 |
| 2532 | 5625 | Q6Q788 | APOA5 |
| 2533 | 5626 | Q6SPF0 | SAMD1 |
| 2534 | 5627 | Q6URK8 | TEPP |
| 2535 | 5628 | Q6UW10 | SFTA2 |
| 2536 | 5629 | Q6UW49 | SPESP1 |
| 2537 | 5630 | Q6UWF9 | FAM180A |
| 2538 | 5631 | Q6UWH4 | FAM198B |
| 2539 | 5632 | Q6UWI2 | PARM1 |
| 2540 | 5633 | Q6UWI4 | SHISA2 |
| 2541 | 5634 | Q6UWJ1 | TMCO3 |
| 2542 | 5635 | Q6UWJ8 | CD164L2 |
| 2543 | 5636 | Q6UWM5 | GLIPR1L1 |
| 2544 | 5637 | Q6UWM7 | LCTL |
| 2545 | 5638 | Q6UWM9 | UGT2A3 |
| 2546 | 5639 | Q6UWN8 | SPINK6 |
| 2547 | 5640 | Q6UWQ5 | LYZL1 |
| 2548 | 5641 | Q6UWR7 | ENPP6 |
| 2549 | 5642 | Q6UWU4 | C6orf89 |
| 2550 | 5643 | Q6UWV6 | ENPP7 |
| 2551 | 5644 | Q6UWW0 | LCN15 |
| 2552 | 5645 | Q6UWW8 | CES3 |
| 2553 | 5646 | Q6UWY0 | ARSK |
| 2554 | 5647 | Q6UWY2 | PRSS57 |
| 2555 | 5648 | Q6UWY5 | OLFML1 |
| 2556 | 5649 | Q6UX06 | OLFM4 |
| 2557 | 5650 | Q6UX34 | SNORC |
| 2558 | 5651 | Q6UX39 | AMTN |
| 2559 | 5652 | Q6UX71 | PLXDC2 |
| 2560 | 5653 | Q6UXA7 | C6orf15 |
| 2561 | 5654 | Q6UXF1 | TMEM108 |
| 2562 | 5655 | Q6UXI7 | VIT |
| 2563 | 5656 | Q6UXQ4 | C2orf66 |
| 2564 | 5657 | Q6UXT8 | ALKAL1 |
| 2565 | 5658 | Q6UXT9 | ABHD15 |
| 2566 | 5659 | Q6UXX5 | ITIH6 |
| 2567 | 5660 | Q6WN34 | CHRDL2 |
| 2568 | 5661 | Q6X4U4 | SOSTDC1 |
| 2569 | 5662 | Q6XE38 | SCGB1D4 |
| 2570 | 5663 | Q6XZB0 | LIPI |
| 2571 | 5664 | Q6ZMH5 | SLC39A5 |
| 2572 | 5665 | Q6ZMR5 | TMPRSS11A |
| 2573 | 5666 | Q6ZNF0 | ACP7 |
| 2574 | 5667 | Q6ZP80 | TMEM182 |
| 2575 | 5668 | Q6ZQN7 | SLCO4C1 |
| 2576 | 5669 | Q6ZTQ4 | CDHR3 |
| 2577 | 5670 | Q75V66 | ANO5 |
| 2578 | 5671 | Q76B58 | BRINP3 |
| 2579 | 5672 | Q7L0J3 | SV2A |
| 2580 | 5673 | Q7L1I2 | SV2B |
| 2581 | 5674 | Q7L8A9 | VASH1 |
| 2582 | 5675 | Q7RTT9 | SLC29A4 |
| 2583 | 5676 | Q7RTW8 | OTOA |
| 2584 | 5677 | Q7RTX0 | TAS1R3 |
| 2585 | 5678 | Q7RTY5 | PRSS48 |
| 2586 | 5679 | Q7RTY7 | OVCH1 |
| 2587 | 5680 | Q7Z304 | MAMDC2 |
| 2588 | 5681 | Q7Z3D4 | LYSMD3 |
| 2589 | 5682 | Q7Z3S7 | CACNA2D4 |
| 2590 | 5683 | Q7Z404 | TMC4 |
| 2591 | 5684 | Q7Z410 | TMPRSS9 |
| 2592 | 5685 | Q7Z4F1 | LRP10 |
| 2593 | 5686 | Q7Z4W2 | LYZL2 |
| 2594 | 5687 | Q7Z5A4 | PRSS42 |
| 2595 | 5688 | Q7Z5A8 | FAM19A3 |
| 2596 | 5689 | Q7Z5A9 | FAM19A1 |
| 2597 | 5690 | Q7Z5L0 | VMO1 |
| 2598 | 5691 | Q7Z5M5 | TMC3 |
| 2599 | 5692 | Q7Z5P4 | HSD17B13 |
| 2600 | 5693 | Q7Z7B7 | DEFB132 |
| 2601 | 5694 | Q86SG7 | LYG2 |
| 2602 | 5695 | Q86SI9 | C5orf38 |
| 2603 | 5696 | Q86T26 | TMPRSS11B |
| 2604 | 5697 | Q86TE4 | LUZP2 |
| 2605 | 5698 | Q86TW2 | ADCK1 |
| 2606 | 5699 | Q86TY3 | C14orf37 |
| 2607 | 5700 | Q86U17 | SERPINA11 |
| 2608 | 5701 | Q86UD1 | OAF |
| 2609 | 5702 | Q86UL3 | GPAT4 |
| 2610 | 5703 | Q86W47 | KCNMB4 |
| 2611 | 5704 | Q86WD7 | SERPINA9 |
| 2612 | 5705 | Q86WI0 | LHFPL1 |
| 2613 | 5706 | Q86WS5 | TMPRSS12 |
| 2614 | 5707 | Q86XP6 | GKN2 |
| 2615 | 5708 | Q86YB8 | ERO1B |
| 2616 | 5709 | Q86YL7 | PDPN |
| 2617 | 5710 | Q86Z14 | KLB |
| 2618 | 5711 | Q86Z23 | CIQL4 |
| 2619 | 5712 | Q8IU80 | TMPRSS6 |
| 2620 | 5713 | Q8IU99 | CALHM1 |
| 2621 | 5714 | Q8IUB2 | WFDC3 |
| 2622 | 5715 | Q8IUH2 | CREG2 |
| 2623 | 5716 | Q8IUK5 | PLXDC1 |
| 2624 | 5717 | Q8IVL6 | P3H3 |
| 2625 | 5718 | Q8IVL8 | CPO |
| 2626 | 5719 | Q8IVM8 | SLC22A9 |
| 2627 | 5720 | Q8IVN8 | SBSPON |
| 2628 | 5721 | Q8IW75 | SERPINA12 |
| 2629 | 5722 | Q8IW92 | GLB1L2 |
| 2630 | 5723 | Q8IWF2 | FOXRED2 |
| 2631 | 5724 | Q8IWU5 | SULF2 |
| 2632 | 5725 | Q8IWU6 | SULF1 |
| 2633 | 5726 | Q8IX19 | MCEMP1 |
| 2634 | 5727 | Q8IXA5 | SPACA3 |
| 2635 | 5728 | Q8IXB1 | DNAJC10 |
| 2636 | 5729 | Q8IXB3 | TUSC5 |
| 2637 | 5730 | Q8IYJ0 | PIANP |
| 2638 | 5731 | Q8IYK4 | COLGALT2 |
| 2639 | 5732 | Q8IYS2 | KIAA2013 |
| 2640 | 5733 | Q8IZS8 | CACNA2D3 |
| 2641 | 5734 | Q8J025 | APCDD1 |
| 2642 | 5735 | Q8N0W4 | NLGN4X |
| 2643 | 5736 | Q8N0W7 | FMR1NB |
| 2644 | 5737 | Q8N129 | CNPY4 |
| 2645 | 5738 | Q8N131 | TMEM123 |
| 2646 | 5739 | Q8N158 | GPC2 |
| 2647 | 5740 | Q8N1C3 | GABRG1 |
| 2648 | 5741 | Q8N1E2 | LYG1 |
| 2649 | 5742 | Q8N2K0 | ABHD12 |
| 2650 | 5743 | Q8N2Q7 | NLGN1 |
| 2651 | 5744 | Q8N302 | AGGF1 |
| 2652 | 5745 | Q8N387 | MUC15 |
| 2653 | 5746 | Q8N3H0 | FAM19A2 |
| 2654 | 5747 | Q8N3Z0 | PRSS35 |
| 2655 | 5748 | Q8N436 | CPXM2 |
| 2656 | 5749 | Q8N474 | SFRP1 |
| 2657 | 5750 | Q8N4F0 | BPIFB2 |
| 2658 | 5751 | Q8N4T0 | CPA6 |
| 2659 | 5752 | Q8N539 | FIBCD1 |
| 2660 | 5753 | Q8N5I4 | DHRSX |
| 2661 | 5754 | Q8N5W8 | FAM24B |
| 2662 | 5755 | Q8N608 | DPP10 |
| 2663 | 5756 | Q8N695 | SLC5A8 |
| 2664 | 5757 | Q8N6F1 | CLDN19 |
| 2665 | 5758 | Q8N766 | EMC1 |
| 2666 | 5759 | Q8N807 | PDILT |
| 2667 | 5760 | Q8N9M5 | TMEM102 |
| 2668 | 5761 | Q8NA29 | MFSD2A |
| 2669 | 5762 | Q8NA58 | PNLDC1 |
| 2670 | 5763 | Q8NB37 | GATD1 |
| 2671 | 5764 | Q8NBJ9 | SIDT2 |
| 2672 | 5765 | Q8NBK3 | SUMF1 |
| 2673 | 5766 | Q8NBL1 | POGLUT1 |
| 2674 | 5767 | Q8NBQ5 | HSD17B11 |
| 2675 | 5768 | Q8NC42 | RNF149 |
| 2676 | 5769 | Q8NC54 | KCT2 |
| 2677 | 5770 | Q8NC67 | NETO2 |
| 2678 | 5771 | Q8NCS7 | SLC44A5 |
| 2679 | 5772 | Q8NCW5 | NAXE |
| 2680 | 5773 | Q8NDZ4 | C3orf58 |
| 2681 | 5774 | Q8NE79 | BVES |
| 2682 | 5775 | Q8NEA5 | C19orf18 |
| 2683 | 5776 | Q8NEB7 | ACRBP |
| 2684 | 5777 | Q8NER1 | TRPV1 |
| 2685 | 5778 | Q8NER5 | ACVR1C |
| 2686 | 5779 | Q8NET1 | DEFB108B |
| 2687 | 5780 | Q8NEX5 | WFDC9 |
| 2688 | 5781 | Q8NEX6 | WFDC11 |
| 2689 | 5782 | Q8NF86 | PRSS33 |
| 2690 | 5783 | Q8NFJ6 | PROKR2 |
| 2691 | 5784 | Q8NFQ5 | BPIFB6 |
| 2692 | 5785 | Q8NFU4 | FDCSP |
| 2693 | 5786 | Q8NFZ6 | VN1R2 |
| 2694 | 5787 | Q8NI22 | MCFD2 |
| 2695 | 5788 | Q8TAA1 | RNASE11 |
| 2696 | 5789 | Q8TAF8 | LHFPL5 |
| 2697 | 5790 | Q8TAL6 | FIBIN |
| 2698 | 5791 | Q8TAV5 | C11orf45 |
| 2699 | 5792 | Q8TAX7 | MUC7 |
| 2700 | 5793 | Q8TB22 | SPATA20 |
| 2701 | 5794 | Q8TB96 | ITFG1 |
| 2702 | 5795 | Q8TBP5 | FAM174A |
| 2703 | 5796 | Q8TCC7 | SLC22A8 |
| 2704 | 5797 | Q8TCP9 | FAM200A |
| 2705 | 5798 | Q8TCW7 | ZPLD1 |
| 2706 | 5799 | Q8TCW9 | PROKR1 |
| 2707 | 5800 | Q8TCZ2 | CD99L2 |
| 2708 | 5801 | Q8TD06 | AGR3 |
| 2709 | 5802 | Q8TD07 | RAET1E |
| 2710 | 5803 | Q8TD20 | SLC2A12 |
| 2711 | 5804 | Q8TDE3 | RNASE8 |
| 2712 | 5805 | Q8TDL5 | BPIFB1 |
| 2713 | 5806 | Q8TDN2 | KCNV2 |
| 2714 | 5807 | Q8TE23 | TAS1R2 |
| 2715 | 5808 | Q8TE56 | ADAMTS17 |
| 2716 | 5809 | Q8TE57 | ADAMTS16 |
| 2717 | 5810 | Q8TE58 | ADAMTS15 |
| 2718 | 5811 | Q8TE60 | ADAMTS18 |
| 2719 | 5812 | Q8TEB7 | RNF128 |
| 2720 | 5813 | Q8TEB9 | RHBDD1 |
| 2721 | 5814 | Q8WTR4 | GDPD5 |
| 2722 | 5815 | Q8WTV0 | SCARB1 |
| 2723 | 5816 | Q8WU39 | MZB1 |
| 2724 | 5817 | Q8WUF8 | FAM172A |
| 2725 | 5818 | Q8WUJ1 | CYB5D2 |
| 2726 | 5819 | Q8WUM4 | PDCD6IP |
| 2727 | 5820 | Q8WUM9 | SLC20A1 |
| 2728 | 5821 | Q8WWA0 | ITLN1 |
| 2729 | 5822 | Q8WWF1 | C1orf54 |
| 2730 | 5823 | Q8WWQ2 | HPSE2 |
| 2731 | 5824 | Q8WWU7 | ITLN2 |
| 2732 | 5825 | Q8WWY7 | WFDC12 |
| 2733 | 5826 | Q8WWY8 | LIPH |
| 2734 | 5827 | Q8WX39 | LCN9 |
| 2735 | 5828 | Q8WXA8 | HTR3C |
| 2736 | 5829 | Q8WXD2 | SCG3 |
| 2737 | 5830 | Q8WXQ8 | CPA5 |
| 2738 | 5831 | Q8WXS8 | ADAMTS14 |
| 2739 | 5832 | Q8WXW3 | PIBF1 |
| 2740 | 5833 | Q8WZ59 | TMEM190 |
| 2741 | 5834 | Q8WZ79 | DNASE2B |
| 2742 | 5835 | Q92484 | SMPDL3A |
| 2743 | 5836 | Q92520 | FAM3C |
| 2744 | 5837 | Q92537 | SUSD6 |
| 2745 | 5838 | Q92542 | NCSTN |
| 2746 | 5839 | Q92563 | SPOCK2 |
| 2747 | 5840 | Q92629 | SGCD |
| 2748 | 5841 | Q92765 | FRZB |
| 2749 | 5842 | Q92781 | RDH5 |
| 2750 | 5843 | Q92820 | GGH |
| 2751 | 5844 | Q92874 | DNASE1L2 |
| 2752 | 5845 | Q92876 | KLK6 |
| 2753 | 5846 | Q92911 | SLC5A5 |
| 2754 | 5847 | Q92932 | PTPRN2 |
| 2755 | 5848 | Q92959 | SLCO2A1 |
| 2756 | 5849 | Q92982 | NINJ1 |
| 2757 | 5850 | Q93070 | ART4 |
| 2758 | 5851 | Q93086 | P2RX5 |
| 2759 | 5852 | Q93091 | RNASE6 |
| 2760 | 5853 | Q93098 | WNT8B |
| 2761 | 5854 | Q96A33 | CCDC47 |
| 2762 | 5855 | Q96A84 | EMID1 |
| 2763 | 5856 | Q96AY3 | FKBP10 |
| 2764 | 5857 | Q96B33 | CLDN23 |
| 2765 | 5858 | Q96B86 | RGMA |
| 2766 | 5859 | Q96BD0 | SLCO4A1 |
| 2767 | 5860 | Q96BQ1 | FAM3D |
| 2768 | 5861 | Q96CG8 | CTHRC1 |
| 2769 | 5862 | Q96D15 | RCN3 |
| 2770 | 5863 | Q96DA0 | ZG16B |
| 2771 | 5864 | Q96DB9 | FXYD5 |
| 2772 | 5865 | Q96DD7 | SHISA4 |
| 2773 | 5866 | Q96DN0 | ERP27 |
| 2774 | 5867 | Q96DR5 | BPIFA2 |
| 2775 | 5868 | Q96DR8 | MUCL1 |
| 2776 | 5869 | Q96DX4 | RSPRY1 |
| 2777 | 5870 | Q96DZ1 | ERLEC1 |
| 2778 | 5871 | Q96EE4 | CCDC126 |
| 2779 | 5872 | Q96EG1 | ARSG |
| 2780 | 5873 | Q96EP9 | SLC10A4 |
| 2781 | 5874 | Q96F05 | C11orf24 |
| 2782 | 5875 | Q96FT7 | ASIC4 |
| 2783 | 5876 | Q96GC9 | VMP1 |
| 2784 | 5877 | Q96GX1 | TCTN2 |
| 2785 | 5878 | Q96HE7 | ERO1A |
| 2786 | 5879 | Q96HF1 | SFRP2 |
| 2787 | 5880 | Q96HH4 | TMEM169 |
| 2788 | 5881 | Q96HP4 | OXNAD1 |
| 2789 | 5882 | Q96HV5 | TMEM41A |
| 2790 | 5883 | Q96HY6 | DDRGK1 |
| 2791 | 5884 | Q96IY4 | CPB2 |
| 2792 | 5885 | Q96J42 | TXNDC15 |
| 2793 | 5886 | Q96JB6 | LOXL4 |
| 2794 | 5887 | Q96JW4 | SLC41A2 |
| 2795 | 5888 | Q96K78 | ADGRG7 |
| 2796 | 5889 | Q96KA5 | CLPTM1L |
| 2797 | 5890 | Q96KN2 | CNDP1 |
| 2798 | 5891 | Q96KX0 | LYZL4 |
| 2799 | 5892 | Q96L08 | SUSD3 |
| 2800 | 5893 | Q96L12 | CALR3 |
| 2801 | 5894 | Q96L15 | ART5 |
| 2802 | 5895 | Q96LB9 | PGLYRP3 |
| 2803 | 5896 | Q96LR4 | FAM19A4 |
| 2804 | 5897 | Q96LT7 | C9orf72 |
| 2805 | 5898 | Q96MK3 | FAM20A |
| 2806 | 5899 | Q96MU5 | C17orf77 |
| 2807 | 5900 | Q96NZ9 | PRAP1 |
| 2808 | 5901 | Q96P44 | COL21A1 |
| 2809 | 5902 | Q96PB7 | OLFM3 |
| 2810 | 5903 | Q96PC5 | MIA2 |
| 2811 | 5904 | Q96PD2 | DCBLD2 |
| 2812 | 5905 | Q96PH1 | NOX5 |
| 2813 | 5906 | Q96PL1 | SCGB3A2 |
| 2814 | 5907 | Q96PL2 | TECTB |
| 2815 | 5908 | Q96PS8 | AQP10 |
| 2816 | 5909 | Q96PZ7 | CSMD1 |
| 2817 | 5910 | Q96QD8 | SLC38A2 |
| 2818 | 5911 | Q96QE2 | SLC2A13 |
| 2819 | 5912 | Q96QR1 | SCGB3A1 |
| 2820 | 5913 | Q96QZ0 | PANX3 |
| 2821 | 5914 | Q96RQ9 | IL4I1 |
| 2822 | 5915 | Q96S42 | NODAL |
| 2823 | 5916 | Q96S66 | CLCC1 |
| 2824 | 5917 | Q96SL4 | GPX7 |
| 2825 | 5918 | Q96T91 | GPHA2 |
| 2826 | 5919 | Q99217 | AMELX |
| 2827 | 5920 | Q99218 | AMELY |
| 2828 | 5921 | Q99470 | SDF2 |
| 2829 | 5922 | Q99519 | NEU1 |
| 2830 | 5923 | Q99523 | SORT1 |
| 2831 | 5924 | Q99538 | LGMN |
| 2832 | 5925 | Q99542 | MMP19 |
| 2833 | 5926 | Q99571 | P2RX4 |
| 2834 | 5927 | Q99572 | P2RX7 |
| 2835 | 5928 | Q99584 | S100A13 |
| 2836 | 5929 | Q99674 | CGREF1 |
| 2837 | 5930 | Q99727 | TIMP4 |
| 2838 | 5931 | Q99784 | OLFM1 |
| 2839 | 5932 | Q99835 | SMO |
| 2840 | 5933 | Q99884 | SLC6A7 |
| 2841 | 5934 | Q99895 | CTRC |
| 2842 | 5935 | Q99943 | AGPAT1 |
| 2843 | 5936 | Q99954 | SMR3A |
| 2844 | 5937 | Q99969 | RARRES2 |
| 2845 | 5938 | Q99972 | MYOC |
| 2846 | 5939 | Q9BPW4 | APOL4 |
| 2847 | 5940 | Q9BQ08 | RETNLB |
| 2848 | 5941 | Q9BQ16 | SPOCK3 |
| 2849 | 5942 | Q9BQB4 | SOST |
| 2850 | 5943 | Q9BQI4 | CCDC3 |
| 2851 | 5944 | Q9BQS7 | HEPH |
| 2852 | 5945 | Q9BQT9 | CLSTN3 |
| 2853 | 5946 | Q9BQY6 | WFDC6 |
| 2854 | 5947 | Q9BRK5 | SDF4 |
| 2855 | 5948 | Q9BRN9 | TM2D3 |
| 2856 | 5949 | Q9BRR6 | ADPGK |
| 2857 | 5950 | Q9BS26 | ERP44 |
| 2858 | 5951 | Q9BSA4 | TTYH2 |
| 2859 | 5952 | Q9BSG0 | PRADC1 |
| 2860 | 5953 | Q9BSG5 | RTBDN |
| 2861 | 5954 | Q9BSJ5 | C17orf80 |
| 2862 | 5955 | Q9BSN7 | TMEM204 |
| 2863 | 5956 | Q9BT09 | CNPY3 |
| 2864 | 5957 | Q9BT56 | SPX |
| 2865 | 5958 | Q9BTY2 | FUCA2 |
| 2866 | 5959 | Q9BU40 | CHRDL1 |
| 2867 | 5960 | Q9BUR5 | APOO |
| 2868 | 5961 | Q9BV94 | EDEM2 |
| 2869 | 5962 | Q9BWS9 | CHID1 |
| 2870 | 5963 | Q9BX73 | TM2D2 |
| 2871 | 5964 | Q9BX74 | TM2D1 |
| 2872 | 5965 | Q9BX93 | PLA2G12B |
| 2873 | 5966 | Q9BX97 | PLVAP |
| 2874 | 5967 | Q9BXI9 | C1QTNF6 |
| 2875 | 5968 | Q9BXJ1 | C1QTNF1 |
| 2876 | 5969 | Q9BXJ2 | C1QTNF7 |
| 2877 | 5970 | Q9BXJ4 | C1QTNF3 |
| 2878 | 5971 | Q9BXR6 | CFHR5 |
| 2879 | 5972 | Q9BXS4 | TMEM59 |
| 2880 | 5973 | Q9BXY4 | RSPO3 |
| 2881 | 5974 | Q9BYE2 | TMPRSS13 |
| 2882 | 5975 | Q9BYE9 | CDHR2 |
| 2883 | 5976 | Q9BZD6 | PRRG4 |
| 2884 | 5977 | Q9BZD7 | PRRG3 |
| 2885 | 5978 | Q9BZG2 | ACP4 |
| 2886 | 5979 | Q9BZM1 | PLA2G12A |
| 2887 | 5980 | Q9BZM2 | PLA2G2F |
| 2888 | 5981 | Q9BZM5 | ULBP2 |
| 2889 | 5982 | Q9BZM6 | ULBP1 |
| 2890 | 5983 | Q9C0B6 | BRINP2 |
| 2891 | 5984 | Q9C0H2 | TTYH3 |
| 2892 | 5985 | Q9C0K1 | SLC39A8 |
| 2893 | 5986 | Q9GZM7 | TINAGL1 |
| 2894 | 5987 | Q9GZN4 | PRSS22 |
| 2895 | 5988 | Q9GZT5 | WNT10A |
| 2896 | 5989 | Q9GZX9 | TWSG1 |
| 2897 | 5990 | Q9GZZ6 | CHRNA10 |
| 2898 | 5991 | Q9GZZ8 | LACRT |
| 2899 | 5992 | Q9H015 | SLC22A4 |
| 2900 | 5993 | Q9H0B8 | CRISPLD2 |
| 2901 | 5994 | Q9H0U3 | MAGT1 |
| 2902 | 5995 | Q9H0X4 | FAM234A |
| 2903 | 5996 | Q9H112 | CST11 |
| 2904 | 5997 | Q9H114 | CSTL1 |
| 2905 | 5998 | Q9H173 | SIL1 |
| 2906 | 5999 | Q9H1A3 | METTL9 |
| 2907 | 6000 | Q9H1E1 | RNASE7 |
| 2908 | 6001 | Q9H1F0 | WFDC10A |
| 2909 | 6002 | Q9H1J7 | WNT5B |
| 2910 | 6003 | Q9H1M3 | DEFB129 |
| 2911 | 6004 | Q9H1Z8 | C2orf40 |
| 2912 | 6005 | Q9H221 | ABCG8 |
| 2913 | 6006 | Q9H2J7 | SLC6A15 |
| 2914 | 6007 | Q9H2R5 | KLK15 |
| 2915 | 6008 | Q9H2U9 | ADAM7 |
| 2916 | 6009 | Q9H306 | MMP27 |
| 2917 | 6010 | Q9H336 | CRISPLD1 |
| 2918 | 6011 | Q9H3G5 | CPVL |
| 2919 | 6012 | Q9H3N1 | TMX1 |
| 2920 | 6013 | Q9H3S3 | TMPRSS5 |
| 2921 | 6014 | Q9H3U7 | SMOC2 |
| 2922 | 6015 | Q9H3Y0 | R3HDML |
| 2923 | 6016 | Q9H461 | FZD8 |
| 2924 | 6017 | Q9H497 | TOR3A |
| 2925 | 6018 | Q9H4A4 | RNPEP |
| 2926 | 6019 | Q9H4B8 | DPEP3 |
| 2927 | 6020 | Q9H4D0 | CLSTN2 |
| 2928 | 6021 | Q9H4F8 | SMOC1 |
| 2929 | 6022 | Q9H4G1 | CST9L |
| 2930 | 6023 | Q9H5V8 | CDCP1 |
| 2931 | 6024 | Q9H6B9 | EPHX3 |
| 2932 | 6025 | Q9H6E4 | CCDC134 |
| 2933 | 6026 | Q9H741 | C12orf49 |
| 2934 | 6027 | Q9H772 | GREM2 |
| 2935 | 6028 | Q9H7B7 | C7orf69 |
| 2936 | 6029 | Q9H8H3 | METTL7A |
| 2937 | 6030 | Q9H8J5 | MANSC1 |
| 2938 | 6031 | Q9H9K5 | ERVMER34-1 |
| 2939 | 6032 | Q9HAT2 | SIAE |
| 2940 | 6033 | Q9HAW8 | UGT1A10 |
| 2941 | 6034 | Q9HAW9 | UGT1A8 |
| 2942 | 6035 | Q9HB40 | SCPEP1 |
| 2943 | 6036 | Q9HBJ0 | PLAC1 |
| 2944 | 6037 | Q9HBL7 | PLGRKT |
| 2945 | 6038 | Q9HBV2 | SPACA1 |
| 2946 | 6039 | Q9HC23 | PROK2 |
| 2947 | 6040 | Q9HC57 | WFDC1 |
| 2948 | 6041 | Q9HC58 | SLC24A3 |
| 2949 | 6042 | Q9HCB6 | SPON1 |
| 2950 | 6043 | Q9HCC8 | GDPD2 |
| 2951 | 6044 | Q9HCN8 | SDF2L1 |
| 2952 | 6045 | Q9HCX4 | TRPC7 |
| 2953 | 6046 | Q9HD89 | RETN |
| 2954 | 6047 | Q9HDC9 | APMAP |
| 2955 | 6048 | Q9NNX1 | TUFT1 |
| 2956 | 6049 | Q9NP55 | BPIFA1 |
| 2957 | 6050 | Q9NP70 | AMBN |
| 2958 | 6051 | Q9NP91 | SLC6A20 |
| 2959 | 6052 | Q9NPA0 | EMC7 |
| 2960 | 6053 | Q9NPA1 | KCNMB3 |
| 2961 | 6054 | Q9NPD5 | SLCO1B3 |
| 2962 | 6055 | Q9NPH5 | NOX4 |
| 2963 | 6056 | Q9NPH6 | OBP2B |
| 2964 | 6057 | Q9NQ30 | ESM1 |
| 2965 | 6058 | Q9NQ34 | TMEM9B |
| 2966 | 6059 | Q9NQ38 | SPINK5 |
| 2967 | 6060 | Q9NQ40 | SLC52A3 |
| 2968 | 6061 | Q9NQ60 | EQTN |
| 2969 | 6062 | Q9NQ76 | MEPE |
| 2970 | 6063 | Q9NQ90 | ANO2 |
| 2971 | 6064 | Q9NQE7 | PRSS16 |
| 2972 | 6065 | Q9NQX5 | NPDC1 |
| 2973 | 6066 | Q9NRC9 | OTOR |
| 2974 | 6067 | Q9NRE1 | MMP26 |
| 2975 | 6068 | Q9NRM1 | ENAM |
| 2976 | 6069 | Q9NRN5 | OLFML3 |
| 2977 | 6070 | Q9NRR1 | CYTL1 |
| 2978 | 6071 | Q9NRS4 | TMPRSS4 |
| 2979 | 6072 | Q9NS71 | GKN1 |
| 2980 | 6073 | Q9NSA0 | SLC22A11 |
| 2981 | 6074 | Q9NSD5 | SLC6A13 |
| 2982 | 6075 | Q9NT22 | EMILIN3 |
| 2983 | 6076 | Q9NTU7 | CBLN4 |
| 2984 | 6077 | Q9NU53 | GINM1 |
| 2985 | 6078 | Q9NUN5 | LMBRD1 |
| 2986 | 6079 | Q9NW15 | ANO10 |
| 2987 | 6080 | Q9NWH7 | SPATA6 |
| 2988 | 6081 | Q9NWM8 | FKBP14 |
| 2989 | 6082 | Q9NX61 | TMEM161A |
| 2990 | 6083 | Q9NXC2 | GFOD1 |
| 2991 | 6084 | Q9NY37 | ASIC5 |
| 2992 | 6085 | Q9NY91 | SLC5A4 |
| 2993 | 6086 | Q9NYL4 | FKBP11 |
| 2994 | 6087 | Q9NZ20 | PLA2G3 |
| 2995 | 6088 | Q9NZ53 | PODXL2 |
| 2996 | 6089 | Q9NZ94 | NLGN3 |
| 2997 | 6090 | Q9NZG7 | NINJ2 |
| 2998 | 6091 | Q9NZK5 | ADA2 |
| 2999 | 6092 | Q9NZK7 | PLA2G2E |
| 3000 | 6093 | Q9NZP8 | C1RL |
| 3001 | 6094 | Q9NZQ8 | TRPM5 |
| 3002 | 6095 | Q9P0G3 | KLK14 |
| 3003 | 6096 | Q9P0L9 | PKD2L1 |
| 3004 | 6097 | Q9P2E8 | MARCHF4 |
| 3005 | 6098 | Q9P2K2 | TXNDC16 |
| 3006 | 6099 | Q9UBC7 | GALP |
| 3007 | 6100 | Q9UBD9 | CLCF1 |
| 3008 | 6101 | Q9UBN1 | CACNG4 |
| 3009 | 6102 | Q9UBN4 | TRPC4 |
| 3010 | 6103 | Q9UBP4 | DKK3 |
| 3011 | 6104 | Q9UBR2 | CTSZ |
| 3012 | 6105 | Q9UBS3 | DNAJB9 |
| 3013 | 6106 | Q9UBS4 | DNAJB11 |
| 3014 | 6107 | Q9UBT3 | DKK4 |
| 3015 | 6108 | Q9UBU2 | DKK2 |
| 3016 | 6109 | Q9UBV4 | WNT16 |
| 3017 | 6110 | Q9UEW3 | MARCO |
| 3018 | 6111 | Q9UGM1 | CHRNA9 |
| 3019 | 6112 | Q9UHC3 | ASIC3 |
| 3020 | 6113 | Q9UHG3 | PCYOX1 |
| 3021 | 6114 | Q9UHI8 | ADAMTS1 |
| 3022 | 6115 | Q9UHL4 | DPP7 |
| 3023 | 6116 | Q9UHM6 | OPN4 |
| 3024 | 6117 | Q9UI38 | PRSS50 |
| 3025 | 6118 | Q9UI42 | CPA4 |
| 3026 | 6119 | Q9UIG8 | SLCO3A1 |
| 3027 | 6120 | Q9UJ14 | GGT7 |
| 3028 | 6121 | Q9UJA9 | ENPP5 |
| 3029 | 6122 | Q9UJJ9 | GNPTG |
| 3030 | 6123 | Q9UJQ1 | LAMP5 |
| 3031 | 6124 | Q9UJW2 | TINAG |
| 3032 | 6125 | Q9UK28 | TMEM59L |
| 3033 | 6126 | Q9UK55 | SERPINA10 |
| 3034 | 6127 | Q9UK85 | DKKL1 |
| 3035 | 6128 | Q9UKI3 | VPREB3 |
| 3036 | 6129 | Q9UKQ9 | KLK9 |
| 3037 | 6130 | Q9UKR3 | KLK13 |
| 3038 | 6131 | Q9UKU6 | TRHDE |
| 3039 | 6132 | Q9UKY0 | PRND |
| 3040 | 6133 | Q9UKZ9 | PCOLCE2 |
| 3041 | 6134 | Q9UL01 | DSE |
| 3042 | 6135 | Q9UL52 | TMPRSS11E |
| 3043 | 6136 | Q9UL62 | TRPC5 |
| 3044 | 6137 | Q9ULV1 | FZD4 |
| 3045 | 6138 | Q9ULW2 | FZD10 |
| 3046 | 6139 | Q9ULX7 | CA14 |
| 3047 | 6140 | Q9UM22 | EPDR1 |
| 3048 | 6141 | Q9UMR5 | PPT2 |
| 3049 | 6142 | Q9UMX5 | NENF |
| 3050 | 6143 | Q9UN76 | SLC6A14 |
| 3051 | 6144 | Q9UN88 | GABRQ |
| 3052 | 6145 | Q9UNI1 | CELA1 |
| 3053 | 6146 | Q9UNK4 | PLA2G2D |
| 3054 | 6147 | Q9UNQ0 | ABCG2 |
| 3055 | 6148 | Q9UNW1 | MINPP1 |
| 3056 | 6149 | Q9UQF0 | ERVW-1 |
| 3057 | 6150 | Q9UQQ1 | NAALADL1 |
| 3058 | 6151 | Q9Y215 | COLQ |
| 3059 | 6152 | Q9Y251 | HPSE |
| 3060 | 6153 | Q9Y267 | SLC22A14 |
| 3061 | 6154 | Q9Y2B0 | CNPY2 |
| 3062 | 6155 | Q9Y2B1 | RXYLT1 |
| 3063 | 6156 | Q9Y2E5 | MAN2B2 |
| 3064 | 6157 | Q9Y2G5 | POFUT2 |
| 3065 | 6158 | Q9Y2G8 | DNAJC16 |
| 3066 | 6159 | Q9Y320 | TMX2 |
| 3067 | 6160 | Q9Y337 | KLK5 |
| 3068 | 6161 | Q9Y345 | SLC6A5 |
| 3069 | 6162 | Q9Y394 | DHRS7 |
| 3070 | 6163 | Q9Y4K0 | LOXL2 |
| 3071 | 6164 | Q9Y561 | LRP12 |
| 3072 | 6165 | Q9Y5I7 | CLDN16 |
| 3073 | 6166 | Q9Y5K2 | KLK4 |
| 3074 | 6167 | Q9Y5L3 | ENTPD2 |
| 3075 | 6168 | Q9Y5S8 | NOX1 |
| 3076 | 6169 | Q9Y5X9 | LIPG |
| 3077 | 6170 | Q9Y5Y6 | ST14 |
| 3078 | 6171 | Q9Y5Y7 | LYVE1 |
| 3079 | 6172 | Q9Y5Z0 | BACE2 |
| 3080 | 6173 | Q9Y625 | GPC6 |
| 3081 | 6174 | Q9Y646 | CPQ |
| 3082 | 6175 | Q9Y680 | FKBP7 |
| 3083 | 6176 | Q9Y691 | KCNMB2 |
| 3084 | 6177 | Q9Y693 | LHFPL6 |
| 3085 | 6178 | Q9Y6C5 | PTCH2 |
| 3086 | 6179 | Q9Y6I9 | TEX264 |
| 3087 | 6180 | Q9Y6L6 | SLCO1B1 |
| 3088 | 6181 | Q9Y6M0 | PRSS21 |
| 3089 | 6182 | Q9Y6M7 | SLC4A7 |
| 3090 | 6183 | Q9Y6U7 | RNF215 |
| 3091 | 6184 | Q9Y6X5 | ENPP4 |
| 3092 | 6185 | Q9Y6Y9 | LY96 |

[0424] Library Construction:

[0425] A two-step PCR process was used to amplify cDNAs for cloning into a barcoded yeast-display vector. cDNAs were amplified with gene-specific primers, with the forward primer containing a 5′ sequence (CTGTTATTGCTAGCGTTTTAGCA (SEQ ID NO: 6186)) and the reverse primer containing a 5′ sequence (GCCACCAGAAGCGGCCGC (SEQ ID NO: 6187)) for template addition in the second step of PCR. PCR reactions were conducted using 1 μL pooled cDNA, gene-specific primers, and the following PCR settings: 98° C. denaturation, 58° C. annealing, 72° C. extension, 35 rounds of amplification. 1 μL of PCR product was used for direct amplification by common primers Aga2FOR and 159REV, and the following PCR settings: 98° C. denaturation, 58° C. annealing, 72° C. extension, 35 rounds of amplification. PCR product was purified using magnetic PCR purification beads (AvanBio). 90 μL beads were added to the PCR product and supernatant was removed. Beads were washed twice with 200 μL 70% ethanol and resuspended in 50 μL water to elute PCR products from the beads. Beads were removed from purified PCR products. The 15 bp barcode fragment was constructed by overlap PCR. 4 primers (bc1, bc2, bc3, bc4) were mixed in equimolar ratios and used as template for a PCR reaction using the following PCR settings: 98° C. denaturation, 55° C. annealing, 72° C. extension, 35 rounds of amplification. Purified product was reamplified with the first and fourth primer using identical PCR conditions. PCR products were run on 2% agarose gels and purified by gel extraction (Qiagen). Purified barcode and gene products were combined with linearized yeast-display vector (pDD003 digested with EcoRI and BamHI) and electroporated into JAR300 yeast cell using a 96-well electroporater (BTX Harvard Apparatus) using the following electroporation conditions: Square wave, 500 V, 5 ms pulse, 2 mm gap. Yeast cell were immediately recovered into 1 mL liquid synthetic dextrose medium lacking uracil (SDO-Ura) in 96-well deepwell blocks and grown overnight at 30° C. Yeast cell were passaged once by 1:10 dilution in SDO-Ura, then frozen as glycerol stocks. To construct the final library, 2.5 μL of all wells except 32 containing genes previously identified as incompatible with high-quality yeast cell display were pooled and counted. A limited dilution of 56,000 clones was sub-sampled and expanded in SDO-Ura. Expression was induced by passaging into synthetic galactose medium lacking uracil (SGO-Ura) at a 1:10 dilution and growing at 30° C. overnight. 10⁸ yeast cell were pelleted and resuspend in 1 mL PBE (PBS with 0.5% BSA and 0.5 mM EDTA) containing 1:100 anti-FLAG PE antibody (BioLegend). Yeast cell were stained at 4° C. for 75 minutes, then washed twice with 1 mL PBE and sorted for FLAG display on a Sony SH800Z cell sorter. Sorted cells were expanded in SDO-Ura supplemented with 35 μg/mL chloramphenicol, expanded, and frozen as the final library.

(SEQ ID NO: 6188)
bc1-TTGTTAATATACCTCTATACTTTAACGTCAAGGAGAAAAAACCCCG
GATC
(SEQ ID NO: 6189)
bc2-CTGCATCCTTTAGTGAGGGTTGAANNNNNNNNNNNNNNNTTCGATC
CGGGGTTTTTTCTCCTTG
(SEQ ID NO: 6190)
bc3-TTCAACCCTCACTAAAGGATGCAGTTACTTCGCTGTTTTTCAATAT
TTTCTGTTATTGC
(SEQ ID NO: 6191)
bc4-TGCTAAAACGCTAGCAATAACAGAAAATATTGAAAAACAGCG

[0426] Barcode Identification:

[0427] Barcode-gene pairings were identified using a custom Tn5-based sequence approach. Tn5 transposase was purified as previously described, using the on-column assembly method for loading oligos. DNA was extracted from the yeast library using Zymoprep-96 Yeast Plasmid Miniprep kits or Zymoprep Yeast Plasmid Miniprep II kits (Zymo Research) according to standard manufacturer protocols. 5 μL of purified plasmid DNA was digested with Tn5 in a 20 μL total reaction as previously described. 2 μL of digested DNA was amplified using primers index1 and index2, using the following PCR settings: 98° C. denaturation, 56° C. annealing, 72° C. extension, 25 rounds of amplification. The product was run on a 2% gel and purified by gel extraction (Qiagen). Purified product was amplified using primers index3 and index4, using the following PCR settings: 98° C. denaturation, 60° C. annealing, 72° C. extension, 25 rounds of amplification. In parallel, the barcode region alone was amplified using primers index1 and index5, using the following PCR settings: 98° C. denaturation, 56° C. annealing, 72° C. extension, 25 rounds of amplification. The product was run on a 2% gel and purified by gel extraction (Qiagen). Purified product was amplified using primers index3 and index6, using the following PCR settings: 98° C. denaturation, 60° C. annealing, 72° C. extension, 20 rounds of amplification. Both barcode and digested fragment products were run on a 2% gel and purified by gel extraction (Qiagen). NGS library was sequenced using an Illumina MiSeq and Illumina v3 MiSeq Reagent Kits with 150 base pair single-end sequencing according to standard manufacturer protocols. Gene-barcode pairings were identified using custom code. Briefly, from each read, the barcode sequence was extracted based on the identification of the flanking constant vector backbone sequences, and the first 25 bp of sequence immediately following the constant vector backbone-derived signal peptide were extracted and mapped to a gene identity based on the first 25 bp of all amplified cDNA constructs. The number of times each barcode was paired with an identified gene was calculated. Barcode-gene pairings that were identified more than twice, with an overall observed barcode frequency of greater than 0.0002% were compiled. For barcodes with multiple gene pairings matching the above criteria, the best-fit gene was manually identified by inspection of all barcode-gene pairing frequencies and, in general, identification of the most abundant gene pairing. In the final library, 2,688 genes were confidently mapped to 35,835 barcodes.

[0428] Rapid Extracellular Antigen Profiling.

[0429] Antibody Purification and Yeast Cell Adsorption

[0430] 20 μL protein G magnetic resin (Lytic Solutions) was washed twice with 100 μL sterile PBS, resuspended in 50 μL PBS, and added to 50 μL serum or plasma. Serum-resin mixture was incubated for three hours at 4° C. with shaking. Resin was washed five times with 200 μL PBS, resuspended in 90 μL 100 mM glycine pH 2.7, and incubated for five minutes at room temperature. Supernatant was extracted and added to 10 μL sterile 1M Tris pH 8.0 (purified IgG). Empty vector (pDD003) yeast cell were expanded in SDO-Ura at 30° C. One day later, yeast cell were induced by 1:10 dilution in SGO-Ura for 24 hours. 10⁸ induced yeast cell were washed twice with 200 μL PBE (PBS with 0.5% BSA and 0.5 mM EDTA), resuspended with 100 μL purified IgG, and incubated for three hours at 4° C. with shaking. Yeast-IgG mixtures were placed into 96 well 0.45 um filter plates (Thomas Scientific) and yeast-depleted IgG was eluted into sterile 96 well plates by centrifugation at 3000 g for 3 minutes.

[0431] Antibody Yeast Library Selections.

[0432] Transformed yeast were expanded in SDO-Ura at 30° C. One day later, at an optical density (OD) below 8, yeast were induced by resuspension at an OD of 1 in SGO-Ura supplemented with ten percent SDO-Ura and culturing at 30° C. for 20 hours. Prior to selection, 400 μL pre-selection library was set aside to allow for comparison to post-selection libraries. 10⁸ induced yeast were washed twice with 200 μL PBE and added to wells of a sterile 96-well v-bottom microtiter plate. Yeast were resuspended in 100 μL PBE containing appropriate antibody concentration and incubated with shaking for 1 hour at 4° C. Unless otherwise indicated, 10 μg antibody per well was used for human serum or plasma derived antibodies and 1 μg antibody was used for monoclonal antibodies. Yeast were washed twice with 200 μL PBE, resuspended in 100 μL PBE with a 1:100 dilution of biotin anti-human IgG Fc antibody (clone HP6017, BioLegend) for human serum or plasma derived antibodies or a 1:25 dilution of biotin goat anti-rat or anti-mouse IgG antibody (A16088, Thermo Fisher Scientific; A18869, Thermo Fisher Scientific) for monoclonal antibodies. Yeast-antibody mixtures were incubated with shaking for 30 minutes at 4° C. Yeast were washed twice with 200 μL PBE, resuspended in 100 μL PBE with a 1:20 dilution of Streptavidin MicroBeads (Miltenyi Biotec), and incubated with shaking for 30 minutes at 4° C. Yeast were then pelleted and kept on ice. Multi-96 Columns (Miltenyi Biotec) were placed into a MultiMACS M96 Separator (Miltenyi Biotec) and the separator was placed into positive selection mode. All following steps were carried out at room temperature. Columns were equilibrated with 400 μL 70% ethanol followed by 700 μL degassed PBE. Yeast were resuspended in 200 μL degassed PBE and placed into the columns. After the mixture had completely passed through, columns were washed three times with 700 μL degassed PBE. To elute the selected yeast, columns were removed from the separator and placed over 96-well deep well plates. 700 μL degassed PBE was added to each well of the column and the column and deep well plate were spun at 50 g for 30 seconds. This process was repeated 3 times. Selected yeast were pelleted, and recovered in 1 mL SDO-Ura at 30° C.

[0433] Recombinant Protein Yeast Library Selections.

[0434] All pre-selection and yeast induction steps were performed identically as those of the antibody yeast library selections. 10⁸ induced yeast were washed twice with 200 μL PBE and added to wells of a sterile 96-well v-bottom microtiter plate. Yeast were resuspended in 100 μL PBE containing 75 μL clarified protein expression supernatant and incubated with shaking for 1 hour at 4° C. Yeast were washed twice with 200 μL PBE, resuspended in 100 μL PBE with 5 μL MACS Protein G MicroBeads (Miltenyi Biotec), and incubated with shaking for 30 minutes at 4° C. Selection of yeast using the MultiMACS M96 Separator and subsequent steps were performed identically as those of the antibody yeast library selections.

[0435] Next Generation Sequencing Library Preparation and Sequencing.

[0436] DNA was extracted from yeast libraries using Zymoprep-96 Yeast Plasmid Miniprep kits or Zymoprep Yeast Plasmid Miniprep II kits (Zymo Research) according to standard manufacturer protocols. A first round of PCR was used to amplify a DNA sequence containing the protein display barcode on the yeast plasmid. PCR reactions were conducted using 1 μL plasmid DNA, 159_DIF2 and 159_DIR2 primers (sequences listed below), and the following PCR settings: 98° C. denaturation, 58° C. annealing, 72° C. extension, 25 rounds of amplification. PCR product was purified using magnetic PCR purification beads (AvanBio). 45 μL beads were added to the PCR product and supernatant was removed. Beads were washed twice with 100 μL 70% ethanol and resuspended in 25 μL water to elute PCR products from the beads. Beads were removed from purified PCR products. A second round of PCR was conducted using 1 μL purified PCR product, Nextera i5 and i7 dual-index library primers (Illumina), and the following PCR settings: 98° C. denaturation, 58° C. annealing, 72° C. extension, 25 rounds of amplification. PCR products were pooled and run on a 1% agarose gel. The band corresponding to 257 base pairs was cut out and DNA (NGS library) was extracted using a QlAquick Gel Extraction Kit (Qiagen) according to standard manufacturer protocols. NGS library was sequenced using an Illumina MiSeq and Illumina v3 MiSeq Reagent Kits with 75 base pair single-end sequencing or using an Illumina NovaSeq 6000 and Illumina NovaSeq S4 200 cycle kit with 101 base pair paired-end sequencing according to standard manufacturer protocols. A minimum of 50,000 reads per sample was collected and the pre-selection library was sampled at ten times greater depth than other samples.

(SEQ ID NO: 6192)
159_DIF2-TCGTCGGCAGCGTCAGATGTGTATAAGAGACAGNNNNNNNN
NNGAGAAAAAACCCCGGATCG
(SEQ ID NO: 6193)
159_DIR2-GTCTCGTGGGCTCGGAGATGTGTATAAGAGACAGNNNNNNN
NNNACGCTAGCAATAACAGAAAATATTG

[0437] Data Analysis.

[0438] REAP scores were calculated as follows. First, barcode counts were extracted from raw NGS data using custom codes and counts from technical replicates were summed. Next, aggregate and clonal enrichment was calculated using edgeR⁶² and custom codes. For aggregate enrichment, barcode counts across all unique barcodes associated with a given protein were summed, library sizes across samples were normalized using default edgeR parameters, common and tagwise dispersion were estimated using default edgeR parameters, and exact tests comparing each sample to the pre-selection library were performed using default edgeR parameters. Aggregate enrichment is thus the log 2 fold change values from these exact tests with zeroes in the place of negative fold changes. Log 2 fold change values for clonal enrichment were calculated in an identical manner, but barcode counts across all unique barcodes associated with a given protein were not summed. Clonal enrichment for a given reactivity was defined as the fraction of clones out of total clones that were enriched (log 2 fold change ≥2). Aggregate (Eₐ) and clonal enrichment (E_{c}) for a given protein, a scaling factor (βᵤ) based on the number of unique yeast clones (yeast that have a unique DNA barcode) displaying a given protein, and a scaling factor (β_{f}) based on the overall frequency of yeast in the library displaying a given protein were used as inputs to calculate the REAP score, which is defined as follows.

REAP score=Eₐ*(E_{c})²*βᵤ*β_{f}

[0439] βᵤ and β_{f} are logarithmic scaling factors that progressively penalize the REAP score of proteins with low numbers of unique barcodes or low frequencies in the library. βᵤ is applied to proteins with ≤5 unique yeast clones in the library and β_{f} is applied to proteins with a frequency ≤0.0001 in the library. β_{f} was implemented to mitigate spurious enrichment signals from low frequency proteins, which could occur due to sequencing errors or stochasticity in the selection process. βᵤ was implemented because the clonal enrichment metric is less valid for proteins with low numbers of unique yeast clones, decreasing confidence in the validity of the reactivity. βᵤ and β_{f} are defined as follows where xᵤ is the number of unique yeast clones for a given protein and x_{f} is the log 10 transformed frequency of a given protein in the library.

$${β}_{u} = \frac{ln ( {x}_{u} + 0.5 )}{1.705}$$

$${β}_{f} = \frac{ln ( {x}_{f} + 7.1 )}{1.16}$$

[0440] Recombinant Protein Production.

[0441] REAP Recombinant Protein Production.

[0442] Proteins were produced as human IgG1 Fc fusions to enable binding of secondary antibody and magnetic beads to the produced proteins during the REAP process. Sequences encoding the extracellular portions of proteins-of-interests that were present in the yeast display library were cloned by Gibson assembly into a modified pD2610-v12 plasmid (ATUM). Modifications include addition of an H7 signal sequence followed by a (GGGGS)₃ linker and a truncated human IgG1 Fc (N297A). Protein-of-interest sequences were inserted directly downstream of the H7 leader sequence. Protein was produced by transfection into Expi293 cells (Thermo Fisher Scientific) in 96-well plate format. One day prior to transfection, cells were seeded at a density of 2 million cells per mL in Expi293 Expression Medium (Thermo Fisher Scientific). In a 96-well plate, 0.5 μg plasmid DNA was diluted added to 25 μL Opti-MEM (Thermo Fisher Scientific) and mixed gently. In a separate 96-well plate, 1.35 μL ExpiFectamine was added to 25 μL Opti-MEM and mixed gently. The ExpiFectamine-Opti-MEM mixture was added to the diluted DNA, mixed gently, and incubated for 20 minutes at room temperature. Expi293 cells were diluted to a density of 2.8 million cells per mL and 500 L of cells were added to each well of a 96-well deep well plate. 50 μL of the DNA-ExpiFectamine-Opti-MEM mixture was added to each well. The plate was sealed with Breathe-Easier sealing film (Diversified Biotech) and incubated in a humidified tissue culture incubator (37° C., 8% CO₂) with shaking at 1,200 rpm so that cells were kept in suspension. 18-20 hours post-transfection, 25 μL enhancer 2 and 2.5 μL enhancer 1 (Thermo Fisher Scientific) were added to each well. 4 days post-transfection, media was clarified by centrifugation at 3000-4000 g for 5 minutes. Clarified media was used for recombinant protein REAP.

[0443] ELISA Protein Production.

[0444] Sequences encoding the extracellular portions of proteins-of-interests that were present in the yeast display library were cloned by Gibson assembly into pEZT_Dlux, a modified pEZT-BM vector. The pEZT-BM vector was a gift from Ryan Hibbs (Addgene plasmid #74099). Modifications included insertion of an H7 Leader Sequence followed by an AviTag (Avidity), HRV 3C site, protein C epitope, and an 8×his tag. Protein-of-interest sequences were inserted directly downstream of the H7 leader sequence. Protein was produced by transfection into Expi293 cells (Thermo Fisher Scientific) according to standard manufacturer protocols. Transfected cells were maintained according to manufacturer protocols. 4 days post-transfection, media was clarified by centrifugation at 300 g for 5 minutes. Protein was purified from clarified media by nickel-nitrilotriacetic acid (Ni-NTA) chromatography and desalted into HEPES buffered saline+100 mM sodium chloride, pH 7.5. Protein purity was verified by SDS-PAGE.

[0445] Biotinylated Protein Production.

[0446] Sequences encoding the extracellular portions of proteins-of-interests were cloned into pEZT_Dlux as described above. Protein was expressed and purified as described above minus desalting. Enzymatic biotinylation with BirA ligase was performed and protein was purified by size-exclusion fast protein liquid chromatography using a NGC Quest 10 Chromatography System (Bio-Rad).

[0447] LIPS Protein Production.

[0448] Sequences encoding Lucia luciferase (InvivoGen) fused by a GGSG linker to the N-terminus of the protein-of-interest extracellular portion (as defined above) were cloned by Gibson assembly into pEZT-BM. Protein was produced by transfection into Expi293 cells (Thermo Fisher Scientific) according to standard manufacturer protocols. Transfected cells were maintained according to manufacturer protocols. 3 days post-transfection, media was clarified by centrifugation at 300 g for 5 minutes. Clarified media was used in luciferase immunoprecipitation systems assays.

[0449] Enzyme-Linked Immunosorbent Assays (ELISAs).

[0450] 200 or 400 ng of purchased or independently produced recombinant protein in 100 μL of PBS pH 7.0 was added to 96-well flat bottom Immulon 2HB plates (Thermo Fisher Scientific) and placed at 4° C. overnight. Plates were washed once with 225 μL ELISA wash buffer (PBS+0.05% Tween 20) and 150 μL ELISA blocking buffer (PBS+2% Human Serum Albumin) was added to the well. Plates were incubated with shaking for 2 hours at room temperature. ELISA blocking buffer was removed from the wells and appropriate dilutions of sample serum in 100 μL ELISA blocking buffer were added to each well. Plates were incubated with shaking for 2 hours at room temperature. Plates were washed 6 times with 225 μL ELISA wash buffer and 1:5000 goat anti-human IgG HRP (Millipore Sigma) or anti-human IgG isotype specific HRP (Southern Biotech; IgG1: clone HP6001, IgG2: clone 31-7-4, IgG3: clone HP6050, IgG4: clone HP6025) in 100 μL ELISA blocking buffer was added to the wells. Plates were incubated with shaking for 1 hour at room temperature. Plates were washed 6 times with 225 μL ELISA wash buffer. 50 μL TMB substrate (BD Biosciences) was added to the wells and plates were incubated for 15 minutes (pan-IgG ELISAs) or 20 minutes (isotype specific IgG ELISAs) in the dark at room temperature. 50 μL 1 M sulfuric acid was added to the wells and absorbance at 450 nm was measured in a Synergy HTX Multi-Mode Microplate Reader (BioTek).

[0451] Luciferase Immunoprecipitation Systems (LIPS) Assays.

[0452] Pierce Protein A/G Ultralink Resin (5 μL; Thermo Fisher Scientific) and 1 μL sample serum in 100 μL Buffer A (50 mM Tris, 150 mM NaCl, 0.1% Triton X-100, pH 7.5) was added to 96-well opaque Multiscreen HTS 96 HV 0.45 um filter plates (Millipore Sigma). Plates were incubated with shaking at 300 rpm for 1 hour at room temperature. Supernatant in wells was removed by centrifugation at 2000 g for 1 minute. Luciferase fusion protein (10⁶ RLU) was added to the wells in 100 μL Buffer A. Plates were incubated with shaking at 300 rpm for 1 hour at room temperature. Using a vacuum manifold, wells were washed 8 times with 100 μL Buffer A followed by 2 washes with 100 μL PBS. Remaining supernatant in wells was removed by centrifugation at 2000 g for 1 minute. Plates were dark adapted for 5 minutes. An autoinjector equipped Synergy HTX Multi-Mode Microplate Reader (BioTek) was primed with QUANTI-Luc Gold (InvivoGen). Plates were read using the following per well steps: 50 μL QUANTI-Luc Gold injection, 4 second delay with shaking, read luminescence with an integration time of 0.1 seconds and a read height of 1 mm.

[0453] PD-L2 Blocking Assay.

[0454] A single clone of PD-L2 displaying yeast was isolated from the library and expanded in SDO-Ura at 30° C. Yeast were induced by 1:10 dilution into SGO-Ura and culturing at 30° C. for 24 hours. 105 induced PD-L1 yeast were washed twice with 200 μL PBE and added to wells of a 96-well v-bottom microtiter plate. Yeast were resuspended in 25 μL PBE containing serial dilutions of sample serum and incubated with shaking for 1 hour at 4° C. PD-1 tetramers were prepared by incubating a 5:1 ratio of biotinylated PD-1 and PE streptavidin (BioLegend) for 10 minutes on ice in the dark. Yeast were washed twice with 200 μL PBE, resuspended in 25 μL PBE containing 10 nM previously prepared PD-1 tetramers, and incubated with shaking for 1 hour at 4° C. Yeast were washed twice with 200 μL PBE and resuspended in 75 μL PBE. PE fluorescent intensity was quantified by flow cytometry using a Sony SA3800 Spectral Cell Analyzer. Percent max binding was calculated based on fluorescent PD-1 tetramer binding in the absence of any serum.

[0455] IL-33 Neutralization Assay.

[0456] IL-33 Reporter Cell Line Construction.

[0457] The full-length coding sequence for ST2 was cloned by Gibson assembly into the lentiviral transfer plasmid pL-SFFV.Reporter.RFP657.PAC, a kind gift from Benjamin Ebert (Addgene plasmid #61395). REK-293FT cells were seeded into a 6-well plate in 2 mL growth media (DMEM with 10% (v/v) FBS, 100 units/mL penicillin, and 0.1 mg/mL streptomycin) and were incubated at 37° C., 5% CO2. Once cells achieved 70-80% confluence approximately one day later, cells were transfected using TransIT-LT1 (Mirus Bio) in Opti-MEM media (Life Technologies). TransIT-LTI Reagent was pre-warmed to room temperature and vortexed gently. For each well, 0.88 ug lentiviral transfer plasmid along with 0.66 ug pSPAX2 (Addgene plasmid #12260) and 0.44 ug pMD2.G (Addgene plasmid #12259), kind gifts from Didier Trono, were added to 250 μL Opti-MEM media and mixed gently. TransIT-LT1 reagent (6 μl) was added to the DNA mixture, mixed gently, and incubated at room temperature for 15-20 minutes. The mixture was added dropwise to different areas of the well Plates were incubated at 37° C., 5% CO2; 48 hrs later, the virus-containing media was collected and filtered with a 0.45 μm low protein-binding filter. H1EK-BIlue IL-18 cells (InvivoGen) were seeded into a 6-well plate in 1 mL growth media (DMEM with 10% (v/v) FBS, 100 units/mL penicillin, and 0.1 mg/mL streptomycin) and 1 mL virus-containing media. Cells were incubated at 37° C., 5% CO2 for two days before the media was changed.

[0458] Reporter Cell Stimulation and Reading.

[0459] Purified IgG titrations and 2 nM IL-33 were mixed in 50 μL assay media (DMEM with 10% (v/v) FBS, 100 units/mL penicillin, and 0.1 mg/mL streptomycin) and incubated with shaking for 1 hour at room temperature. Approximately 50,000 IL-33 reporter cells in 50 μl assay media were added to wells of a sterile tissue culture grade flat-bottom 96-well plate. IgG-IL-33 mixtures were added to respective wells (1 nM IL-33 final concentration). Plates were incubated at 37° C. 5% CO2 for 20 hours, then 20 μL media from each well was added to 180 μL room temperature QUANTI-Blue Solution (InvivoGen) in a separate flat-bottom 96-well plate and incubated at 37° C. for 3 hours. Absorbance at 655 nm was measured in a Synergy HTX Multi-Mode Microplate Reader (BioTek). Percent max signal was calculated based on signal generated by IL-33 in the absence of any serum.

[0460] ROC Analysis of REAP Score Performance.

[0461] Orthogonal validation data for the receiver operator curve (ROC) analysis was obtained by ELISA, LIPS, or clinical autoantibody tests. For ELISA and LIPS, valid reactivities were defined as those 3 standard deviations above the healthy donor average for a given protein in each assay. ROC analysis was performed using 247 test pairs across 25 different proteins.

[0462] Statistical Analysis.

[0463] Statistical details of experiments can be found in the figure legends. All error bars in figures indicate standard deviation. Data analysis was performed using R, Python, Excel, and GraphPad Prism.

[0464] In summary, autoantibodies targeting extracellular proteins are known to mediate autoimmune diseases and paraneoplastic syndromes in cancer. However, discovery of new autoantibodies against extracellular (transmembrane and secreted) proteins in high throughput remained difficult due to a lack of methods for screening the thousands of extracellular proteins in the human proteome. The autoantibodies can mediate new forms of autoimmune disease, predict response to therapy, or mediate toxicity or responses in cancer in response to immune-modifying checkpoint blockade therapies.

[0465] The essence of the invention is the discovery of extracellular antibody targets using a yeast-displayed library of proteins and next-generation sequencing, which enabled high-throughput interrogation of natively folded proteins by total human serum. Moreover, yeast cell display is a technique well-suited to display of human extracellular proteins, and amenable to high-throughput screening due to the ease of handling yeast. This allowed unbiased assessment of autoantibody repertoires in any human patient or healthy population at a previously unattainable scale and cost. Furthermore, it was accomplished by (Step I) using a yeast-displayed library of extracellular antigens as a substrate to interrogate whole sero-reactivities, (Step II) optimizing an antibody isolation protocol, (Step III) staining and selecting conditions for yeast cell selection with total serum antibodies, and (Step IV) next-generation sequencing pipelines to identify the antigen targets. Consequently, this technique enabled screening against thousands of candidate antigens simultaneously

[0466] More specifically, (Step I) standard methods were used to identify and amplify the ectodomains of human extracellular proteins, and individually transformed them into standard yeast-display strains for fusion to cell-wall associated proteins in yeast. A random nucleotide barcode was additionally incorporated into the display vector to enable tracking of proteins by next-generation sequencing. These individual strains were then pooled to create a single library encompassing all proteins of interest.

[0467] (Step II) Antibodies were isolated from human serum by affinity purification. For example, antibodies were purified with Protein A or Protein G, using either magnetic or agarose beads, and via standard methods. If other isotypes of antibody besides IgG were desired, appropriate affinity purification methods were used in place of Protein A or Protein G. After antibody purification, yeast-reactive antibodies present in human serum were removed by incubation with parental yeast cell strains and filtration. The final elution was suitable for yeast cell staining and selection.

[0468] (Step III) Yeast cell were stained with a normalized concentration of purified, non-yeast-reactive antibody from 1-10 μg per reaction. Stained yeast cell were identified with any appropriate secondary antibody recognizing immunoglobulins of the isotype used, such as a biotinylated or fluorescently labeled anti-immunoglobulin antibody. Stained yeast cell were then selected via magnetic separation using standard methods and appropriate magnetic reagents or by FACS. Stained yeast cell were also directly selected with appropriate anti-immunoglobulin magnetic particles. Selected yeast cell were expanded following selection and their DNA isolated via standard methods.

[0469] (Step IV) Yeast cell DNA was amplified and prepared for next-generation sequencing by standard methods appropriate from the next-generation sequencing method of interest (e.g. Illumina sequencing-by-synthesis). The frequencies of each protein were measured in the initial library and in all samples following selection, by tabulating the frequencies of all barcodes corresponding to an individual protein. An enrichment score was calculated based on the total enrichment of each protein in each sample and the fraction of associated barcodes that enrich. Different thresholds were applied to this enrichment score depending on the desired level of sensitivity or specificity. Proteins with scores above a particular threshold were predicted as candidate autoantigens.

[0470] Accordingly, the primary novel feature of the present invention is, in part, the design of the display library to improve display success and quality of results over previous methods, such as shotgun cDNA library preparations. A high-quality curation of the library greatly improved the specificity and sensitivity by removing out-of-frame or truncated protein products. Additional novelty comes, in part, from the next-generation sequencing approach and analytical methods, which increased confidence in the predicted candidate autoantigens. Finally, the optimized method for staining and selection was more amenable to high-throughput screening of hundreds of serum samples due to applicability to 96-well formats.

[0471] As described above, the herein described technique used a more advanced library with higher display success rates that can cover the full complement of well-folded ectodomains in the human proteome. It was additionally scalable, sensitive, and amenable to high-throughput screening and even automation. Compared to the gold-standard approaches, such as protein arrays, it was found that known and novel autoantibody responses can be detected that were previously undectable. As the technique was amenable to high-throughput screening approaches and requires small samples volumes, it can rapidly query large patient cohorts for a small fraction of the cost of previous methods, such as protein arrays.

### Diagnostic or Prognostic Antibodies

TABLE 2
List of Diseases or Disorders and the Corresponding Abbreviations

| Abbreviation | Full Name |
|---|---|
| AAV | ANCA-Associated vasculitis |
| APECED | Autoimmune Polyendocrinopathy Candidiasis |
| | Ecto-Dermal Dystrophy |
| APS | Antiphospholipid Antibody Syndome |
| CIDP | Chronic Inflammatory Demyelinating |
| | Polyradiculoneuropathy |
| COVID-19 | Coronavirus Disease 2019 |
| DIL | Drug-Induced Lupus |
| DM | Dermatomyositis |
| KT | Kidney Transplant |
| Malaria | Malaria |
| MG | Myasthenia Gravis |
| MM | Malignant Melanoma |
| NMO | Neuromyelitis Optica |
| NSCLC | Non-Small Cell Lung Cancer |
| PANDAS | Pediatric Autoimmune Neuropsychiatric |
| | Disorders Associated with Streptococcal |
| | Infections |
| SLE | Systemic Lupus Erythematosus |
| SS | Sjogren's Syndrome |
| SSC | Scleroderma |
| SUSAC | Susac Syndrome |

TABLE 3
List of Autoantigens and the Corresponding Diseases or Disorders

| Disease | Target |
|---|---|
| AAV | EDIL3 |
| AAV | LY6H |
| AAV | TREM2 |
| APECED | ACRV1 |
| APECED | ADM2 |
| APECED | AFP |
| APECED | APOA4 |
| APECED | APOO |
| APECED | BPIFA1 |
| APECED | BPIFA2 |
| APECED | BTN1A1 |
| APECED | C5orf64 |
| APECED | CASQ1 |
| APECED | CCDC47 |
| APECED | CCL11 |
| APECED | CCL15 |
| APECED | CCL17 |
| APECED | CCL18 |
| APECED | CCL7 |
| APECED | CCL8 |
| APECED | CDSN |
| APECED | CELA2B |
| APECED | CLCC1 |
| APECED | CLPS |
| APECED | CLSTN1 |
| APECED | CLU |
| APECED | CNPY2 |
| APECED | CNPY3 |
| APECED | CP |
| APECED | CSHL1 |
| APECED | CSN2 |
| APECED | CSPG5 |
| APECED | CST4 |
| APECED | CST5 |
| APECED | CST6 |
| APECED | CTSG |
| APECED | DEFA5 |
| APECED | DKK1 |
| APECED | DRAXIN |
| APECED | ECSCR |
| APECED | EPHA4 |
| APECED | EREG |
| APECED | FAM19A4 |
| APECED | FAM3A |
| APECED | FGF1 |
| APECED | FGFR2 |
| APECED | FKBP14 |
| APECED | GFRAL |
| APECED | GIF |
| APECED | GPHB5 |
| APECED | HCRTR2 |
| APECED | HSPA13 |
| APECED | IBSP |
| APECED | IFNA13 |
| APECED | IFNA14 |
| APECED | IFNA17 |
| APECED | IFNA2 |
| APECED | IFNA5 |
| APECED | IFNA6 |
| APECED | IFNA8 |
| APECED | IFNL2 |
| APECED | IFNW1 |
| APECED | IGF1 |
| APECED | IGFBP1 |
| APECED | IGSF4B |
| APECED | IL17A |
| APECED | IL17F |
| APECED | IL22 |
| APECED | IL22RA2 |
| APECED | IL28B |
| APECED | IL5 |
| APECED | IL6 |
| APECED | KAL1 |
| APECED | KLK2 |
| APECED | LAIR2 |
| APECED | LCN1 |
| APECED | LEG1 |
| APECED | LIPF |
| APECED | LRIT3 |
| APECED | LRRC3B |
| APECED | LY6H |
| APECED | MMP1 |
| APECED | MMP7 |
| APECED | MPZL3 |
| APECED | MSMP |
| APECED | MSR1 |
| APECED | OBP2A |
| APECED | ODAPH |
| APECED | OPN4 |
| APECED | OTOL1 |
| APECED | OTOR |
| APECED | PANX3 |
| APECED | PAP |
| APECED | PDGFB |
| APECED | PDILT |
| APECED | PGC |
| APECED | PLA2G10 |
| APECED | PLA2G2E |
| APECED | PLAC9 |
| APECED | PLVAP |
| APECED | PMCH |
| APECED | PNLIP |
| APECED | PNLIPRP1 |
| APECED | PNLIPRP2 |
| APECED | PPT1 |
| APECED | PRG3 |
| APECED | PRLR |
| APECED | PRRG1 |
| APECED | PRRG3 |
| APECED | PRRT1 |
| APECED | PRRT3 |
| APECED | PSAP |
| APECED | PTPRN2 |
| APECED | PTPRR |
| APECED | RAMP2 |
| APECED | REG1A |
| APECED | REG3G |
| APECED | REG4 |
| APECED | RNASE8 |
| APECED | RTBDN |
| APECED | SERPINE1 |
| APECED | SLC2A10 |
| APECED | SLC41A2 |
| APECED | SMR3A |
| APECED | SOSTDC1 |
| APECED | SPACA7 |
| APECED | SPAG11B |
| APECED | SPINK1 |
| APECED | SPINK4 |
| APECED | SPINK8 |
| APECED | SRGN |
| APECED | SYCN |
| APECED | TEPP |
| APECED | TEX264 |
| APECED | TFF2 |
| APECED | TGFA |
| APECED | TM4SF6 |
| APECED | TM9SF3 |
| APECED | TMEM119 |
| APECED | TMEM149 |
| APECED | TNFRSF12A |
| APECED | TSLP |
| APECED | TXNDC12 |
| APECED | VSTM2A |
| APS | IL6R |
| APS | IFNA13 |
| APS | IFNA14 |
| APS | IFNA17 |
| APS | IFNA2 |
| APS | IFNA5 |
| APS | IFNA6 |
| APS | IFNA8 |
| APS | IL6R |
| CIDP | CXCL1 |
| CIDP | CXCL2 |
| CIDP | CXCL3 |
| CIDP | PDGFB |
| CIDP | TMEM149 |
| CIDP | CD74 |
| CIDP | CXCL13 |
| COVID-19 | APOO |
| COVID-19 | OPRL1 |
| COVID-19 | IFNA14 |
| COVID-19 | MIA2 |
| COVID-19 | FKBP2 |
| COVID-19 | GPR1 |
| COVID-19 | IL29 |
| COVID-19 | PTPRR |
| COVID-19 | RCN2 |
| COVID-19 | IFNA13 |
| COVID-19 | IFNW1 |
| COVID-19 | IL1A |
| COVID-19 | TSPAN9 |
| COVID-19 | SHISA7 |
| COVID-19 | IFNA17 |
| COVID-19 | LEP |
| COVID-19 | CALU |
| COVID-19 | SSPN |
| COVID-19 | LPAL2 |
| COVID-19 | OBP2B |
| COVID-19 | CST5 |
| COVID-19 | IL6 |
| COVID-19 | CCDC47 |
| COVID-19 | ACRV1 |
| COVID-19 | PGA3 |
| COVID-19 | LRRC8C |
| COVID-19 | PMCH |
| COVID-19 | GPR6 |
| COVID-19 | CSF2 |
| COVID-19 | RCN3 |
| COVID-19 | LYSMD4 |
| COVID-19 | CD99 |
| COVID-19 | IFNA5 |
| COVID-19 | IFNL2 |
| COVID-19 | CXCL9 |
| COVID-19 | SLC41A2 |
| COVID-19 | EPYC |
| COVID-19 | DUOXA1 |
| COVID-19 | LACRT |
| COVID-19 | CNPY2 |
| COVID-19 | KLK8 |
| COVID-19 | MZB1 |
| COVID-19 | LYG2 |
| COVID-19 | MUCL3 |
| COVID-19 | LALBA |
| COVID-19 | ZG16B |
| COVID-19 | ODAM |
| COVID-19 | PILRA |
| COVID-19 | HRC |
| COVID-19 | PPBP |
| COVID-19 | CSPG5 |
| COVID-19 | PTPRN2 |
| COVID-19 | CST4 |
| COVID-19 | FAM168B |
| COVID-19 | TNFRSF17 |
| COVID-19 | OTOS |
| COVID-19 | SPINK9 |
| COVID-19 | KLRC2 |
| COVID-19 | IFNA8 |
| COVID-19 | TMEM119 |
| COVID-19 | CSAG1 |
| COVID-19 | OTOR |
| COVID-19 | KCT2 |
| COVID-19 | PGA4 |
| COVID-19 | SPINK4 |
| COVID-19 | FCGR2A |
| COVID-19 | CNPY3 |
| COVID-19 | NEGR1 |
| COVID-19 | ERP27 |
| COVID-19 | AGRP |
| COVID-19 | PRR27 |
| COVID-19 | MCFD2 |
| COVID-19 | IGFBP6 |
| COVID-19 | IFNA2 |
| COVID-19 | LGALS3 |
| COVID-19 | SPOCK1 |
| COVID-19 | KCNV2 |
| COVID-19 | HCRTR2 |
| COVID-19 | LECT2 |
| COVID-19 | PLA2G2E |
| COVID-19 | FAM19A3 |
| COVID-19 | SPACA7 |
| COVID-19 | NENF |
| COVID-19 | IL6R |
| COVID-19 | SPX |
| COVID-19 | IGFBP1 |
| COVID-19 | SRGN |
| COVID-19 | LAIR2 |
| COVID-19 | CPXM2 |
| COVID-19 | CCL17 |
| COVID-19 | TUSC5 |
| COVID-19 | LOC644613 |
| COVID-19 | TNFRSF21 |
| COVID-19 | GPR77 |
| COVID-19 | C2orf40 |
| COVID-19 | C5A |
| COVID-19 | IFNA6 |
| COVID-19 | SPP1 |
| COVID-19 | SERPINA3 |
| COVID-19 | OXTR |
| COVID-19 | KLRC1 |
| COVID-19 | SEMG2 |
| COVID-19 | APOH |
| COVID-19 | PRRG1 |
| COVID-19 | BTC |
| COVID-19 | MSLN |
| COVID-19 | FAM19A2 |
| COVID-19 | CXCL1 |
| COVID-19 | PRSS55 |
| COVID-19 | SLCO2B1 |
| COVID-19 | BTN1A1 |
| COVID-19 | COV2-RBD |
| COVID-19 | OS9 |
| COVID-19 | PGLYRP1 |
| COVID-19 | DKK3 |
| COVID-19 | TOR1B |
| COVID-19 | CST1 |
| COVID-19 | LRRC8D |
| COVID-19 | ACKR1 |
| COVID-19 | COL8A1 |
| COVID-19 | CXCL3 |
| COVID-19 | ODAPH |
| COVID-19 | PIANP |
| COVID-19 | PSORS1C2 |
| COVID-19 | RNASE10 |
| COVID-19 | CXCR7 |
| COVID-19 | PLVAP |
| COVID-19 | CDSN |
| COVID-19 | SDF2L1 |
| COVID-19 | TFF2 |
| COVID-19 | HSPA13 |
| COVID-19 | CXCR5 |
| COVID-19 | C5orf64 |
| COVID-19 | EPO |
| COVID-19 | GNLY |
| COVID-19 | OPRM1 |
| COVID-19 | TGFA |
| COVID-19 | SLC2A10 |
| COVID-19 | CXCL13 |
| COVID-19 | CD99L2 |
| COVID-19 | AGER |
| COVID-19 | CGA |
| COVID-19 | CRTAM |
| COVID-19 | SLC1A1 |
| COVID-19 | CDH19 |
| COVID-19 | GPR25 |
| COVID-19 | CCL8 |
| COVID-19 | SERPINI1 |
| COVID-19 | SPINK8 |
| COVID-19 | SLPI |
| COVID-19 | HRH3 |
| COVID-19 | TMEM149 |
| COVID-19 | CD38 |
| COVID-19 | REG4 |
| COVID-19 | IGFBP5 |
| COVID-19 | FKBP7 |
| COVID-19 | GRM5 |
| COVID-19 | CXCR3 |
| COVID-19 | PTHLH |
| COVID-19 | LY6K |
| COVID-19 | PLAC9 |
| COVID-19 | LPL |
| COVID-19 | CCKAR |
| COVID-19 | RTN4R |
| COVID-19 | GYPA |
| COVID-19 | TMED1 |
| COVID-19 | DRAXIN |
| COVID-19 | CCL13 |
| COVID-19 | LRRC8A |
| COVID-19 | ANGPTL4 |
| COVID-19 | NPPC |
| COVID-19 | IL22 |
| COVID-19 | CCL21 |
| COVID-19 | RCN1 |
| COVID-19 | CD74 |
| COVID-19 | FGF17 |
| COVID-19 | PAEP |
| COVID-19 | CNPY4 |
| COVID-19 | APOC3 |
| COVID-19 | SPINK1 |
| COVID-19 | AZGP1 |
| COVID-19 | STC2 |
| COVID-19 | S1PR4 |
| COVID-19 | IBSP |
| COVID-19 | CEACAM18 |
| COVID-19 | SLC38A4 |
| COVID-19 | CSN2 |
| COVID-19 | VSIG2 |
| COVID-19 | ENSP00000381830 |
| COVID-19 | CSHL1 |
| COVID-19 | CASQ1 |
| COVID-19 | XG |
| COVID-19 | ENDOU |
| COVID-19 | RAET1L |
| COVID-19 | COL10A1 |
| COVID-19 | PTH |
| COVID-19 | SLC15A1 |
| COVID-19 | SLC6A2 |
| COVID-19 | PRRT1 |
| COVID-19 | CLCC1 |
| COVID-19 | F2R |
| COVID-19 | JTB |
| COVID-19 | TGOLN2 |
| COVID-19 | CCL16 |
| COVID-19 | MIA |
| COVID-19 | TNF |
| COVID-19 | TMEM91 |
| COVID-19 | RTBDN |
| COVID-19 | MPL |
| COVID-19 | RSPO1 |
| COVID-19 | RSPO3 |
| COVID-19 | PRSS3 |
| COVID-19 | GPR17 |
| COVID-19 | CCR9 |
| COVID-19 | GP6 |
| COVID-19 | PRH1; |
| COVID-19 | EQTN |
| COVID-19 | RNF43 |
| COVID-19 | SPN |
| COVID-19 | IGSF4B |
| COVID-19 | CFD |
| COVID-19 | SPACA5 |
| COVID-19 | CHGA |
| COVID-19 | UNQ6190/PRO20217 |
| COVID-19 | APOA1 |
| COVID-19 | PRG3 |
| COVID-19 | SLC2A2 |
| COVID-19 | CCL11 |
| COVID-19 | TSLP |
| COVID-19 | SMOC2 |
| COVID-19 | HTR5 |
| COVID-19 | PRAP1 |
| COVID-19 | LY6H |
| COVID-19 | IMPG1 |
| COVID-19 | TNFRSF12A |
| COVID-19 | SSTR2 |
| COVID-19 | IGFBP3 |
| COVID-19 | PRLR |
| COVID-19 | PRR4 |
| COVID-19 | IL13 |
| COVID-19 | HCTR1 |
| COVID-19 | IGF1 |
| COVID-19 | CD300E |
| COVID-19 | LINC00305 |
| COVID-19 | SPESP1 |
| COVID-19 | FRZB |
| COVID-19 | IL28B |
| COVID-19 | MMP9 |
| COVID-19 | GAST |
| COVID-19 | FGF1 |
| COVID-19 | IL15RA |
| COVID-19 | CCR10 |
| COVID-19 | VEGFB |
| COVID-19 | SERPINE1 |
| COVID-19 | EXOC3-AS1 |
| COVID-19 | PRRT3 |
| COVID-19 | NETO1 |
| COVID-19 | VSTM2B |
| COVID-19 | CCR4 |
| COVID-19 | APP |
| COVID-19 | AMTN |
| COVID-19 | CXCL6 |
| COVID-19 | NINJ1 |
| COVID-19 | KLK9 |
| COVID-19 | SDF4 |
| COVID-19 | CPE |
| COVID-19 | AMELX |
| COVID-19 | DCD |
| COVID-19 | ANTXRL |
| COVID-19 | CCR2 |
| COVID-19 | PCSK1 |
| COVID-19 | QRFP |
| COVID-19 | RGMB |
| COVID-19 | NPY2R |
| COVID-19 | IGFBP7 |
| COVID-19 | SLC2A12 |
| COVID-19 | PPT1 |
| COVID-19 | CCL7 |
| COVID-19 | JCHAIN |
| COVID-19 | ADCYAP1 |
| COVID-19 | PDZD11 |
| COVID-19 | CP |
| COVID-19 | MANF |
| COVID-19 | GZMA |
| COVID-19 | TXNDC12 |
| COVID-19 | PGC |
| COVID-19 | ACVR1 |
| COVID-19 | WFDC13 |
| COVID-19 | SFRP4 |
| COVID-19 | REG1A |
| COVID-19 | GPR37 |
| COVID-19 | NOPE |
| COVID-19 | Cllorf94 |
| COVID-19 | SCARA5 |
| COVID-19 | GPR19 |
| COVID-19 | EMC7 |
| COVID-19 | CCL15 |
| COVID-19 | CA4 |
| COVID-19 | RNASE8 |
| COVID-19 | MLN |
| COVID-19 | UNQ9165/PRO28630 |
| COVID-19 | NTRK3 |
| COVID-19 | TREML1 |
| COVID-19 | CDH15 |
| COVID-19 | SMR3A |
| COVID-19 | DKK1 |
| COVID-19 | OXER1 |
| COVID-19 | FAM24B |
| COVID-19 | CRLF1 |
| COVID-19 | PDIA6 |
| COVID-19 | PLA2G12B |
| COVID-19 | FGF7 |
| COVID-19 | ZP4 |
| COVID-19 | BAMBI |
| COVID-19 | GKN2 |
| COVID-19 | IGFBPL1 |
| COVID-19 | MMP7 |
| COVID-19 | MANSC4 |
| COVID-19 | APOA4 |
| COVID-19 | SUSD6 |
| COVID-19 | CELA1 |
| COVID-19 | IGLL1 |
| COVID-19 | IL9 |
| COVID-19 | MADCAM1 |
| COVID-19 | NPBW1 |
| COVID-19 | HAVCR1 |
| COVID-19 | ITPRIPL1 |
| COVID-19 | SOST |
| COVID-19 | LHFPL1 |
| COVID-19 | SDC3 |
| COVID-19 | SEMG1 |
| COVID-19 | C1QB |
| COVID-19 | ASIP |
| COVID-19 | CCL18 |
| COVID-19 | LHFPL5 |
| COVID-19 | IGFL2 |
| COVID-19 | FGFRL1 |
| COVID-19 | EFNB2 |
| COVID-19 | C2orf66 |
| COVID-19 | MFAP3 |
| COVID-19 | C6orf15 |
| COVID-19 | OPN4 |
| COVID-19 | NOV |
| COVID-19 | GNS |
| COVID-19 | FKBP14 |
| COVID-19 | CELA2B |
| COVID-19 | C9 |
| COVID-19 | VWC2L |
| COVID-19 | BMPR2 |
| COVID-19 | CSH2 |
| COVID-19 | IL1RAP |
| COVID-19 | C1QTNF2 |
| COVID-19 | SLC10A4 |
| COVID-19 | IL16 |
| COVID-19 | LRIT3 |
| COVID-19 | GRN |
| COVID-19 | NIPAL4 |
| COVID-19 | GNRH1 |
| COVID-19 | ATP4B |
| COVID-19 | APLP2 |
| COVID-19 | TMEM123 |
| COVID-19 | IL3 |
| COVID-19 | PDGFA |
| COVID-19 | EVI2B |
| COVID-19 | NGFR |
| COVID-19 | PROK1 |
| COVID-19 | SOSTDC1 |
| COVID-19 | FLJ36131 |
| COVID-19 | EREG |
| COVID-19 | TNFRSF9 |
| COVID-19 | LYG1 |
| COVID-19 | SLCO4C1 |
| COVID-19 | GUCA2A |
| COVID-19 | FAM19A5 |
| COVID-19 | IL21 |
| COVID-19 | FCMR |
| COVID-19 | CADM2 |
| COVID-19 | CSF3 |
| COVID-19 | CA11 |
| COVID-19 | NTRK2 |
| COVID-19 | CRELD2 |
| COVID-19 | GPR120 |
| COVID-19 | C9orf135 |
| COVID-19 | SLC1A5 |
| COVID-19 | SYCN |
| COVID-19 | COL9A3 |
| COVID-19 | ADRA1D |
| COVID-19 | GLB1 |
| COVID-19 | SV2C |
| COVID-19 | DKFZp686O24166 |
| COVID-19 | PRSS3P2 |
| COVID-19 | KIRREL3 |
| COVID-19 | VSTM2A |
| COVID-19 | GCG |
| COVID-19 | SERPINE2 |
| COVID-19 | EDA2R |
| COVID-19 | CPAMD8 |
| COVID-19 | SCN3B |
| COVID-19 | OXT |
| COVID-19 | CD3E |
| COVID-19 | INSL3 |
| COVID-19 | CALY |
| COVID-19 | GHSR |
| COVID-19 | SCGB1D1 |
| COVID-19 | C6 |
| COVID-19 | CLDN2 |
| COVID-19 | MUC7 |
| COVID-19 | KISS1 |
| COVID-19 | ULBP2 |
| COVID-19 | CLDN7 |
| COVID-19 | IGFBP2 |
| COVID-19 | EFNB3 |
| COVID-19 | NXPH1 |
| COVID-19 | GHRHR |
| COVID-19 | LILRA4 |
| COVID-19 | OTOL1 |
| COVID-19 | EFNB1 |
| COVID-19 | FGFBP3 |
| COVID-19 | GPR63 |
| COVID-19 | PRRG4 |
| COVID-19 | MUCL1 |
| COVID-19 | XCL1 |
| COVID-19 | TMEM120A |
| COVID-19 | TMEM108 |
| COVID-19 | IL1F5 |
| COVID-19 | MSMP |
| COVID-19 | CXCL12 |
| COVID-19 | GNPTG |
| COVID-19 | SDC4 |
| COVID-19 | FZD9 |
| COVID-19 | CCL4L1 |
| COVID-19 | GPRC6A |
| COVID-19 | GPR156 |
| COVID-19 | ITIH3 |
| COVID-19 | RAMP2 |
| COVID-19 | TNFRSF11A |
| COVID-19 | DKK2 |
| COVID-19 | SPINK13 |
| COVID-19 | SDCBP |
| COVID-19 | CD8B2 |
| COVID-19 | CTSG |
| COVID-19 | CST2 |
| COVID-19 | EDDM3B |
| COVID-19 | CLTRN |
| COVID-19 | PLA2G10 |
| COVID-19 | DCN |
| COVID-19 | DAG1 |
| COVID-19 | CXCL16 |
| COVID-19 | CCRL2 |
| COVID-19 | DEFB108B |
| COVID-19 | MRGPRF |
| COVID-19 | FCRL3 |
| COVID-19 | NPS |
| COVID-19 | OBP2A |
| COVID-19 | ACKR2 |
| COVID-19 | GRM2 |
| COVID-19 | FAM174A |
| COVID-19 | MSR1 |
| COVID-19 | NOG |
| COVID-19 | TMEM102 |
| COVID-19 | LAIR1 |
| COVID-19 | IL22RA2 |
| COVID-19 | SPACA3 |
| COVID-19 | WIF1 |
| COVID-19 | F13B |
| COVID-19 | LRTM1 |
| COVID-19 | ERVH48-1 |
| COVID-19 | CCL2 |
| COVID-19 | TFF1 |
| COVID-19 | ADM2 |
| COVID-19 | IFITM10 |
| COVID-19 | HSD11B1L |
| COVID-19 | AXL |
| COVID-19 | FMR1NB |
| COVID-19 | C6orf25 |
| COVID-19 | OPN3 |
| COVID-19 | MUC13 |
| COVID-19 | CCL28 |
| COVID-19 | CCL26 |
| COVID-19 | PTN |
| COVID-19 | SLC39A8 |
| COVID-19 | FGF21 |
| COVID-19 | TIMD4 |
| COVID-19 | NPTX2 |
| COVID-19 | IL17RD |
| COVID-19 | PAPLN |
| COVID-19 | TMEM219 |
| COVID-19 | CYB5D2 |
| COVID-19 | IL1B |
| COVID-19 | FSTL1 |
| COVID-19 | PTPRJ |
| COVID-19 | NPY1R |
| COVID-19 | CLDN18 |
| COVID-19 | FLT3LG |
| COVID-19 | C17orf99 |
| COVID-19 | SLC6A5 |
| COVID-19 | AIMP1 |
| COVID-19 | TNFRSF8 |
| COVID-19 | CD248 |
| COVID-19 | TM9SF3 |
| COVID-19 | FCGR2C |
| COVID-19 | MPZL3 |
| COVID-19 | OSTN |
| COVID-19 | SPARCL1 |
| COVID-19 | TMPRSS11D |
| COVID-19 | KLK7 |
| COVID-19 | GDPD3 |
| COVID-19 | IL34 |
| COVID-19 | BTNL8 |
| COVID-19 | ASTL |
| COVID-19 | CLDN19 |
| COVID-19 | SCG5 |
| COVID-19 | PSAP |
| COVID-19 | PRRG3 |
| COVID-19 | PLA2G12A |
| COVID-19 | LCN1 |
| COVID-19 | LRRTM2 |
| COVID-19 | FAM3D |
| COVID-19 | PTGS2 |
| COVID-19 | FCRLB |
| COVID-19 | CST8 |
| COVID-19 | ANGPTL5 |
| COVID-19 | OPRK1 |
| COVID-19 | APOD |
| COVID-19 | ADM |
| COVID-19 | CLU |
| COVID-19 | PANX3 |
| COVID-19 | SLC52A3 |
| COVID-19 | VASN |
| COVID-19 | CMKLR1 |
| COVID-19 | BGLAP |
| COVID-19 | IL4 |
| COVID-19 | IL18BP |
| COVID-19 | ACVRL1 |
| COVID-19 | FLRT3 |
| COVID-19 | FAM234A |
| COVID-19 | CPVL |
| COVID-19 | GPR3 |
| COVID-19 | LMBRD2 |
| COVID-19 | TMEM169 |
| COVID-19 | LRRC8B |
| COVID-19 | INSL6 |
| COVID-19 | PDCD1 |
| COVID-19 | EMC10 |
| COVID-19 | IL18RAP |
| COVID-19 | NRN1 |
| COVID-19 | TRABD2A |
| COVID-19 | SSBP3-AS1 |
| COVID-19 | IL17C |
| COVID-19 | LGALS1 |
| COVID-19 | MDK |
| COVID-19 | WFDC1 |
| COVID-19 | NRN1L |
| COVID-19 | TNFRSF1B |
| COVID-19 | HNRNPA2B1 |
| COVID-19 | DKKL1 |
| COVID-19 | NTSR1 |
| COVID-19 | IL32 |
| COVID-19 | FAM24A |
| COVID-19 | SGCA |
| COVID-19 | IL1RN |
| COVID-19 | LY6D |
| COVID-19 | HSD17B7 |
| COVID-19 | SCG3 |
| COVID-19 | TNFRSF4 |
| COVID-19 | CCL22 |
| COVID-19 | XK |
| COVID-19 | RETN |
| COVID-19 | GALP |
| COVID-19 | FGL2 |
| COVID-19 | PDGFB |
| COVID-19 | CTF1 |
| COVID-19 | C8G |
| COVID-19 | EBI3 |
| COVID-19 | EDIL3 |
| COVID-19 | TRABD2B |
| COVID-19 | GP5 |
| COVID-19 | CLEC2B |
| COVID-19 | SEMA6C |
| COVID-19 | CLDN9 |
| COVID-19 | CSN3 |
| COVID-19 | TRH |
| COVID-19 | CCL25 |
| COVID-19 | APOE |
| COVID-19 | IER3 |
| COVID-19 | DHRS7C |
| COVID-19 | C19orf18 |
| COVID-19 | MCHR1 |
| COVID-19 | CHRDL2 |
| COVID-19 | FGF18 |
| COVID-19 | PINLYP |
| COVID-19 | MFAP2 |
| COVID-19 | C11orf44 |
| COVID-19 | CXCL17 |
| COVID-19 | ART1 |
| COVID-19 | LILRB4 |
| COVID-19 | DUOXA2 |
| COVID-19 | CSN1S1 |
| COVID-19 | PEBP4 |
| COVID-19 | RTN4RL1 |
| COVID-19 | SCGB2A2 |
| COVID-19 | TGFBR3L |
| COVID-19 | UCMA |
| COVID-19 | RAET1E |
| COVID-19 | PKD2L1 |
| COVID-19 | ACVR1B |
| COVID-19 | AVPR1A |
| COVID-19 | HEPACAM2 |
| COVID-19 | P4HB |
| COVID-19 | AJAP1 |
| COVID-19 | MOG |
| COVID-19 | EPHA4 |
| COVID-19 | BAGE3 |
| COVID-19 | CPA6 |
| COVID-19 | FSTL3 |
| COVID-19 | ARTN |
| COVID-19 | LRRN4 |
| COVID-19 | BRINP3 |
| COVID-19 | EPOR |
| COVID-19 | NRG1 |
| COVID-19 | MEGF9 |
| COVID-19 | MFSD2A |
| COVID-19 | SERPINA13P |
| COVID-19 | CLDN10 |
| COVID-19 | SCG2 |
| COVID-19 | ENDOD1 |
| COVID-19 | TMEFF1 |
| COVID-19 | F12 |
| COVID-19 | NUCB1 |
| COVID-19 | CEACAM19 |
| COVID-19 | B2M |
| COVID-19 | FETUB |
| COVID-19 | UNQ5830/PRO19650/PRO19816 |
| COVID-19 | DNASE1L2 |
| COVID-19 | CLEC-6 |
| COVID-19 | IL20RB |
| COVID-19 | CHRNA9 |
| COVID-19 | APOC2 |
| COVID-19 | SLC1A4 |
| COVID-19 | MC5R |
| COVID-19 | COLQ |
| COVID-19 | IMPG2 |
| COVID-19 | VTCN1 |
| COVID-19 | DEFB126 |
| COVID-19 | TMEM41A |
| COVID-19 | SDC1 |
| COVID-19 | IL15 |
| COVID-19 | BPIFA3 |
| COVID-19 | LTBR |
| COVID-19 | CELA3B |
| COVID-19 | MPEG1 |
| COVID-19 | ADAMTS16 |
| COVID-19 | S1PR3 |
| COVID-19 | GPR37L1 |
| COVID-19 | LAS2 |
| COVID-19 | SNCA |
| COVID-19 | SLC6A11 |
| COVID-19 | LYPD6B |
| COVID-19 | FLJ46089 |
| COVID-19 | CXCL11 |
| COVID-19 | FAM3A |
| COVID-19 | NINJ2 |
| COVID-19 | HBEGF |
| COVID-19 | C9orf47 |
| COVID-19 | CST6 |
| COVID-19 | CRTAC1 |
| COVID-19 | CD14 |
| COVID-19 | LAG3 |
| COVID-19 | LILRB2 |
| COVID-19 | SLC22A31 |
| COVID-19 | HS3ST1 |
| COVID-19 | GIF |
| COVID-19 | NLGN4X |
| COVID-19 | NOTCH2NL |
| COVID-19 | MFGE8 |
| COVID-19 | RXFP3 |
| COVID-19 | LCAT |
| COVID-19 | TRPC3 |
| COVID-19 | MARCO |
| COVID-19 | IGLL5 |
| COVID-19 | GKN1 |
| COVID-19 | CST7 |
| COVID-19 | FMOD |
| DIL | CXCL1 |
| DIL | TNF |
| DIL | TSLP |
| DM | CD81 |
| MG | CXCL2 |
| MG | PDGFB |
| MC | REG4 |
| MG | CCL22 |
| MG | CCL2 |
| MM | PLA2G2E |
| MM | SPX |
| MM | KCNK1 |
| MM | TNFRSF21 |
| MM | CLDN19 |
| MM | MMP7 |
| MM | NGRN |
| MM | PSORS1C2 |
| MM | FGFBP3 |
| MM | VEGFB |
| MM | LOC644613 |
| MM | C9 |
| MM | COLEC12 |
| MM | SLC38A4 |
| MM | SOST |
| MM | SLC41A2 |
| MM | MOG |
| MM | DNASE2 |
| MM | FMR1NB |
| MM | ODAPH |
| MM | LY6H |
| MM | OPN4 |
| MM | PRRT3 |
| MM | CCL18 |
| MM | TMEM41A |
| MM | APOC3 |
| MM | LGALS1 |
| MM | SSPN |
| MM | IL21 |
| MM | ACRV1 |
| MM | TFF2 |
| MM | AGER |
| MM | DKK1 |
| MM | CST9L |
| MM | EPHA5 |
| MM | PDIA6 |
| MM | DHRS4L2 |
| MM | MZB1 |
| MM | EVI2B |
| MM | C19orf18 |
| MM | SPOCK1 |
| MM | SCN3B |
| MM | CCL11 |
| MM | HCRTR2 |
| MM | MFSD2A |
| MM | IFNA17 |
| MM | LILRB1 |
| MM | SHISA5 |
| MM | GNRH2 |
| MM | COL8A1 |
| MM | TGFA |
| MM | ACP5 |
| MM | SMR3A |
| MM | PSAPL1 |
| MM | ZG16B |
| MM | GYPA |
| MM | IGLL5 |
| MM | CCL22 |
| MM | MANSC4 |
| MM | DNAJC3 |
| MM | TNFRSF8 |
| MM | ARTN |
| MM | NEGR1 |
| MM | CHRNA9 |
| MM | APOO |
| MM | UNQ6190/PRO20217 |
| MM | CST6 |
| MM | CD164L2 |
| MM | ASTN2 |
| MM | KAL1 |
| MM | TRPC3 |
| MM | IGFBP6 |
| MM | MLN |
| MM | IL15RA |
| MM | PPT1 |
| MM | FGF1 |
| MM | PRRG3 |
| MM | IFNA5 |
| MM | C9orf47 |
| MM | FAM3A |
| MM | LCN12 |
| MM | IFNL2 |
| MM | SECTM1 |
| MM | PMCH |
| MM | BMPR2 |
| MM | FAM19A5 |
| MM | PNLIPRP1 |
| MM | IL13RA1 |
| MM | LCN2 |
| MM | LAIR2 |
| MM | ERVK13-1 |
| MM | SLPI |
| MM | OPTC |
| MM | SPN |
| MM | CXCL17 |
| MM | CASQ1 |
| MM | TMEM108 |
| MM | MCFD2 |
| MM | IL19 |
| MM | SLC6A5 |
| MM | POMC |
| MM | ACVRL1 |
| MM | IL5 |
| MM | PRL |
| MM | OVGP1 |
| MM | LCN15 |
| MM | ITPRIPL1 |
| MM | TMEM91 |
| MM | FCGR2C |
| MM | CHGA |
| MM | TIMD4 |
| MM | RBP4 |
| MM | LYG2 |
| MM | OBP2A |
| MM | KIR3DL3 |
| MM | PTHLH |
| MM | CCL8 |
| MM | AMELX |
| MM | CST4 |
| MM | GNLY |
| MM | KCNMB3 |
| MM | IFNW1 |
| MM | WFDC9 |
| MM | CLDN2 |
| MM | KCT2 |
| MM | CPXM2 |
| MM | BCAM |
| MM | RAMP2 |
| MM | ERVK-7 |
| MM | NHLRC3 |
| MM | OS9 |
| MM | DKK2 |
| MM | IL2RA |
| MM | SPINK8 |
| MM | SYNDIG1L |
| MM | SPINK9 |
| MM | DPT |
| MM | AXL |
| MM | SPINK1 |
| MM | BTN1A1 |
| MM | SLC2A2 |
| MM | SLC24A3 |
| MM | DRAXIN |
| MM | ERVK-24 |
| MM | TNFRSF4 |
| MM | CST5 |
| MM | IER3 |
| MM | SLC22A25 |
| MM | CLCC1 |
| MM | TNFRSF1B |
| MM | FP248 |
| MM | LYSMD4 |
| MM | AGRP |
| MM | ADAMTS16 |
| MM | DEFB126 |
| MM | ECM1 |
| MM | IL16 |
| MM | INSL6 |
| MM | XCL2 |
| MM | ENDOU |
| MM | CST8 |
| MM | UGT2A1 |
| MM | FAM174A |
| MM | RCN1 |
| MM | UGT1A1 |
| MM | RTN4RL1 |
| MM | C11orf94 |
| MM | FAM187B |
| MM | APOE |
| MM | BTC |
| MM | LHFPL1 |
| MM | PRLR |
| MM | FGFRL1 |
| MM | CCL15 |
| MM | MPZL3 |
| MM | PPBP |
| MM | PDCD1 |
| MM | SPINK4 |
| MM | RTBDN |
| MM | CD99L2 |
| MM | PGA4 |
| MM | HSPA13 |
| MM | CNTN2 |
| MM | TMED1 |
| MM | IL1B |
| MM | WFDC12 |
| MM | SDF2L1 |
| MM | IL1F9 |
| MM | IGFBP5 |
| MM | TNFRSF12A |
| MM | MICB |
| MM | S100A13 |
| MM | RNASE8 |
| MM | FAM19A2 |
| MM | IMPG1 |
| MM | SERPINE1 |
| MM | CTSA |
| MM | NPPC |
| MM | PLA2G1B |
| MM | OBP2B |
| MM | CCL16 |
| MM | IL13 |
| MM | EREG |
| MM | KLK8 |
| MM | IL6 |
| MM | TNF |
| MM | C1QTNF2 |
| MM | KLK14 |
| MM | PTPRR |
| MM | ADM2 |
| MM | CCL24 |
| MM | NCR3 |
| MM | NETO1 |
| MM | C5orf64 |
| MM | GP6 |
| MM | MIA2 |
| MM | FGF17 |
| MM | TREML4 |
| MM | SOSTDC1 |
| MM | COL9A3 |
| MM | FCER1A |
| MM | ENSP00000320207 |
| MM | IGFBP3 |
| MM | C6orf15 |
| MM | PROK1 |
| MM | SLC22A31 |
| MM | CD151 |
| MM | EPYC |
| MM | PROKR2 |
| MM | FKBP9 |
| MM | IL34 |
| MM | MMP1 |
| MM | LAMC1 |
| MM | SRGN |
| MM | ERVK-18 |
| MM | IGSF4B |
| MM | CALY |
| MM | FKBP14 |
| MM | RCN2 |
| MM | IL17BR |
| MM | CALR |
| MM | CLDN3 |
| MM | GPC6 |
| MM | OTOL1 |
| MM | MANF |
| MM | STC2 |
| MM | CSAG1 |
| MM | TNFRSF9 |
| MM | TMEM161A |
| MM | PRH1; |
| MM | TRH |
| MM | CXCL1 |
| MM | FSTL1 |
| MM | TDGF1 |
| MM | PRSS3 |
| MM | PGA3 |
| MM | VSTM2A |
| MM | IGFL2 |
| MM | CRTAC1 |
| MM | F13B |
| MM | CTRB2 |
| MM | UNQ9165/PRO28630 |
| MM | GNRH1 |
| MM | SERPINA3 |
| MM | APP |
| MM | IGFBP2 |
| MM | ITIH3 |
| MM | TM9SF3 |
| MM | CNPY2 |
| MM | IL29 |
| MM | OTOR |
| MM | TM2D2 |
| MM | CSN3 |
| MM | APOH |
| MM | SEMA6A |
| MM | CD14 |
| MM | MUC7 |
| MM | LAS2 |
| MM | C2orf40 |
| MM | TNFRSF5 |
| MM | FGFR2 |
| MM | CXCL3 |
| MM | ADM |
| MM | IL1RAP |
| MM | CSPG5 |
| MM | RARRES2 |
| MM | MIA |
| MM | FKBP2 |
| MM | JCHAIN |
| MM | NINJ1 |
| MM | RCN3 |
| MM | ZP4 |
| MM | MDK |
| MM | LCN1P1 |
| MM | SIGLEC9 |
| MM | COL10A1 |
| MM | SPACA7 |
| MM | SPAG11B |
| MM | XG |
| MM | CLDN18 |
| MM | CCL17 |
| MM | SHISA7 |
| MM | TMEM149 |
| MM | NBL1 |
| MM | GAST |
| MM | OXT |
| MM | SEMA6C |
| MM | CCL28 |
| MM | LRIT3 |
| MM | CHRNB3 |
| MM | CCDC47 |
| MM | SLC2A10 |
| MM | LECT2 |
| MM | CRLF1 |
| MM | PSAP |
| MM | TMEM119 |
| MM | SPACA5 |
| MM | CALU |
| MM | MUCL3 |
| MM | LILRB2 |
| MM | ODAM |
| MM | CLU |
| MM | CD40LG |
| MM | CFHR1 |
| MM | CHGB |
| MM | IL7 |
| MM | XCL1 |
| MM | CPVL |
| MM | SYCN |
| MM | SLC39A8 |
| MM | DCD |
| MM | PLA2G10 |
| MM | IL36B |
| MM | SLC6A2 |
| MM | FAM24B |
| MM | LEP |
| MM | IL9 |
| MM | PTN |
| MM | CCL26 |
| MM | AHSG |
| MM | RNASE10 |
| MM | CD274 |
| MM | KCNV2 |
| MM | FAM3C |
| MM | LY6G6D |
| MM | SPINK13 |
| MM | ASIP |
| MM | LGALS3 |
| MM | CTSW |
| MM | FCAMR |
| MM | CD320 |
| MM | PRRG4 |
| MM | CA4 |
| MM | LILRB6 |
| MM | APLP2 |
| MM | BMPR1A |
| MM | APOA4 |
| MM | TXNDC12 |
| MM | OLR1 |
| MM | CXCL6 |
| MM | CXCL9 |
| MM | OTOS |
| MM | XK |
| MM | PRG3 |
| MM | ANGPTL4 |
| MM | CCL23 |
| MM | PRRT1 |
| MM | ATP4B |
| MM | IL17C |
| MM | CSF2 |
| MM | CCL13 |
| MM | HSD11B1L |
| MM | MICA |
| MM | IGF1 |
| MM | MSMP |
| MM | TGOLN2 |
| MM | ERP27 |
| MM | PTPRN2 |
| MM | KLRK1 |
| MM | LRP11 |
| MM | PIANP |
| MM | LIF |
| MM | S100A8 |
| MM | CSN2 |
| MM | EVAIC |
| MM | IFNA6 |
| MM | PCSK1 |
| MM | LILRB4 |
| MM | QPCT |
| MM | SNORC |
| MM | SHISA6 |
| MM | PRR27 |
| MM | KLRF1 |
| MM | CTSG |
| MM | PDIA3 |
| MM | CNPY4 |
| MM | RSPO4 |
| MM | REG1A |
| MM | PEBP4 |
| MM | CRTAP |
| MM | TGFBR1 |
| MM | VSTM2B |
| MM | CP |
| MM | VPREB1 |
| MM | CD44 |
| MM | IGFBP7 |
| MM | FGF7 |
| MM | ENSP00000381830 |
| MM | SEMG1 |
| MM | IL1A |
| MM | EPO |
| MM | CDH19 |
| MM | IL32 |
| MM | SUMF1 |
| MM | ANTXRL |
| MM | LHFPL5 |
| MM | CCL21 |
| MM | PLVAP |
| MM | CELA1 |
| MM | ICOSLG |
| MM | FGF23 |
| MM | SLC6A11 |
| MM | CLDN1 |
| MM | SFTPB |
| MM | NTS |
| MM | REG4 |
| MM | IGLL1 |
| MM | CSF3 |
| MM | CNPY3 |
| MM | NOPE |
| MM | TXN |
| MM | CDSN |
| MM | KLK7 |
| MM | TNFRSF13C |
| MM | RAET1L |
| MM | FAM19A3 |
| MM | LALBA |
| MM | RTN4R |
| MM | CFD |
| MM | PGLYRP1 |
| MM | CRELD2 |
| MM | AMTN |
| MM | CCL7 |
| MM | TMEM102 |
| MM | TNFRSF10B |
| MM | C2orf66 |
| MM | HAVCR1 |
| MM | FAM234A |
| MM | NOV |
| MM | RSPO3 |
| MM | IFNA13 |
| MM | CTLA4 |
| MM | PLAC9 |
| MM | UGT2B28 |
| MM | IL28B |
| MM | TOR1B |
| MM | INSL3 |
| MM | APOA1 |
| MM | CFHR2 |
| MM | FCGR2A |
| MM | IGF2 |
| MM | AMBN |
| MM | ASIC5 |
| MM | NTRK2 |
| MM | HNRNPA2B1 |
| MM | PRELP |
| MM | CILP2 |
| MM | EPHA4 |
| MM | KAZALD1 |
| MM | FAM168B |
| MM | CD248 |
| MM | COL14A1 |
| MM | VTN |
| MM | CELA3A |
| MM | PTPRD |
| MM | CELA3B |
| MM | DKK3 |
| MM | CREG2 |
| MM | ANGPTL5 |
| MM | MUCL1 |
| MM | SLC15A1 |
| MM | GREM2 |
| MM | WFDC3 |
| MM | PRR4 |
| MM | VSIG4 |
| MM | FAM19A4 |
| MM | CST7 |
| MM | TEX46 |
| MM | TFF1 |
| MM | FCMR |
| MM | CST1 |
| MM | CGREF1 |
| MM | AIMP1 |
| MM | IL4 |
| MM | SERPINI1 |
| MM | PRAP1 |
| MM | PGC |
| MM | GZMA |
| MM | CXCL11 |
| MM | SDC4 |
| MM | CXCL5 |
| MM | PANX3 |
| MM | CCL20 |
| MM | BPIFC |
| MM | TGFBR3L |
| MM | SNCA |
| MM | IL22RA2 |
| MM | ARSJ |
| MM | SFRP4 |
| MM | TREML1 |
| MM | LYPD6B |
| MM | CCL1 |
| MM | HRC |
| MM | CLTRN |
| MM | FZD4 |
| MM | LRRC8C |
| MM | GH1 |
| MM | IHH |
| MM | IL10RB |
| MM | IGFBP1 |
| MM | IGDCC3 |
| MM | VEGFA |
| MM | SPOCK2 |
| MM | FGF16 |
| MM | SLC39A14 |
| MM | BST2 |
| MM | SCG2 |
| MM | MFAP2 |
| MM | CT83 |
| MM | TMEM95 |
| MM | ABHD12 |
| MM | CLN5 |
| MM | SCGB1A1 |
| MM | HSD17B13 |
| MM | SPACA3 |
| MM | BTNL8 |
| MM | SLC22A9 |
| MM | SLC2A13 |
| MM | MPO |
| MM | TTYH2 |
| MM | TMEM169 |
| MM | CD72 |
| MM | TRABD2B |
| MM | SCG5 |
| MM | SERPINI2 |
| MM | SPP2 |
| MM | S100A7 |
| MM | KRTDAP |
| MM | CST2 |
| MM | CREG1 |
| MM | TSPAN2 |
| MM | NRN1 |
| MM | VSIG2 |
| MM | MEGF9 |
| MM | RNF43 |
| MM | CLDN8 |
| MM | ENH1 |
| MM | SMOC1 |
| MM | LRRN4CL |
| MM | PDGFA |
| MM | PLA2G12B |
| MM | PTTG1IP |
| MM | FAM24A |
| MM | FKBP10 |
| MM | SLC6A13 |
| MM | SLC10A4 |
| MM | GFRA2 |
| MM | SLURP1 |
| MM | OLFM1 |
| MM | BTLA |
| MM | ATP6AP2 |
| MM | SCGB2A2 |
| MM | PILRB |
| MM | SLC22A4 |
| MM | EXOC3-AS1 |
| MM | ART1 |
| MM | MUC5AC |
| MM | CHAD |
| MM | DKKL1 |
| MM | SLC8B1 |
| MM | TSLP |
| MM | SCGB1C2 |
| MM | PDGFB |
| MM | C1QL1 |
| MM | TM4SF6 |
| MM | FRZB |
| MM | TMEFF1 |
| MM | IL17B |
| MM | DAG1 |
| MM | COLQ |
| MM | PLAT |
| MM | TNFRSF6B |
| MM | CLDN4 |
| MM | TREM2 |
| MM | SUSD6 |
| MM | VSTM2L |
| MM | NFASC |
| MM | COMT |
| MM | MSR1 |
| MM | LSR |
| MM | CER1 |
| MM | AZU1 |
| MM | CCK |
| MM | PLA2G2A |
| MM | SMOC2 |
| MM | CXCL13 |
| MM | CRTAM |
| MM | GKN1 |
| MM | NRXN3 |
| MM | DHRS7C |
| MM | CHRDL2 |
| MM | HTR3D |
| MM | TRPC4 |
| NMO | CXCL2 |
| NMO | CXCL3 |
| NMO | IGFBPL1 |
| NMO | CCL22 |
| NMO | IL1F9 |
| NMO | LY6G6D |
| NSCLC | CCL17 |
| NSCLC | CCL24 |
| NSCLC | CXCL1 |
| NSCLC | CXCL3 |
| NSCLC | EDIL3 |
| NSCLC | IFNA13 |
| NSCLC | IFNA14 |
| NSCLC | IFNA17 |
| NSCLC | IFNA2 |
| NSCLC | IFNA5 |
| NSCLC | IFNA6 |
| NSCLC | IFNA8 |
| NSCLC | IFNL2 |
| NSCLC | IFNW1 |
| NSCLC | IL28B |
| NSCLC | IL34 |
| NSCLC | MADCAM1 |
| NSCLC | PDGFB |
| NSCLC | REG1A |
| NSCLC | SDC1 |
| NSCLC | BTN1A1 |
| NSCLC | C6 |
| NSCLC | CD207 |
| NSCLC | CD3D |
| NSCLC | CDH19 |
| NSCLC | COLEC12 |
| NSCLC | EREG |
| NSCLC | FGF23 |
| NSCLC | FGF7 |
| NSCLC | FGFBP3 |
| NSCLC | IGFBPL1 |
| NSCLC | IL15RA |
| NSCLC | IL17F |
| NSCLC | IL1RAP |
| NSCLC | IL22RA2 |
| NSCLC | IL4 |
| NSCLC | IL4R |
| NSCLC | ITGA5 |
| NSCLC | LAG3 |
| NSCLC | LRRC4 |
| NSCLC | MPZL3 |
| NSCLC | NOTCH2NL |
| NSCLC | NTRK3 |
| NSCLC | REG4 |
| NSCLC | SCARA3 |
| NSCLC | STIM2 |
| NSCLC | TNFRSF10C |
| NSCLC | TNFRSF19L |
| NSCLC | TREML1 |
| PANDAS | LRP11 |
| Sarcoidosis | CX3CL1 |
| Sarcoidosis | EPYC |
| Sarcoidosis | PGLYRP1 |
| SLE | CXCL3 |
| SLE | IFNA17 |
| SLE | CXCL1 |
| SLE | LOC644613 |
| SLE | IFNA6 |
| SLE | SV2C |
| SLE | TMEM102 |
| SLE | PDCD1LG2 |
| SLE | SLC29A4 |
| SLE | IL1A |
| SLE | C5orf64 |
| SLE | IFNW1 |
| SLE | SCGB1D1 |
| SLE | EPYC |
| SLE | CNPY2 |
| SLE | CCL4L1 |
| SLE | SPINK9 |
| SLE | TNF |
| SLE | KIRREL3 |
| SLE | IFNA8 |
| SLE | IFNA14 |
| SLE | VEGFB |
| SLE | TMEM108 |
| SLE | IFNA5 |
| SLE | ACVR2B |
| SLE | OBP2B |
| SLE | MCFD2 |
| SLE | DPT |
| SLE | SPACA7 |
| SLE | IFNA13 |
| SLE | FKBP14 |
| SLE | LACRT |
| SLE | IL6 |
| SLE | FAM19A3 |
| SLE | IFNL2 |
| SLE | ERP27 |
| SLE | TMEM149 |
| SLE | PRH1; |
| SLE | ZG16B |
| SLE | IFNA2 |
| SLE | RAET1E |
| SLE | CCDC47 |
| SLE | MUC21 |
| SLE | CCL22 |
| SLE | CGREF1 |
| SLE | TEPP |
| SLE | FAM19A2 |
| SLE | SPOCK1 |
| SLE | SRGN |
| SLE | SHISA7 |
| SLE | CCL17 |
| SLE | RNASE10 |
| SLE | FGF21 |
| SLE | APOA4 |
| SLE | NGFR |
| SLE | KCNV2 |
| SLE | AGER |
| SLE | FGFRL1 |
| SLE | LGR6 |
| SLE | CCL8 |
| SLE | CD44 |
| SLE | ITIH3 |
| SLE | CST8 |
| SLE | SSPN |
| SLE | CELA1 |
| SLE | IL4 |
| SLE | RCN3 |
| SLE | PRRG4 |
| SLE | MFAP5 |
| SLE | CSPG5 |
| SLE | VTCN1 |
| SLE | PLA2G2E |
| SLE | LY6H |
| SLE | GYPC |
| SLE | SLC41A2 |
| SLE | DRAXIN |
| SLE | CSHL1 |
| SLE | LAIR2 |
| SLE | IGFBP2 |
| SLE | CD248 |
| SLE | RGMB |
| SLE | TGOLN2 |
| SLE | CSAG1 |
| SLE | ACP4 |
| SLE | CALU |
| SLE | BTNL8 |
| SLE | SOSTDC1 |
| SLE | LYSMD4 |
| SLE | LCN2 |
| SLE | SCGB1C2 |
| SLE | CST4 |
| SLE | IGF1 |
| SLE | PRRT1 |
| SLE | CHRNA5 |
| SLE | ANTXRL |
| SLE | TNFRSF6 |
| SLE | CD300LG |
| SLE | SERPINE1 |
| SLE | OLFM1 |
| SLE | PLA2G10 |
| SLE | CD300E |
| SLE | CDH19 |
| SLE | RAMP2 |
| SLE | ATP4B |
| SLE | PTPRR |
| SLE | SFN |
| SLE | HCRTR2 |
| SLE | ACRV1 |
| SLE | FAM3A |
| SLE | ACVR1B |
| SLE | FGF23 |
| SLE | IL15RA |
| SLE | IGFBP7 |
| SLE | LHFPL1 |
| SLE | IL28B |
| SLE | VIT |
| SLE | IER3 |
| SLE | C2orf40 |
| SLE | PLVAP |
| SLE | LECT2 |
| SLE | DAG1 |
| SLE | SPINK6 |
| SLE | SLC2A12 |
| SLE | IGLL1 |
| SLE | TFF2 |
| SLE | ASIP |
| SLE | IL16 |
| SLE | EDIL3 |
| SLE | CCL13 |
| SLE | RCN1 |
| SLE | CSH2 |
| SLE | IL33 |
| SLE | LILRB4 |
| SLE | SPESP1 |
| SLE | PDGFB |
| SLE | PTHLH |
| SLE | C9orf47 |
| SLE | CHRDL2 |
| SLE | ART3 |
| SLE | CPVL |
| SLE | CCL15 |
| SSC | SERPINE1 |
| SSC | LEP |
| SSC | LECT2 |
| SSC | OTOR |
| SSC | CASQ1 |
| SSC | CST6 |
| SSC | INSL3 |
| SSC | SPACA3 |
| SSC | AMTN |
| SSC | ZG16B |
| SSC | LOC644613 |
| SSC | PGA4 |
| SSC | LYSMD4 |
| SSC | SRGN |
| SSC | CDH19 |
| SSC | SHISA7 |
| SSC | FAM19A3 |
| SSC | HAVCR1 |
| SSC | BAMBI |
| SSC | MSMP |
| SSC | SPACA7 |
| SSC | PTHLH |
| SSC | PLA2G12B |
| SSC | CXCL3 |
| SSC | CST4 |
| SSC | DKK3 |
| SSC | PIANP |
| SSC | PRG3 |
| SSC | BTC |
| SSC | CCL17 |
| SSC | XCL1 |
| SSC | LMBRD2 |
| SSC | LALBA |
| SSC | TGFA |
| SSC | IL29 |
| SSC | EVI2B |
| SSC | SLPI |
| SSC | CLCC1 |
| SSC | RNASE10 |
| SSC | FGFBP3 |
| SSC | FAM168B |
| SSC | PGLYRP1 |
| SSC | ANGPTL4 |
| SSC | CLU |
| SSC | AGER |
| SSC | TMEM108 |
| SSC | C1QTNF2 |
| SSC | TMEM119 |
| SSC | CCL8 |
| SSC | ODAPH |
| SSC | CNPY3 |
| SSC | MZB1 |
| SSC | CYTL1 |
| SSC | PRH1 |
| SSC | SLC2A10 |
| SSC | PRRG1 |
| SSC | CSPG5 |
| SSC | DRAXIN |
| SSC | PRR27 |
| SSC | DKK1 |
| SSC | NTRK2 |
| SSC | IFNA13 |
| SSC | PDCD1 |
| SSC | FAM19A2 |
| SSC | IFNW1 |
| SSC | RCN1 |
| SSC | CFD |
| SSC | CRELD2 |
| SSC | CCL18 |
| SSC | CD14 |
| SSC | BTN1A1 |
| SSC | PTPRR |
| SSC | TMEM91 |
| SSC | VSIG2 |
| SSC | CCL13 |
| SSC | C2orf40 |
| SSC | VEGFB |
| SSC | REG4 |
| SSC | TXNDC12 |
| SSC | ACVR2B |
| SSC | ODAM |
| SSC | CST5 |
| SSC | PI3 |
| SSC | TMEM149 |
| SSC | TEPP |
| SSC | KCNV2 |
| SSC | PLA2G2E |
| SSC | AIMP1 |
| SSC | IGFBP5 |
| SSC | ASIP |
| SSC | PGC |
| SSC | TM9SF3 |
| SSC | AMELX |
| SSC | CSN2 |
| SSC | CPXM2 |
| SSC | PRSS3 |
| SSC | FAM3A |
| SSC | LILRA3 |
| SSC | CSAG1 |
| SSC | RTBDN |
| SSC | CELA1 |
| SSC | ANTXRL |
| SSC | PLA2G10 |
| SSC | KCT2 |
| SSC | APOH |
| SSC | NENF |
| SSC | NPPC |
| SSC | LY6H |
| SSC | FGF1 |
| SSC | SLC1A1 |
| SSC | IFNL2 |
| SSC | HSPA13 |
| SSC | C6orf15 |
| SSC | FLJ37218 |
| SSC | CCL7 |
| SSC | APOA4 |
| SSC | FSTL1 |
| SSC | IGFBP1 |
| SSC | FCGR2A |
| SSC | SMR3A |
| SSC | IFITM10 |
| SSC | MSLN |
| SSC | PRAP1 |
| SSC | EPO |
| SSC | PLVAP |
| SSC | PROK1 |
| SSC | TSLP |
| SSC | MIA |
| SSC | APP |
| SSC | OBP2A |
| SSC | RTN4RL1 |
| SSC | PRRT3 |
| SSC | APOA1 |
| SSC | FGF7 |
| SSC | TMED1 |
| SSC | LGALS3 |
| SSC | JCHAIN |
| SSC | PRRG3 |
| SSC | IGF1 |
| SSC | ACRV1 |
| SSC | SLC38A4 |
| SSC | FKBP11 |
| SSC | ITPRIPL1 |
| SSC | PLAC9 |
| SSC | TFF2 |
| SSC | WFDC13 |
| SSC | LCN1 |
| SSC | LYG1 |
| SSC | LAIR2 |
| SSC | TNFRSF8 |
| SSC | SOSTDC1 |
| SSC | VSTM2A |
| SSC | IGFBP7 |
| SSC | PSORS1C2 |
| SSC | FGF23 |
| SSC | RSPO3 |
| SSC | S100A9 |
| SSC | CXCL9 |
| SSC | TGOLN2 |
| SSC | ACP5 |
| SSC | MANF |
| SSC | AMBN |
| SSC | PSAPL1 |
| SSC | WFDC10A |
| SSC | PPT1 |
| SSC | MANSC4 |
| SSC | CD248 |
| SSC | NGRN |
| SSC | PSAP |
| SSC | LILRB2 |
| SSC | SCGB2A2 |
| SSC | IGFBPL1 |
| SSC | SV2C |
| SSC | CXCL6 |
| SSC | CD300E |
| SSC | RCN3 |
| SSC | IGFBP3 |
| SSC | RTN4R |
| SSC | PRRT1 |
| SSC | ACVR2A |
| SSC | LCN2 |
| SSC | HCRTR2 |
| SSC | CELA3A |
| SSC | ADM2 |
| SSC | LRIT3 |
| SSC | MIA2 |
| SSC | TNFRSF17 |
| SSC | SPN |
| SSC | SLC6A5 |
| SSC | WFDC1 |
| SSC | LILRB4 |
| SSC | CTSG |
| SSC | CXCL11 |
| SSC | KLK7 |
| SSC | CST8 |
| SSC | NOPE |
| SSC | GAST |
| SSC | ASTN2 |
| SSC | MCFD2 |
| SSC | CCL22 |
| SSC | OTOL1 |
| SSC | SYCN |
| SSC | CCL2 |
| SSC | SOST |
| SSC | PTN |
| SSC | TACSTD2 |
| SSC | IL21 |
| SSC | IGLL1 |
| SSC | MMP7 |
| SSC | APLP2 |
| SSC | SSBP3_AS1 |
| SSC | CST7 |
| SSC | SSPN |
| SSC | HS3ST1 |
| SSC | GP6 |
| SSC | RNASE8 |
| SSC | ACVR1B |
| SSC | PDIA3 |
| SSC | IL15RA |
| SSC | PTPRN2 |
| SSC | IL28B |
| SSC | PMCH |
| SSC | PVRL2 |
| SSC | WIF1 |
| SSC | EREG |
| SSC | EDIL3 |
| SSC | CDSN |
| SSC | REG1A |
| SSC | PTH |
| SSC | LHFPL1 |
| SSC | TRABD2B |
| SSC | TIGIT |
| SSC | KISS1 |
| SSC | CXCL17 |
| SSC | SPOCK2 |
| SSC | CTF1 |
| SSC | CD55 |
| SSC | DEFB108B |
| SSC | IL17C |
| SSC | GPHB5 |
| SSC | PRLR |
| SSC | NLGN4Y |
| SSC | SPACA5 |
| SSC | FGF17 |
| SSC | C9 |
| SSC | CHRDL2 |
| SSC | PF4V1 |
| SSC | RAMP2 |
| SSC | CCL26 |
| SSC | CD151 |
| SSC | TRPC5 |
| SSC | MMP1 |
| SSC | PRRG4 |
| SSC | ART3 |
| SSC | HEPACAM2 |
| SSC | SDF2L1 |
| SSC | IGFBP2 |
| SSC | AXL |
| SSC | SCN3B |
| SSC | EPHA5 |
| SSC | IL1RAP |
| SSC | ATP6AP2 |
| SSC | CCL20 |
| SSC | GNRH1 |
| SSC | SEMG1 |
| SSC | APOE |
| SSC | FGFRL1 |
| SSC | IBSP |
| SSC | TEX264 |
| SSC | CCBE1 |
| SSC | BCAM |
| SSC | LRRC8C |
| SSC | DKK2 |
| SSC | EPHA4 |
| SSC | SFRP4 |
| SSC | SYNDIG1L |
| SSC | FAM19A5 |
| SSC | LYG2 |
| SSC | FAM3C |
| SSC | TUSC5 |
| SSC | MDK |
| SSC | FGF16 |
| SSC | MFGE8 |
| SSC | PRELP |
| SSC | COL10A1 |
| SSC | IGF2 |
| SSC | CSN3 |
| SSC | CLDN18 |
| SSC | PDIA6 |
| SSC | CHAD |
| SSC | TNFRSF21 |
| SSC | C6orf120 |
| SSC | COL9A3 |
| SSC | PDGFB |
| SSC | TOR1B |
| SSC | LHFPL5 |
| SSC | UNQ9165_PRO28630 |
| SSC | CCL15 |
| SSC | BMPR1A |
| SSC | FGFR2 |
| SSC | DGAT2L7P |
| SSC | SERPINA13P |
| SSC | FCAMR |
| SSC | XCL2 |
| SSC | TMEM9B |
| SSC | RNF167 |
| SSC | LCN15 |
| SSC | TREML1 |
| SSC | FGF21 |
| SSC | SLC22A31 |
| SSC | IL20RB |
| SSC | CCL11 |
| SSC | STC2 |
| SSC | FKBP14 |
| SUSAC | CCL24 |
| SUSAC | SDC4 |
| SUSAC | TREML1 |
| SUSAC | VSIG4 |
| Malaria | LCN15 |
| Malaria | IL21 |
| Malaria | LEP |
| Malaria | FKBP7 |
| Malaria | CCL11 |
| Malaria | BMPR2 |
| Malaria | SCGB2A2 |
| Malaria | GZMK |
| Malaria | MSMP |
| Malaria | DCD |
| Malaria | SPARC |
| Malaria | COL9A3 |
| Malaria | FLRT3 |
| Malaria | TNFRSF10B |
| Malaria | FZD4 |
| Malaria | TSPAN13 |
| Malaria | HTRA3 |
| Malaria | PCSK1 |
| Malaria | LYPD6B |
| Malaria | CPE |
| Malaria | GFRAL |
| Malaria | TGOLN2 |
| Malaria | PRLR |
| Malaria | TNFRSF21 |
| Malaria | TSPAN2 |
| Malaria | AMTN |
| Malaria | F12 |
| Malaria | SLC1A1 |
| Malaria | MPZL3 |
| Malaria | F13B |
| Malaria | C6orf120 |
| Malaria | PRAP1 |
| Malaria | IGFBP6 |
| Malaria | FGL2 |
| Malaria | SPX |
| Malaria | GPC6 |
| Malaria | INSL3 |
| Malaria | CYTL1 |
| Malaria | TM4SF6 |
| Malaria | SGCA |
| Malaria | C9orf135 |
| Malaria | CD300A |
| Malaria | CTF1 |
| Malaria | OPN4 |
| Malaria | SLC22A31 |
| Malaria | ZP4 |
| Malaria | IL21R |
| Malaria | ADM |
| Malaria | AXL |
| Malaria | EPHA5 |
| Malaria | IL17A |
| Malaria | PTH |
| Malaria | TNFRSF17 |
| Malaria | SHISA6 |
| Malaria | FGF17 |
| Malaria | GNRH1 |
| Malaria | SDF2L1 |
| Malaria | CNPY4 |
| Malaria | SLC6A9 |
| Malaria | NPR3 |
| Malaria | SIGLEC10 |
| Malaria | IL13 |
| Malaria | SFTPA2 |
| Malaria | GDPD3 |
| Malaria | CD164L2 |
| Malaria | KLK2 |
| Malaria | ENSP00000381830 |
| Malaria | AKR1B10 |
| Malaria | KLK3 |
| Malaria | FCER1A |
| Malaria | SNORC |
| Malaria | CSHL1 |
| Malaria | CSH2 |
| Malaria | CSN3 |
| Malaria | SLC1A4 |
| Malaria | HEPACAM2 |
| Malaria | INS |
| Malaria | GP6 |
| Malaria | RNASE8 |
| Malaria | SLAMF9 |
| Malaria | DPT |
| Malaria | MINPP1 |
| Malaria | FGFR3 |
| Malaria | C2orf66 |
| Malaria | IMPG1 |
| Malaria | NENF |
| Malaria | DKK3 |
| Malaria | NOV |
| Malaria | SERPINI2 |
| Malaria | IFNA6 |
| Malaria | COLEC12 |
| Malaria | CALR |
| Malaria | PRRG1 |
| Malaria | GSN |
| Malaria | SLC10A4 |
| Malaria | CD99 |
| Malaria | FSTL1 |
| Malaria | IL16 |
| Malaria | TRH |
| Malaria | SLC6A14 |
| Malaria | GLB1 |
| Malaria | CCL20 |
| Malaria | ARTN |
| Malaria | SPP2 |
| Malaria | LINC00305 |
| Malaria | LAS2 |
| Malaria | S100A13 |
| Malaria | MZB1 |
| Malaria | RETN |
| Malaria | FAM172A |
| Malaria | CD99L2 |
| Malaria | CD151 |
| Malaria | SDF4 |
| Malaria | CEACAM19 |
| Malaria | CHGB |
| Malaria | SLC8B1 |
| Malaria | CDNF |
| Malaria | BCAM |
| Malaria | TSPAN9 |
| Malaria | ENDOD1 |
| Malaria | EMC10 |
| Malaria | OS9 |
| Malaria | TMEM169 |
| Malaria | IL22 |
| Malaria | NBL1 |
| Malaria | IL1RN |
| Malaria | SMOC2 |
| Malaria | PRRG3 |
| Malaria | LRIT3 |
| Malaria | KCT2 |
| Malaria | XG |
| Malaria | IGF1 |
| Malaria | GAST |
| Malaria | CGREF1 |
| Malaria | RAMP2 |
| Malaria | PRRG4 |
| Malaria | CDSN |
| Malaria | C11orf94 |
| Malaria | OTOL1 |
| Malaria | IBSP |
| Malaria | LGALS3 |
| Malaria | LYSMD4 |
| Malaria | SYCN |
| Malaria | JCHAIN |
| Malaria | CST8 |
| Malaria | PRRT1 |
| Malaria | CCL15 |
| Malaria | SSPN |
| Malaria | APOO |
| Malaria | CST5 |
| Malaria | SPINK1 |
| Malaria | HCRTR2 |
| Malaria | PRRT3 |
| Malaria | PSORS1C2 |
| Malaria | RTBDN |
| Malaria | ACRV1 |
| Malaria | FKBP14 |
| Malaria | SPINK4 |
| Malaria | IGFBP1 |
| Malaria | PLA2G2E |
| Malaria | OBP2A |
| Malaria | CCL8 |
| Malaria | VEGFB |
| Malaria | TGFA |
| Malaria | COL10A1 |
| Malaria | IFNW1 |
| Malaria | RNASE10 |
| Malaria | PRH1; |
| Malaria | CDH19 |
| Malaria | CPXM2 |
| Malaria | CSPG5 |
| Malaria | RCN3 |
| Malaria | IFNA13 |
| Malaria | IGFBP2 |
| Malaria | PLA2G10 |
| Malaria | SRGN |
| Malaria | EPYC |
| Malaria | CXCL1 |
| Malaria | CNPY2 |
| Malaria | MCFD2 |
| Malaria | ANGPTL4 |
| Malaria | SPACA7 |
| Malaria | SLC2A10 |
| Malaria | RTN4R |
| Malaria | CXCL3 |
| Malaria | CCDC47 |
| Malaria | CST4 |
| Malaria | CELA1 |
| Malaria | LALBA |
| Malaria | PTPRR |
| Malaria | OBP2B |
| Malaria | TXNDC12 |
| Malaria | PTN |
| Malaria | ZG16B |
| Malaria | PRSS3 |
| Malaria | CNPY3 |
| Malaria | PTHLH |
| Malaria | PGLYRP1 |
| Malaria | KLK7 |
| Malaria | CCL13 |
| Malaria | FAM19A3 |
| Malaria | KLK8 |
| Malaria | SERPINA3 |
| Malaria | HCTR1 |
| Malaria | DRD5 |
| Malaria | GPR37L1 |
| Malaria | BDKBR1 |
| Malaria | NPY2R |
| Malaria | SCTR |
| Malaria | ADCYAP1R1 |
| Malaria | GPR19 |
| Malaria | S1PR3 |
| Malaria | NMBR |
| Malaria | CCR4 |
| Malaria | GPR17 |
| Malaria | CNR1 |
| Malaria | OPRK1 |
| Malaria | CYSLTR2 |
| Malaria | P2RY10 |
| Malaria | HTR1B |
| Malaria | OPRM1 |
| Malaria | RXFP3 |
| Malaria | OXER1 |
| Malaria | CXCR3 |
| Malaria | HTR2B |
| Malaria | GPR1 |
| Malaria | NPBW1 |
| Malaria | VSTM2A |
| Malaria | LY6G6D |
| Malaria | SLC41A2 |
| Malaria | MOG |
| Malaria | RNASE9 |
| Malaria | IGLL5 |
| Malaria | CHGA |
| Malaria | TREML1 |
| Malaria | GHRHR |
| Malaria | XK |
| Malaria | KITLG |
| Malaria | WFDC10A |
| Malaria | TMEM108 |
| Malaria | OTOR |
| Malaria | GPR63 |
| Malaria | PLGRKT |
| Malaria | CTSG |
| Malaria | SLC6A5 |
| Malaria | CSAG1 |
| Malaria | FZD9 |
| Malaria | CMKLR1 |
| Malaria | FKBP2 |
| Malaria | ITIH3 |
| Malaria | LILRA4 |
| Malaria | TNFRSF12A |
| Malaria | CXCL13 |
| Malaria | PPT1 |
| Malaria | CXCL17 |
| Malaria | ODAM |
| Malaria | IL1RAP |
| Malaria | SLC38A4 |
| Malaria | ACKR1 |
| Malaria | CADM2 |
| Malaria | PAPLN |
| Malaria | GPR37 |
| Malaria | SLC38A2 |
| Malaria | TMEM59 |
| Malaria | RAET1L |
| Malaria | SPINK8 |
| Malaria | TRABD2B |
| Malaria | FGF23 |
| Malaria | TMEM91 |
| Malaria | SV2C |
| Malaria | REG1A |
| KT | SPOCK1 |
| KT | CD99L2 |
| KT | ACRV1 |
| KT | SPINK4 |
| KT | MCFD2 |
| KT | CD80 |
| KT | IL2RA |
| KT | LOC644613 |
| KT | AGRP |
| KT | SHISA7 |
| KT | RCN2 |
| KT | ACKR1 |
| KT | IFNG |
| KT | SCGB3A1 |
| KT | CCL16 |
| KT | IL29 |
| KT | OBP2B |
| KT | CXCL3 |
| KT | CCDC47 |
| KT | SSPN |
| KT | EPYC |
| KT | SPACA3 |
| KT | MRGPRF |
| KT | KLK8 |
| KT | MUCL3 |
| KT | IL9 |
| KT | IFNL2 |
| KT | IGFBP1 |
| KT | CALU |
| KT | MZB1 |
| KT | CCL22 |
| KT | TNFRSF21 |
| KT | SPACA7 |
| KT | LYG2 |
| KT | TNFRSF5 |
| KT | ANGPTL4 |
| KT | ENDOU |
| KT | PTPRR |
| KT | CSPG5 |
| KT | SPINK9 |
| KT | IL7 |
| KT | FLJ37218 |
| KT | DKK3 |
| KT | ZG16B |
| KT | SERPINE1 |
| KT | SLPI |
| KT | CD274 |
| KT | FAM19A2 |
| KT | VSIG2 |
| KT | CD40LG |
| KT | EDDM3B |
| KT | HCRTR2 |
| KT | FGFR2 |
| KT | EXOC3-AS1 |
| KT | IGFBP2 |
| KT | SERPINA3 |
| KT | CXCL1 |
| KT | OTOR |
| KT | TSPAN9 |
| KT | CNPY3 |
| KT | PRR27 |
| KT | RCN3 |
| KT | CNPY2 |
| KT | BTC |
| KT | ADRB3 |
| KT | IGFBP5 |
| KT | NPY1R |
| KT | TMEM102 |
| KT | LALBA |
| KT | CXCL2 |
| KT | CCL13 |
| KT | OTOL1 |
| KT | IL1A |
| KT | APOO |
| KT | LGALS3 |
| KT | LECT2 |
| KT | CDH19 |
| KT | RTN4R |
| KT | RETN |
| KT | CSF2 |
| KT | APOH |
| KT | MICA |
| KT | GPR6 |
| KT | IL4 |
| KT | CRLF1 |
| KT | LAIR2 |
| KT | NPY2R |
| KT | LYSMD4 |
| KT | DCD |
| KT | TXNDC12 |
| KT | GP6 |
| KT | NOV |
| KT | DRAXIN |
| KT | CCR10 |
| KT | PILRA |
| KT | GPR1 |
| KT | OPRL1 |
| KT | FAM168B |
| KT | PRLR |
| KT | CFD |
| KT | IBSP |
| KT | PTPRN2 |
| KT | ERP27 |
| KT | BTN1A1 |
| KT | PDCD1 |
| KT | SV2C |
| KT | CSN2 |
| KT | NINJ1 |
| KT | TMEM91 |
| KT | SLC1A1 |
| KT | ADCYAP1 |
| KT | SEMG2 |
| KT | APOA1 |
| KT | MPO |
| KT | VEGFB |
| KT | IL34 |
| KT | IFNA17 |
| KT | S100A13 |
| KT | AVPR1A |
| KT | CCL17 |
| KT | AMTN |
| KT | IL17RD |
| KT | DKK1 |
| KT | PSORS1C2 |
| KT | SSTR2 |
| KT | SYCN |
| KT | GPR37 |
| KT | ANTXRL |
| KT | AGER |
| KT | PGLYRP1 |
| KT | WFDC12 |
| KT | IMPG1 |
| KT | GNRH1 |
| KT | SLC2A12 |
| KT | FKBP2 |
| KT | ULBP1 |
| KT | TMEM119 |
| KT | PRSS3 |
| KT | MIA2 |
| KT | SLC2A2 |
| KT | C5orf64 |
| KT | TFPI2 |
| KT | PCSK1 |
| KT | PRH1; |
| KT | IGFBP7 |
| KT | UNQ6190/PRO20217 |
| KT | CELA1 |
| KT | OSTN |
| KT | RARRES2 |
| KT | AZGP1 |
| KT | TGFA |
| KT | IL6 |
| KT | FMR1NB |
| KT | REG1B |
| KT | CXCL12 |
| KT | IL28B |
| KT | JCHAIN |
| KT | CES3 |
| KT | FAM19A3 |
| KT | FAM174A |
| KT | CCL4L1 |
| KT | PLA2G2E |
| KT | COL10A1 |
| KT | ITPRIPL1 |
| KT | PPBP |
| KT | MANF |
| KT | TMEM149 |
| KT | PRRG4 |
| KT | GFRA2 |
| KT | CA11 |
| KT | TLR1 |
| KT | CCL21 |
| KT | REG4 |
| KT | PRG3 |
| KT | IFNA13 |
| KT | SLC22A25 |
| KT | CCL7 |
| KT | ATP6AP2 |
| KT | BRICD5 |
| KT | GAST |
| KT | KAL1 |
| KT | TMEM108 |
| KT | IL16 |
| KT | GPR182 |
| KT | TNFRSF6 |
| KT | TSLP |
| KT | APOA4 |
| KT | SIRPA |
| KT | FCER1A |
| KT | PLBD2 |
| KT | KCNV2 |
| KT | NXPH1 |
| KT | BCAM |
| KT | IFNA6 |
| KT | SPESP1 |
| KT | NENF |
| KT | PLA2G10 |
| KT | VSTM2A |
| KT | GPR19 |
| KT | NOG |
| KT | CD300E |
| KT | CST5 |
| KT | MMP7 |
| KT | HAVCR1 |
| KT | CST4 |
| KT | THBD |
| KT | MLN |
| KT | TRABD2A |
| KT | ATP4B |
| KT | PIANP |
| KT | GNLY |
| KT | CCKAR |
| KT | GPR63 |
| KT | ICAM2 |
| KT | LYPD6B |
| KT | TMEM120A |
| KT | DHRS4L2 |
| KT | OTOS |
| KT | RCN1 |
| KT | B2M |
| KT | CCL24 |
| KT | IFNA2 |
| KT | IFNA14 |
| KT | BMPR2 |
| KT | SRGN |
| KT | FCGR2A |
| KT | ITIH3 |
| KT | CPXM2 |
| KT | ACP5 |
| KT | KAZALD1 |
| KT | MIA |
| KT | FGF1 |
| KT | LRRC4B |
| KT | CCL26 |
| KT | C2orf40 |
| KT | PLVAP |
| KT | SOSTDC1 |
| KT | CGREF1 |
| KT | TNFRSF12A |
| KT | CLCC1 |
| KT | SMR3A |
| KT | LY6G6D |
| KT | CCL18 |
| KT | CCL2 |
| KT | RTN4RL2 |
| KT | C10orf54 |
| KT | FAM24B |
| KT | FGF23 |
| KT | RSPO3 |
| KT | GPR156 |
| KT | TGOLN2 |
| KT | XG |
| KT | UNQ9165/PRO28630 |
| KT | FKBP14 |
| KT | GPRC6A |
| KT | C6orf15 |
| KT | CREG2 |
| KT | PTHLH |
| KT | ASIP |
| KT | GPR25 |
| KT | GPR17 |
| KT | HCTR1 |
| KT | SLC38A4 |
| KT | SLC8B1 |
| KT | IL15RA |
| KT | SLC2A10 |
| KT | NPBW1 |
| KT | PAEP |
| KT | DKK2 |
| KT | CADM2 |
| KT | CCL15 |
| KT | CXCR3 |
| KT | ADRA1D |
| KT | IFNA5 |
| KT | KIRREL3 |
| KT | BMPR1A |
| KT | TNFRSF17 |
| KT | MFSD2A |
| KT | C12orf49 |
| KT | FCGR2C |
| KT | COL9A3 |
| KT | SPINK7 |
| KT | WFDC1 |
| KT | ADM |
| KT | SOST |
| KT | RXFP3 |
| KT | TM4SF6 |
| KT | IGFBP3 |
| KT | NETO1 |
| KT | FGF7 |
| KT | LPA4 |
| KT | SPINK1 |
| KT | TMED1 |
| KT | ADM2 |
| KT | RAET1L |
| KT | S1PR4 |
| KT | C2orf66 |
| KT | CST6 |
| KT | SERPINI1 |
| KT | IFITM10 |
| KT | SEMG1 |
| KT | SCG3 |
| KT | SCG5 |
| KT | IL17BR |
| KT | ANGPTL5 |
| KT | CSAG1 |
| KT | REG1A |
| KT | IGFBP6 |
| KT | GPR83 |
| KT | INSL3 |
| KT | PRRG1 |
| KT | CD248 |
| KT | EFNB3 |
| KT | IL21 |
| KT | NOPE |
| KT | APOC3 |
| KT | NPPC |
| KT | JTB |
| KT | SELL |
| KT | UNC5B |
| KT | WFDC13 |
| KT | APLP2 |
| KT | LYPD1 |
| KT | C17orf99 |
| KT | MADCAM1 |
| KT | FZD9 |
| KT | CST1 |
| KT | IL32 |
| KT | PGA3 |
| KT | ADAMTS16 |
| KT | PSAPL1 |
| KT | IL1F5 |
| KT | P4HB |
| KT | CXCL11 |
| KT | SLC20A1 |
| KT | SPX |
| KT | SLC10A4 |
| KT | TMEM41A |
| KT | LRFN2 |
| KT | ULBP2 |
| KT | LAG3 |
| KT | EPCAM |
| KT | OSM |
| KT | SLC39A8 |
| KT | FGFRL1 |
| KT | GPR22 |
| KT | CP |
| KT | AMELX |
| KT | MUCL1 |
| KT | FSTL1 |
| KT | GZMM |
| KT | GSN |
| KT | SLC6A5 |
| KT | LCN1 |
| KT | PRL |
| KT | CXCL9 |
| KT | 229E-S1 |
| KT | F13B |
| KT | CPVL |
| KT | TFF2 |
| KT | SPINK13 |
| KT | SNORC |
| KT | STC2 |
| KT | LIFR |
| KT | OS9 |
| KT | HRC |
| KT | SMOC2 |
| KT | FGFBP3 |
| KT | CRTAP |
| KT | SGCB |
| KT | TOR1B |
| KT | C6 |
| KT | GALP |
| KT | SDC1 |
| KT | PDGFA |
| KT | OXTR |
| KT | KLK7 |
| KT | RNASE8 |
| KT | CYTL1 |
| KT | SPINK8 |
| KT | HRH3 |
| KT | CALY |
| KT | LCN15 |
| KT | APP |
| KT | TRPC3 |
| KT | AVP |
| KT | RNF167 |
| KT | GPR77 |
| KT | IGF1 |
| KT | CXCR5 |
| KT | PGA4 |
| KT | CLDN9 |
| KT | OXER1 |
| KT | CTSG |
| KT | FGF17 |
| KT | GPR3 |
| KT | COV2-S1 |
| KT | EDIL3 |
| KT | AZU1 |
| KT | NPTX2 |
| KT | LRRC8C |
| KT | DEFB126 |
| KT | CXCR1 |
| KT | PMCH |
| KT | CCL11 |
| KT | MOG |
| KT | TNFRSF6B |
| KT | PDGFB |
| KT | TFF1 |
| KT | BTNL8 |
| KT | CHGA |
| KT | NTRK2 |
| KT | PTN |
| KT | ACKR2 |
| KT | SERPINE2 |
| KT | C9 |
| KT | MCP |
| KT | CMKLR1 |
| KT | C6orf25 |
| KT | OBP2A |
| KT | SLC22A8 |
| KT | NGFR |
| KT | CT83 |
| KT | CCL8 |
| KT | IL6R |
| KT | PLGRKT |
| KT | ART1 |
| KT | CXCL13 |
| KT | HNRNPA2B1 |
| KT | CD14 |
| KT | LHFPL6 |
| KT | FAM20A |
| KT | NOTCH2NL |
| KT | ISM2 |
| KT | MUC7 |
| KT | LGALS1 |
| KT | PLAC9 |
| KT | FAM187B |
| KT | FGF19 |
| KT | FAM3D |
| KT | ODAPH |
| KT | KCNK1 |
| KT | LRIT3 |
| KT | RTN4RL1 |
| KT | SLC22A4 |
| KT | FAM19A4 |
| KT | PRRT3 |
| KT | F2R |
| KT | F12 |
| KT | PKD2L1 |
| KT | OPRM1 |
| KT | VSTM2B |
| KT | KLRF1 |
| KT | MC5R |
| KT | CCL1 |
| KT | EREG |
| KT | PLA2G15 |
| KT | CLDN4 |
| KT | LHFPL1 |
| KT | CDSN |
| KT | APOE |
| KT | TNF |
| KT | OPRK1 |
| KT | PDIA6 |
| KT | NTNG2 |
| KT | TRH |
| KT | FAM24A |
| KT | OPN4 |
| KT | TIMP1 |
| KT | CD99 |
| KT | CSN3 |
| KT | AIMP1 |
| KT | XK |
| KT | SLC6A11 |
| KT | IGFBPL1 |
| KT | HAPLN2 |
| KT | ALPI |
| KT | FCMR |
| KT | CSHL1 |
| KT | PRAP1 |
| KT | COL26A1 |
| KT | APLP1 |
| KT | RAMP2 |
| KT | LYPD2 |
| KT | TMEM219 |
| KT | CASQ1 |
| KT | NAPSA |
| KT | COL8A1 |
| KT | FRZB |
| KT | DEFB116 |
| KT | DLL3 |
| KT | KCNMB4 |
| KT | S100A8 |
| KT | COMT |
| KT | ANGPT4 |
| KT | C1QL1 |
| KT | GRM5 |
| KT | KLRK1 |
| KT | VTCN1 |
| KT | MARCO |
| KT | RNASE10 |
| KT | FCN2 |
| KT | IL13 |
| KT | WFDC8 |
| KT | CCL20 |
| KT | CD300A |
| KT | IL1RN |
| KT | GGH |
| KT | IL8RB |
| KT | WNT5A |
| KT | MDK |
| KT | CELA3B |
| KT | PSAP |
| KT | IL25 |
| KT | SELE |
| KT | ACVRL1 |
| KT | PAPLN |
| KT | DEAF1 |
| KT | CDNF |
| KT | SDF2L1 |
| KT | PRR4 |
| KT | SHBG |
| KT | IFNA8 |
| KT | FAM3A |
| KT | SPP2 |
| KT | C1QTNF2 |
| KT | TMPRSS2 |
| KT | CXCL17 |
| KT | PRRT1 |
| KT | EDAR |
| KT | LIPF |
| KT | TREM2 |
| KT | FZD7 |
| KT | FCRL6 |
| KT | CLCF1 |
| KT | FAM20C |
| KT | TNFSF9 |
| KT | LRRN4 |
| KT | CELA3A |
| KT | LCN12 |
| KT | CHODL |
| KT | CLEC-6 |
| KT | RNF149 |
| KT | SYNDIG1L |
| KT | ISLR2 |
| KT | EPOR |
| KT | ASTN2 |
| KT | LGI4 |
| KT | INHBE |
| KT | NRG1 |
| KT | FAM19A5 |
| KT | EGFR |
| KT | CLDN12 |
| KT | CD74 |
| KT | PRSS55 |
| KT | PLA2G2C |
| KT | CFP |
| KT | LCAT |
| KT | BPIFA1 |
| KT | CNNM4 |
| KT | THBS3 |
| KT | CRELD2 |
| KT | C9orf47 |
| KT | MANSC4 |
| KT | METTL24 |
| KT | NPY4R |
| KT | SLCO1B1 |
| KT | ALPPL2 |
| KT | TMPRSS3 |
| KT | SPACA4 |
| KT | CDH9 |
| KT | GYPA |
| KT | GLRA1 |
| KT | CX3CL1 |
| KT | OLR1 |
| KT | EFNA5 |
| KT | PRSS22 |
| KT | LRRC21 |
| KT | IER3 |
| KT | PROK1 |
| KT | TREM1 |
| KT | IL6ST |
| KT | DNASE1L1 |
| KT | MMP17 |
| KT | PRSS23 |
| KT | NPNT |
| KT | IL1B |
| KT | MMP9 |
| KT | CA14 |
| KT | NXPH4 |
| KT | GABRR3 |

### Example 3: Diagnostic or Prognostic Autoantigens

TABLE 4
List of Diagnostic or Prognostic Autoantigens
and their Corresponding Diseases or Disorders

| Disease | Target |
|---|---|
| AAV | EDIL3 |
| AAV | LY6H |
| AAV | TREM2 |
| APECED | IFNA6 |
| APECED | IFNW1 |
| APECED | IFNA17 |
| APECED | IFNA14 |
| APECED | LCN1 |
| APECED | GPHB5 |
| APECED | IFNA13 |
| APECED | IFNA8 |
| APECED | IL22RA2 |
| APECED | PRRT3 |
| APECED | IL22 |
| APECED | C5orf64 |
| APECED | CP |
| APECED | IFNA5 |
| APECED | LEG1 |
| APECED | PNLIPRP2 |
| APECED | IL17A |
| APECED | PRG3 |
| APECED | IL17F |
| APECED | IFNA2 |
| APECED | IL5 |
| APECED | SLC2A10 |
| APECED | GIF |
| APECED | PNLIPRP1 |
| APECED | BPIFA1 |
| APECED | PDILT |
| APECED | IFNL2 |
| APECED | PDGFB |
| APECED | CST5 |
| APECED | PNLIP |
| APECED | IGSF4B |
| APECED | TGFA |
| APECED | BPIFA2 |
| APECED | HSPA13 |
| APECED | ODAPH |
| APECED | SPINK4 |
| APECED | IGFBP1 |
| APECED | IL6 |
| APECED | CLCC1 |
| APECED | BTN1A1 |
| APECED | EREG |
| APECED | FAM19A4 |
| APECED | PTPRR |
| APECED | CST6 |
| APECED | RAMP2 |
| APECED | IL28B |
| APECED | TSLP |
| APECED | SPAG11B |
| APECED | CNPY3 |
| APECED | FAM3A |
| APECED | SLC41A2 |
| APECED | FKBP14 |
| APECED | AFP |
| APECED | TM4SF6 |
| APECED | REG1A |
| APECED | PANX3 |
| APECED | PRRG3 |
| APECED | RNASE8 |
| APECED | SMR3A |
| APECED | SPINK1 |
| APECED | PSAP |
| APECED | SERPINE1 |
| APECED | CST4 |
| APECED | PRRG1 |
| APECED | KLK2 |
| APECED | HCRTR2 |
| APECED | LAIR2 |
| APECED | OTOR |
| APECED | TFF2 |
| APECED | MSR1 |
| APECED | CCL7 |
| APECED | ADM2 |
| APECED | OPN4 |
| APECED | PAP |
| APECED | MMP1 |
| APECED | REG4 |
| APECED | PMCH |
| APECED | CLPS |
| APECED | OBP2A |
| APECED | ACRV1 |
| APECED | DEFA5 |
| APECED | ECSCR |
| APECED | LRIT3 |
| APECED | PLA2G10 |
| APECED | TM9SF3 |
| APS | IL6R |
| APS | IFNA13 |
| APS | IFNA14 |
| APS | IFNA17 |
| APS | IFNA2 |
| APS | IFNA5 |
| APS | IFNA6 |
| APS | IFNA8 |
| APS | IL6R |
| CIDP | CXCL1 |
| CIDP | CXCL2 |
| CIDP | CXCL3 |
| CIDP | PDGFB |
| CIDP | TMEM149 |
| CIDP | CD74 |
| CIDP | CXCL13 |
| COVID-19 | APOO |
| COVID-19 | OPRL1 |
| COVID-19 | IFNA14 |
| COVID-19 | MIA2 |
| COVID-19 | FKBP2 |
| COVID-19 | GPR1 |
| COVID-19 | IL29 |
| COVID-19 | PTPRR |
| COVID-19 | RCN2 |
| COVID-19 | IFNA13 |
| COVID-19 | IFNW1 |
| COVID-19 | IL1A |
| COVID-19 | TSPAN9 |
| COVID-19 | SHISA7 |
| COVID-19 | IFNA17 |
| COVID-19 | LEP |
| COVID-19 | CALU |
| COVID-19 | SSPN |
| COVID-19 | LPAL2 |
| COVID-19 | OBP2B |
| COVID-19 | CST5 |
| COVID-19 | IL6 |
| COVID-19 | CCDC47 |
| COVID-19 | ACRV1 |
| COVID-19 | PGA3 |
| COVID-19 | LRRC8C |
| COVID-19 | PMCH |
| COVID-19 | GPR6 |
| COVID-19 | CSF2 |
| COVID-19 | RCN3 |
| COVID-19 | LYSMD4 |
| COVID-19 | CD99 |
| COVID-19 | IFNA5 |
| COVID-19 | IFNL2 |
| COVID-19 | CXCL9 |
| COVID-19 | SLC41A2 |
| COVID-19 | EPYC |
| COVID-19 | DUOXA1 |
| COVID-19 | LACRT |
| COVID-19 | CNPY2 |
| COVID-19 | KLK8 |
| COVID-19 | MZB1 |
| COVID-19 | LYG2 |
| COVID-19 | MUCL3 |
| COVID-19 | LALBA |
| COVID-19 | ZG16B |
| COVID-19 | ODAM |
| COVID-19 | PILRA |
| COVID-19 | HRC |
| COVID-19 | PPBP |
| COVID-19 | CSPG5 |
| COVID-19 | PTPRN2 |
| COVID-19 | CST4 |
| COVID-19 | FAM168B |
| COVID-19 | TNFRSF17 |
| COVID-19 | OTOS |
| COVID-19 | SPINK9 |
| COVID-19 | KLRC2 |
| COVID-19 | IFNA8 |
| COVID-19 | TMEM119 |
| COVID-19 | CSAG1 |
| COVID-19 | OTOR |
| COVID-19 | KCT2 |
| COVID-19 | PGA4 |
| COVID-19 | SPINK4 |
| COVID-19 | FCGR2A |
| COVID-19 | CNPY3 |
| COVID-19 | NEGR1 |
| COVID-19 | ERP27 |
| COVID-19 | AGRP |
| COVID-19 | PRR27 |
| COVID-19 | MCFD2 |
| COVID-19 | IGFBP6 |
| COVID-19 | IFNA2 |
| COVID-19 | LGALS3 |
| COVID-19 | SPOCK1 |
| COVID-19 | KCNV2 |
| COVID-19 | HCRTR2 |
| COVID-19 | LECT2 |
| COVID-19 | PLA2G2E |
| COVID-19 | FAM19A3 |
| COVID-19 | SPACA7 |
| COVID-19 | NENF |
| COVID-19 | IL6R |
| COVID-19 | SPX |
| COVID-19 | IGFBP1 |
| COVID-19 | SRGN |
| COVID-19 | LAIR2 |
| COVID-19 | CPXM2 |
| COVID-19 | CCL17 |
| COVID-19 | TUSC5 |
| COVID-19 | LOC644613 |
| COVID-19 | TNFRSF21 |
| COVID-19 | GPR77 |
| COVID-19 | C2orf40 |
| COVID-19 | C5A |
| COVID-19 | IFNA6 |
| COVID-19 | SPP1 |
| COVID-19 | SERPINA3 |
| COVID-19 | OXTR |
| COVID-19 | KLRC1 |
| COVID-19 | SEMG2 |
| COVID-19 | APOH |
| COVID-19 | PRRG1 |
| COVID-19 | BTC |
| COVID-19 | MSLN |
| COVID-19 | FAM19A2 |
| COVID-19 | CXCL1 |
| COVID-19 | PRSS55 |
| COVID-19 | SLCO2B1 |
| COVID-19 | BTN1A1 |
| COVID-19 | COV2-RBD |
| COVID-19 | OS9 |
| COVID-19 | PGLYRP1 |
| COVID-19 | DKK3 |
| COVID-19 | TOR1B |
| COVID-19 | CST1 |
| COVID-19 | LRRC8D |
| COVID-19 | ACKR1 |
| COVID-19 | COL8A1 |
| COVID-19 | CXCL3 |
| COVID-19 | ODAPH |
| COVID-19 | PIANP |
| COVID-19 | PSORS1C2 |
| COVID-19 | RNASE10 |
| COVID-19 | CXCR7 |
| COVID-19 | PLVAP |
| COVID-19 | CDSN |
| COVID-19 | SDF2L1 |
| COVID-19 | TFF2 |
| COVID-19 | HSPA13 |
| COVID-19 | CXCR5 |
| COVID-19 | C5orf64 |
| COVID-19 | EPO |
| COVID-19 | GNLY |
| COVID-19 | OPRM1 |
| COVID-19 | TGFA |
| COVID-19 | SLC2A10 |
| COVID-19 | CXCL13 |
| COVID-19 | CD99L2 |
| COVID-19 | AGER |
| COVID-19 | CGA |
| COVID-19 | CRTAM |
| COVID-19 | SLC1A1 |
| COVID-19 | CDH19 |
| COVID-19 | GPR25 |
| COVID-19 | CCL8 |
| COVID-19 | SERPINI1 |
| COVID-19 | SPINK8 |
| COVID-19 | SLPI |
| COVID-19 | HRH3 |
| COVID-19 | TMEM149 |
| COVID-19 | CD38 |
| COVID-19 | REG4 |
| COVID-19 | IGFBP5 |
| COVID-19 | FKBP7 |
| COVID-19 | GRM5 |
| COVID-19 | CXCR3 |
| COVID-19 | PTHLH |
| COVID-19 | LY6K |
| COVID-19 | PLAC9 |
| COVID-19 | LPL |
| COVID-19 | CCKAR |
| COVID-19 | RTN4R |
| COVID-19 | GYPA |
| COVID-19 | TMED1 |
| COVID-19 | DRAXIN |
| COVID-19 | CCL13 |
| COVID-19 | LRRC8A |
| COVID-19 | ANGPTL4 |
| COVID-19 | NPPC |
| COVID-19 | IL22 |
| COVID-19 | CCL21 |
| COVID-19 | RCN1 |
| COVID-19 | CD74 |
| COVID-19 | FGF17 |
| COVID-19 | PAEP |
| COVID-19 | CNPY4 |
| COVID-19 | APOC3 |
| COVID-19 | SPINK1 |
| COVID-19 | AZGP1 |
| COVID-19 | STC2 |
| COVID-19 | S1PR4 |
| COVID-19 | IBSP |
| COVID-19 | CEACAM18 |
| COVID-19 | SLC38A4 |
| COVID-19 | CSN2 |
| COVID-19 | VSIG2 |
| COVID-19 | ENSP00000381830 |
| COVID-19 | CSHL1 |
| COVID-19 | CASQ1 |
| COVID-19 | XG |
| COVID-19 | ENDOU |
| COVID-19 | RAET1L |
| COVID-19 | COL10A1 |
| COVID-19 | PTH |
| COVID-19 | SLC15A1 |
| COVID-19 | SLC6A2 |
| COVID-19 | PRRT1 |
| COVID-19 | CLCC1 |
| COVID-19 | F2R |
| COVID-19 | JTB |
| COVID-19 | TGOLN2 |
| COVID-19 | CCL16 |
| COVID-19 | MIA |
| COVID-19 | TNF |
| COVID-19 | TMEM91 |
| COVID-19 | RTBDN |
| COVID-19 | MPL |
| COVID-19 | RSPO1 |
| COVID-19 | RSPO3 |
| COVID-19 | PRSS3 |
| COVID-19 | GPR17 |
| COVID-19 | CCR9 |
| COVID-19 | GP6 |
| COVID-19 | PRH1; |
| COVID-19 | EQTN |
| COVID-19 | RNF43 |
| COVID-19 | SPN |
| COVID-19 | IGSF4B |
| COVID-19 | CFD |
| COVID-19 | SPACA5 |
| COVID-19 | CHGA |
| COVID-19 | UNQ6190/PRO20217 |
| COVID-19 | APOA1 |
| COVID-19 | PRG3 |
| COVID-19 | SLC2A2 |
| COVID-19 | CCL11 |
| COVID-19 | TSLP |
| COVID-19 | SMOC2 |
| COVID-19 | HTR5 |
| COVID-19 | PRAP1 |
| COVID-19 | LY6H |
| COVID-19 | IMPG1 |
| COVID-19 | TNFRSF12A |
| COVID-19 | SSTR2 |
| COVID-19 | IGFBP3 |
| COVID-19 | PRLR |
| COVID-19 | PRR4 |
| COVID-19 | IL13 |
| COVID-19 | HCTR1 |
| COVID-19 | IGF1 |
| COVID-19 | CD300E |
| COVID-19 | LINC00305 |
| COVID-19 | SPESP1 |
| COVID-19 | FRZB |
| COVID-19 | IL28B |
| COVID-19 | MMP9 |
| COVID-19 | GAST |
| COVID-19 | FGF1 |
| COVID-19 | IL15RA |
| COVID-19 | CCR10 |
| COVID-19 | VEGFB |
| COVID-19 | SERPINE1 |
| COVID-19 | EXOC3-AS1 |
| COVID-19 | PRRT3 |
| COVID-19 | NETO1 |
| COVID-19 | VSTM2B |
| COVID-19 | CCR4 |
| COVID-19 | APP |
| COVID-19 | AMTN |
| COVID-19 | CXCL6 |
| COVID-19 | NINJ1 |
| COVID-19 | KLK9 |
| COVID-19 | SDF4 |
| COVID-19 | CPE |
| COVID-19 | AMELX |
| COVID-19 | DCD |
| COVID-19 | ANTXRL |
| COVID-19 | CCR2 |
| COVID-19 | PCSK1 |
| COVID-19 | QRFP |
| COVID-19 | RGMB |
| COVID-19 | NPY2R |
| COVID-19 | IGFBP7 |
| COVID-19 | SLC2A12 |
| COVID-19 | PPT1 |
| COVID-19 | CCL7 |
| COVID-19 | JCHAIN |
| COVID-19 | ADCYAP1 |
| COVID-19 | PDZD11 |
| COVID-19 | CP |
| COVID-19 | MANF |
| COVID-19 | GZMA |
| COVID-19 | TXNDC12 |
| COVID-19 | PGC |
| COVID-19 | ACVR1 |
| COVID-19 | WFDC13 |
| COVID-19 | SFRP4 |
| COVID-19 | REG1A |
| COVID-19 | GPR37 |
| COVID-19 | NOPE |
| COVID-19 | C11orf94 |
| COVID-19 | SCARA5 |
| COVID-19 | GPR19 |
| COVID-19 | EMC7 |
| COVID-19 | CCL15 |
| COVID-19 | CA4 |
| COVID-19 | RNASE8 |
| COVID-19 | MLN |
| COVID-19 | UNQ9165/PRO28630 |
| COVID-19 | NTRK3 |
| COVID-19 | TREML1 |
| COVID-19 | CDH15 |
| COVID-19 | SMR3A |
| COVID-19 | DKK1 |
| COVID-19 | OXER1 |
| COVID-19 | FAM24B |
| COVID-19 | CRLF1 |
| COVID-19 | PDIA6 |
| COVID-19 | PLA2G12B |
| COVID-19 | FGF7 |
| COVID-19 | ZP4 |
| COVID-19 | BAMBI |
| COVID-19 | GKN2 |
| COVID-19 | IGFBPL1 |
| COVID-19 | MMP7 |
| COVID-19 | MANSC4 |
| COVID-19 | APOA4 |
| COVID-19 | SUSD6 |
| COVID-19 | CELA1 |
| COVID-19 | IGLL1 |
| COVID-19 | IL9 |
| COVID-19 | MADCAM1 |
| COVID-19 | NPBW1 |
| COVID-19 | HAVCR1 |
| COVID-19 | ITPRIPL1 |
| COVID-19 | SOST |
| COVID-19 | LHFPL1 |
| COVID-19 | SDC3 |
| COVID-19 | SEMG1 |
| COVID-19 | C1QB |
| COVID-19 | ASIP |
| COVID-19 | CCL18 |
| COVID-19 | LHFPL5 |
| COVID-19 | IGFL2 |
| COVID-19 | FGFRL1 |
| COVID-19 | EFNB2 |
| COVID-19 | C2orf66 |
| COVID-19 | MFAP3 |
| COVID-19 | C6orf15 |
| COVID-19 | OPN4 |
| COVID-19 | NOV |
| COVID-19 | GNS |
| COVID-19 | FKBP14 |
| COVID-19 | CELA2B |
| COVID-19 | C9 |
| COVID-19 | VWC2L |
| COVID-19 | BMPR2 |
| COVID-19 | CSH2 |
| COVID-19 | IL1RAP |
| COVID-19 | C1QTNF2 |
| COVID-19 | SLC10A4 |
| COVID-19 | IL16 |
| COVID-19 | LRIT3 |
| COVID-19 | GRN |
| COVID-19 | NIPAL4 |
| COVID-19 | GNRH1 |
| COVID-19 | ATP4B |
| COVID-19 | APLP2 |
| COVID-19 | TMEM123 |
| COVID-19 | IL3 |
| COVID-19 | PDGFA |
| COVID-19 | EVI2B |
| COVID-19 | NGFR |
| COVID-19 | PROK1 |
| COVID-19 | SOSTDC1 |
| COVID-19 | FLJ36131 |
| COVID-19 | EREG |
| COVID-19 | TNFRSF9 |
| COVID-19 | LYG1 |
| COVID-19 | SLCO4C1 |
| COVID-19 | GUCA2A |
| COVID-19 | FAM19A5 |
| COVID-19 | IL21 |
| COVID-19 | FCMR |
| COVID-19 | CADM2 |
| COVID-19 | CSF3 |
| COVID-19 | CA11 |
| COVID-19 | NTRK2 |
| COVID-19 | CRELD2 |
| COVID-19 | GPR120 |
| COVID-19 | C9orf135 |
| COVID-19 | SLC1A5 |
| COVID-19 | SYCN |
| COVID-19 | COL9A3 |
| COVID-19 | ADRA1D |
| COVID-19 | GLB1 |
| COVID-19 | SV2C |
| COVID-19 | DKFZp686O24166 |
| COVID-19 | PRSS3P2 |
| COVID-19 | KIRREL3 |
| COVID-19 | VSTM2A |
| COVID-19 | GCG |
| COVID-19 | SERPINE2 |
| COVID-19 | EDA2R |
| COVID-19 | CPAMD8 |
| COVID-19 | SCN3B |
| COVID-19 | OXT |
| COVID-19 | CD3E |
| COVID-19 | INSL3 |
| COVID-19 | CALY |
| COVID-19 | GHSR |
| COVID-19 | SCGB1D1 |
| COVID-19 | C6 |
| COVID-19 | CLDN2 |
| COVID-19 | MUC7 |
| COVID-19 | KISS1 |
| COVID-19 | ULBP2 |
| COVID-19 | CLDN7 |
| COVID-19 | IGFBP2 |
| COVID-19 | EFNB3 |
| COVID-19 | NXPH1 |
| COVID-19 | GHRHR |
| COVID-19 | LILRA4 |
| COVID-19 | OTOL1 |
| COVID-19 | EFNB1 |
| COVID-19 | FGFBP3 |
| COVID-19 | GPR63 |
| COVID-19 | PRRG4 |
| COVID-19 | MUCL1 |
| COVID-19 | XCL1 |
| COVID-19 | TMEM120A |
| COVID-19 | TMEM108 |
| COVID-19 | IL1F5 |
| COVID-19 | MSMP |
| COVID-19 | CXCL12 |
| COVID-19 | GNPTG |
| COVID-19 | SDC4 |
| COVID-19 | FZD9 |
| COVID-19 | CCL4L1 |
| COVID-19 | GPRC6A |
| COVID-19 | GPR156 |
| COVID-19 | ITIH3 |
| COVID-19 | RAMP2 |
| COVID-19 | TNFRSF11A |
| COVID-19 | DKK2 |
| COVID-19 | SPINK13 |
| COVID-19 | SDCBP |
| COVID-19 | CD8B2 |
| COVID-19 | CTSG |
| COVID-19 | CST2 |
| COVID-19 | EDDM3B |
| COVID-19 | CLTRN |
| COVID-19 | PLA2G10 |
| COVID-19 | DCN |
| COVID-19 | DAG1 |
| COVID-19 | CXCL16 |
| COVID-19 | CCRL2 |
| COVID-19 | DEFB108B |
| COVID-19 | MRGPRF |
| COVID-19 | FCRL3 |
| COVID-19 | NPS |
| COVID-19 | OBP2A |
| COVID-19 | ACKR2 |
| COVID-19 | GRM2 |
| COVID-19 | FAM174A |
| COVID-19 | MSR1 |
| COVID-19 | NOG |
| COVID-19 | TMEM102 |
| COVID-19 | LAIR1 |
| COVID-19 | IL22RA2 |
| COVID-19 | SPACA3 |
| COVID-19 | WIF1 |
| COVID-19 | F13B |
| COVID-19 | LRTM1 |
| COVID-19 | ERVH48-1 |
| COVID-19 | CCL2 |
| COVID-19 | TFF1 |
| COVID-19 | ADM2 |
| COVID-19 | IFITM10 |
| COVID-19 | HSD11BIL |
| COVID-19 | AXL |
| COVID-19 | FMR1NB |
| COVID-19 | C6orf25 |
| COVID-19 | OPN3 |
| COVID-19 | MUC13 |
| COVID-19 | CCL28 |
| COVID-19 | CCL26 |
| COVID-19 | PTN |
| COVID-19 | SLC39A8 |
| COVID-19 | FGF21 |
| COVID-19 | TIMD4 |
| COVID-19 | NPTX2 |
| COVID-19 | IL17RD |
| COVID-19 | PAPLN |
| COVID-19 | TMEM219 |
| COVID-19 | CYB5D2 |
| COVID-19 | IL1B |
| COVID-19 | FSTL1 |
| COVID-19 | PTPRJ |
| COVID-19 | NPY1R |
| COVID-19 | CLDN18 |
| COVID-19 | FLT3LG |
| COVID-19 | C17orf99 |
| COVID-19 | SLC6A5 |
| COVID-19 | AIMP1 |
| COVID-19 | TNFRSF8 |
| COVID-19 | CD248 |
| COVID-19 | TM9SF3 |
| COVID-19 | FCGR2C |
| COVID-19 | MPZL3 |
| COVID-19 | OSTN |
| COVID-19 | SPARCL1 |
| COVID-19 | TMPRSS11D |
| COVID-19 | KLK7 |
| COVID-19 | GDPD3 |
| COVID-19 | IL34 |
| COVID-19 | BTNL8 |
| COVID-19 | ASTL |
| COVID-19 | CLDN19 |
| COVID-19 | SCG5 |
| COVID-19 | PSAP |
| COVID-19 | PRRG3 |
| COVID-19 | PLA2G12A |
| COVID-19 | LCN1 |
| COVID-19 | LRRTM2 |
| COVID-19 | FAM3D |
| COVID-19 | PTGS2 |
| COVID-19 | FCRLB |
| COVID-19 | CST8 |
| COVID-19 | ANGPTL5 |
| COVID-19 | OPRK1 |
| COVID-19 | APOD |
| COVID-19 | ADM |
| COVID-19 | CLU |
| COVID-19 | PANX3 |
| COVID-19 | SLC52A3 |
| DIL | CXCL1 |
| DIL | TNF |
| DIL | TSLP |
| DM | CD81 |
| KT | CD99L2 |
| KT | CD80 |
| KT | TNFRSF21 |
| KT | TMEM102 |
| KT | MICA |
| KT | PILRA |
| KT | AGER |
| KT | ULBP1 |
| KT | JCHAIN |
| KT | TLR1 |
| KT | TNFRSF6 |
| KT | SIRPA |
| KT | FCER1A |
| KT | CD300E |
| KT | B2M |
| KT | C10orf54 |
| KT | GPR17 |
| KT | IL15RA |
| KT | TMED1 |
| KT | S1PR4 |
| KT | IFITM10 |
| KT | IL17BR |
| KT | EFNB3 |
| KT | C6 |
| KT | GPR77 |
| KT | IL2RA |
| KT | IFNG |
| KT | IL9 |
| KT | IFNL2 |
| KT | MZB1 |
| KT | IL1A |
| KT | CSF2 |
| KT | IL4 |
| KT | CRLF1 |
| KT | IL34 |
| KT | IFNA17 |
| KT | IL17RD |
| KT | TGFA |
| KT | IL6 |
| KT | IL28B |
| KT | PRG3 |
| KT | IFNA13 |
| KT | IL16 |
| KT | TSLP |
| KT | IFNA6 |
| KT | IFNA2 |
| KT | IFNA14 |
| KT | TNFRSF12A |
| KT | CCL15 |
| KT | IFNA5 |
| KT | TNFRSF17 |
| KT | IL21 |
| KT | C17orf99 |
| KT | IL1F5 |
| KT | OSM |
| KT | GZMM |
| KT | LIFR |
| KT | ACKR1 |
| KT | CCL16 |
| KT | CXCL3 |
| KT | CCL22 |
| KT | CXCL1 |
| KT | CCR10 |
| KT | GPR1 |
| KT | CXCL12 |
| KT | CCL4L1 |
| KT | PPBP |
| KT | CCL26 |
| KT | CCL2 |
| KT | CXCR3 |
| KT | CXCL9 |
| KT | TFF2 |
| KT | CXCR5 |
| KT | ANGPTL4 |
| KT | ADRB3 |
| KT | RETN |
| KT | PRLR |
| KT | ADCYAP1 |
| KT | AVPR1A |
| KT | GNRH1 |
| KT | GAST |
| KT | THBD |
| KT | CCKAR |
| KT | C2orf40 |
| KT | PTHLH |
| KT | NPBW1 |
| KT | RXFP3 |
| KT | ADM2 |
| KT | INSL3 |
| KT | ADM |
| KT | NPPC |
| KT | SPX |
| KT | STC2 |
| KT | OXTR |
| KT | AVP |
| KT | SLC1A1 |
| KT | SLC2A2 |
| KT | SLC22A25 |
| KT | KCNV2 |
| KT | HCTR1 |
| KT | SLC38A4 |
| KT | SLC8B1 |
| KT | SLC2A10 |
| KT | MFSD2A |
| KT | SLC20A1 |
| KT | SLC10A4 |
| KT | SLC6A5 |
| KT | GALP |
| KT | EPYC |
| KT | OTOL1 |
| KT | CDH19 |
| KT | IBSP |
| KT | AMTN |
| KT | PSORS1C2 |
| KT | IMPG1 |
| KT | COL10A1 |
| KT | BCAM |
| KT | ICAM2 |
| KT | SRGN |
| KT | CPXM2 |
| KT | CGREF1 |
| KT | CADM2 |
| KT | COL9A3 |
| KT | CD248 |
| KT | SELL |
| KT | MADCAM1 |
| KT | EPCAM |
| KT | CRTAP |
| KT | SGCB |
| KT | SDC1 |
| KT | LYG2 |
| KT | LGALS3 |
| KT | DCD |
| KT | BTN1A1 |
| KT | MPO |
| KT | PGLYRP1 |
| KT | WFDC12 |
| KT | AZU1 |
| KT | IGFBP1 |
| KT | DKK3 |
| KT | FGFR2 |
| KT | IGFBP2 |
| KT | CNPY2 |
| KT | NOV |
| KT | VEGFB |
| KT | TMEM119 |
| KT | FAM19A3 |
| KT | MANF |
| KT | TMEM149 |
| KT | NENF |
| KT | VSTM2A |
| KT | BMPR2 |
| KT | FGF1 |
| KT | FGF23 |
| KT | RSPO3 |
| KT | BMPR1A |
| KT | TM4SF6 |
| KT | IGFBP3 |
| KT | FGF7 |
| KT | IGFBP6 |
| KT | FZD9 |
| KT | FGFRL1 |
| KT | AMELX |
| KT | FSTL1 |
| KT | SNORC |
| KT | SMOC2 |
| KT | FGFBP3 |
| KT | PDGFA |
| KT | CYTL1 |
| KT | IGF1 |
| KT | FGF17 |
| KT | EDIL3 |
| KT | CNPY3 |
| KT | MCFD2 |
| KT | CCDC47 |
| KT | RCN3 |
| KT | RCN1 |
| KT | TGOLN2 |
| KT | C12orf49 |
| KT | OS9 |
| KT | SHISA7 |
| KT | MRGPRF |
| KT | CSPG5 |
| KT | HCRTR2 |
| KT | OTOR |
| KT | SV2C |
| KT | PRRG4 |
| KT | GFRA2 |
| KT | TMEM108 |
| KT | LRRC4B |
| KT | UNC5B |
| KT | LYPD1 |
| KT | LRFN2 |
| KT | SCGB3A1 |
| KT | OBP2B |
| KT | FLJ37218 |
| KT | VSIG2 |
| KT | EDDM3B |
| KT | EXOC3-AS1 |
| KT | NPY1R |
| KT | APOO |
| KT | GPR6 |
| KT | LYSMD4 |
| KT | OPRL1 |
| KT | PTPRN2 |
| KT | ERP27 |
| KT | NINJ1 |
| KT | TMEM91 |
| KT | S100A13 |
| KT | SSTR2 |
| KT | SYCN |
| KT | ANTXRL |
| KT | SLC2A12 |
| KT | MIA2 |
| KT | C5orf64 |
| KT | REG1B |
| KT | FAM174A |
| KT | ITPRIPL1 |
| KT | REG4 |
| KT | BRICD5 |
| KT | GPR182 |
| KT | NXPH1 |
| KT | NOG |
| KT | MLN |
| KT | GPR63 |
| KT | TMEM120A |
| KT | ACP5 |
| KT | KAZALD1 |
| KT | MIA |
| KT | PLVAP |
| KT | SMR3A |
| KT | RTN4RL2 |
| KT | FAM24B |
| KT | UNQ9165/PRO28630 |
| KT | GPRC6A |
| KT | ASIP |
| KT | GPR25 |
| KT | ADRA1D |
| KT | KIRREL3 |
| KT | SOST |
| KT | LPA4 |
| KT | SCG3 |
| KT | SCG5 |
| KT | REG1A |
| KT | GPR83 |
| KT | PRRG1 |
| KT | JTB |
| KT | CST1 |
| KT | PSAPL1 |
| KT | GPR22 |
| KT | CP |
| KT | GSN |
| KT | LCN1 |
| KT | PRL |
| KT | HRC |
| KT | LCN15 |
| KT | OXER1 |
| KT | NPTX2 |
| KT | APOA1 |
| KT | APOA4 |
| KT | APOC3 |
| KT | F13B |
| KT | SPOCK1 |
| KT | SPINK4 |
| KT | KLK8 |
| KT | PTPRR |
| KT | SERPINE1 |
| KT | LALBA |
| KT | TXNDC12 |
| KT | FKBP2 |
| KT | PRSS3 |
| KT | TFPI2 |
| KT | PCSK1 |
| KT | CELA1 |
| KT | AZGP1 |
| KT | CES3 |
| KT | PLA2G2E |
| KT | ATP6AP2 |
| KT | PLBD2 |
| KT | PLA2G10 |
| KT | CST5 |
| KT | MMP7 |
| KT | CST4 |
| KT | TRABD2A |
| KT | DHRS4L2 |
| KT | ITIH3 |
| KT | FKBP14 |
| KT | SPINK7 |
| KT | WFDC1 |
| KT | SPINK1 |
| KT | CST6 |
| KT | SERPINI1 |
| KT | WFDC13 |
| KT | P4HB |
| KT | TOR1B |
| KT | KLK7 |
| KT | RNASE8 |
| KT | SPINK8 |
| KT | RNF167 |
| KT | CTSG |
| KT | ACRV1 |
| KT | SPACA7 |
| KT | SSPN |
| KT | SPACA3 |
| KT | ZG16B |
| KT | TSPAN9 |
| KT | RTN4R |
| KT | NPY2R |
| KT | GP6 |
| KT | FAM168B |
| KT | CSN2 |
| KT | SEMG2 |
| KT | GPR37 |
| KT | PRH1; |
| KT | OSTN |
| KT | FMR1NB |
| KT | CA11 |
| KT | SPESP1 |
| KT | GPR19 |
| KT | LYPD6B |
| KT | CLCC1 |
| KT | LY6G6D |
| KT | GPR156 |
| KT | XG |
| KT | NETO1 |
| KT | C2orf66 |
| KT | SEMG1 |
| KT | ANGPTL5 |
| KT | CSAG1 |
| KT | MUCL1 |
| KT | HRH3 |
| KT | APP |
| KT | 229E-RBD |
| KT | NL63-RBD |
| KT | COV2-RBD |
| KT | 229E-S1 |
| KT | COV2-S1 |
| KT | LOC644613 |
| KT | AGRP |
| KT | RCN2 |
| KT | IL29 |
| KT | MUCL3 |
| KT | CALU |
| KT | ENDOU |
| KT | SPINK9 |
| KT | SLPI |
| KT | FAM19A2 |
| KT | SERPINA3 |
| KT | PRR27 |
| KT | BTC |
| KT | IGFBP5 |
| KT | CXCL2 |
| KT | CCL13 |
| KT | LECT2 |
| KT | APOH |
| KT | LAIR2 |
| KT | DRAXIN |
| KT | CFD |
| KT | CCL17 |
| KT | DKK1 |
| KT | IGFBP7 |
| KT | UNQ6190/PRO20217 |
| KT | RARRES2 |
| KT | CCL21 |
| KT | CCL7 |
| KT | KAL1 |
| KT | HAVCR1 |
| KT | ATP4B |
| KT | PIANP |
| KT | GNLY |
| KT | OTOS |
| KT | CCL24 |
| KT | FCGR2A |
| KT | SOSTDC1 |
| KT | CCL18 |
| KT | C6orf15 |
| KT | CREG2 |
| KT | DKK2 |
| KT | NOPE |
| KT | APLP2 |
| KT | IL32 |
| KT | PGA3 |
| KT | ADAMTS16 |
| KT | CXCL11 |
| KT | TMEM41A |
| KT | LAG3 |
| KT | SLC39A8 |
| KT | CPVL |
| KT | SPINK13 |
| KT | CALY |
| KT | TRPC3 |
| KT | PGA4 |
| KT | CLDN9 |
| KT | GPR3 |
| Malaria | SPINK8 |
| Malaria | OBP2B |
| Malaria | GPR1 |
| Malaria | MCFD2 |
| Malaria | SDF2L1 |
| Malaria | FKBP2 |
| Malaria | EPYC |
| Malaria | PTPRR |
| Malaria | LGALS3 |
| Malaria | CD99L2 |
| Malaria | HCRTR2 |
| Malaria | TM4SF6 |
| Malaria | CGREF1 |
| Malaria | SSPN |
| Malaria | FZD4 |
| Malaria | SPINK4 |
| Malaria | GPR17 |
| Malaria | SRGN |
| Malaria | PRRG1 |
| Malaria | SLC1A4 |
| Malaria | CCDC47 |
| Malaria | ODAM |
| Malaria | MZB1 |
| Malaria | CSPG5 |
| Malaria | ACKR1 |
| Malaria | C9orf135 |
| Malaria | ZG16B |
| Malaria | KCT2 |
| Malaria | ANGPTL4 |
| Malaria | KLK8 |
| Malaria | DPT |
| Malaria | CD164L2 |
| Malaria | LY6G6D |
| Malaria | COL10A1 |
| Malaria | FAM19A3 |
| Malaria | RCN3 |
| Malaria | KLK3 |
| Malaria | COLEC12 |
| Malaria | DKK3 |
| Malaria | COL9A3 |
| Malaria | CSAG1 |
| Malaria | CNPY4 |
| Malaria | BCAM |
| Malaria | ADM |
| Malaria | ACRV1 |
| Malaria | SLC38A2 |
| Malaria | NBL1 |
| Malaria | TGFA |
| Malaria | CYTL1 |
| Malaria | SPACA7 |
| Malaria | CALR |
| Malaria | SMOC2 |
| Malaria | CSHL1 |
| Malaria | DCD |
| Malaria | IMPG1 |
| Malaria | IL1RN |
| Malaria | RAMP2 |
| Malaria | IGFBP6 |
| Malaria | TNFRSF17 |
| Malaria | SPX |
| Malaria | SERPINA3 |
| Malaria | NPY2R |
| Malaria | GPR19 |
| Malaria | FKBP7 |
| Malaria | CXCL3 |
| Malaria | NOV |
| Malaria | CXCR3 |
| Malaria | CCL15 |
| Malaria | RTBDN |
| Malaria | HEPACAM2 |
| Malaria | CST4 |
| Malaria | LEP |
| Malaria | SNORC |
| Malaria | CHGA |
| Malaria | SLC22A31 |
| Malaria | CCL13 |
| Malaria | OTOL1 |
| Malaria | C11orf94 |
| Malaria | RETN |
| Malaria | PLA2G2E |
| Malaria | PRRG3 |
| Malaria | APOO |
| Malaria | PGLYRP1 |
| Malaria | PRAP1 |
| Malaria | GAST |
| Malaria | TMEM91 |
| Malaria | HTR2B |
| Malaria | SCTR |
| Malaria | CNPY2 |
| Malaria | ZP4 |
| Malaria | CD151 |
| Malaria | SLC6A9 |
| Malaria | TMEM59 |
| Malaria | SERPINI2 |
| Malaria | CYSLTR2 |
| Malaria | SLC8B1 |
| Malaria | TRABD2B |
| Malaria | IGF1 |
| Malaria | S1PR3 |
| Malaria | IBSP |
| Malaria | JCHAIN |
| Malaria | CSH2 |
| Malaria | IL16 |
| Malaria | CELA1 |
| Malaria | NENF |
| Malaria | SGCA |
| Malaria | LINC00305 |
| Malaria | CXCL1 |
| Malaria | CNPY3 |
| Malaria | 229E-RBD |
| Malaria | LAS2 |
| Malaria | LYSMD4 |
| Malaria | PTHLH |
| Malaria | SLC10A4 |
| Malaria | RNASE10 |
| Malaria | KLK2 |
| Malaria | RAET1L |
| Malaria | HCTR1 |
| Malaria | SLC41A2 |
| Malaria | AXL |
| Malaria | CCL20 |
| Malaria | PRSS3 |
| Malaria | GPC6 |
| Malaria | TGOLN2 |
| Malaria | LRIT3 |
| Malaria | EMC10 |
| Malaria | AMTN |
| Malaria | PSORS1C2 |
| Malaria | NPBW1 |
| Malaria | S100A13 |
| Malaria | PCSK1 |
| Malaria | PTH |
| Malaria | INS |
| Malaria | CDNF |
| Malaria | SLC2A10 |
| Malaria | TXNDC12 |
| Malaria | ITIH3 |
| Malaria | LILRA4 |
| Malaria | IL1RAP |
| Malaria | XG |
| Malaria | IL17A |
| Malaria | CST5 |
| Malaria | CPE |
| Malaria | NL63-RBD |
| Malaria | GNRH1 |
| Malaria | CADM2 |
| Malaria | IL21R |
| Malaria | TSPAN13 |
| Malaria | OS9 |
| Malaria | P2RY10 |
| Malaria | SPARC |
| Malaria | PLA2G10 |
| Malaria | FKBP14 |
| Malaria | RXFP3 |
| Malaria | VEGFB |
| Malaria | VSTM2A |
| Malaria | ENSP00000381830 |
| Malaria | IFNA13 |
| Malaria | LYPD6B |
| Malaria | TREML1 |
| Malaria | GDPD3 |
| Malaria | SLC38A4 |
| Malaria | OPRK1 |
| Malaria | SV2C |
| Malaria | CPXM2 |
| Malaria | IGFBP2 |
| Malaria | TMEM169 |
| Malaria | CD300A |
| Malaria | GZMK |
| Malaria | ADCYAP1R1 |
| Malaria | LALBA |
| Malaria | PRH1; |
| Malaria | IFNW1 |
| Malaria | PTN |
| Malaria | OPN4 |
| Malaria | FLRT3 |
| Malaria | TRH |
| Malaria | FGF23 |
| Malaria | NPR3 |
| Malaria | MPZL3 |
| Malaria | TMEM108 |
| Malaria | TNFRSF10B |
| Malaria | SIGLEC10 |
| Malaria | GLB1 |
| Malaria | PRRT1 |
| Malaria | OPRM1 |
| Malaria | AKR1B10 |
| Malaria | KITLG |
| Malaria | OTOR |
| Malaria | CNR1 |
| Malaria | MINPP1 |
| Malaria | SDF4 |
| Malaria | GP6 |
| Malaria | GPR63 |
| Malaria | RNASE8 |
| Malaria | BDKBR1 |
| Malaria | CDH19 |
| Malaria | CCR4 |
| Malaria | SLC6A5 |
| Malaria | IL22 |
| Malaria | SHISA6 |
| Malaria | FZD9 |
| Malaria | GSN |
| Malaria | FCER1A |
| Malaria | IFNA6 |
| Malaria | KLK7 |
| Malaria | CTF1 |
| Malaria | NMBR |
| Malaria | C2orf66 |
| Malaria | TNFRSF12A |
| Malaria | INSL3 |
| Malaria | DRD5 |
| Malaria | SFTPA2 |
| Malaria | GPR37 |
| Malaria | IL13 |
| Malaria | GFRAL |
| Malaria | MOG |
| Malaria | TSPAN2 |
| Malaria | IGFBP1 |
| Malaria | SPINK1 |
| Malaria | PLGRKT |
| Malaria | PAPLN |
| Malaria | SCGB2A2 |
| Malaria | LCN15 |
| Malaria | SLC6A14 |
| Malaria | RNASE9 |
| MG | CXCL2 |
| MG | PDGFB |
| MG | REG4 |
| MG | CCL22 |
| MG | CCL2 |
| MM | CTLA4 |
| MM | RCN2 |
| MM | IL36B |
| MM | TNF |
| MM | CP |
| MM | CALU |
| MM | KLK8 |
| MM | SSPN |
| MM | IL1A |
| MM | TNFRSF9 |
| MM | SERPINA3 |
| MM | CDH19 |
| MM | OBP2B |
| MM | FGFBP3 |
| MM | NEGR1 |
| MM | XCL1 |
| MM | CST5 |
| MM | CNPY2 |
| MM | SRGN |
| MM | SPINK9 |
| MM | TM2D2 |
| MM | HSPA13 |
| MM | AXL |
| MM | FSTL1 |
| MM | MCFD2 |
| MM | ZG16B |
| MM | LEP |
| MM | TMEM108 |
| MM | MUCL3 |
| MM | IL17BR |
| MM | ODAPH |
| MM | CNPY3 |
| MM | FAM168B |
| MM | FAM19A3 |
| MM | IGFL2 |
| MM | DPT |
| MM | CCDC47 |
| MM | CXCL1 |
| MM | COL10A1 |
| MM | SPINK4 |
| MM | WFDC9 |
| MM | CSPG5 |
| MM | ENDOU |
| MM | VEGFB |
| MM | SPINK8 |
| MM | GNLY |
| MM | CRELD2 |
| MM | ERP27 |
| MM | RCN3 |
| MM | TMEM119 |
| MM | LOC644613 |
| MM | AGRP |
| MM | PIANP |
| MM | FAM19A2 |
| MM | IL9 |
| MM | GNRH2 |
| MM | LECT2 |
| MM | GNRH1 |
| MM | CCL17 |
| MM | IL29 |
| MM | KAZALD1 |
| MM | CST4 |
| MM | KCNK1 |
| MM | PANX3 |
| MM | FKBP14 |
| MM | PGA3 |
| MM | IGFBP2 |
| MM | PGLYRP1 |
| MM | NTS |
| MM | OTOL1 |
| MM | SOST |
| MM | SHISA7 |
| MM | CCL13 |
| MM | CGREF1 |
| MM | PRR27 |
| MM | IFNL2 |
| MM | DHRS4L2 |
| MM | LYG2 |
| MM | OTOS |
| MM | UNQ6190/PRO20217 |
| MM | GPC6 |
| MM | TNFRSF21 |
| MM | PSORS1C2 |
| MM | IFNA13 |
| MM | JCHAIN |
| MM | ACP5 |
| MM | TXNDC12 |
| MM | C5orf64 |
| MM | CLCC1 |
| MM | IL10RB |
| MM | FMR1NB |
| MM | SLPI |
| MM | HRC |
| MM | CCL22 |
| MM | CASQ1 |
| MM | CELA1 |
| MM | LCN1P1 |
| MM | ODAM |
| MM | TMED1 |
| MM | REG1A |
| MM | MZB1 |
| MM | ACRV1 |
| MM | IGLL1 |
| MM | HCRTR2 |
| MM | CST8 |
| MM | PLA2G2E |
| MM | BTN1A1 |
| MM | CLDN19 |
| MM | CSAG1 |
| MM | REG4 |
| MM | VEGFA |
| MM | COLEC12 |
| MM | LYSMD4 |
| MM | CCL24 |
| MM | C1QTNF2 |
| MM | PCSK1 |
| MM | PGA4 |
| MM | ITIH3 |
| MM | ICOSLG |
| MM | SDF2L1 |
| MM | LALBA |
| MM | PTPRN2 |
| MM | FGFRL1 |
| MM | SERPINE1 |
| MM | CSN2 |
| MM | BTC |
| MM | ANGPTL4 |
| MM | C2orf40 |
| MM | FCGR2A |
| MM | FGF1 |
| MM | IGSF4B |
| MM | CLTRN |
| MM | ERVK-18 |
| MM | BPIFC |
| MM | LAIR2 |
| MM | IFNW1 |
| MM | APOC3 |
| MM | CCL21 |
| MM | WFDC3 |
| MM | CD274 |
| MM | PTHLH |
| MM | PROKR2 |
| MM | LRRN4CL |
| MM | CA4 |
| MM | TMEM102 |
| MM | SLC41A2 |
| MM | MIA2 |
| MM | CDSN |
| MM | SLC6A13 |
| MM | CLDN2 |
| MM | RNF43 |
| MM | CALR |
| MM | PSAP |
| MM | AMELX |
| MM | RTBDN |
| MM | MICA |
| MM | HAVCR1 |
| MM | PDCD1 |
| MM | C9orf47 |
| MM | DRAXIN |
| MM | OTOR |
| MM | CCL18 |
| MM | PRSS3 |
| MM | IL6 |
| MM | C6orf15 |
| MM | NETO1 |
| MM | TMEM149 |
| MM | AMTN |
| MM | KLK14 |
| MM | RAMP2 |
| MM | SHISA6 |
| MM | TNFRSF12A |
| MM | FAM3A |
| MM | PLA2G10 |
| MM | MFAP2 |
| MM | PMCH |
| MM | CCL23 |
| MM | PRL |
| MM | LCN2 |
| MM | MOG |
| MM | ITPRIPL1 |
| MM | CST2 |
| MM | APOO |
| MM | CFD |
| MM | CTSW |
| MM | GP6 |
| MM | NOV |
| MM | MMP7 |
| MM | CXCL13 |
| MM | EREG |
| MM | NPPC |
| MM | IGFBP6 |
| MM | PRLR |
| MM | EXOC3-AS1 |
| MM | MIA |
| MM | OPN4 |
| MM | KCNV2 |
| MM | IL1F9 |
| MM | INSL3 |
| MM | CXCL6 |
| MM | SMR3A |
| MM | CFHR2 |
| MM | SHISA5 |
| MM | SLC2A2 |
| MM | PRH1; |
| MM | CHRNB3 |
| MM | TNFRSF13C |
| MM | RCN1 |
| MM | CCL15 |
| MM | TMEM91 |
| MM | RNASE10 |
| MM | PTPRR |
| MM | IL15RA |
| MM | CD151 |
| MM | SLC2A10 |
| MM | ERVK-7 |
| MM | PLVAP |
| MM | FKBP10 |
| MM | CCL28 |
| MM | ANTXRL |
| MM | CTRB2 |
| MM | FGF17 |
| MM | APP |
| MM | PNLIPRP1 |
| MM | LILRB6 |
| MM | ATP4B |
| MM | IGFBP5 |
| MM | LGALS3 |
| MM | IFNA17 |
| MM | LRIT3 |
| MM | CCL8 |
| MM | CTSA |
| MM | PRR4 |
| MM | DNAJC3 |
| MM | LCN15 |
| MM | TGOLN2 |
| MM | TSLP |
| MM | TGFA |
| MM | APOA1 |
| MM | CCL7 |
| MM | EVA1C |
| MM | SDC4 |
| MM | CSF2 |
| MM | IL28B |
| MM | ENSP00000381830 |
| MM | PPT1 |
| MM | CRTAM |
| MM | SPN |
| MM | DCD |
| MM | LAS2 |
| MM | CHGB |
| MM | DKK1 |
| MM | IL34 |
| MM | ERVK-24 |
| MM | IL1B |
| MM | LRP11 |
| MM | AIMP1 |
| MM | RSPO4 |
| MM | APOA4 |
| MM | PROK1 |
| MM | RSPO3 |
| MM | FKBP2 |
| MM | SCGB1A1 |
| MM | TM9SF3 |
| MM | MANSC4 |
| MM | CST6 |
| MM | SPACA7 |
| MM | SPACA5 |
| MM | DEFB126 |
| MM | SLC6A2 |
| MM | EPHA5 |
| MM | ASIP |
| MM | CD14 |
| MM | CRLF1 |
| MM | SNORC |
| MM | PRG3 |
| MM | RNASE8 |
| MM | IGF1 |
| MM | MUCL1 |
| MM | CLN5 |
| MM | STC2 |
| MM | SOSTDC1 |
| MM | MMP1 |
| MM | VSTM2A |
| MM | PRRT1 |
| MM | CELA3A |
| MM | PRRG4 |
| MM | C1QL1 |
| MM | CXCL17 |
| MM | IGFBP1 |
| MM | SLC22A31 |
| MM | LHFPL5 |
| MM | SLC6A5 |
| MM | VPREB1 |
| MM | FGF7 |
| MM | OLR1 |
| MM | AGER |
| MM | PRRT3 |
| MM | ATP6AP2 |
| MM | APOH |
| MM | CCL11 |
| MM | S100A13 |
| MM | CPXM2 |
| MM | CD248 |
| MM | FAM24B |
| MM | TDGF1 |
| MM | XG |
| MM | TNFRSF6B |
| MM | KLK7 |
| MM | PGC |
| MM | IGFBP3 |
| MM | IFNA6 |
| MM | SUMF1 |
| MM | FAM19A4 |
| MM | AHSG |
| MM | SMOC2 |
| MM | AMBN |
| MM | IL5 |
| MM | OVGP1 |
| MM | CCL26 |
| MM | EPYC |
| MM | FAM19A5 |
| MM | MSR1 |
| MM | IER3 |
| MM | OS9 |
| MM | XCL2 |
| MM | TRABD2B |
| MM | ADM2 |
| MM | CXCL3 |
| MM | MICB |
| MM | PDIA3 |
| MM | TMEM95 |
| MM | TM4SF6 |
| MM | RTN4R |
| MM | FKBP9 |
| MM | LHFPL1 |
| MM | TFF2 |
| MM | TNFRSF1B |
| MM | SPOCK1 |
| MM | GAST |
| MM | FAM174A |
| MM | CNPY4 |
| MM | C19orf18 |
| MM | TREML1 |
| MM | CLU |
| MM | KAL1 |
| MM | NBL1 |
| MM | TGFBR1 |
| MM | MANF |
| MM | MUC7 |
| MM | KCT2 |
| MM | PRRG3 |
| MM | FGF23 |
| MM | CTSG |
| MM | IL1RAP |
| MM | SCGB2A2 |
| MM | LY6H |
| MM | IHH |
| MM | NRN1 |
| MM | PTN |
| MM | PRAP1 |
| MM | FCMR |
| MM | APLP2 |
| MM | IL21 |
| MM | TNFRSF4 |
| MM | VSIG2 |
| MM | SIGLEC9 |
| MM | TRH |
| MM | SPP2 |
| MM | SPINK13 |
| MM | SEMA6C |
| MM | MEGF9 |
| MM | IL32 |
| MM | IL16 |
| MM | PLAC9 |
| MM | UNQ9165/PRO28630 |
| MM | DNASE2 |
| MM | IGFBP7 |
| MM | COL8A1 |
| MM | HSD11B1L |
| MM | CLDN3 |
| MM | HSD17B13 |
| MM | OBP2A |
| NMO | CXCL2 |
| NMO | CXCL3 |
| NMO | IGFBPL1 |
| NMO | CCL22 |
| NMO | IL1F9 |
| NMO | LY6G6D |
| NSCLC | CCL17 |
| NSCLC | CCL24 |
| NSCLC | CXCL1 |
| NSCLC | CXCL3 |
| NSCLC | EDIL3 |
| NSCLC | IFNA13 |
| NSCLC | IFNA14 |
| NSCLC | IFNA17 |
| NSCLC | IFNA2 |
| NSCLC | IFNA5 |
| NSCLC | IFNA6 |
| NSCLC | IFNA8 |
| NSCLC | IFNL2 |
| NSCLC | IFNW1 |
| NSCLC | IL28B |
| NSCLC | IL34 |
| NSCLC | MADCAM1 |
| NSCLC | PDGFB |
| NSCLC | REG1A |
| NSCLC | SDC1 |
| NSCLC | BTN1A1 |
| NSCLC | C6 |
| NSCLC | CD207 |
| NSCLC | CD3D |
| NSCLC | CDH19 |
| NSCLC | COLEC12 |
| NSCLC | EREG |
| NSCLC | FGF23 |
| NSCLC | FGF7 |
| NSCLC | FGFBP3 |
| NSCLC | IGFBPL1 |
| NSCLC | IL15RA |
| NSCLC | IL17F |
| NSCLC | IL1RAP |
| NSCLC | IL22RA2 |
| NSCLC | IL4 |
| NSCLC | IL4R |
| NSCLC | ITGA5 |
| NSCLC | LAG3 |
| NSCLC | LRRC4 |
| NSCLC | MPZL3 |
| NSCLC | NOTCH2NL |
| NSCLC | NTRK3 |
| NSCLC | REG4 |
| NSCLC | SCARA3 |
| NSCLC | STIM2 |
| NSCLC | TNFRSF10C |
| NSCLC | TNFRSF19L |
| NSCLC | TREML1 |
| PANDAS | LRP11 |
| Sarcoidosis | CX3CL1 |
| Sarcoidosis | EPYC |
| Sarcoidosis | PGLYRP1 |
| SLE | CXCL3 |
| SLE | IFNA17 |
| SLE | CXCL1 |
| SLE | LOC644613 |
| SLE | IFNA6 |
| SLE | SV2C |
| SLE | TMEM102 |
| SLE | PDCD1LG2 |
| SLE | SLC29A4 |
| SLE | IL1A |
| SLE | C5orf64 |
| SLE | IFNW1 |
| SLE | SCGB1D1 |
| SLE | EPYC |
| SLE | CNPY2 |
| SLE | CCL4L1 |
| SLE | SPINK9 |
| SLE | TNF |
| SLE | KIRREL3 |
| SLE | IFNA8 |
| SLE | IFNA14 |
| SLE | VEGFB |
| SLE | TMEM108 |
| SLE | IFNA5 |
| SLE | ACVR2B |
| SLE | OBP2B |
| SLE | MCFD2 |
| SLE | DPT |
| SLE | SPACA7 |
| SLE | IFNA13 |
| SLE | FKBP14 |
| SLE | LACRT |
| SLE | IL6 |
| SLE | FAM19A3 |
| SLE | IFNL2 |
| SLE | ERP27 |
| SLE | TMEM149 |
| SLE | PRH1; |
| SLE | ZG16B |
| SLE | IFNA2 |
| SLE | RAET1E |
| SLE | CCDC47 |
| SLE | MUC21 |
| SLE | CCL22 |
| SLE | CGREF1 |
| SLE | TEPP |
| SLE | FAM19A2 |
| SLE | SPOCK1 |
| SLE | SRGN |
| SLE | SHISA7 |
| SLE | CCL17 |
| SLE | RNASE10 |
| SLE | FGF21 |
| SLE | APOA4 |
| SLE | NGFR |
| SLE | KCNV2 |
| SLE | AGER |
| SLE | FGFRL1 |
| SLE | LGR6 |
| SLE | CCL8 |
| SLE | CD44 |
| SLE | ITIH3 |
| SLE | CST8 |
| SLE | SSPN |
| SLE | CELA1 |
| SLE | IL4 |
| SLE | RCN3 |
| SLE | PRRG4 |
| SLE | MFAP5 |
| SLE | CSPG5 |
| SLE | VTCN1 |
| SLE | PLA2G2E |
| SLE | LY6H |
| SLE | GYPC |
| SLE | SLC41A2 |
| SLE | DRAXIN |
| SLE | CSHL1 |
| SLE | LAIR2 |
| SLE | IGFBP2 |
| SLE | CD248 |
| SLE | RGMB |
| SLE | TGOLN2 |
| SLE | CSAG1 |
| SLE | ACP4 |
| SLE | CALU |
| SLE | BTNL8 |
| SLE | SOSTDC1 |
| SLE | LYSMD4 |
| SLE | LCN2 |
| SLE | SCGB1C2 |
| SLE | CST4 |
| SLE | IGF1 |
| SLE | PRRT1 |
| SLE | CHRNA5 |
| SLE | ANTXRL |
| SLE | TNFRSF6 |
| SLE | CD300LG |
| SLE | SERPINE1 |
| SLE | OLFM1 |
| SLE | PLA2G10 |
| SLE | CD300E |
| SLE | CDH19 |
| SLE | RAMP2 |
| SLE | ATP4B |
| SLE | PTPRR |
| SLE | SFN |
| SLE | HCRTR2 |
| SLE | ACRV1 |
| SLE | FAM3A |
| SLE | ACVR1B |
| SLE | FGF23 |
| SLE | IL15RA |
| SLE | IGFBP7 |
| SLE | LHFPL1 |
| SLE | IL28B |
| SLE | VIT |
| SLE | IER3 |
| SLE | C2orf40 |
| SLE | PLVAP |
| SLE | LECT2 |
| SLE | DAG1 |
| SLE | SPINK6 |
| SLE | SLC2A12 |
| SLE | IGLL1 |
| SLE | TFF2 |
| SLE | ASIP |
| SLE | IL16 |
| SLE | EDIL3 |
| SLE | CCL13 |
| SLE | RCN1 |
| SLE | CSH2 |
| SLE | IL33 |
| SLE | LILRB4 |
| SLE | SPESP1 |
| SLE | PDGFB |
| SLE | PTHLH |
| SLE | C9orf47 |
| SLE | CHRDL2 |
| SLE | ART3 |
| SLE | CPVL |
| SLE | CCL15 |
| SLE | CFD |
| SLE | MFSD2A |
| SLE | RTN4RL1 |
| SLE | ADM2 |
| SLE | APOO |
| SLE | CTSG |
| SLE | PMCH |
| SLE | DKK2 |
| SLE | CARTPT |
| SLE | BTC |
| SLE | IL18RAP |
| SLE | LRIT3 |
| SLE | LHFPL5 |
| SLE | SPN |
| SLE | FAM19A5 |
| SLE | IL6R |
| SLE | SDC1 |
| SLE | IL20RB |
| SLE | CXCL9 |
| SLE | RNASE8 |
| SLE | LILRB2 |
| SLE | CDSN |
| SS | CXCL1 |
| SS | CXCL3 |
| SS | PDCD1LG2 |
| SSC | KLK10 |
| SSC | RCN2 |
| SSC | IGFBP6 |
| SSC | SERPINA3 |
| SSC | SPOCK1 |
| SSC | SPINK9 |
| SSC | AGRP |
| SSC | CCL21 |
| SSC | CSF2 |
| SSC | CALU |
| SSC | ENDOU |
| SSC | CXCL1 |
| SSC | NEGR1 |
| SSC | C5orf64 |
| SSC | CCDC47 |
| SSC | IL1A |
| SSC | EPYC |
| SSC | GNLY |
| SSC | PGA3 |
| SSC | UNQ6190_PRO20217 |
| SSC | CCL4L1 |
| SSC | OBP2B |
| SSC | KLK8 |
| SSC | OTOS |
| SSC | CNPY2 |
| SSC | ERP27 |
| SSC | CP |
| SSC | MUCL3 |
| SSC | RAET1L |
| SSC | ULBP2 |
| SSC | TM2D2 |
| SSC | SLC2A2 |
| SSC | IL6 |
| SSC | SERPINE1 |
| SSC | LEP |
| SSC | LECT2 |
| SSC | OTOR |
| SSC | CASQ1 |
| SSC | CST6 |
| SSC | INSL3 |
| SSC | SPACA3 |
| SSC | AMTN |
| SSC | ZG16B |
| SSC | LOC644613 |
| SSC | PGA4 |
| SSC | LYSMD4 |
| SSC | SRGN |
| SSC | CDH19 |
| SSC | SHISA7 |
| SSC | FAM19A3 |
| SSC | HAVCR1 |
| SSC | BAMBI |
| SSC | MSMP |
| SSC | SPACA7 |
| SSC | PTHLH |
| SSC | PLA2G12B |
| SSC | CXCL3 |
| SSC | CST4 |
| SSC | DKK3 |
| SSC | PIANP |
| SSC | PRG3 |
| SSC | BTC |
| SSC | CCL17 |
| SSC | XCL1 |
| SSC | LMBRD2 |
| SSC | LALBA |
| SSC | TGFA |
| SSC | IL29 |
| SSC | EVI2B |
| SSC | SLPI |
| SSC | CLCC1 |
| SSC | RNASE10 |
| SSC | FGFBP3 |
| SSC | FAM168B |
| SSC | PGLYRP1 |
| SSC | ANGPTL4 |
| SSC | CLU |
| SSC | AGER |
| SSC | TMEM108 |
| SSC | C1QTNF2 |
| SSC | TMEM119 |
| SSC | CCL8 |
| SSC | ODAPH |
| SSC | CNPY3 |
| SSC | MZB1 |
| SSC | CYTL1 |
| SSC | PRH1 |
| SSC | SLC2A10 |
| SSC | PRRG1 |
| SSC | CSPG5 |
| SSC | DRAXIN |
| SSC | PRR27 |
| SSC | DKK1 |
| SSC | NTRK2 |
| SSC | IFNA13 |
| SSC | PDCD1 |
| SSC | FAM19A2 |
| SSC | IFNW1 |
| SSC | RCN1 |
| SSC | CFD |
| SSC | CRELD2 |
| SSC | CCL18 |
| SSC | CD14 |
| SSC | BTN1A1 |
| SSC | PTPRR |
| SSC | TMEM91 |
| SSC | VSIG2 |
| SSC | CCL13 |
| SSC | C2orf40 |
| SSC | VEGFB |
| SSC | REG4 |
| SSC | TXNDC12 |
| SSC | ACVR2B |
| SSC | ODAM |
| SSC | CST5 |
| SSC | PI3 |
| SSC | TMEM149 |
| SSC | TEPP |
| SSC | KCNV2 |
| SSC | PLA2G2E |
| SSC | AIMP1 |
| SSC | IGFBP5 |
| SSC | ASIP |
| SSC | PGC |
| SSC | TM9SF3 |
| SSC | AMELX |
| SSC | CSN2 |
| SSC | CPXM2 |
| SSC | PRSS3 |
| SSC | FAM3A |
| SSC | LILRA3 |
| SSC | CSAG1 |
| SSC | RTBDN |
| SSC | CELA1 |
| SSC | ANTXRL |
| SSC | PLA2G10 |
| SSC | KCT2 |
| SSC | APOH |
| SSC | NENF |
| SSC | NPPC |
| SSC | LY6H |
| SSC | FGF1 |
| SSC | SLC1A1 |
| SSC | IFNL2 |
| SSC | HSPA13 |
| SSC | C6orf15 |
| SSC | FLJ37218 |
| SSC | CCL7 |
| SSC | APOA4 |
| SSC | FSTL1 |
| SSC | IGFBP1 |
| SSC | FCGR2A |
| SSC | SMR3A |
| SSC | IFITM10 |
| SSC | MSLN |
| SSC | PRAP1 |
| SSC | EPO |
| SSC | PLVAP |
| SSC | PROK1 |
| SSC | TSLP |
| SSC | MIA |
| SSC | APP |
| SSC | OBP2A |
| SSC | RTN4RL1 |
| SSC | PRRT3 |
| SSC | APOA1 |
| SSC | FGF7 |
| SSC | TMED1 |
| SSC | LGALS3 |
| SSC | JCHAIN |
| SSC | PRRG3 |
| SSC | IGF1 |
| SSC | ACRV1 |
| SSC | SLC38A4 |
| SSC | FKBP11 |
| SSC | ITPRIPL1 |
| SSC | PLAC9 |
| SSC | TFF2 |
| SSC | WFDC13 |
| SSC | LCN1 |
| SSC | LYG1 |
| SSC | LAIR2 |
| SSC | TNFRSF8 |
| SSC | SOSTDC1 |
| SSC | VSTM2A |
| SSC | IGFBP7 |
| SSC | PSORS1C2 |
| SSC | FGF23 |
| SSC | RSPO3 |
| SSC | S100A9 |
| SSC | CXCL9 |
| SSC | TGOLN2 |
| SSC | ACP5 |
| SSC | MANF |
| SSC | AMBN |
| SSC | PSAPL1 |
| SSC | WFDC10A |
| SSC | PPT1 |
| SSC | MANSC4 |
| SSC | CD248 |
| SSC | NGRN |
| SSC | PSAP |
| SSC | LILRB2 |
| SSC | SCGB2A2 |
| SSC | IGFBPL1 |
| SSC | SV2C |
| SSC | CXCL6 |
| SSC | CD300E |
| SSC | RCN3 |
| SSC | IGFBP3 |
| SSC | RTN4R |
| SSC | PRRT1 |
| SSC | ACVR2A |
| SSC | LCN2 |
| SSC | HCRTR2 |
| SSC | CELA3A |
| SSC | ADM2 |
| SSC | LRIT3 |
| SSC | MIA2 |
| SSC | TNFRSF17 |
| SSC | SPN |
| SSC | SLC6A5 |
| SSC | WFDC1 |
| SSC | LILRB4 |
| SSC | CTSG |
| SSC | CXCL11 |
| SSC | KLK7 |
| SSC | CST8 |
| SSC | NOPE |
| SSC | GAST |
| SSC | ASTN2 |
| SSC | MCFD2 |
| SSC | CCL22 |
| SSC | OTOL1 |
| SSC | SYCN |
| SSC | CCL2 |
| SSC | SOST |
| SSC | PTN |
| SSC | TACSTD2 |
| SSC | IL21 |
| SSC | IGLL1 |
| SSC | MMP7 |
| SSC | APLP2 |
| SSC | SSBP3_AS1 |
| SSC | CST7 |
| SSC | SSPN |
| SUSAC | CCL24 |
| SUSAC | SDC4 |
| SUSAC | TREML1 |
| SUSAC | VSIG4 |

TABLE 5
Therapeutic Autoantigens and Corresponding Disease or Disorder

| Disease | Target |
|---|---|
| APECED | IL22RA2 |
| CLE | TYRO3 |
| CLE | CD300E |
| COVID-19 | IL13 |
| COVID-19 | IL18RAP |
| COVID-19 | TNFRSF8 |
| COVID-19 | CCR10 |
| COVID-19 | CD74 |
| COVID-19 | TNFRSF17 |
| COVID-19 | CCR9 |
| COVID-19 | CRTAM |
| COVID-19 | C6 |
| DM | CD81 |
| GN | IL34 |
| KT | IGFBP1 |
| KT | IL15RA |
| KT | NXPH1 |
| KT | CST5 |
| KT | C6 |
| MG | CCL22 |
| MG | CCL2 |
| MM | PSORS1C2 |
| MM | LHFPL1 |
| MM | PTPRR |
| MM | ZG16B |
| MM | IGF1 |
| MM | IGLL1 |
| MM | LRIT3 |
| MM | VEGFB |
| NSCLC | CCL22 |
| NMO | CCL22 |
| NMO | IL1F9 |
| NSCLC | FGF23 |
| NSCLC | FGF7 |
| NSCLC | EREG |
| NSCLC | CXCL1 |
| NSCLC | CXCL2 |
| NSCLC | CXCL3 |
| NSCLC | VEGFB |
| NSCLC | IL1A |
| NSCLC | LAG3 |
| NSCLC | IFNA13 |
| NSCLC | IFNA14 |
| NSCLC | IFNA17 |
| NSCLC | IFNA2 |
| NSCLC | IFNA5 |
| NSCLC | IFNA6 |
| NSCLC | IFNA8 |
| NSCLC | IFNW1 |
| NSCLC | IL34 |
| NSCLC | IL22RA2 |
| SLE | PDCD1LG2 |
| SLE | LIF |
| SLE | IFNA13 |
| SLE | IFNA14 |
| SLE | IFNA17 |
| SLE | IFNA2 |
| SLE | IFNA5 |
| SLE | IFNA6 |
| SLE | IFNA8 |
| SLE | IFNB1 |
| SLE | IFNL2 |
| SLE | IFNW1 |
| SLE | IL6 |
| SLE | IL6R |
| SLE | IL33 |
| SLE | IL34 |
| SLE | IL16 |
| SLE | IL19 |
| SLE | IL20RB |
| SLE | IL18RAP |
| SLE | MADCAM1 |
| SLE | TNF |
| SLE | TRAILR4 |
| SLE | TYRO3 |
| SLE | CD44 |
| SLE | CD300E |
| SLE | CXCL1 |
| SLE | CXCL2 |
| SLE | CXCL3 |
| SLE | VEGFB |
| SLE | IL1A |
| SLE | LILRB2 |
| SLE | LILRB4 |
| SS | PDCD1LG2 |
| NSCLC | IGFBPL1 |

TABLE 6
Autoantigen Specific Therapies

| Disease | Target |
|---|---|
| COVID-19 | IFITM10 |
| COVID-19 | IFNA13 |
| COVID-19 | IFNA14 |
| COVID-19 | IFNA17 |
| COVID-19 | IFNA2 |
| COVID-19 | IFNA5 |
| COVID-19 | IFNA6 |
| COVID-19 | IFNA8 |
| COVID-19 | IFNW1 |
| COVID-19 | KLRC1 |
| COVID-19 | KLRC2 |
| COVID-19 | KLRC3 |
| COVID-19 | CCR2 |
| COVID-19 | CD38 |
| COVID-19 | C5A |
| COVID-19 | CCR4 |
| COVID-19 | CD3E |
| COVID-19 | TNFRSF9 |
| COVID-19 | ADCYAP1 |
| COVID-19 | CGA |
| COVID-19 | HCTR2 |
| COVID-19 | AZGP1 |
| COVID-19 | SLC41A2 |
| COVID-19 | LAIR1 |
| KT | IFITM10 |
| KT | IL4 |
| KT | EXOC3-AS1 |
| KT | IFNA13 |
| KT | CD99L2 |
| KT | OSTN |
| KT | SYCN |
| KT | LYG2 |
| KT | BTN1A1 |
| MM | IFNA13 |
| MM | OBP2B |
| MM | TMEM108 |
| MM | CELA1 |
| MM | OTOL1 |
| MM | ATP4B |
| MM | ICOSLG |
| MM | REG1A |
| MM | CCL24 |
| MM | TMEM91 |
| MM | LALBA |
| MM | ITPRIPL1 |
| MM | LCN2 |
| MM | BTN1A1 |
| MM | OS9 |
| MM | FGF17 |
| NSCLC | IFNL2 |
| NSCLC | VSTM2A |
| NSCLC | PDGFB |
| SLE | TMEM102 |
| SLE | CCL8 |
| SLE | CCL4L1 |
| SLE | ACVR2B |
| SLE | FGF21 |
| SLE | IGFBP2 |
| SLE | RGMB |
| SLE | ACVR1B |
| SLE | ACRV1 |
| SLE | SCGB1D1 |
| SLE | TFF2 |
| SLE | SFN |
| SLE | ANTXRL |
| SLE | SLC41A2 |
| SLE | CD248 |

[0474] The disclosures of each and every patent, patent application, and publication cited herein are hereby incorporated herein by reference in their entirety. While this invention has been disclosed with reference to specific embodiments, it is apparent that other embodiments and variations of this invention may be devised by others skilled in the art without departing from the true spirit and scope of the invention. The appended claims are intended to be construed to include all such embodiments and equivalent variations.

The application's sequence listing, which the Patent Office published only in electronic form, follows.

SEQUENCE LISTING (6193 sequences)

SEQ ID NO: 1 - protein, 474 aa, Homo Sapiens [sequence omitted]

SEQ ID NO: 2 - protein, 1451 aa, Homo Sapiens
SVSGKPQYMVLVPSLLHTETTEKGCVLLSYLNETVTVSASLESVRGNRSLFTDLEAENDVLHCVAFAVPKSSSNEEVMFLTVQVKGPTQEFKKRTTVMVKNEDSLVFVQTDKSIYKPGQTVKFRVVSMDENFHPLNELIPLVYIQDPKGNRIAQWQSFQLEGGLKQFSFPLSSEPFQGSYKVVVQKKSGGRTEHPFTVEEFVLPKFEVQVTVPKIITILEEEMNVSVCGLYTYGKPVPGHVTVSICRKYSDASDCHGEDSQAFCEKFSGQLNSHGCFYQQVKTKVFQLKRKEYEMKLHTEAQIQEEGTVVELTGRQSSEITRTITKLSFVKVDSHFRQGIPFFGQVRLVDGKGVPIPNKVIFIRGNEANYYSNATTDEHGLVQFSINTTNVMGTSLTVRVNYKDRSPCYGYQWVSEEHEEAHHTAYLVFSPSKSFVHLEPMSHELPCGHTQTVQAHYILNGGTLLGLKKLSFYYLIMAKGGIVRTGTHGLLVKQEDMKGHFSISIPVKSDIAPVARLLIYAVLPTGDVIGDSAKYDVENCLANKVDLSFSPSQSLPASHAHLRVTAAPQSVCALRAVDQSVLLMKPDAELSASSVYNLLPEKDLTGFPGPLNDQDDEDCINRHNVYINGITYTPVSSTNEKDMYSFLEDMGLKAFTNSKIRKPKMCPQLQQYEMHGPEGLRVGFYESDVMGRGHARLVHVEEPHTETVRKYFPETWIWDLVVVNSAGVAEVGVTVPDTITEWKAGAFCLSEDAGLGISSTASLRAFQPFFVELTMPYSVIRGEAFTLKATVLNYLPKCIRVSVQLEASPAFLAVPVEKEQAPHCICANGRQTVSWAVTPKSLGNVNFTVSAEALESQELCGTEVPSVPEHGRKDTVIKPLLVEPEGLEKETTFNSLLCPSGGEVSEELSLKLPPNVVEESARASVSVLGDILGSAMQNTQNLLQMPYGCGEQNMVLFAPNIYVLDYLNETQQLTPEVKSKAIGYLNTGYQRQLNYKHYDGSYSTFGERYGRNQGNTWLTAFVLKTFAQARAYIFIDEAHITQALIWLSQRQKDNGCFRSSGSLLNNAIKGGVEDEVTLSAYITIALLEIPLTVTHPVVRNALFCLESAWKTAQEGDHGSHVYTKALLAYAFALAGNQDKRKEVLKSLNEEAVKKDNSVHWERPQKPKAPVGHFYEPQAPSAEVEMTSYVLLAYLTAQPAPTSEDLTSATNIVKWITKQQNAQGGFSSTQDTVVALHALSKYGAATFTRTGKAAQVTIQSSGTFSSKFQVDNNNRLLLQQVSLPELPGEYSMKVTGEGCVYLQTSLKYNILPEKEEFPFALGVQTLPQTCDEPKAHTSFQISLSVSYTGSRSASNMAIVDVKMVSGFIPLKPTVKMLERSNHVSRTEVSSNHVLIYLDKVSNQTLSLFFTVLQDVPVRDLKPAIVKVYDYYETDEFAIAEYNAPCSKDLGNA

SEQ ID NO: 3 - protein, 1047 aa, Homo Sapiens
QKLPKGKRPNLKVHINTTSDSILLKFLRPSPNVKLEGLLLGYGSNVSPNQYFPLPAEGKFTEAIVDAEPKYLIVVRPAPPPSQKKSCSGKTRSRKPLQLVVGTLTPSSVFLSWGFLINPHHDWTLPSHCPNDRFYTIRYREKDKEKKWIFQICPATETIVENLKPNTVYEFGVKDNVEGGIWSKIFNHKTVVGSKKVNGKIQSTYDQDHTVPAYVPRKLIPITIIKQVIQNVTHKDSAKSPEKAPLGGVILVHLIIPGLNETTVKLPASLMFEISDALKTQLAKNETLALPAESKTPEVEKISARPTTVTPETVPRSTKPTTSSALDVSETTLASSEKPWIVPTAKISEDSKVLQPQTATYDVFSSPTTSDEPEISDSYTATSDRILDSIPPKTSRTLEQPRATLAPSETPFVPQKLEIFTSPEMQPTTPAPQQTTSIPSTPKRRPRPKPPRTKPERTTSAGTITPKISKSPEPTWTTPAPGKTQFISLKPKIPLSPEVTHTKPAPKQTPRAPPKPKTSPRPRIPQTQPVPKVPQRVTAKPKTSPSPEVSYTTPAPKDVLLPHKPYPEVSQSEPAPLETRGIPFIPMISPSPSQEELQTTLEETDQSTQEPFTTKIPRTTELAKTTQAPHRFYTTVRPRTSDKPHIRPGVKQAPRPSGADRNVSVDSTHPTKKPGTRRPPLPPRPTHPRRKPLPPNNVTGKPGSAGIISSGPITTPPLRSTPRPTGTPLERIETDIKQPTVPASGEELENITDFSSSPTRETDPLGKPRFKGPHVRYIQKPDNSPCSITDSVKRFPKEEATEGNATSPPQNPPTNLTVVTVEGCPSFVILDWEKPLNDTVTEYEVISRENGSFSGKNKSIQMTNQTFSTVENLKPNTSYEFQVKPKNPLGEGPVSNTVAFSTESADPRVSEPVSAGRDAIWTERPFNSDSYSECKGKQYVKRTWYKKFVGVQLCNSLRYKIYLSDSLTGKFYNIGDQRGHGEDHCQFVDSFLDGRTGQQLTSDQLPIKEGYFRAVRQEPVQFGEIGGHTQINYVQWYECGTTIPGKW

SEQ ID NO: 4 - protein, 114 aa, Homo Sapiens
PQPSPLRVLLGTSLTIPCYFIDPMHPVTTAPSTAPLAPRIKWSRVSKEKEVVLLVATEGRVRVNSAYQDKVSLPNYPAIPSDATLEVQSLRSNDSGVYRCEVMHGIEDSEATLE

SEQ ID NO: 5 - protein, 723 aa, Homo Sapiens
QSTIEEQAKTFLDKFNHEAEDLFYQSSLASWNYNTNITEENVQNMNNAGDKWSAFLKEQSTLAQMYPLQEIQNLTVKLQLQALQQNGSSVLSEDKSKRLNTILNTMSTIYSTGKVCNPDNPQECLLLEPGLNEIMANSLDYNERLWAWESWRSEVGKQLRPLYEEYVVLKNEMARANHYEDYGDYWRGDYEVNGVDGYDYSRGQLIEDVEHTFEEIKPLYEHLHAYVRAKLMNAYPSYISPIGCLPAHLLGDMWGRFWTNLYSLTVPFGQKPNIDVTDAMVDQAWDAQRIFKEAEKFFVSVGLPNMTQGFWENSMLTDPGNVQKAVCHPTAWDLGKGDFRILMCTKVTMDDFLTAHHEMGHIQYDMAYAAQPFLLRNGANEGFHEAVGEIMSLSAATPKHLKSIGLLSPDFQEDNETEINFLLKQALTIVGTLPFTYMLEKWRWMVFKGEIPKDQWMKKWWEMKREIVGVVEPVPHDETYCDPASLFHVSNDYSFIRYYTRTLYQFQFQEALCQAAKHEGPLHKCDISNSTEAGQKLFNMLRLGKSEPWTLALENVVGAKNMNVRPLLNYFEPLFTWLKDQNKNSFVGWSTDWSPYADQSIKVRISLKSALGDKAYEWNDNEMYLFRSSVAYAMRQYFLKVKNQMILFGEEDVRVANLKPRISFNFFVTAPKNVSDIIPRTEVEKAIRMSRSRINDAFRLNDNSLEFLGIQPTLGPPNQPPVS

SEQ ID NO: 6 - protein, 509 aa, Homo Sapiens
QVRRGHPTVHSETKYVELIVINDHQLFEQMRQSVVLTSNFAKSVVNLADVIYKEQLNTRIVLVAMETWADGDKIQVQDDLLETLARLMVYRREGLPEPSDATHLFSGRTFQSTSSGAAYVGGICSLSHGGGVNEYGNMGAMAVTLAQTLGQNLGMMWNKHRSSAGDCKCPDIWLGCIMEDTGFYLPRKFSRCSIDEYNQFLQEGGGSCLFNKPLKLLDPPECGNGFVEAGEECDCGSVQECSRAGGNCCKKCTLTHDAMCSDGLCCRRCKYEPRGVSCREAVNECDIAETCTGDSSQCPPNLHKLDGYYCDHEQGRCYGGRCKTRDRQCQVLWGHAAADRFCYEKLNVEGTERGSCGRKGSGWVQCSKQDVLCGFLLCVNISGAPRLGDLVGDISSVTFYHQGKELDCRGGHVQLADGSDLSYVEDGTACGPNMLCLDHRCLPASAFNFSTCPGSGERRICSHHGVCSNEGKCICQPDWTGKDCSIHNPLPTSPPTGETERYKGPSGTN

SEQ ID NO: 7 - protein, 533 aa, Homo Sapiens
ETLKATKYVELVIVADNREFQRQGKDLEKVKQRLIEIANHVDKFYRPLNIRIVLVGVEVWNDMDKCSVSQDPFTSLHEFLDWRKMKLLPRKSHDNAQLVSGVYFQGTTIGMAPIMSMCTADQSGGIVMDHSDNPLGAAVTLAHELGHNFGMNHDTLDRGCSCQMAVEKGGCIMNASTGYPFPMVFSSCSRKDLETSLEKGMGVCLFNLPEVRESFGGQKCGNRFVEEGEECDCGEPEECMNRCCNATTCTLKPDAVCAHGLCCEDCQLKPAGTACRDSSNSCDLPEFCTGASPHCPANVYLHDGHSCQDVDGYCYNGICQTHEQQCVTLWGPGAKPAPGICFERVNSAGDPYGNCGKVSKSSFAKCEMRDAKCGKIQCQGGASRPVIGTNAVSIETNIPLQQGGRILCRGTHVYLGDDMPDPGLVLAGTKCADGKICLNRQCQNISVFGVHECAMQCHGRGVCNNRKNCHCEAHWAPPFCDKFGFGGSTDSGPIRQAGKEARQEAAESNRERGQGQEPVGSQEHASTASLTLI

SEQ ID NO: 8 - protein, 490 aa, Homo Sapiens
DVVTETKTVELVIVADHSEAQKYRDFQHLLNRTLEVALLLDTFFRPLNVRVALVGLEAWTQRDLVEISPNPAVTLENFLHWRRAHLLPRLPHDSAQLVTGTSFSGPTVGMAIQNSICSPDFSGGVNMDHSTSILGVASSIAHELGHSLGLDHDLPGNSCPCPGPAPAKTCIMEASTDFLPGLNFSNCSRRALEKALLDGMGSCLFERLPSLPPMAAFCGNMFVEPGEQCDCGFLDDCVDPCCDSLTCQLRPGAQCASDGPCCQNCQLRPSGWQCRPTRGDCDLPEFCPGDSSQCPPDVSLGDGEPCAGGQAVCMHGRCASYAQQCQSLWGPGAQPAAPLCLQTANTRGNAFGSCGRNPSGSYVSCTPRDAICGQLQCQTGRTQPLLGSIRDLLWETIDVNGTELNCSWVHLDLGSDVAQPLLTLPGTACGPGLVCIDHRCQRVDLLGAQECRSKCHGHGVCDSNRHCYCEEGWAPPDCTTQLKATSSLTT

SEQ ID NO: 9 - protein, 511 aa, Homo Sapiens
NLSKLLPQYLEIYIIVEKALYDYMGSEMMAVTQKIVQVIGLVNTMFTQFKLTVILSSLELWSNENQISTSGDADDILQRFLAWKRDYLILRPHDIAYLLVYRKHPKYVGATFPGTVCNKSYDAGIAMYPDAIGLEGFSVIIAQLLGLNVGLTYDDITQCFCLRATCIMNHEAVSASGRKIFSNCSMHDYRYFVSKFETKCLQKLSNLQPLHQNQPVCGNGILESNEECDCGNKNECQFKKCCDYNTCKLKGSVKCGSGPCCTSKCELSIAGTPCRKSIDPECDFTEYCNGTSSNCVPDTYALNGRLCKLGTAYCYNGQCQTTDNQCAKIFGKGAQGAPFACFKEVNSLHERSENCGFKNSQPLPCERKDVLCGKLACVQPHKNANKSDAQSTVYSYIQDHVCVSIATGSSMRSDGTDNAYVADGTMCGPEMYCVNKTCRKVHLMGYNCNATTKCKGKGICNNFGNCQCFPGHRPPDCKFQFGSPGGSIDDGNFQKSGDFYTEKGYNTHWNN

SEQ ID NO: 10 - protein, 497 aa, Homo Sapiens
REDLNSMKYVELYLVADYLEFQKNRRDQDATKHKLIEIANYVDKFYRSLNIRIALVGLEVWTHGNMCEVSENPYSTLWSFLSWRRKLLAQKYHDNAQLITGMSFHGTTIGLAPLMAMCSVYQSGGVNMDHSENAIGVAATMAHEMGHNFGMTHDSADCCSASAADGGCIMAAATGHPFPKVFNGCNRRELDRYLQSGGGMCLSNMPDTRMLYGGRRCGNGYLEDGEECDCGEEEECNNPCCNASNCTLRPGAECAHGSCCHQCKLLAPGTLCREQARQCDLPEFCTGKSPHCPTNFYQMDGTPCEGGQAYCYNGMCLTYQEQCQQLWGPGARPAPDLCFEKVNVAGDTFGNCGKDMNGEHRKCNMRDAKCGKIQCQSSEARPLESNAVPIDTTIIMNGRQIQCRGTHVYRGPEEEGDMLDPGLVMTGTKCGYNHICFEGQCRNTSFFETEGCGKKCNGHGVCNNNQNCHCLPGWAPPFCNTPGHGGSIDSGPMPPES

SEQ ID NO: 11 - protein, 496 aa, Homo Sapiens
YNHMGSDTTVVAQKVFQLIGLTNAIFVSFNITIILSSLELWIDENKIATTGEANELLHTFLRWKTSYLVLRPHDVAFLLVYREKSNYVGATFQGKMCDANYAGGVVLHPRTISLESLAVILAQLLSLSMGITYDDINKCQCSGAVCIMNPEAIHFSGVKIFSNCSFEDFAHFISKQKSQCLHNQPRLDPFFKQQAVCGNAKLEAGEECDCGTEQDCALIGETCCDIATCRFKAGSNCAEGPCCENCLFMSKERMCRPSFEECDLPEYCNGSSASCPENHYVQTGHPCGLNQWICIDGVCMSGDKQCTDTFGKEVEFGPSECYSHLNSKTDVSGNCGISDSGYTQCEADNLQCGKLICKYVGKFLLQIPRATIIYANISGHLCIAVEFASDHADSQKMWIKDGTSCGSNKVCRNQRCVSSSYLGYDCTTDKCNDRGVCNNKKHCHCSASYLPPDCSVQSDLWPGGSIDSGNFPPVAIPARLPERRYIENIYHSKPMR

SEQ ID NO: 12 - protein, 487 aa, Homo Sapiens
RFVELVVVVDNIRYLFSQSNATTVQHEVFNVVNIVDSFYHPLEVDVILTGIDIWTASNPLPTSGDLDNVLEDFSIWKNYNLNNRLQHDVAHLFIKDTQGMKLGVAYVKGICQNPFNTGVDVFEDNRLVVFAITLGHELGHNLGMQHDTQWCVCELQWCIMHAYRKVTTKFSNCSYAQYWDSTISSGLCIQPPPYPGNIFRLKYCGNLVVEEGEECDCGTIRQCAKDPCCLLNCTLHPGAACAFGICCKDCKFLPSGTLCRQQVGECDLPEWCNGTSHQCPDDVYVQDGISCNVNAFCYEKTCNNHDIQCKEIFGQDARSASQSCYQEINTQGNRFGHCGIVGTTYVKCWTPDIMCGRVQCENVGVIPNLIEHSTVQQFHLNDTTCWGTDYHLGMAIPDIGEVKDGTVCGPEKICIRKKCASMVHLSQACQPKTCNMRGICNNKQHCHCNHEWAPPYCKDKGYGGSADSGPPPKNNMEGLNVMGKLRY

SEQ ID NO: 13 - protein, 467 aa, Homo Sapiens
PKSAGDWWTHAWFLELVVVVNHDFFIYSQSNISKVQEDVFLVVNIVDSMYQQLGTYIILIGIEIWNQGNVFPMTSIEQVLNDFSQWKQISLSQLQHDAAHMFIKNSLISILGLAYVAGICRPPIDCGVDNFQGDTWSLFANTVAHELGHTLGMQHDEEFCFCGERGCIMNTFRVPAEKFTNCSYADFMKTTLNQGSCLHNPPRLGEIFMLKRCGNGVVEREEQCDCGSVQQCEQDACCLLNCTLRPGAACAFGLCCKDCKFMPSGELCRQEVNECDLPEWCNGTSHQCPEDRYVQDGIPCSDSAYCYQKRCNNHDQHCREIFGKDAKSASQNCYKEINSQGNRFGHCGINGTTYLKCHISDVFCGRVQCENVRDIPLLQDHFTLQHTHINGVTCWGIDYHLRMNISDIGEVKDGTVCGPGKICIHKKCVSLSVLSHVCLPETCNMKGICNNKHHCHCGYGWSPPYCQ

SEQ ID NO: 14 - protein, 514 aa, Homo Sapiens
SKRQLRRYPRNVEEETKYIELMIVNDHLMFKKHRLSVVHTNTYAKSVVNMADLIYKDQLKTRIVLVAMETWATDNKFAISENPLITLREFMKYRRDFIKEKSDAVHLFSGSQFESSRSGAAYIGGICSLLKGGGVNEFGKTDLMAVTLAQSLAHNIGIISDKRKLASGECKCEDTWSGCIMGDTGYYLPKKFTQCNIEEYHDFLNSGGGACLFNKPSKLLDPPECGNGFIETGEECDCGTPAECVLEGAECCKKCTLTQDSQCSDGLCCKKCKFQPMGTVCREAVNDCDIRETCSGNSSQCAPNIHKMDGYSCDGVQGICFGGRCKTRDRQCKYIWGQKVTASDKYCYEKLNIEGTEKGNCGKDKDTWIQCNKRDVLCGYLLCTNIGNIPRLGELDGEITSTLVVQQGRTLNCSGGHVKLEEDVDLGYVEDGTPCGPQMMCLEHRCLPVASFNFSTCLSSKEGTICSGNGVCSNELKCVCNRHWIGSDCNTYFPHNDDAKTGITLSGNGVAGTN

SEQ ID NO: 15 - protein, 506 aa, Homo Sapiens
AVNPSRGIFEEMKYLELMIVNDHKTYKKHRSSHAHTNNFAKSVVNLVDSIYKEQLNTRVVLVAVETWTEKDQIDITTNPVQMLHEFSKYRQRIKQHADAVHLISRVTFHYKRSSLSYFGGVCSRTRGVGVNEYGLPMAVAQVLSQSLAQNLGIQWEPSSRKPKCDCTESWGGCIMEETGVSHSRKFSKCSILEYRDFLQRGGGACLFNRPTKLFEPTECGNGYVEAGEECDCGFHVECYGLCCKKCSLSNGAHCSDGPCCNNTSCLFQPRGYECRDAVNECDITEYCTGDSGQCPPNLHKQDGYACNQNQGRCYNGECKTRDNQCQYIWGTKAAGSDKFCYEKLNTEGTEKGNCGKDGDRWIQCSKHDVFCGFLLCTNLTRAPRIGQLQGEIIPTSFYHQGRVIDCSGAHVVLDDDTDVGYVEDGTPCGPSMMCLDRKCLQIQALNMSSCPLDSKGKVCSGHGVCSNEATCICDFTWAGTDCSIRDPVRNLHPPKDEGPKGPSATN

SEQ ID NO: 16 - protein, 467 aa, Homo Sapiens
VQEHEKYIEYYLVLDNGEFKRYNENQDEIRKRVFEMANYVNMLYKKLNTHVALVGMEIWTDKDKIKITPNASFTLENFSKWRGSVLSRRKRHDIAQLITATELAGTTVGLAFMSTMCSPYSVGVVQDHSDNLLRVAGTMAHEMGHNFGMFHDDYSCKCPSTICVMDKALSFYIPTDFSSCSRLSYDKFFEDKLSNCLFNAPLPTDIISTPICGNQLVEMGEDCDCGTSEECTNICCDAKTCKIKATFQCALGECCEKCQFKKAGMVCRPAKDECDLPEMCNGKSGNCPDDRFQVNGFPCHHGKGHCLMGTCPTLQEQCTELWGPGTEVADKSCYNRNEGGSKYGYCRRVDDTLIPCKANDTMCGKLFCQGGSDNLPWKGRIVTFLTCKTFDPEDTSQEIGMVANGTKCGDNKVCINAECVDIEKAYKSTNCSSKCKGHAVCDHELQCQCEEGWIPPDCDDSSVVFHF

SEQ ID NO: 17 - protein, 481 aa, Homo Sapiens
WIHFRIVEIVVVIDNYLYIRYERNDSKLLEDLYVIVNIVDSILDVIGVKVLLFGLEIWTNKNLIVVDDVRKSVHLYCKWKSENITPRMQHDTSHLFTTLGLRGLSGIGAFRGMCTPHRSCAIVTFMNKTLGTFSIAVAHHLGHNLGMNHDEDTCRCSQPRCIMHEGNPPITKFSNCSYGDFWEYTVERTKCLLETVHTKDIFNVKRCGNGVVEEGEECDCGPLKHCAKDPCCLSNCTLTDGSTCAFGLCCKDCKFLPSGKVCRKEVNECDLPEWCNGTSHKCPDDFYVEDGIPCKERGYCYEKSCHDRNEQCRRIFGAGANTASETCYKELNTLGDRVGHCGIKNATYIKCNISDVQCGRIQCENVTEIPNMSDHTTVHWARFNDIMCWSTDYHLGMKGPDIGEVKDGTECGIDHICIHRHCVHITILNSNCSPAFCNKRGICNNKHHCHCNYLWDPPNCLIKGYGGSVDSGPPPKRKKKK

SEQ ID NO: 18 - protein, 489 aa, Homo Sapiens
YKHPKYLELILLFDQSRYRFVNNNLSQVIHDAILLTGIMDTYFQDVRMRIHLKALEVWTDFNKIRVGYPELAEVLGRFVIYKKSVLNARLSSDWAHLYLQRKYNDALAWSFGKVCSLEYAGSVSTLLDTNILAPATWSAHELGHAVGMSHDEQYCQCRGRLNCIMGSGRTGFSNCSYISFFKHISSGATCLNNIPGLGYVLKRCGNKIVEDNEECDCGSTEECQKDRCCQSNCKLQPGANCSIGLCCHDCRFRPSGYVCRQEGNECDLAEYCDGNSSSCPNDVYKQDGTPCKYEGRCFRKGCRSRYMQCQSIFGPDAMEAPSECYDAVNLIGDQFGNCEITGIRNFKKCESANSICGRLQCINVETIPDLPEHTTIISTHLQAENLMCWGTGYHLSMKPMGIPDLGMINDGTSCGEGRVCFKKNCVNSSVLQFDCLPEKCNTRGVCNNRKNCHCMYGWAPPFCEEVGYGGSIDSGPPGLLRGAIPSSIW

SEQ ID NO: 19 - protein, 508 aa, Homo Sapiens
KSEPAVPDLFPLYLEMHIVVDKTLYDYWGSDSMIVTNKVIEIVGLANSMFTQFKVTIVLSSLELWSDENKISTVGEADELLQKFLEWKQSYLNLRPHDIAYLLIYMDYPRYLGAVFPGTMCITRYSAGVALYPKEITLEAFAVIVTQMLALSLGISYDDPKKCQCSESTCIMNPEVVQSNGVKTFSSCSLRSFQNFISNVGVKCLQNKPQMQKKSPKPVCGNGRLEGNEICDCGTEAQCGPASCCDFRTCVLKDGAKCYKGLCCKDCQILQSGVECRPKAHPECDIAENCNGSSPECGPDITLINGLSCKNNKFICYDGDCHDLDARCESVFGKGSRNAPFACYEEIQSQSDRFGNCGRDRNNKYVFCGWRNLICGRLVCTYPTRKPFHQENGDVIYAFVRDSVCITVDYKLPRTVPDPLAVKNGSQCDIGRVCVNRECVESRIIKASAHVCSQQCSGHGVCDSRNKCHCSPGYKPPNCQIRSKGFSIFPEEDMGSIMERASGKTENT

SEQ ID NO: 20 - protein, 489 aa, Homo Sapiens
EARRTRKYLELYIVADHTLFLTRHRNLNHTKQRLLEVANYVDQLLRTLDIQVALTGLEVWTERDRSRRQLRAFFRKGGGACLSNAPDPGLPVPPALCGNGFVEAGEECDCGPGQECRDLCCFAHNCSLRPGAQCAHGDCCVRCLLKPAGALCRQAMGDCDLPEFCTGTSSHCPPDVYLLDGSPCARGSGYCWDGACPTLEQQCQQLWGPGSHPAPEACFQVVNSAGDAHGNCGQDSEGHFLPCAGRDALCGKLQCQGGKPSLLAPHMVPVDSTVHLDGQEVTCRGALALPSAQLDLLGLGLVEPGTQCGPRMVCQSRRCRKNAFQELQRCLTACHSHGVCNSNHNCHCAPGWAPPFCDKPGFGGSMDSGPVQAENHDTFLLAMLLSVLLPLLPGAGLAWCCYRLPGAHLQRCSWGCRRDPACSGPKDGPHRDHPLGGVHPMELGPTATGQPWPLDPENSHEPSSHPEKPLPAVSPDPQDQVQMPRSCLW

SEQ ID NO: 21 - protein, 639 aa, Homo Sapiens
IAPSRPWALMEQYEVVLPRRLPGPRVRRALPSHLGLHPERVSYVLGATGHNFTLHLRKNRDLLGSGYTETYTAANGSEVTEQPRGQDHCFYQGHVEGYPDSAASLSTCAGLRGFFQVGSDLHLIEPLDEGGEGGRHAVYQAEHLLQTAGTCGVSDDSLGSLLGPRTAAVFRPRPGDSLPSRETRYVELYVVVDNAEFQMLGSEAAVRHRVLEVVNHVDKLYQKLNFRVVLVGLEIWNSQDRFHVSPDPSVTLENLLTWQARQRTRRHLHDNVQLITGVDFTGTTVGFARVSAMCSHSSGAVNQDHSKNPVGVACTMAHEMGHNLGMDHDENVQGCRCQERFEAGRCIMAGSIGSSFPRMFSDCSQAYLESFLERPQSVCLANAPDLSHLVGGPVCGNLFVERGEQCDCGPPEDCRNRCCNSTTCQLAEGAQCAHGTCCQECKVKPAGELCRPKKDMCDLEEFCDGRHPECPEDAFQENGTPCSGGYCYNGACPTLAQQCQAFWGPGGQAAEESCFSYDILPGCKASRYRADMCGVLQCKGGQQPLGRAICIVDVCHALTTEDGTAYEPVPEGTRCGPEKVCWKGRCQDLHVYRSSNCSAQCHNHGVCNHKQECHCHAGWAPPHCAKLLTEVHAASGSLP

SEQ ID NO: 22 - protein, 296 aa, Homo Sapiens
AVLPQTRYVELFIVVDKERYDMMGRNQTAVREEMILLANYLDSMYIMLNIRIVLVGLEIWTNGNLINIVGGAGDVLGNFVQWREKFLITRRRHDSAQLVLKKGFGGTAGMAFVGTVCSRSHAGGINVFGQITVETFASIVAHELGHNLGMNHDDGRDCSCGAKSCIMNSGASGSRNFSSCSAEDFEKLTLNKGGNCLLNIPKPDEAYSAPSCGNKLVDAGEECDCGTPKECELDPCCEGSTCKLKSFAECAYGDCCKDCRFLPGGTLCRGKTSECDVPEYCNGSSQFCQPDVFIQN

SEQ ID NO: 23 - protein, 1665 aa, Homo Sapiens
EKSPGAYFLPEFALSPQGSFLEDTTGEQFLTYRYDDQTSRNTRSDEDKDGNWDAWGDWSDCSRTCGGGASYSLRRCLTGRNCEGQNIRYKTCSNHDCPPDAEDFRAQQCSAYNDVQYQGRYYEWLPRYNDPAAPCALKCHAQGQNLVVELAPKVLDGTRCNTDSLDMCISGICQAVGCDRQLGSNAKEDNCGVCAGDGSTCRLVRGQSKSHVSPEKREENVIAVPLGSRSVRITVKGPAHLFIESKTLQGSKGEHSFNSPGVFVVENTTVEFQRGSERQTFKIPGPLMADFIFKTRYTAAKDSVVQFFFYQPISHQWRQTDFFPCTVTCGGGYQLNSAECVDIRLKRVVPDHYCHYYPENVKPKPKLKECSMDPCPSSDGFKEIMPYDHFQPLPRWEHNPWTACSVSCGGGIQRRSFVCVEESMHGEILQVEEWKCMYAPKPKVMQTCNLFDCPKWIAMEWSQCTVTCGRGLRYRVVLCINHRGEHVGGCNPQLKLHIKEECVIPIPCYKPKEKSPVEAKLPWLKQAQELEETRIATEEPTFIPEPWSACSTTCGPGVQVREVKCRVLLTFTQTETELPEEECEGPKLPTERPCLLEACDESPASRELDIPLPEDSETTYDWEYAGFTPCTATCLGGHQEAIAVCLHIQTQQTVNDSLCDMVHRPPAMSQACNTEPCPPRWHVGSWGPCSATCGVGIQTRDVYCLHPGETPAPPEECRDEKPHALQACNQFDCPPGWHIEEWQQCSRTCGGGTQNRRVTCRQLLTDGSFLNLSDELCQGPKASSHKSCARTDCPPHLAVGDWSKCSVSCGVGIQRRKQVCQRLAAKGRRIPLSEMMCRDLPGLPLVRSCQMPECSKIKSEMKTKLGEQGPQILSVQRVYIQTREEKRINLTIGSRAYLLPNTSVIIKCPVRRFQKSLIQWEKDGRCLQNSKRLGITKSGSLKIHGLAAPDIGVYRCIAGFAQETVVLKLIGTDNRLIARPALREPMREYPGMDHSEANSLGVTWHKMRQMWNNKNDLYLDDDHISNQPFLRALLGHCSNSAGSTNSWELKNKQFEAAVKQGAYSMDTAQFDELIRNMSQLMETGEVSDDLASQLIYQLVAELAKAQPTHMQWRGIQEETPPAAQLRGETGSVSQSSHAKNSGKLTFKPKGPVLMRQSQPPSISFNKTINSRIGNTVYITKRTEVINILCDLITPSEATYTWTKDGTLLQPSVKIILDGTGKIQIQNPTRKEQGIYECSVANHLGSDVESSSVLYAEAPVILSVERNITKPEHNHLSVVVGGIVEAALGANVTIRCPVKGVPQPNITWLKRGGSLSGNVSLLFNGSLLLQNVSLENEGTYVCIATNALGKAVATSVLHLLERRWPESRIVFLQGHKKYILQATNTRTNSNDPTGEPPPQEPFWEPGNWSHCSATCGHLGARIQRPQCVMANGQEVSEALCDHLQKPLAGFEPCNIRDCPARWFTSVWSQCSVSCGEGYHSRQVTCKRTKANGTVQVVSPRSCAPKDRPLGRKPCFGHPCVQWEPGNRCPGRCMGRAVRMQQRHTACQHNSSDSNCDDRKRPTLRRNCTSGACDVCWHTGPWKPCTAACGRGFQSRKVDCIHTRSCKPVAKRHCVQKKKPISWRHCLGPSCDRDCTDTTHYCMFVKHLNLCSLDRYKQRCCQSCQEG

SEQ ID NO: 24 - protein, 517 aa, Homo Sapiens
QDSRGCARWCPQDSSCVNATACRCNPGFSSFSEIITTPMETCDDINECATLSKVSCGKFSDCWNTEGSYDCVCSPGYEPVSGAKTFKNESENTCQDVDECQQNPRLCKSYGTCVNTLGSYTCQCLPGFKFIPEDPKVCTDVNECTSGQNPCHSSTHCLNNVGSYQCRCRPGWQPIPGSPNGPNNTVCEDVDECSSGQHQCDSSTVCFNTVGSYSCRCRPGWKPRHGIPNNQKDTVCEDMTFSTWTPPPGVHSQTLSRFFDKVQDLGRDYKPGLANNTIQSILQALDELLEVPGDLETLPRLQQHCVASHLLDGLEDVLRGLSKNLSNGLLNFSYPAGTELSLEVQKQVDRSVTLRQNQAVMQLDWNQAQKSGDPGPSVVGLVSIPGMGKLLAEAPLVLEPEKQMLLHETHQGLLQDGSPILLSDVISAFLSNNDTQNLSSPVTFTFSHRSVIPRQKVLCVFWEHGQNGCGHWATTGCSTIGTRDTSTICRCTHLSSFAVLMAHYDVQEEDPVLTVIT

SEQ ID NO: 25 - protein, 291 aa, Homo Sapiens
DINECTPPYSVYCGFNAVCYNVEGSFYCQCVPGYRLHSGNEQFSNSNENTCQDTTSSKTTQGRKELQKIVDKFESLLTNQTLWRTEGRQEISSTATTILRDVESKVLETALKDPEQKVLKIQNDSVAIETQAITDNCSEERKTFNLNVQMNSMDIRCSDIIQGDTQGPSAIAFISYSSLGNIINATFFEEMDKKDQVYLNSQVVSAAIGPKRNVSLSKSVTLTFQHVKMTPSTKKVFCVYWKSTGQGSQWSRDGCFLIHVNKSHTMCNCSHLSSFAVLMALTSQEEDPVLT

SEQ ID NO: 26 - protein, 176 aa, Homo Sapiens
PPCPKYASCHNSTHCTCEDGFRARSGRTYFHDSSEKCEDINECETGLAKCKYKAYCRNKVGGYICSCLVKYTLFNFLAGIIDYDHPDCYENNSQGTTQSNVDIWVSGVKPGFGKQLPGDKRTKHICVYWEGSEGGWSTEGCSHVHSNGSYTKCKCFHLSSFAVLVALAPKEDPVLT

SEQ ID NO: 27 - protein, 322 aa, Homo Sapiens
DVDECSSGQHQCDSSTVCFNTVGSYSCRCRPGWKPRHGIPNNQKDTVCEDMTFSTWTPPPGVHSQTLSRFFDKVQDLGRDSKTSSAEVTIQNVIKLVDELMEAPGDVEALAPPVRHLIATQLLSNLEDIMRILAKSLPKGPFTYISPSNTELTLMIQERGDKNVTMGQSSARMKLNWAVAAGAEDPGPAVAGILSIQNMTTLLANASLNLHSKKQAELEEIYESSIRGVQLRRLSAVNSIFLSHNNTKELNSPILFAFSHLESSDGEAGRDPPAKDVMPGPRQELLCAFWKSDSDRGGHWATEGCQVLGSKNGSTTCQCSHL

SEQ ID NO: 28 - protein, 52 aa, Homo Sapiens
YRQSMNNFQGLRSFGCRFGTCTVQKLAHQIYQFTDKDKDNVAPRSKISPQGY

SEQ ID NO: 29 - protein, 47 aa, Homo Sapiens
TQAQLLRVGCVLGTCQVQNLSHRLWQLMGPAGRQDSAPVDPSSPHSY

SEQ ID NO: 30 - protein, 320 aa, Homo Sapiens
AQNITARIGEPLVLKCKGAPKKPPQRLEWKLNTGRTEAWKVLSPQGGGPWDSVARVLPNGSLFLPAVGIQDEGIFRCQAMNRNGKETKSNYRVRVYQIPGKPEIVDSASELTAGVPNKVGTCVSEGSYPAGTLSWHLDGKPLVPNEKGVSVKEQTRRHPETGLFTLQSELMVTPARGGDPRPTFSCSFSPGLPRHRALRTAPIQPRVWEPVPLEEVQLVVEPEGGAVAPGGTVTLTCEVPAQPSPQIHWMKDGVPLPLPPSPVLILPEIGPQDQGTYSCVATHSSHGPQESRAVSISIIEPGEEGPTAGSVGGSGLGTLA

SEQ ID NO: 31 - protein, 432 aa, Homo Sapiens
CRFGALCEAETGRCVCPSECVALAQPVCGSDGHTYPSECMLHVHACTHQISLHVASAGPCETCGDAVCAFGAVCSAGQCVCPRCEHPPPGPVCGSDGVTYGSACELREAACLQQTQIEEARAGPCEQAECGSGGSGSGEDGDCEQELCRQRGGIWDEDSEDGPCVCDFSCQSVPGSPVCGSDGVTYSTECELKKARCESQRGLYVAAQGACRGPTFAPLPPVAPLHCAQTPYGCCQDNITAARGVGLAGCPSACQCNPHGSYGGTCDPATGQCSCRPGVGGLRCDRCEPGFWNFRGIVTDGRSGCTPCSCDPQGAVRDDCEQMTGLCSCKPGVAGPKCGQCPDGRALGPAGCEADASAPATCAEMRCEFGARCVEESGSAHCVCPMLTCPEANATKVCGSDGVTYGNECQLKTIACRQGLQISIQSLGPCQE

SEQ ID NO: 32 - protein, 500 aa, Homo Sapiens
WYTVNSAYGDTIIIPCRLDVPQNLMFGKWKYEKPDGSPVFIAFRSSTKKSVQYDDVPEYKDRLNLSENYTLSISNARISDEKRFVCMLVTEDNVFEAPTIVKVFKQPSKPEIVSKALFLETEQLKKLGDCISEDSYPDGNITWYRNGKVLHPLEGAVVIIFKKEMDPVTQLYTMTSTLEYKTTKADIQMPFTCSVTYYGPSGQKTIHSEQAVFDIYYPTEQVTIQVLPPKNAIKEGDNITLKCLGNGNPPPEEFLFYLPGQPEGIRSSNTYTLTDVRRNATGDYKCSLIDKKSMIASTAITVHYLDLSLNPSGEVTRQIGDALPVSCTISASRNATVVWMKDNIRLRSSPSFSSLHYQDAGNYVCETALQEVEGLKKRESLTLIVEGKPQIKMTKKTDPSGLSKTIICHVEGFPKPAIQWTITGSGSVINQTEESPYINGRYYSKIIISPEENVTLTCTAENQLERTVNSLNVSAISIPEHDEADEISDENREKVNDQAK

SEQ ID NO: 33 - protein, 256 aa, Homo Sapiens
LNDLNVSPPELTVHVGDSALMGCVFQSTEDKCIFKIDWTLSPGEHAKDEYVLYYYSNLSVPIGRFQNRVHLMGDILCNDGSLLLQDVQEADQGTYICEIRLKGESQVFKKAVVLHVLPEEPKELMVHVGGLIQMGCVFQSTEVKHVTKVEWIFSGRRAKEEIVFRYYHKLRMSVEYSQSWGHFQNRVNLVGDIFRNDGSIMLQGVRESDGGNYTCSIHLGNLVFKKTIVLHVSPEEPRTLVTPAALRPLVLGGNQL

SEQ ID NO: 34 - protein, 345 aa, Homo Sapiens
GRAVVSCPAACLCASNILSCSKQQLPNVPHSLPSYTALLDLSHNNLSRLRAEWTPTRLTQLHSLLLSHNHLNFISSEAFSPVPNLRYLDLSSNQLRTLDEFLFSDLQVLEVLLLYNNHIMAVDRCAFDDMAQLQKLYLSQNQISRFPLELVKEGAKLPKLTLLDLSSNKLKNLPLPDLQKLPAWIKNGLYLHNNPLNCDCELYQLFSHWQYRQLSSVMDFQEDLYCMNSKKLHNVFNLSFLNCGEYKERAWEAHLGDTLIIKCDTKQQGMTKVWVTPSNERVLDEVTNGTVSVSKDGSLLFQQVQVEDGGVYTCYAMGETFNETLSVELKVHNFTLHGHHDTLNT

SEQ ID NO: 35 - protein, 359 aa, Homo Sapiens
VCPTACICATDIVSCTNKNLSKVPGNLFRLIKRLDLSYNRIGLLDSEWIPVSFAKLNTLILRHNNITSISTGSFSTTPNLKCLDLSSNKLKTVKNAVFQELKVLEVLLLYNNHISYLDPSAFGGLSQLQKLYLSGNFLTQFPMDLYVGRFKLAELMFLDVSYNRIPSMPMHHINLVPGKQLRGIYLHGNPFVCDCSLYSLLVFWYRRHFSSVMDFKNDYTCRLWSDSRHSRQVLLLQDSFMNCSDSIINGSFRALGFIHEAQVGERLMVHCDSKTGNANTDFIWVGPDNRLLEPDKEMENFYVFHNGSLVIESPRFEDAGVYSCIAMNKQRLLNETVDVTINVSNFTVSRSHAHEAFNT

SEQ ID NO: 36 - protein, 364 aa, Homo Sapiens
TPDSEGFPPRALHNCPYKCICAADLLSCTGLGLQDVPAELPAATADLDLSHNALQRLRPGWLAPLFQLRALHLDHNELDALGRGVFVNASGLRLLDLSSNTLRALGRHDLDGLGALEKLLLFNNRLVHLDEHAFHGLRALSHLYLGCNELASFSFDHLHGLSATHLLTLDLSSNRLGHISVPELAALPAFLKNGLYLHNNPLPCDCRLYHLLQRWHQRGLSAVRDFAREYVCLAFKVPASRVRFFQHSRVFENCSSAPALGLERPEEHLYALVGRSLRLYCNTSVPAMRIAWVSPQQELLRAPGSRDGSIAVLADGSLAIGNVQEQHAGLFVCLATGPRLHHNQTHEYNVSVHFPRPEPEAFNT

SEQ ID NO: 37 - protein, 483 aa, Homo Sapiens
HIGCSNQRRSPENSGRRYNRIQHGQCAYTFILPEHDGNCRESTTDQYNTNALQRDAPHVEPDFSSQKLQHLEHVMENYTQWLQKLENYIVENMKSEMAQIQQNAVQNHTATMLEIGTSLLSQTAEQTRKLTDVETQVLNQTSRLEIQLLENSLSTYKLEKQLLQQTNEILKIHEKNSLLEHKILEMEGKHKEELDTLKEEKENLQGLVTRQTYIIQELEKQLNRATTNNSVLQKQQLELMDTVHNLVNLCTKEGVLLKGGKREEEKPFRDCADVYQAGFNKSGIYTIYINNMPEPKKVFCNMDVNGGGWTVIQHREDGSLDFQRGWKEYKMGFGNPSGEYWLGNEFIFAITSQRQYMLRIELMDWEGNRAYSQYDRFHIGNEKQNYRLYLKGHTGTAGKQSSLILHGADFSTKDADNDNCMCKCALMLTGGWWFDACGPSNLNGMFYTAGQNHGKLNGIKWHYFKGPSYSLRSTTMMIRPLDF

SEQ ID NO: 38 - protein, 478 aa, Homo Sapiens
YNNFRKSMDSIGKKQYQVQHGSCSYTFLLPEMDNCRSSSSPYVSNAVQRDAPLEYDDSVQRLQVLENIMENNTQWLMKLENYIQDNMKKEMVEIQQNAVQNQTAVMIEIGTNLLNQTAEQTRKLTDVEAQVLNQTTRLELQLLEHSLSTNKLEKQILDQTSEINKLQDKNSFLEKKVLAMEDKHIIQLQSIKEEKDQLQVLVSKQNSIIEELEKKIVTATVNNSVLQKQQHDLMETVNNLLTMMSTSNSAKDPTVAKEEQISFRDCAEVFKSGHTTNGIYTLTFPNSTEEIKAYCDMEAGGGGWTIIQRREDGSVDFQRTWKEYKVGFGNPSGEYWLGNEFVSQLTNQQRYVLKIHLKDWEGNEAYSLYEHFYLSSEELNYRIHLKGLTGTAGKISSISQPGNDFSTKDGDNDKCICKCSQMLTGGWWFDACGPSNLNGMYYPQRQNTNKFNGIKWYYWKGSGYSLKATTMMIRPADF

SEQ ID NO: 39 - protein, 479 aa, Homo Sapiens
TRQEADRGCETLVVQHGHCSYTFLLPKSEPCPPGPEVSRDSNTLQRESLANPLHLGKLPTQQVKQLEQALQNNTQWLKKLERAIKTILRSKLEQVQQQMAQNQTAPMLELGTSLLNQTTAQIRKLTDMEAQLLNQTSRMDAQMPETFLSTNKLENQLLLQRQKLQQLQGQNSALEKRLQALETKQQEELASILSKKAKLLNTLSRQSAALTNIERGLRGVRHNSSLLQDQQHSLRQLLVLLRHLVQERANASAPAFIMAGEQVFQDCAEIQRSGASASGVYTIQVSNATKPRKVFCDLQSSGGRWTLIQRRENGTVNFQRNWKDYKQGFGDPAGEHWLGNEVVHQLTRRAAYSLRVELQDWEGHEAYAQYEHFHLGSENQLYRLSVVGYSGSAGRQSSLVLQNTSFSTLDSDNDHCLCKCAQVMSGGWWFDACGLSNLNGVYYHAPDNKYKMDGIRWHYFKGPSYSLRASRMMIRPLDI

SEQ ID NO: 40 - protein, 471 aa, Homo Sapiens
QEDGFEGTEEGSPREFIYLNRYKRAGESQDKCTYTFIVPQQRVTGAICVNSKEPEVLLENRVHKQELELLNNELLKQKRQIETLQQLVEVDGGIVSEVKLLRKESRNMNSRVTQLYMQLLHEIIRKRDNALELSQLENRILNQTADMLQLASKYKDLEHKYQHLATLAHNQSEIIAQLEEHCQRVPSARPVPQPPPAAPPRVYQPPTYNRIINQISTNEIQSDQNLKVLPPPLPTMPTLTSLPSSTDKPSGPWRDCLQALEDGHDTSSIYLVKPENTNRLMQVWCDQRHDPGGWTVIQRRLDGSVNFFRNWETYKQGFGNIDGEYWLGLENIYWLTNQGNYKLLVTMEDWSGRKVFAEYASFRLEPESEYYKLRLGRYHGNAGDSFTWHNGKQFTTLDRDHDVYTGNCAHYQKGGWWYNACAHSNLNGVWYRGGHYRSRYQDGVYWAEFRGGSYSLKKVVMMIRPNPNTFH

SEQ ID NO: 41 - protein, 444 aa, Homo Sapiens
SRIDQDNSSFDSLSPEPKSRFAMLDDVKILANGLLQLGHGLKDFVHKTKGQINDIFQKLNIFDQSFYDLSLQTSEIKEEEKELRRTTYKLQVKNEEVKNMSLELNSKLESLLEEKILLQQKVKYLEEQLTNLIQNQPETPEHPEVTSLKTFVEKQDNSIKDLLQTVEDQYKQLNQQHSQIKEIENQLRRTSIQEPTEISLSSKPRAPRTTPFLQLNEIRNVKHDGIPAECTTIYNRGEHTSGMYAIRPSNSQVFHVYCDVISGSPWTLIQHRIDGSQNFNETWENYKYGFGRLDGEFWLGLEKIYSIVKQSNYVLRIELEDWKDNKHYIEYSFYLGNHETNYTLHLVAITGNVPNAIPENKDLVFSTWDHKAKGHFNCPEGYSGGWWWHDECGENNLNGKYNKPRAKSKPERRRGLSWKSQNGRLYSIKSTKMLIHPTDSESFE

SEQ ID NO: 42 - protein, 381 aa, Homo Sapiens
GPVQSKSPRFASWDEMNVLAHGLLQLGQGLREHAERTRSQLSALERRLSACGSACQGTEGSTDLPLAPESRVDPEVLHSLQTQLKAQNSRIQQLFHKVAQQQRHLEKQHLRIQHLQSQFGLLDHKHLDHEVAKPARRKRLPEMAQPVDPAHNVSRLHRLPRDCQELFQVGERQSGLFEIQPQGSPPFLVNCKMTSDGGWTVIQRRHDGSVDFNRPWEAYKAGFGDPHGEFWLGLEKVHSITGDRNSRLAVQLRDWDGNAELLQFSVHLGGEDTAYSLQLTAPVAGQLGATTVPPSGLSVPFSTWDQDHDLRRDKNCAKSLSGGWWFGTCSHSNLNGQYFRSIPQQRQKLKKGIFWKTWRGRYYPLQATTMLIQPMAAEAAS

SEQ ID NO: 43 - protein, 301 aa, Homo Sapiens
EDGGPACYGGFDLYFILDKSGSVLHHWNEIYYFVEQLAHKFISPQLRMSFIVFSTRGTTLMKLTEDREQIRQGLEELQKVLPGGDTYMHEGFERASEQIYYENRQGYRTASVIIALTDGELHEDLFFYSEREANRSRDLGAIVYCVGVKDFNETQLARIADSKDHVFPVNDGFQALQGIIHSILKKSCIEILAAEPSTICAGESFQVVVRGNGFRHARNVDRVLCSFKINDSVTLNEKPFSVEDTYLLCPAPILKEVGMKAALQVSMNDGLSFISSSVIITTTHCSLHKIASGPTTAACME

SEQ ID NO: 44 - protein, 285 aa, Homo Sapiens
QEQPSCRRAFDLYFVLDKSGSVANNWIEIYNFVQQLAERFVSPEMRLSFIVFSSQATIILPLTGDRGKISKGLEDLKRVSPVGETYIHEGLKLANEQIQKAGGLKTSSIIIALTDGKLDGLVPSYAEKEAKISRSLGASVYCVGVLDFEQAQLERIADSKEQVFPVKGGFQALKGIINSILAQSCTEILELQPSSVCVGEEFQIVLSGRGFMLGSRNGSVLCTYTVNETYTTSVKPVSVQLNSMLCPAPILNKAGETLDVSVSFNGGKSVISGSLIVTATECSNG

SEQ ID NO: 45 - protein, 326 aa, Homo Sapiens
GSLRYHGPDWRIFHRLALGSRRAHHHHGPGWRQHWRQGQAGHRCQGSFDLYFILDKSGSVNNNWIDLYMWVEETVARFQSPNIRMCFITYSTDGQTVLPLTSDKNRIKNGLDQLQKIVPDGHTFMQAGFRKAIQQIESFNSGNKVPSMIIAMTDGELVAHAFQDTLREAQKARKLGANVYTLGVADYNLDQITAIADSPGHVFAVENGFKALRSTIDALTSKVCLDVTSVEPSSECVGEPYHVVIHGNGFQNLKKRDEVICRFIFNESTIIDEKPTSIDNNSMNCPGPKLEKPGEEYSIEVSLNKGKTFFKSNVSITSTTCGIFRN

SEQ ID NO: 46 - protein, 87 aa, Homo Sapiens
SVRVEQVVKPPQNKTESENTSDKPKRKKKGGKNGKNRRNRKKKNPCNAEFQNFCIHGECKYIEHLEAVTCKCQQEYFGERCGEKSMK

SEQ ID NO: 47 - protein, 217 aa, Homo Sapiens
THTEIKRVAEEKVTLPCHHQLGLPEKDTLDIEWLLTDNEGNQKVVITYSSRHVYNNLTEEQKGRVAFASNFLAGDASLQIEPLKPSDEGRYTCKVKNSGRYVWSHVILKVLVRPSKPKCELEGELTEGSDLTLQCESSSGTEPIVYYWQRIREKEGEDERLPPKSRIDYNHPGRVLLQNLTMSYSGLYQCTAGNEAGKESCVVRVTVQYVQSIGMVA

SEQ ID NO: 48 - protein, 230 aa, Homo Sapiens
QNSQLQEELRGLRETFSNFTASTEAQVKGLSTQGGNVGRKMKSLESQLEKQQKDLSEDHSSLLLHVKQFVSDLRSLSCQMAALQGNGSERTCCPVNWVEHERSCYWFSRSGKAWADADNYCRLEDAHLVVVTSWEEQKFVQHHIGPVNTWMGLHDQNGPWKWVDGTDYETGFKNWRPEQPDDWYGHGLGGGEDCAHFTDDGRWNDDVCQRPYRWVCETELDKASQEPPLL

SEQ ID NO: 49 - protein, 227 aa, Homo Sapiens
QSAQLQAELRSLKEAFSNFSSSTLTEVQAISTHGGSVGDKITSLGAKLEKQQQDLKADHDALLFHLKHFPVDLRFVACQMELLHSNGSQRTCCPVNWVEHQGSCYWFSHSGKAWAEAEKYCQLENAHLVVINSWEEQKFIVQHTNPFNTWIGLTDSDGSWKWVDGTDYRHNYKNWAVTQPDNWHGHELGGSEDCVEVQPDGRWNDDFCLQVYRWVCEKRRNATGEVA

SEQ ID NO: 50 - protein, 352 aa, Homo Sapiens
DMEDTDDDDDDDDDDDDDDDDDEEDNSLFPTREPRSHFFPFDLFPMCPFGCQCYSRVVHCSDLGLTSVPTNIPFDTRMLDLQNNKIKEIKENDFKGLTSLYGLILNNNKLTKIHPKAFLTTKKLRRLYLSHNQLSEIPLNLPKSLAELRIHENKVKKIQKDTFKGMNALHVLEMSANPLDNNGIEPGAFEGVTVFHIRIAEAKLTSVPKGLPPTLLELHLDYNKISTVELEDFKRYKELQRLGLGNNKITDIENGSLANIPRVREIHLENNKLKKIPSGLPELKYLQIIFLHSNSIARVGVNDFCPTVPKMKKSLYSAISLFNNPVKYWEMQPATFRCVLSRMSVQLGNFGM

SEQ ID NO: 51 - protein, 814 aa, Homo Sapiens
HVNCPLVVKITLHVPEHLIADGSRFILLEGSQLDASDWLNPAQVVLFSQQNSSGPWAMDLCARRLLDPCEHQCDPETGECLCYEGYMKDPVHKHLCIRNEWGTNQGPWPYTIFQRGFDLVLGEQPSDKIFRFTYTLGEGMWLPLSKSFVIPPAELAINPSAKCKTDMTVMEDAVEVREELMTSSSFDSLEVLLDSFGPVRDCSKDNGGCSKNFRCISDRKLDSTGCVCPSGLSPMKDSSGCYDRHIGVDCSDGFNGGCEQLCLQQMAPFPDDPTLYNILMFCGCIEDYKLGVDGRSCQLITETCPEGSDCGESRELPMNQTLFGEMFFGYNNHSKEVAAGQVLKGTFRQNNFARGLDQQLPDGLVVATVPLENQCLEEISEPTPDPDFLTGMVNFSEVSGYPVLQHWKVRSVMYHIKLNQVAISQALSNALHSLDGATSRADFVALLDQFGNHYIQEAIYGFEESCSIWYPNKQVQRRLWLEYEDISKGNSPSDESEERERDPKVLTFPEYITSLSDSGTKRMAAGVRMECQSKGRCPSSCPLCHVTSSPDTPAEPVLLEVTKAAPIYELVTNNQTQRLLQEATMSSLWCSGTGDVIEDWCRCDSTAFGADGLPTCAPLPQPVLRLSTVHEPSSTLVVLEWEHSEPPIGVQIVDYLLRQEKVTDRMDHSKVETETVLSFVDDIISGAKSPCAMPSQVPDKQLTTISLIIRCLEPDTIYMFTLWGVDNTGRRSRPSDVIVKTPCPVVDDVKAQEIADKIYNLFNGYTSGKEQQTAYNTLLDLGSPTLHRVLYHYNQHYESFGEFTWRCEDELGPR

SEQ ID NO: 52 - protein, 157 aa, Homo Sapiens
GATAAASREPDSPCRLKTVTVSTLPALRESDIGWSGARAGAGAGTGAGAAAAAASPGSPGSAGTAAESRLLLFVRNELPGRIAVQDDLDNTELPFFTLEMSGTAADISLVHWRQQWLENGTLYFHVSMSSSGQLAQATAPTLQEPSEIVEEQMHILH

SEQ ID NO: 53 - protein, 169 aa, Homo Sapiens
LPEICTQCPGSVQNLSKVAFYCKTTRELMLHARCCLNQKGTILGLDLQNCSLEDPGPNFHQAHTTVIIDLQANPLKGDLANTFRGFTQLQTLILPQHVNCPGGINAWNTITSYIDNQICQGQKNLCNNTGDPEMCPENGSCVPDGPGLLQCVCADGFHGYKCMRQGSFS

SEQ ID NO: 54 - protein, 1189 aa, Homo Sapiens
AAAAAAVSGSAAAEAKECDRPCVNGGRCNPGTGQCVCPAGWVGEQCQHCGGRFRLTGSSGFVTDGPGNYKYKTKCTWLIEGQPNRIMRLRFNHFATECSWDHLYVYDGDSIYAPLVAAFSGLIVPERDGNETVPEVVATSGYALLHFFSDAAYNLTGFNITYSFDMCPNNCSGRGECKISNSSDTVECECSENWKGEACDIPHCTDNCGFPHRGICNSSDVRGCSCFSDWQGPGCSVPVPANQSFWTREEYSNLKLPRASHKAVVNGNIMWVVGGYMFNHSDYNMVLAYDLASREWLPLNRSVNNVVVRYGHSLALYKDKIYMYGGKIDSTGNVTNELRVFHIHNESWVLLTPKAKEQYAVVGHSAHIVTLKNGRVVMLVIFGHCPLYGYISNVQEYDLDKNTWSILHTQGALVQGGYGHSSVYDHRTRALYVHGGYKAFSANKYRLADDLYRYDVDTQMWTILKDSRFFRYLHTAVIVSGTMLVFGGNTHNDTSMSHGAKCFSSDFMAYDIACDRWSVLPRPDLHHDVNRFGHSAVLHNSTMYVFGGFNSLLLSDILVFTSEQCDAHRSEAACLAAGPGIRCVWNTGSSQCISWALATDEQEEKLKSECFSKRTLDHDRCDQHTDCYSCTANTNDCHWCNDHCVPRNHSCSEGQISIFRYENCPKDNPMYYCNKKTSCRSCALDQNCQWEPRNQECIALPENICGIGWHLVGNSCLKITTAKENYDNAKLFCRNHNALLASLTTQKKVEFVLKQLRIMQSSQSMSKLTLTPWVGLRKINVSYWCWEDMSPFTNSLLQWMPSEPSDAGFCGILSEPSTRGLKAATCINPLNGSVCERPANHSAKQCRTPCALRTACGDCTSGSSECMWCSNMKQCVDSNAYVASFPFGQCMEWYTMSTCPPENCSGYCTCSHCLEQPGCGWCTDPSNTGKGKCIEGSYKGPVKMPSQAPTGNFYPQPLLNSSMCLEDSRYNWSFIHCPACQCNGHSKCINQSICEKCENLTTGKHCETCISGFYGDPTNGGKCQPCKCNGHASLCNTNTGKCFCTTKGVKGDECQLCEVENRYQGNPLRGTCYYTLLIDYQFTFSLSQEDDRYYTAINFVATPDEQNRDLDMFINASKNFNLNITWAASFSAGTQAGEEMPVVSKTNIKEYKDSFSNEKFDFRNHPNITFFVYVSNFTWPIKIQVQTEQ

SEQ ID NO: 55 - protein, 415 aa, Homo Sapiens
LYAQVSQSKPCERTGSCFSGRCVNSTCLCDPGWVGDQCQHCQGRFKLTEPSGYLTDGPINYKYKTKCTWLIEGYPNAVLRLRFNHFATECSWDHMYVYDGDSIYAPLIAVLSGLIVPEIRGNETVPEVVTTSGYALLHFFSDAAYNLTGFNIFYSINSCPNNCSGHGKCTTSVSVPSQVYCECDKYWKGEACDIPYCKANCGSPDHGYCDLTGEKLCVCNDSWQGPDCSLNVPSTESYWILPNVKPFSPSVGRASHKAVLHGKFMWVIGGYTFNYSSFQMVLNYNLESSIWNVGTPSRGPLQRYGHSLALYQENIFMYGGRIETNDGNVTDELWVFNIHSQSWSTKTPTVLGHGQQYAVEGHSAHIMELDSRDVVMIIIFGYSAIYGYTSSIQEYHICELLKNCNFFIDWECFSL

SEQ ID NO: 56 - protein, 426 aa, Homo Sapiens
APRGTQAEESPFVGNPGNITGARGLTGTLRCQLQVQGEPPEVHWLRDGQILELADSTQTQVPLGEDEQDDWIVVSQLRITSLQLSDTGQYQCLVFLGHQTFVSQPGYVGLEGLPYFLEEPEDRTVAANTPFNLSCQAQGPPEPVDLLWLQDAVPLATAPGHGPQRSLHVPGLNKTSSFSCEAHNAKGVTTSRTATITVLPQQPRNLHLVSRQPTELEVAWTPGLSGIYPLTHCTLQAVLSDDGMGIQAGEPDPPEEPLTSQASVPPHQLRLGSLHPHTPYHIRVACTSSQGPSSWTHWLPVETPEGVPLGPPENISATRNGSQAFVHWQEPRAPLQGTLLGYRLAYQGQDTPEVLMDIGLRQEVTLELQGDGSVSNLTVCVAAYTAAGDGPWSLPVPLEAWRPGQAQPVHQLVKEPSTPAFSWPWW

SEQ ID NO: 57 - protein, 278 aa, Homo Sapiens
QENQDGRYSLTYIYTGLSKHVEDVPAFQALGSLNDLQFFRYNSKDRKSQPMGLWRQVEGMEDWKQDSQLQKAREDIFMETLKDIVEYYNDSNGSHVLQGRFGCEIENNRSSGAFWKYYYDGKDYIEFNKEIPAWVPFDPAAQITKQKWEAEPVYVQRAKAYLEEECPATLRKYLKYSKNILDRQDPPSVVVTSHQAPGEKKKLKCLAYDFYPGKIDVHWTRAGEVQEPELRGDVLHNGNGTYQSWVVVAVPPQDTAPYSCHVQHSSLAQPLVVPWEAS

SEQ ID NO: 58 - protein, 99 aa, Homo Sapiens [sequence omitted]

SEQ ID NO: 59 - protein, 516 aa, Homo Sapiens
EVRLSVPPLVEVMRGKSVILDCTPTGTHDHYMLEWFLTDRSGARPRLASAEMQGSELQVTMHDTRGRSPPYQLDSQGRLVLAEAQVGDERDYVCVVRAGAAGTAEATARLNVFAKPEATEVSPNKGTLSVMEDSAQEIATCNSRNGNPAPKITWYRNGQRLEVPVEMNPEGYMTSRTVREASGLLSLTSTLYLRLRKDDRDASFHCAAHYSLPEGRHGRLDSPTFHLTLHYPTEHVQFWVGSPSTPAGWVREGDTVQLLCRGDGSPSPEYTLFRLQDEQEEVLNVNLEGNLTLEGVTRGQSGTYGCRVEDYDAADDVQLSKTLELRVAYLDPLELSEGKVLSLPLNSSAVVNCSVHGLPTPALRWTKDSTPLGDGPMLSLSSITFDSNGTYVCEASLPTVPVLSRTQNFTLLVQGSPELKTAEIEPKADGSWREGDEVTLICSARGHPDPKLSWSQLGGSPAEPIPGRQGWVSSSLTLKVTSALSRDGISCEASNPHGNKRHVFHFGTVSPQTSQA

SEQ ID NO: 60 - protein, 889 aa, Homo Sapiens
DVLEGDSSEDRAFRVRIAGDAPLQGVLGGALTIPCHVHYLRPPPSRRAVLGSPRVKWTFLSRGREAEVLVARGVRVKVNEAYRFRVALPAYPASLTDVSLALSELRPNDSGIYRCEVQHGIDDSSDAVEVKVKGVVFLYREGSARYAFSFSGAQEACARIGAHIATPEQLYAAYLGGYEQCDAGWLSDQTVRYPIQTPREACYGDMDGFPGVRNYGVVDPDDLYDVYCYAEDLNGELFLGDPPEKLTLEEARAYCQERGAEIATTGQLYAAWDGGLDHCSPGWLADGSVRYPIVTPSQRCGGGLPGVKTLFLFPNQTGFPNKHSRFNVYCFRDSAQPSAIPEASNPASNPASDGLEAIVTVTETLEELQLPQEATESESRGAIYSIPIMEDGGGGSSTPEDPAEAPRTLLEFETQSMVPPTGFSEEEGKALEEEEKYEDEEEKEEEEEEEEVEDEALWAWPSELSSPGPEASLPTEPAAQEKSLSQAPARAVLQPGASPLPDGESEASRPPRVHGPPTETLPTPRERNLASPSPSTLVEAREVGEATGGPELSGVPRGESEETGSSEGAPSLLPATRAPEGTRELEAPSEDNSGRTAPAGTSVQAQPVLPTDSASRGGVAVVPASGDCVPSPCHNGGTCLEEEEGVRCLCLPGYGGDLCDVGLRFCNPGWDAFQGACYKHFSTRRSWEEAETQCRMYGAHLASISTPEEQDFINNRYREYQWIGLNDRTIEGDFLWSDGVPLLYENWNPGQPDSYFLSGENCVVMVWHDQGQWSDVPCNYHLSYTCKMGLVSCGPPPELPLAQVFGRPRLRYEVDTVLRYRCREGLAQRNLPLIRCQENGRWEAPQISCVPRRPARALHPEEDPEGRQGRLLGRWKALLIPPSSPMPGP

SEQ ID NO: 61 - protein, 331 aa, Homo Sapiens
DEEASGADTSGVLDPDSVTPTYSAMCPFGCHCHLRVVQCSDLGLKSVPKEISPDTTLLDLQNNDISELRKDDFKGLQHLYALVLVNNKISKIHEKAFSPLRKLQKLYISKNHLVEIPPNLPSSLVELRIHDNRIRKVPKGVFSGLRNMNCIEMGGNPLENSGFEPGAFDGLKLNYLRISEAKLTGIPKDLPETLNELHLDHNKIQAIELEDLLRYSKLYRLGLGHNQIRMIENGSLSFLPTLRELHLDNNKLARVPSGLPDLKLLQVVYLHSNNITKVGVNDFCPMGFGVKRAYYNGISLFNNPVPYWEVQPATFRCVTDRLAIQFGNYKK

SEQ ID NO: 62 - protein, 866 aa, Homo Sapiens
AATSRPERVWPDGVIPFVIGGNFTGSQRAVFRQAMRHWEKHTCVTFLERTDEDSYIVFTYRPCGCCSYVGRRGGGPQAISIGKNCDKFGIVVHELGHVVGFWHEHTRPDRDRHVSIVRENIQPGQEYNFLKMEPQEVESLGETYDFDSIMHYARNTFSRGIFLDTIVPKYEVNGVKPPIGQRTRLSKGDIAQARKLYKCPACGETLQDSTGNFSSPEYPNGYSAHMHCVWRISVTPGEKIILNFTSLDLYRSRLCWYDYVEVRDGFWRKAPLRGRFCGSKLPEPIVSTDSRLWVEFRSSSNWVGKGFFAVYEAICGGDVKKDYGHIQSPNYPDDYRPSKVCIWRIQVSEGFHVGLTFQSFEIERHDSCAYDYLEVRDGHSESSTLIGRYCGYEKPDDIKSTSSRLWLKFVSDGSINKAGFAVNFFKEVDECSRPNRGGCEQRCLNTLGSYKCSCDPGYELAPDKRRCEAACGGFLTKLNGSITSPGWPKEYPPNKNCIWQLVAPTQYRISLQFDFFETEGNDVCKYDFVEVRSGLTADSKLHGKFCGSEKPEVITSQYNNMRVEFKSDNTVSKKGFKAHFFSDKDECSKDNGGCQQDCINTFGSYECQCRSGFVLHDNKHDCKEAGCDHKVTSTSGTITSPNWPDKYPSKNECTWAISSTPGHRVKLTFMEMDIESQPECAYDHLEVFDGRDAKAPVLGRFCGSKKPEPVLATGSRMFLRFYSDNSVQRKGFQASHATECGGQVRADVKTKDLYSHAQFGDNNYPGGVDCEWVIVAEEGYGVELVFQTFEVEEETDCGYDYMELFDGYDSTAPRLGRYCGSGPPEEVYSAGDSVLVKFHSDDTITKKGFHLRYTSTKFQDTLHSRK

SEQ ID NO: 63 - protein, 108 aa, Homo Sapiens
NAKGNYCKRTPLYIDFKEIGWDSWIIAPPGYEAYECRGVCNYPLAEHLTPTKHAIIQALVHLKNSQKASKACCVPTKLEPISILYLDKGVVTYKFKYEGMAVSECGCR

SEQ ID NO: 64 - protein, 125 aa, Homo Sapiens
QADGISAEVTASSSKHSGPENNQCSLHPFQISFRQLGWDHWIIAPPFYTPNYCKGTCLRVLRDGLNSPNHAIIQNLINQLVDQSVPRPSCVPYKYVPISVLMIEANGSILYKEYEGMIAESCTCR

SEQ ID NO: 65 - protein, 114 aa, Homo Sapiens
QAKHKQRKRLKSSCKRHPLYVDFSDVGWNDWIVAPPGYHAFYCHGECPFPLADHLNSTNHAIVQTLVNSVNSKIPKACCVPTELSAISMLYLDENEKVVLKNYQDMVVEGCGCR

SEQ ID NO: 66 - protein, 110 aa, Homo Sapiens
QWIEPRNCARRYLKVDFADIGWSEWIISPKSFDAYYCSGACQFPMPKSLKPSNHATIQSIVRAVGVVPGIPEPCCVPEKMSSLSILFFDENKNVVLKVYPNMTVESCACR

SEQ ID NO: 67 - protein, 116 aa, Homo Sapiens
SPKHHSQRARKKNKNCRRHSLYVDFSDVGWNDWIVAPPGYQAFYCHGDCPFPLADHLNSTNHAIVQTLVNSVNSSIPKACCVPTELSAISMLYLDEYDKVVLKNYQEMVVEGCGCR

SEQ ID NO: 68 - protein, 138 aa, Homo Sapiens
AANKRKNQNRNKSSSHQDSSRMSSVGDYNTSEQKQACKKHELYVSFRDLGWQDWIIAPEGYAAFYCDGECSFPLNAHMNATNHAIVQTLVHLMFPDHVPKPCCAPTKLNAISVLYFDDSSNVILKKYRNMVVRSCGCH

SEQ ID NO: 69 - protein, 139 aa, Homo Sapiens
STGSKQRSQNRSKTPKNQEALRMANVAENSSSDQRQACKKHELYVSFRDLGWQDWIIAPEGYAAYYCEGECAFPLNSYMNATNHAIVQTLVHFINPETVPKPCCAPTQLNAISVLYFDDSSNVILKKYRNMVVRACGCH

SEQ ID NO: 70 - protein, 139 aa, Homo Sapiens
AVRPLRRRQPKKSNELPQANRLPGIFDDVRGSHGRQVCRRHELYVSFQDLGWLDWVIAPQGYSAYYCEGECSFPLDSCMNATNHAILQSLVHLMKPNAVPKACCAPTKLSATSVLYYDSSNNVILRKHRNMVVKACGCH

SEQ ID NO: 71 - protein, 61 aa, Homo Sapiens
AVRPLRRRQPKKSNELPQANRLPGIFDDVRGSHGRQVCRRHELYVSFQDLGWLVIADSPCF

SEQ ID NO: 72 - protein, 129 aa, Homo Sapiens
QNLDSMLHGTGMKSDSDQKKSENGVTLAPEDTLPFLKCYCSGHCPDDAINNTCITNGHCFAIIEEDDQGETTLASGCMKYEGSDFQCKDSPKAQLRRTIECCRTNLCNQYLQPTLPPVVIGPFFDGSIR

SEQ ID NO: 73 - protein, 113 aa, Homo Sapiens
KKEDGESTAPTPRPKVLRCKCHHHCPEDSVNNICSTDGYCFTMIEEDDSGLPVVTSGCLGLEGSDFQCRDTPIPHQRRSIECCTERNECNKDLHPTLPPLKNRDFVDGPIHHR

SEQ ID NO: 74 - protein, 124 aa, Homo Sapiens [sequence omitted]

SEQ ID NO: 75 - protein, 825 aa, Homo Sapiens
DLNEVPQVTVQPASTVQKPGGTVILGCVVEPPRMNVTWRLNGKELNGSDDALGVLITHGTLVITALNNHTVGRYQCVARMPAGAVASVPATVTLANLQDFKLDVQHVIEVDEGNTAVIACHLPESHPKAQVRYSVKQEWLEASRGNYLIMPSGNLQIVNASQEDEGMYKCAAYNPVTQEVKTSGSSDRLRVRRSTAEAARIIYPPEAQTIIVTKGQSLILECVASGIPPPRVTWAKDGSSVTGYNKTRFLLSNLLIDTTSEEDSGTYRCMADNGVGQPGAAVILYNVQVFEPPEVTMELSQLVIPWGQSAKLTCEVRGNPPPSVLWLRNAVPLISSQRLRLSRRALRVLSMGPEDEGVYQCMAENEVGSAHAVVQLRTSRPSITPRLWQDAELATGTPPVSPSKLGNPEQMLRGQPALPRPPTSVGPASPQCPGEKGQGAPAEAPIILSSPRTSKTDSYELVWRPRHEGSGRAPILYYVVKHRKVTNSSDDWTISGIPANQHRLTLTRLDPGSLYEVEMAAYNCAGEGQTAMVTFRTGRRPKPEIMASKEQQIQRDDPGASPQSSSQPDHGRLSPPEAPDRPTISTASETSVYVTWIPRGNGGFPIQSFRVEYKKLKKVGDWILATSAIPPSRLSVEITGLEKGTSYKFRVRALNMLGESEPSAPSRPYVVSGYSGRVYERPVAGPYITFTDAVNETTIMLKWMYIPASNNNTPIHGFYIYYRPTDSDNDSDYKKDMVEGDKYWHSISHLQPETSYDIKMQCFNEGGESEFSNVMICETKARKSSGQPGRLPPPTLAPPQPPLPETIERPVGTGAMVARSSDLPY

SEQ ID NO: 76 - protein, 186 aa, Homo Sapiens
AAGTVFTTVEDLGSKILLTCSLNDSATEVTGHRWLKGGVVLKEDALPGQKTEFKVDSDDQWGEYSCVFLPEPMGTANIQLHGPPRVKAVKSSEHINEGETAMLVCKSESVPPVTDWAWYKITDSEDKALMNGSESRFFVSSSQGRSELHIENLNMEADPGQYRCNGTSSKGSDQAIITLRVRSHLA

SEQ ID NO: 77 - protein, 115 aa, Homo Sapiens
CIFPVILNELSSTVETITHFPEVTDGECVFPFHYKNGTYYDCIKSKARHKWCSLNKTYEGYWKFCSAEDFANCVFPFWYRRLIYWECTDDGEAFGKKWCSLTKNFNKDRIWKYCE

SEQ ID NO: 78 - protein, 80 aa, Homo Sapiens
DGNSTRSPETNGLLCGDPEENCAATTTQSKRKGHFSRCPKQYKHYCIKGRCRFVVAEQTPSCVCDEGYIGARCERVDLFY

SEQ ID NO: 79 - protein, 104 aa, Homo Sapiens
KESCDVQLYIKRQSEHSILAGDPFELECPVKYCANRPHVTWCKLNGTTCVKLEDRQTSWKEEKNISFFILHFEPVLPNDNGSYRCSANFQSNLIESHSTTLYVT

SEQ ID NO: 80 - protein, 216 aa, Homo Sapiens
APFDVIGPPEPILAVVGEDAELPCRLSPNASAEHLELRWFRKKVSPAVLVHRDGREQEAEQMPEYRGRATLVQDGIAKGRVALRIRGVRVSDDGEYTCFFREDGSYEEALVHLKVAALGSDPHISMQVQENGEICLECTSVGWYPEPQVQWRTSKGEKFPSTSESRNPDEEGLFTVAASVIIRDTSAKNVSCYIQNLLLGQEKKVEISIPASSLPR

SEQ ID NO: 81 - protein, 220 aa, Homo Sapiens
QFIVVGPTDPILATVGENTTLRCHLSPEKNAEDMEVRWFRSQFSPAVFVYKGGRERTEEQMEEYRGRTTFVSKDISRGSVALVIHNITAQENGTYRCYFQEGRSYDEAILHLVVAGLGSKPLISMRGHEDGGIRLECISRGWYPKPLTVWRDPYGGVAPALKEVSMPDADGLFMVTTAVIIRDKSVRNMSCSINNTLLGQKKESVIFIPESFMPSVSPCA

SEQ ID NO: 82 - protein, 233 aa, Homo Sapiens
QFTVVGPANPILAMVGENTTLRCHLSPEKNAEDMEVRWFRSQFSPAVFVYKGGRERTEEQMEEYRGRITFVSKDINRGSVALVIHNVTAQENGIYRCYFQEGRSYDEAILRLVVAGLGSKPLIEIKAQEDGSIWLECISGGWYPEPLTVWRDPYGEVVPALKEVSIADADGLFMVTTAVIIRDKYVRNVSCSVNNTLLGQEKETVIFIPESFMPSASPWMVALAVILTASPWM

SEQ ID NO: 83 - protein, 112 aa, Homo Sapiens
QVTVVGPTDPILAMVGENTTLRCCLSPEENAEDMEVRWFQSQFSPAVFVYKGGRERTEEQKEEYRGRTTFVSKDSRGSVALIIHNVTAEDNGIYQCYFQEGRSCNEAILHLV

SEQ ID NO: 84 - protein, 225 aa, Homo Sapiens
QFSVLGPSGPILAMVGEDADLPCHLFPTMSAETMELKWVSSSLRQVVNVYADGKEVEDRQSAPYRGRTSILRDGITAGKAALRIHNVTASDSGKYLCYFQDGDFYEKALVELKVAALGSDLHVDVKGYKDGGIHLECRSTGWYPQPQIQWSNNKGENIPTVEAPVVADGVGLYAVAASVIMRGSSGEGVSCTIRSSLLGLEKTASISIADPFFRSAQRWIAALAG

SEQ ID NO: 85 - protein, 219 aa, Homo Sapiens
QFSVLGPSGPILAMVGEDADLPCHLFPTMSAETMELKWVSSSLRQVVNVYADGKEVEDRQSAPYRGRTSILRDGITAGKAALRIHNVTASDSGKYLCYFQDGDFYEKALVELKVAALGSNLHVEVKGYEDGGIHLECRSTGWYPQPQIQWSNAKGENIPAVEAPVVADGVGLYEVAASVIMRGGSGEGVSCIIRNSLLGLEKTASISIADPFFRSAQPW

SEQ ID NO: 86 - protein, 219 aa, Homo Sapiens
QFSVLGPSGPILAMVGEDADLPCHLFPTMSAETMELRWVSSSLRQVVNVYADGKEVEDRQSAPYRGRTSILRDGITAGKAALRIHNVTASDSGKYLCYFQDGDFYEKALVELKVAALGSDLHIEVKGYEDGGIHLECRSTGWYPQPQIKWSDTKGENIPAVEAPVVADGVGLYAVAASVIMRGSSGGGVSCIIRNSLLGLEKTASISIADPFFRSAQPW

SEQ ID NO: 87 - protein, 228 aa, Homo Sapiens
SIWKADFDVTGPHAPILAMAGGHVELQCQLFPNISAEDMELRWYRCQPSLAVHMHERGMDMDGEQKWQYRGRTTFMSDHVARGKAMVRSHRVTTFDNRTYCCRFKDGVKFGEATVQVQVAGLGREPRIQVTDQQDGVRAECTSAGCFPKSWVERRDFRGQARPAVTNLSASATTRLWAVASSLTLWDRAVEGLSCSISSPLLPERRKVAESHLPATFSRSSQFTAWKA

SEQ ID NO: 88 - protein, 220 aa, Homo Sapiens
PEKLQTELASLKVNGPSQPILVRVGEDIQLTCYLSPKANAQSMEVRWDRSHRYPAVHVYMDGDHVAGEQMAEYRGRTVLVSDAIDEGRLTLQILSARPSDDGQYRCLFEKDDVYQEASLDLKVVGLGSSPLITVEGQEDGEMQPMCSSDGWFPQPHVPWRDMEGKTIPSSSQALTQGSHGLFHVQTLLRVTNISAVDVTCSISIPFLGEEKIATFSLSGW

SEQ ID NO: 89 - protein, 220 aa, Homo Sapiens
QWQVTGPGKFVQALVGEDAVFSCSLFPETSAEAMEVRFFRNQFHAVVHLYRDGEDWESKQMPQYRGRTEFVKDSIAGGRVSLRLKNITPSDIGLYGCWFSSQIYDEEATWELRVAALGSLPLISIVGYVDGGIQLLCLSSGWFPQPTAKWKGPQGQDLSSDSRANADGYSLYDVEISIIVQENAGSILCSIHLAEQSHEVESKVLIGETFFQPSPWRLAS

SEQ ID NO: 90 - protein, 106 aa, Homo Sapiens
ALGSVPLISIAGYVDRDIQLLCQSSGWFPRPTAKWKGPQGQDLSTDSRTNRDMHGLFDVEISLTVQENAGSISCSMRHAHLSREVESRVQIGDTFFKPISWHLATK

SEQ ID NO: 91 - protein, 222 aa, Homo Sapiens
SSEVKVLGPEYPILALVGEEVEFPCHLWPQLDAQQMEIRWFRSQTFNVVHLYQEQQELPGRQMPAFRNRTKLVKDDIAYGSVVLQLHSIIPSDKGTYGCRFHSDNFSGEALWELEVAGLGSDPHLSLEGFKEGGIQLRLRSSGWYPKPKVQWRDHQGQCLPPEFEAIVWDAQDLFSLETSVVVRAGALSNVSVSIQNLLLSQKKELVVQIADVFVPGASAWK

SEQ ID NO: 92 - protein, 133 aa, Homo Sapiens
INITSSASQEGTRLNLICTVWHKKEEAEGFVVFLCKDRSGDCSPETSLKQLRLKRDPGIDGVGEISSQLMFTISQVTPLHSGTYQCCARSQKSGIRLQGHFFSILFTETGNYTVTGLKQRQHLEFSHNEGTLS

SEQ ID NO: 93 - protein, 162 aa, Homo Sapiens
FKVATPYSLYVCPEGQNVTLTCRLLGPVDKGHDVTFYKTWYRSSRGEVQTCSERRPIRNLTFQDLHLHHGGHQAANTSHDLAQRHGLESASDHHGNFSITMRNLTLLDSGLYCCLVVEIRHHHSEHRVHGAMELQVQTGKDAPSNCVVYPSSSQESENITAA

SEQ ID NO: 94 - protein, 325 aa, Homo Sapiens
ALLRRQTSGPLYLAVWDKADDSGGRMTTACSPHNPQCTADLGAQYITCTPHYAKKHQRFYDELLAYGVLRPLSSPIEGMVMKEGDCNFVAPQGISSIIKHYLKESGAEVYFRHRVTQINLRDDKWEVSKQTGSPEQFDLIVLTMPVPEILQLQGDITTLISECQRQQLEAVSYSSRYALGLFYEAGTKIDVPWAGQYITSNPCIRFVSIDNKKRNIESSEIGPSLVIHTTVPFGVTYLEHSIEDVQELVFQQLENILPGLPQPIATKCQKWRHSQVTNAAANCPGQMTLHHKPFLACGGDGFTQSNFDGCITSALCVLEALKNYI

SEQ ID NO: 95 - protein, 245 aa, Homo Sapiens
REEEITPVVSIAYKVLEVFPKGRWVLITCCAPQPPPPITYSLCGTKNIKVAKKVVKTHEPASFNLNVTLKSSPDLLTYFCWASSTSGAHVDSARLQMHWELWSKPVSELRANFTLQDRGAGPRVEMICQASSGSPPITNSLIGKDGQVHLQQRPCHRQPANFSFLPSQTSDWFWCQAANNANVQHSALTVVPPGGDQKMEDWQGPLESPILALPLYRSTRRLSEEEFGGFRIGNGEVRGRKAAAM

SEQ ID NO: 96 - protein, 142 aa, Homo Sapiens
VSEPTTVAFDVRPGGVVHSFSHNVGPGDKYTCMFTYASQGGTNEQWQMSLGTSEDHQHFTCTIWRPQGKSYLYFTQFKAEVRGAEIEYAMAYSKAAFERESDVPLKTEEFEVTKTAVAHRPGAFKAELSKLVIVAKASRTEL

SEQ ID NO: 97 - protein, 162 aa, Homo Sapiens
AAPTPPGWEPTPDAPWCPYKVLPEGPEAGGGRLCFRSPARGFRCQAPGCVLHAPAGRSLRASVLRNRSVLLQWRLAPAAARRVRAFALNCSWRGAYTRFPCERVLLGASCRDYLLPDVHDSVLYRLCLQPLPLRAGPAAAAPETPEPAECVEFTAEPAGMQD

SEQ ID NO: 98 - protein, 166 aa, Homo Sapiens
LQVTVPDKKKVAMLFQPTVLRCHFSTSSHQPAVVQWKFKSYCQDRMGESLGMSSTRAQSLSKRNLEWDPYLDCLDSRRTVRVVASKQGSTVTLGDFYRGREITIVHDADLQIGKLMWGDSGLYYCIITTPDDLEGKNEDSVELLVLGRTGLLADLLPSFAVEIMPE

SEQ ID NO: 99 - protein, 242 aa, Homo Sapiens
GPEGHYEMLGTCRMVCDPYPARGPGAGARTDGGDALSEQSGAPPPSTLVQGPQGKPGRTGKPGPPGPPGDPGPPGPVGPPGEKGEPGKPGPPGLPGAGGSGAISTATYTTVPRVAFYAGLKNPHEGYEVLKFDDVVTNLGNNYDAASGKFTCNIPGTYFFTYHVLMRGGDGTSMWADLCKNGQVRASAIAQDADQNYDYASNSVILHLDAGDEVFIKLDGGKAHGGNSNKYSTFSGFIIYSD

SEQ ID NO: 100 - protein, 266 aa, Homo Sapiens
HYEMMGTCRMICDPYTAAPGGEPPGAKAQPPGPSTAALEVMQDLSANPPPPFIQGPKGDPGRPGKPGPRGPPGEPGPPGPRGPPGEKGDSGRPGLPGLQLTAGTASGVGVVGGGAGVGGDSEGEVTSALSATFSGPKIAFYVGLKSPHEGYEVLKFDDVVTNLGNHYDPTTGKFSCQVRGIYFFTYHILMRGGDGTSMWADLCKNGQVRASAIAQDADQNYDYASNSVVLHLDSGDEVYVKLDGGKAHGGNNNKYSTFSGFLLYPD

SEQ ID NO: 101 - protein, 557 aa, Homo Sapiens
ADTEAVVCVGTACYTAHSGKLSAAEAQNHCNQNGGNLATVKSKEEAQHVQRVLAQLLRREAALTARMSKFWIGLQREKGKCLDPSLPLKGFSWVGGGEDTPYSNWHKELRNSCISKRCVSLLLDLSQPLLPSRLPKWSEGPCGSPGSPGSNIEGFVCKFSFKGMCRPLALGGPGQVTYTTPFQTTSSSLEAVPFASAANVACGEGDKDETQSHYFLCKEKAPDVFDWGSSGPLCVSPKYGCNFNNGGCHQDCFEGGDGSFLCGCRPGFRLLDDLVTCASRNPCSSSPCRGGATCVLGPHGKNYTCRCPQGYQLDSSQLDCVDVDECQDSPCAQECVNTPGGFRCECWVGYEPGGPGEGACQDVDECALGRSPCAQGCTNTDGSFHCSCEEGYVLAGEDGTQCQDVDECVGPGGPLCDSLCFNTQGSFHCGCLPGWVLAPNGVSCTMGPVSLGPPSGPPDEEDKGEKEGSTVPRAATASPTRGPEGTPKATPTTSRPSLSSDAPITSAPLKMLAPSGSPGVWREPSIHHATAASGPQEPAGGDSSVATQNNDGTDGQK

SEQ ID NO: 102 - protein, 270 aa, Homo Sapiens
DPLLGAFARRDFRKGSPQLVCSLPGPQGPPGPPGAPGPSGMMGRMGFPGKDGQDGHDGDRGDSGEEGPPGRTGNRGKPGPKGKAGAIGRAGPRGPKGVNGTPGKHGTPGKKGPKGKKGEPGLPGPCSCGSGHTKSAFSVAVTKSYPRERLPIKFDKILMNEGGHYNASSGKFVCGVPGIYYFTYDITLANKHLAIGLVHNGQYRIRTFDANTGNHDVASGSTILALKQGDEVWLQIFYSEQNGLFYDPYWTDSLFTGFLIYADQDDPNEV

SEQ ID NO: 103 - protein, 313 aa, Homo Sapiens
LGPTPGPGSSELRSAFSAARTTPLEGTSEMAVTFDKVYVNIGGDFDVATGQFRCRVPGAYFFSFTAGKAPHKSLSVMLVRNRDEVQALAFDEQRRPGARRAASQSAMLQLDYGDTVWLRLHGAPQYALGAPGATFSGYLVYADADADAPARGPPAPPEPRSAFSAARTRSLVGSDAGPGPRHQPLAFDTEFVNIGGDFDAAAGVFRCRLPGAYFFSFTLGKLPRKTLSVKLMKNRDEVQAMIYDDGASRRREMQSQSVMLALRRGDAVWLLSHDHDGYGAYSNHGKYITFSGFLVYPDLAPAAPPGLGASELL

SEQ ID NO: 104 - protein, 228 aa, Homo Sapiens
SPPLDDNKIPSLCPGHPGLPGTPGHHGSRGLPGRDGRDGRDGAPGAPGEKGEGGRPGLPGPRGDPGPRGEAGPAGPTGPAGECSVPPRSAFSAKRSESRVPPPSDAPLPFDRVLVNEQGHYDAVTGKFTCQVPGVYYFAVHATVYRASLQFDLVKNGESIASFFQFFGGWPKPASLSGGAMVRLEPEDQVWVQVGVGDYIGIYASIKTDSTFSGFLVYSDWHSSPVFA

SEQ ID NO: 105 - protein, 688 aa, Homo Sapiens
SIPIPQKLFGEVTSPLFPKPYPNNFETTTVITVPTGYRVKLVFQQFDLEPSEGCFYDYVKISADKKSLGRFCGQLGSPLGNPPGKKEFMSQGNKMLLTFHTDFSNEENGTIMFYKGFLAYYQAVDLDECASRSKLGEEDPQPQCQHLCHNYVGGYFCSCRPGYELQEDRHSCQAECSSELYTEASGYISSLEYPRSYPPDLRCNYSIRVERGLTLHLKFLEPFDIDDHQQVHCPYDQLQIYANGKNIGEFCGKQRPPDLDTSSNAVDLLFFTDESGDSRGWKLRYTTEIIKCPQPKTLDEFTIIQNLQPQYQFRDYFIATCKQGYQLIEGNQVLHSFTAVCQDDGTWHRAMPRCKIKDCGQPRNLPNGDFRYTTTMGVNTYKARIQYYCHEPYYKMQTRAGSRESEQGVYTCTAQGIWKNEQKGEKIPRCLPVCGKPVNPVEQRQRIIGGQKAKMGNFPWQVFTNIHGRGGGALLGDRWILTAAHTLYPKEHEAQSNASLDVFLGHTNVEELMKLGNHPIRRVSVHPDYRQDESYNFEGDIALLELENSVTLGPNLLPICLPDNDTFYDLGLMGYVSGFGVMEEKIAHDLRFVRLPVANPQACENWLRGKNRMDVFSQNMFCAGHPSLKQDACQGDSGGVFAVRDPNTDRWVATGIVSWGIGCSRGYGFYTKVLNYVDWIKKEMEEED

SEQ ID NO: 106 - protein, 673 aa, Homo Sapiens
EPTMYGEILSPNYPQAYPSEVEKSWDIEVPEGYGIHLYFTHLDIELSENCAYDSVQIISGDTEEGRLCGQRSSNNPHSPIVEEFQVPYNKLQVIFKSDFSNEERFTGFAAYYVATDINECTDFVDVPCSHFCNNFIGGYFCSCPPEYFLHDDMKNCGVNCSGDVFTALIGEIASPNYPKPYPENSRCEYQIRLEKGFQVVVTLRREDFDVEAADSAGNCLDSLVFVAGDRQFGPYCGHGFPGPLNIETKSNALDIIFQTDLTGQKKGWKLRYHGDPMPCPKEDTPNSVWEPAKAKYVFRDVVQITCLDGFEVVEGRVGATSFYSTCQSNGKWSNSKLKCQPVDCGIPESIENGKVEDPESTLFGSVIRYTCEEPYYYMENGGGGEYHCAGNGSWVNEVLGPELPKCVPVCGVPREPFEEKQRIIGGSDADIKNFPWQVFFDNPWAGGALINEYWVLTAAHVVEGNREPTMYVGSTSVQTSRLAKSKMLTPEHVFIHPGWKLLEVPEGRTNFDNDIALVRLKDPVKMGPTVSPICLPGTSSDYNLMDGDLGLISGWGRTEKRDRAVRLKAARLPVAPLRKCKEVKVEKPTADAEAYVFTPNMICAGGEKGMDSCKGDSGGAFAVQDPNDKTKFYAAGLVSWGPQCGTYGLYTRVKNYVDWIMKTMQENSTPRED

SEQ ID NO: 107 - protein, 77 aa, Homo Sapiens
SVQLTEKRMDKVGKYPKELRKCCEDGMRENPMRFSCQRRTRFISLGEACKKVFLDCCNYITELRRQHARASHLGLAR

SEQ ID NO: 108 - protein, 77 aa, Homo Sapiens
NVNFQKAINEKLGQYASPTAKRCCQDGVTRLPMMRSCEQRAARVQQPDCWEPFLSCCQFAESLRKKSRDKGQAGLQR

SEQ ID NO: 109 - protein, 74 aa, Homo Sapiens
TLQKKIEEIAAKYKHSVVKKCCYDGACVNNDETCEQRAARISLGPRCIKAFTECCVVASQLRANISHKDMQLGR

SEQ ID NO: 110 - protein, 913 aa, Homo Sapiens
CFCDHYAWTQWTSCSKTCNSGTQSRHRQIVVDKYYQENFCEQICSKQETRECNWQRCPINCLLGDFGPWSDCDPCIEKQSKVRSVLRPSQFGGQPCTEPLVAFQPCIPSKLCKIEEADCKNKFRCDSGRCIARKLECNGENDCGDNSDERDCGRTKAVCTRKYNPIPSVQLMGNGFHFLAGEPRGEVLDNSFTGGICKTVKSSRTSNPYRVPANLENVGFEVQTAEDDLKTDFYKDLTSLGHNENQQGSFSSQGGSSFSVPIFYSSKRSENINHNSAFKQAIQASHKKDSSFIRIHKVMKVLNFTTKAKDLHLSDVFLKALNHLPLEYNSALYSRIFDDFGTHYFTSGSLGGVYDLLYQFSSEELKNSGLTEEEAKHCVRIETKKRVLFAKKTKVEHRCTTNKLSEKHEGSFIQGAEKSISLIRGGRSEYGAALAWEKGSSGLEEKTFSEWLESVKENPAVIDFELAPIVDLVRNIPCAVTKRNNLRKALQEYAAKFDPCQCAPCPNNGRPTLSGTECLCVCQSGTYGENCEKQSPDYKSNAVDGQWGCWSSWSTCDATYKRSRTRECNNPAPQRGGKRCEGEKRQEEDCTFSIMENNGQPCINDDEEMKEVDLPEIEADSGCPQPVPPENGFIRNEKQLYLVGEDVEISCLTGFETVGYQYFRCLPDGTWRQGDVECQRTECIKPVVQEVLTITPFQRLYRIGESIELTCPKGFVVAGPSRYTCQGNSWTPPISNSLTCEKDTLTKLKGHCQLGQKQSGSECICMSPEEDCSHHSEDLCVFDTDSNDYFTSPACKFLAEKCLNNQQLHFLHIGSCQDGRQLEWGLERTRLSSNSTKKESCGYDTCYDWEKCSASTSKCVCLLPPQCFKGGNQLYCVKMGSSTSEKTLNICEVGTIRCANRKMEILHPGKCLA

SEQ ID NO: 111 - protein, 125 aa, Homo Sapiens
NPGASLDGRPGDRVNLSCGGVSHPIRWVWAPSFPACKGLSKGRRPILWASSSGTPTVPPLQPFVGRLRSLDSGIRRLELLLSAGDSGTFFCKGRHEDESRTVLHVLGDRTYCKAPGPTHGSVYPQ

SEQ ID NO: 112 - protein, 821 aa, Homo Sapiens
SSPVNCQWDFYAPWSECNGCTKTQTRRRSVAVYGQYGGQPCVGNAFETQSCEPTRGCPTEEGCGERFRCFSGQCISKSLVCNGDSDCDEDSADEDRCEDSERRPSCDIDKPPPNIELTGNGYNELTGQFRNRVINTKSFGGQCRKVFSGDGKDFYRLSGNVLSYTFQVKINNDFNYEFYNSTWSYVKHTSTEHTSSSRKRSFFRSSSSSSRSYTSHTNEIHKGKSYQLLVVENTVEVAQFINNNPEFLQLAEPFWKELSHLPSLYDYSAYRRLIDQYGTHYLQSGSLGGEYRVLFYVDSEKLKQNDFNSVEEKKCKSSGWHFVVKFSSHGCKELENALKAASGTQNNVLRGEPFIRGGGAGFISGLSYLELDNPAGNKRRYSAWAESVTNLPQVIKQKLTPLYELVKEVPCASVKKLYLKWALEEYLDEFDPCHCRPCQNGGLATVEGTHCLCHCKPYTFGAACEQGVLVGNQAGGVDGGWSCWSSWSPCVQGKKTRSRECNNPPPSGGGRSCVGETTESTQCEDEELEHLRLLEPHCFPLSLVPTEFCPSPPALKDGFVQDEGTMFPVGKNVVYTCNEGYSLIGNPVARCGEDLRWLVGEMHCQKIACVLPVLMDGIQSHPQKPFYTVGEKVTVSCSGGMSLEGPSAFLCGSSLKWSPEMKNARCVQKENPLTQAVPKCQRWEKLQNSRCVCKMPYECGPSLDVCAQDERSKRILPLTVCKMHVLHCQGRNYTLTGRDSCTLPASAEKACGACPLWGKCDAESSKCVCREASECEEEGFSICVEVNGKEQTMSECEAGALRCRGQSISVTSIRPCAAETQ

SEQ ID NO: 113 - protein, 554 aa, Homo Sapiens
AATPAAVTCQLSNWSEWTDCFPCQDKKYRHRSLLQPNKFGGTICSGDIWDQASCSSSTTCVRKAQCGQDFQCKETGRCLKRHLVCNGDQDCLDGSDEDDCEDVRAIDEDCSQYEPIPGSQKAALGYNILTQEDAQSVYDASYYGGQCETVYNGEWRELRYDSTCERLYYGDDEKYFRKPYNFLKYHFEALADTGISSEFYDNANDLLSKVKKDKSDSFGVTIGIGPAGSPLLVGVGVSHSQDTSFLNELNKYNEKKFIFTRIFTKVQTAHFKMRKDDIMLDEGMLQSLMELPDQYNYGMYAKFINDYGTHYITSGSMGGIYEYILVIDKAKMESLGITSRDITTCFGGSLGIQYEDKINVGGGLSGDHCKKFGGGKTERARKAMAVEDIISRVRGGSSGWSGGLAQNRSTITYRSWGRSLKYNPVVIDFEMQPIHEVLRHTSLGPLEAKRQNLRRALDQYLMEFNACRCGPCFNNGVPILEGTSCRCQCRLGSLGAACEQTQTEGAKADGSWSCWSSWSVCRAGIQERRRECDNPAPQNGGASCPGRKVQTQAC

SEQ ID NO: 114 - protein, 537 aa, Homo Sapiens
SVDVTLMPIDCELSSWSSWTTCDPCQKKRYRYAYLLQPSQFHGEPCNFSDKEVEDCVTNRPCRSQVRCEGFVCAQTGRCVNRRLLCNGDNDCGDQSDEANCRRIYKKCQHEMDQYWGIGSLASGINLFTNSFEGPVLDHRYYAGGCSPHYILNTRFRKPYNVESYTPQTQGKYEFILKEYESYSDFERNVTEKMASKSGFSFGFKIPGIFELGISSQSDRGKHYIRRTKRFSHTKSVFLHARSDLEVAHYKLKPRSLMLHYEFLQRVKRLPLEYSYGEYRDLFRDFGTHYITEAVLGGIYEYTLVMNKEAMERGDYTLNNVHACAKNDFKIGGAIEEVYVSLGVSVGKCRGILNEIKDRNKRDTMVEDLVVLVRGGASEHITTLAYQELPTADLMQEWGDAVQYNPAIIKVKVEPLYELVTATDFAYSSTVRQNMKQALEEFQKEVSSCHCAPCQGNGVPVLKGSRCDCICPVGSQGLACEVSYRKNTPIDGKWNCWSNWSSCSGRRKTRQRQCNNPPPQNGGSPCSGPASETLDCS

SEQ ID NO: 115 - protein, 244 aa, Homo Sapiens
QYTTSYDPELTESSGSASHIDCRMSPWSEWSQCDPCLRQMFRSRSIEVFGQFNGKRCTDAVGDRRQCVPTEPCEDAEDDCGNDFQCSTGRCIKMRLRCNGDNDCGDFSDEDDCESEPRPPCRDRVVEESELARTAGYGINILGMDPLSTPFDNEFYNGLCNRDRDGNTLTYYRRPWNVASLIYETKGEKNFRTEHYEEQIEAFKSIIQEKTSNFNAAISLKFTPTETNKAEQCCEETASSISLH

SEQ ID NO: 116 - protein, 302 aa, Homo Sapiens
QNLFTKDVTVIEGEVATISCQVNKSDDSVIQLLNPNRQTIYFRDFRPLKDSRFQLLNFSSSELKVSLTNVSISDEGRYFCQLYTDPPQESYTTITVLVPPRNLMIDIQKDTAVEGEEIEVNCTAMASKPATTIRWFKGNTELKGKSEVEEWSDMYTVTSQLMLKVHKEDDGVPVICQVEHPAVTGNLQTQRYLEVQYKPQVHIQMTYPLQGLTREGDALELTCEAIGKPQPVMVTWVRVDDEMPQHAVLSGPNLFINNLNKTDNGTYRCEASNIVGKAHSDYMLYVYDSRAGEEGSIRAVDH

SEQ ID NO: 117 - protein, 219 aa, Homo Sapiens
MPVKTSKAYLTVLGVPEKPQISGFSSPVMEGDLMQLTCKTSGSKPAADIRWFKNDKEIKDVKYLKEEDANRKTFTVSSTLDFRVDRSDDGVAVICRVDHESLNATPQVAMQVLEIHYTPSVKIIPSTPFPQEGQPLILTCESKGKPLPEPVLWTKDGGELPDPDRMVVSGRELNILFLNKTDNGTYRCEATNTIGQSSAEYVLIVHDPNALAGQNGPDH

SEQ ID NO: 118 - protein, 215 aa, Homo Sapiens
MVKAGTCCATCKEFYQMKQTVLQLKQKIALLPNNAADLGKYITGDKVLASNTYLPGPPGLPGGQGPPGSPGPKGSPGFPGMPGPPGQPGPRGSMGPMGPSPDLSHIKQGRRGPVGPPGAPGRDGSKGERGAPGPRGSPGPPGSFDFLLLMLADIRNDITELQEKVFGHRTHSSAEEFPLPQEFPSYPEAMDLGSGDDHPRRTETRDLRAPRDFYP

SEQ ID NO: 119 - protein, 73 aa, Homo Sapiens
KSMQVPFSRCCFSFAEQEIPLRAILCYRNTSSICSNEGLIFKLKRGKEACALDTVGWVQRHRKMLRHCPSKRK

SEQ ID NO: 120 - protein, 74 aa, Homo Sapiens
GPASVPTTCCFNLANRKIPLQRLESYRRITSGKCPQKAVIFKTKLAKDICADPKKKWVQDSMKYLDQKSPTPKP

SEQ ID NO: 121 - protein, 82 aa, Homo Sapiens
FNPQGLAQPDALNVPSTCCFTFSSKKISLQRLKSYVITTSRCPQKAVIFRTKLGKEICADPKEKWVQNYMKHLGRKAHTLKT

SEQ ID NO: 122 - protein, 66 aa, Homo Sapiens
GPYHPSECCFTYTTYKIPRQRIMDYYETNSQCSKPGIVFITKRGHSVCTNPSDKWVQDYIKDMKEN

SEQ ID NO: 123 - protein, 92 aa, Homo Sapiens
QFTNDAETELMMSKLPLENPVVLNSFHFAADCCTSYISQSIPCSLMKSYFETSSECSKPGVIFLTKKGRQVCAKPSGPGVQDCMKKLKPYSI

SEQ ID NO: 124 - protein, 97 aa, Homo Sapiens
QPKVPEWVNTPSTCCLKYYEKVLPRRLVVGYRKALNCHLPAIIFVTKRNREVCTNPNDDWVQEYIKDPNLPLLPTRNLSTVKIITAKNGQPQLLNSQ

SEQ ID NO: 125 - protein, 71 aa, Homo Sapiens
ARGTNVGRECCLEYFKGAIPLRKLKTWYQTSEDCSRDAIVFVTVQGRAICSDPNNKRVKNAVKYLQSLERS

SEQ ID NO: 126 - protein, 69 aa, Homo Sapiens
AQVGTNKELCCLVYTSWQIPQKFIVDYSETSPQCPKPGVILLTKRGRQICADPNKKWVQKYISDLKLNA

SEQ ID NO: 127 - protein, 77 aa, Homo Sapiens
GTNDAEDCCLSVTQKPIPGYIVRNFHYLLIKDGCRVPAVVFTTLRGRQLCAPPDQPWVERIIQRLQRTSAKMKRRSS

SEQ ID NO: 128 - protein, 76 aa, Homo Sapiens
QPDAINAPVTCCYNFTNRKISVQRLASYRRITSSKCPKEAVIFKTIVAKEICADPKQKWVQDSMDHLDKQTQTPKT

SEQ ID NO: 129 - protein, 70 aa, Homo Sapiens
ASNFDCCLGYTDRILHPKFIVGFTRQLANEGCDINAIIFHTKKKLSVCANPKQTWVKYIVRLLSKKVKNM

SEQ ID NO: 130 - protein, 111 aa, Homo Sapiens
SDGGAQDCCLKYSQRKIPAKVVRSYRKQEPSLGCSIPAILFLPRKRSQAELCADPKELWVQQLMQHLDKTPSPQKPAQGCRKDRGASKTGKKGKGSKGCKRTERSQTPKGP

SEQ ID NO: 131 - protein, 69 aa, Homo Sapiens
GPYGANMEDSVCCRDYVRYRLPLRVVKHFYWTSDSCPRPGVVLLTFRDKEICADPRVPWVKMILNKLSQ

SEQ ID NO: 132 - protein, 81 aa, Homo Sapiens
NPVLLDRFHATSADCCISYTPRSIPCSLLESYFETNSECSKPGVIFLTKKGRRFCANPSDKQVQVCMRMLKLDTRIKTRKN

SEQ ID NO: 133 - protein, 93 aa, Homo Sapiens
VVIPSPCCMFFVSKRIPENRVVSYQLSSRSICLKAGVIFTTKKGQQFCGDPKQEWVQRYMKNLDAKQKKASPRARAVAVKGPVQRYPGNQTTC

SEQ ID NO: 134 - protein, 127 aa, Homo Sapiens
QGVFEDCCLAYHYPIGWAVLRRAWTYRIQEVSGSCNLPAAIFYLPKRHRKVCGNPKSREVQRAMKLLDARNKVFAKLHHNTQTFQAGPHAVKKLSSGNSKLSSSKFSNPISSSKRNVSLLISANSGL

SEQ ID NO: 135 - protein, 71 aa, Homo Sapiens
TRGSDISKTCCFQYSHKPLPWTWVRSYEFTSNSCSQRAVIFTTKRGKKVCTHPRKKWVQKYISLLKTPKQL

SEQ ID NO: 136 - protein, 88 aa, Homo Sapiens
FLLPPSTACCTQLYRKPLSDKLLRKVIQVELQEADGDCHLQAFVLHLAQRSICIHPQNPSLSQWFEHQERKLHGTLPKLNFGMLRKMG

SEQ ID NO: 137 - protein, 108 aa, Homo Sapiens
SEAILPIASSCCTEVSHHISRRLLERVNMCRIQRADGDCDLAAVILHVKRRRICVSPHNHTVKQWMKVQAAKKNGKGNVCHRKKHHGKRNSNRAHQGKHETYGHKTPY

SEQ ID NO: 138 - protein, 69 aa, Homo Sapiens
SLAADTPTACCFSYTSRQIPQNFIADYFETSSQCSKPGVIFLTKRSRQVCADPSEEWVQKYVSDLELSA

SEQ ID NO: 139 - protein, 68 aa, Homo Sapiens
LAADTPTACCFSYTSRQIPQNFIADYFETSSQCSKPSVIFLTKRGRQVCADPSEEWVQKYVSDLEPSA

SEQ ID NO: 140 - protein, 69 aa, Homo Sapiens
APMGSDPPTACCFSYTARKLPRNFVVDYYETSSLCSQPAVVFQTKRSKQVCADPSESWVQEYVYDLELN

SEQ ID NO: 141 - protein, 69 aa, Homo Sapiens
APMGSDPPTACCFSYTARKLPHNFVVDYYETSSLCSQPAVVFQTKRGKQVCADPSESWVQEYVYDLELN

SEQ ID NO: 142 - protein, 68 aa, Homo Sapiens
SPYSSDTTPCCFAYIARPLPRAHIKEYFYTSGKCSNPAVVFVTRKNRQVCANPEKKWVREYINSLEMS

SEQ ID NO: 143 - protein, 76 aa, Homo Sapiens
QPVGINTSTTCCYRFINKKIPKQRLESYRRTTSSHCPREAVIFKTKLDKEICADPTQKWVQDFMKHLDKKTQTPKL

SEQ ID NO: 144 - protein, 76 aa, Homo Sapiens
QPDSVSIPITCCFNVINRKIPIQRLESYTRITNIQCPKEAVIFKTQRGKEVCADPKERWVRDSMKHLDQIFQNLKP

SEQ ID NO: 145 - protein, 326 aa, Homo Sapiens
TTPEPCELDDEDFRCVCNFSEPQPDWSEAFQCVSAVEVEIHAGGLNLEPFLKRVDADADPRQYADTVKALRVRRLTVGAAQVPAQLLVGALRVLAYSRLKELTLEDLKITGTMPPLPLEATGLALSSLRLRNVSWATGRSWLAELQQWLKPGLKVLSIAQAHSPAFSCEQVRAFPALTSLDLSDNPGLGERGLMAALCPHKFPAIQNLALRNTGMETPTGVCAALAAAGVQPHSLDLSHNSLRATVNPSAPRCMWSSALNSLNLSFAGLEQVPKGLPAKLRVLDLSCNRLNRAPQPDELPEVDNLTLDGNPFLVPGTALPHEGSMN

SEQ ID NO: 146 - protein, 109 aa, Homo Sapiens
AYYQQLNTELKENLKDTMTKRYHQPGHEAVTSAVDQLQQEFHCCGSNNSQDWRDSEWIRSQEAGGRVVPDSCCKTVVALCGQRDHASNIYKVEGGCITKLETFIQEHLR

SEQ ID NO: 147 - protein, 1009 aa, Homo Sapiens
SSLGGTDKELRLVDGENKCSGRVEVKVQEEWGTVCNNGWSMEAVSVICNQLGCPTAIKAPGWANSSAGSGRIWMDHVSCRGNESALWDCKHDGWGKHSNCTHQQDAGVTCSDGSNLEMRLTRGGNMCSGRIEIKFQGRWGTVCDDNFNIDHASVICRQLECGSAVSFSGSSNFGEGSGPIWFDDLICNGNESALWNCKHQGWGKHNCDHAEDAGVICSKGADLSLRLVDGVTECSGRLEVRFQGEWGTICDDGWDSYDAAVACKQLGCPTAVTAIGRVNASKGFGHIWLDSVSCQGHEPAVWQCKHHEWGKHYCNHNEDAGVTCSDGSDLELRLRGGGSRCAGTVEVEIQRLLGKVCDRGWGLKEADVVCRQLGCGSALKTSYQVYSKIQATNTWLFLSSCNGNETSLWDCKNWQWGGLTCDHYEEAKITCSAHREPRLVGGDIPCSGRVEVKHGDTWGSICDSDFSLEAASVLCRELQCGTVVSILGGAHFGEGNGQIWAEEFQCEGHESHLSLCPVAPRPEGTCSHSRDVGVVCSRYTEIRLVNGKTPCEGRVELKTLGAWGSLCNSHWDIEDAHVLCQQLKCGVALSTPGGARFGKGNGQIWRHMFHCTGTEQHMGDCPVTALGASLCPSEQVASVICSGNQSQTLSSCNSSSLGPTRPTIPEESAVACIESGQLRLVNGGGRCAGRVEIYHEGSWGTICDDSWDLSDAHVVCRQLGCGEAINATGSAHFGEGTGPIWLDEMKCNGKESRIWQCHSHGWGQQNCRHKEDAGVICSEFMSLRLTSEASREACAGRLEVFYNGAWGTVGKSSMSETTVGVVCRQLGCADKGKINPASLDKAMSIPMWVDNVQCPKGPDTLWQCPSSPWEKRLASPSEETWITCDNKIRLQEGPTSCSGRVEIWHGGSWGTVCDDSWDLDDAQVVCQQLGCGPALKAFKEAEFGQGTGPIWLNEVKCKGNESSLWDCPARRWGHSECGHKEDAAVNCTDISVQKTPQKATTGRSSRQSS

SEQ ID NO: 148 - protein, 1319 aa, Homo Sapiens
FNGTDLELRLVNGDGPCSGTVEVKFQGQWGTVCDDGWNTTASTVVCKQLGCPFSFAMFRFGQAVTRHGKIWLDDVSCYGNESALWECQHREWGSHNCYHGEDVGVNCYGEANLGLRLVDGNNSCSGRVEVKFQERWGTICDDGWNLNTAAVVCRQLGCPSSFISSGVVNSPAVLRPIWLDDILCQGNELALWNCRHRGWGNHDCSHNEDVTLTCYDSSDLELRLVGGTNRCMGRVELKIQGRWGTVCHHKWNNAAADVVCKQLGCGTALHFAGLPHLQSGSDVVWLDGVSCSGNESFLWDCRHSGTVNFDCLHQNDVSVICSDGADLELRLADGSNNCSGRVEVRIHEQWWTICDQNWKNEQALVVCKQLGCPFSVFGSRRAKPSNEARDIWINSISCTGNESALWDCTYDGKAKRTCFRRSDAGVICSDKADLDLRLVGAHSPCYGRLEVKYQGEWGTVCHDRWSTRNAAVVCKQLGCGKPMHVFGMTYFKEASGPIWLDDVSCIGNESNIWDCEHSGWGKHNCVHREDVIVTCSGDATWGLRLVGGSNRCSGRLEVYFQGRWGTVCDDGWNSKAAAVVCSQLDCPSSIIGMGLGNASTGYGKIWLDDVSCDGDESDLWSCRNSGWGNNDCSHSEDVGVICSDASDMELRLVGGSSRCAGKVEVNVQGAVGILCANGWGMNIAEVVCRQLECGSAIRVSREPHFTERTLHILMSNSGCTGGEASLWDCIRWEWKQTACHLNMEASLICSAHRQPRLVGADMPCSGRVEVKHADTWRSVCDSDFSLHAANVLCRELNCGDAISLSVGDHFGKGNGLTWAEKFQCEGSETHLALCPIVQHPEDTCIHSREVGVVCSRYTDVRLVNGKSQCDGQVEINVLGHWGSLCDTHWDPEDARVLCRQLSCGTALSTTGGKYIGERSVRVWGHRFHCLGNESLLDNCQMTVLGAPPCIHGNTVSVICTGSLTQPLFPCLANVSDPYLSAVPEGSALICLEDKRLRLVDGDSRCAGRVEIYHDGFWGTICDDGWDLSDAHVVCQKLGCGVAFNATVSAHFGEGSGPIWLDDLNCTGMESHLWQCPSRGWGQHDCRHKEDAGVICSEFTALRLYSETETESCAGRLEVFYNGTWGSVGRRNITTAIAGIVCRQLGCGENGVVSLAPLSKTGSGFMWVDDIQCPKTHISIWQCLSAPWERRISSPAEETWITCEDRIRVRGGDTECSGRVEIWHAGSWGTVCDDSWDLAEAEVVCQQLGCGSALAALRDASFGQGTGTIWLDDMRCKGNESFLWDCHAKPWGQSDCGHKEDAGVRCSGQSLKSLNASSGH

SEQ ID NO: 149 - protein, 603 aa, Homo Sapiens
WDQMCIEKEANKTYNCENLGLSEIPDTLPNTTEFLEFSFNFLPTIHNRTFSRLMNLTFLDLTRCQINWIHEDTFQSHHQLSTLVLTGNPLIFMAETSLNGPKSLKHLFLIQTGISNLEFIPVHNLENLESLYLGSNHISSIKFPKDFPARNLKVLDFQNNAIHYISREDMRSLEQAINLSLNFNGNNVKGIELGAFDSTVFQSLNFGGTPNLSVIFNGLQNSTTQSLWLGTFEDIDDEDISSAMLKGLCEMSVESLNLQEHRFSDISSTTFQCFTQLQELDLTATHLKGLPSGMKGLNLLKKLVLSVNHFDQLCQISAANFPSLTHLYIRGNVKKLHLGVGCLEKLGNLQTLDLSHNDIEASDCCSLQLKNLSHLQTLNLSHNEPLGLQSQAFKECPQLELLDLAFTRLHINAPQSPFQNLHFLQVLNLTYCFLDTSNQHLLAGLPVLRHLNLKGNHFQDGTITKTNLLQTVGSLEVLILSSCGLLSIDQQAFHSLGKMSHVDLSHNSLTCDSIDSLSHLKGIYLNLAANSINIISPRLLPILSQQSTINLSHNPLDCTCSNIHFLTWYKENLHKLEGSEETTCANPPSLRGVKLSDVKLSCG

SEQ ID NO: 150 - protein, 272 aa, Homo Sapiens
PEEPLVVKVEEGDNAVLQCLKGTSDGPTQQLTWSRESPLKPFLKLSLGLPGLGIHMRPLAIWLFIFNVSQQMGGFYLCQPGPPSEKAWQPGWTVNVEGSGELFRWNVSDLGGLGCGLKNRSSEGPSSPSGKLMSPKLYVWAKDRPEIWEGEPPCLPPRDSLNQSLSQDLTMAPGSTLWLSCGVPPDSVSRGPLSWTHVHPKGPKSLLSLELKDDRPARDMWVMETGLLLPRATAQDAGKYYCHRGNLTMSFHLEITARPVLWHWLLRTGGWK

SEQ ID NO: 151 - protein, 280 aa, Homo Sapiens
LKEPLSFHVIWIASFYNHSWKQNLVSGWLSDLQTHTWDSNSSTIVFLWPWSRGNFSNEEWKELETLFRIRTIRSFEGIRRYAHELQFEYPFEIQVTGGCELHSGKVSGSFLQLAYQGSDFVSFQNNSWLPYPVAGNMAKHFCKVLNQNQHENDITHNLLSDTCPRFILGLLDAGKAHLQRQVKPEAWLSHGPSPGPGHLQLVCHVSGFYPKPVWVMWMRGEQEQQGTQRGDILPSADGTWYLRATLEVAAGEAADLSCRVKHSSLEGQDIVLYWEHHSSV

SEQ ID NO: 152 - protein, 286 aa, Homo Sapiens
SEHAFQGPTSFHVIQTSSFTNSTWAQTQGSGWLDDLQIHGWDSDSGTAIFLKPWSKGNFSDKEVAELEEIFRVYIFGFAREVQDFAGDFQMKYPFEIQGIAGCELHSGGAIVSFLRGALGGLDFLSVKNASCVPSPEGGSRAQKFCALIIQYQGIMETVRILLYETCPRYLLGVLNAGKADLQRQVKPEAWLSSGPSPGPGRLQLVCHVSGFYPKPVWVMWMRGEQEQQGTQLGDILPNANWTWYLRATLDVADGEAAGLSCRVKHSSLEGQDIILYWRNPTSIGS

SEQ ID NO: 153 - protein, 285 aa, Homo Sapiens
NADASQEHVSFHVIQIFSFVNQSWARGQGSGWLDELQTHGWDSESGTIIFLHNWSKGNFSNEELSDLELLFRFYLFGLTREIQDHASQDYSKYPFEVQVKAGCELHSGKSPEGFFQVAFNGLDLLSFQNTTWVPSPGCGSLAQSVCHLLNHQYEGVTETVYNLIRSTCPRFLLGLLDAGKMYVHRQVRPEAWLSSRPSLGSGQLLLVCHASGFYPKPVWVTWMRNEQEQLGTKHGDILPNADGTWYLQVILEVASEEPAGLSCRVRHSSLGGQDIILYWGHHFSM

SEQ ID NO: 154 - protein, 282 aa, Homo Sapiens
EVPQRLFPLRCLQISSFANSSWTRTDGLAWLGELQTHSWSNDSDTVRSLKPWSQGTFSDQQWETLQHIFRVYRSSFTRDVKEFAKMLRLSYPLELQVSAGCEVHPGNASNNFFHVAFQGKDILSFQGTSWEPTQEAPLWVNLAIQVLNQDKWTRETVQWLLNGTCPQFVSGLLESGKSELKKQVKPKAWLSRGPSPGPGRLLLVCHVSGFYPKPVWVKWMRGEQEQQGTQPGDILPNADETWYLRATLDVVAGEAAGLSCRVKHSSLEGQDIVLYWGGSYTS

SEQ ID NO: 155 - protein, 285 aa, Homo Sapiens
APQALQSYHLAAEEQLSFRMLQTSSFANHSWAHSEGSGWLGDLQTHGWDTVLGTIRFLKPWSHGNFSKQELKNLQSLFQLYFHSFIQIVQASAGQFQLEYPFEIQILAGCRMNAPQIFLNMAYQGSDFLSFQGISWEPSPGAGIRAQNICKVLNRYLDIKEILQSLLGHTCPRFLAGLMEAGESELKRKVKPEAWLSCGPSPGPGRLQLVCHVSGFYPKPVWVMWMRGEQEQRGTQRGDVLPNADETWYLRATLDVAAGEAAGLSCRVKHSSLGGHDLIIHWGGY

SEQ ID NO: 156 - protein, 185 aa, Homo Sapiens
KEITNALETWGALGQDINLDIPSFQMSDDIDDIKWEKTSDKKKIAQFRKEKETFKEKDTYKLFKNGTLKIKHLKTDDQDIYKVSIYDTKGKNVLEKIFDLKIQERVSKPKISWTCINTTLTCEVMNGTDPELNLYQDGKHLKLSQRVITHKWTTSLSAKFKCTAGNKVSKESSVEPVSCPEKGLD

SEQ ID NO: 157 - protein, 202 aa, Homo Sapiens
QVQVVTQDEREQLYTPASLKCSLQNAQEALIVTWQKKKAVSPENMVTFSENHGVVIQPAYKDKINITQLGLQNSTITFWNITLEDEGCYMCLFNTFGFGKISGTACLTVYVQPIVSLHYKFSEDHLNITCSATARPAPMVFWKVPRSGIENSTVTLSHPNGTTSVTSILHIKDPKNQVGKEVICQVLHLGTVTDFKQTVNKG

SEQ ID NO: 158 - protein, 215 aa, Homo Sapiens
MDEKQITQNYSKVLAEVNTSWPVKMATNAVLCCPPIALRNLIIITWEIILRGQPSCTKAYKKETNETKETNCTDERITWVSRPDQNSDLQIRTVAITHDGYYRCIMVTPDGNFHRGYHLQVLVTPEVTLFQNRNRTAVCKAVAGKPAAHISWIPEGDCATKQEYWSNGTVTVKSTCHWEVHNVSTVTCHVSHLTGNKSLYIELLPVPGAKKSAKL

SEQ ID NO: 159 - protein, 87 aa, Homo Sapiens
MDINAVLCCPPIALRNLIIITWEIILRGQPSCTKAYKKETNETKETNCTVERITWVSRPDQNSDLQIRPVDTTHDGYYRGIVVTPDG

SEQ ID NO: 160 - protein, 264 aa, Homo Sapiens
PRFMGTISDVKTNVQLLKGRVDNISTLDSEIKKNSDGMEAAGVQIQMVNESLGYVRSQFLKLKTSVEKANAQIQILTRSWEEVSTLNAQIPELKSDLEKASALNTKIRALQGSLENMSKLLKRQNDILQVVSQGWKYFKGNFYYFSLIPKTWYSAEQFCVSRNSHLTSVTSESEQEFLYKTAGGLIYWIGLTKAGMEGDWSWVDDTPFNKVQSARFWIPGEPNNAGNNEHCGNIKAPSLQAWNDAPCDKTFLFICKRPYVPSEP

SEQ ID NO: 161 - protein, 343 aa, Homo Sapiens
AVSKVPSSISQEQSRQDAIYQNLTQLKAAVGELSEKSKLQEIYQELTQLKAAVGELPEKSKLQEIYQELTRLKAAVGELPEKSKLQEIYQELTWLKAAVGELPEKSKMQEIYQELTRLKAAVGELPEKSKQQEIYQELTRLKAAVGELPEKSKQQEIYQELTRLKAAVGELPEKSKQQEIYQELTQLKAAVERLCHPCPWEWTFFQGNCYFMSNSQRNWHDSITACKEVGAQLVVIKSAEEQNFLQLQSSRSNRFTWMGLSDLNQEGTWQWVDGSPLLPSFKQYWNRGEPNNVGEEDCAEFSGNGWNDDKCNLAKFWICKKSAASCSRDEEQFLSPAPATPNP

SEQ ID NO: 162 - protein, 515 aa, Homo Sapiens
MSLWLLEGVPMRQAAVTSTSLTIKSVFTRSELKFSPQWSHHGKIVTCQLQDADGKFLSNDTVQLNVKHTPKLEIKVTPSDAIVREGDSVTMTCEVSSSNPEYTTVSWLKDGTSLKKQNTFTLNLREVTKDQSGKYCCQVSNDVGPGRSEEVFLQVQYAPEPSTVQILHSPAVEGSQVEFLCMSLANPLPTNYTWYHNGKEMQGRTEEKVHIPKILPWHAGTYSCVAENILGTGQRGPGAELDVQYPPKKVTTVIQNPMPIREGDTVTLSCNYNSSNPSVTRYEWKPHGAWEEPSLGVLKIQNVGWDNTTIACAACNSWCSWASPVALNVQYAPRDVRVRKIKPLSEIHSGNSVSLQCDFSSSHPKEVQFFWEKNGRLLGKESQLNFDSISPEDAGSYSCWVNNSIGQTASKAWTLEVLYAPRRLRVSMSPGDQVMEGKSATLTCESDANPPVSHYTWFDWNNQSLPYHSQKLRLEPVKVQHSGAYWCQGTNSVGKGRSPLSTLTVYYSPETIGRR

SEQ ID NO: 163 - protein, 236 aa, Homo Sapiens [sequence omitted]

SEQ ID NO: 164 - protein, 203 aa, Homo Sapiens
CQGSADHVVSISGVPLQLQPNSIQTKVDSIAWKKLLPSQNGFHHILKWENGSLPSNTSNDRFSFIVKNLSLLIKAAQQQDSGLYCLEVTSISGKVQTATFQVFVFDKVEKPRLQGQGKILDRGRCQVALSCLVSRDGNVSYAWYRGSKLIQTAGNLTYLDEEVDINGTHTYTCNVSNPVSWESHTLNLTQDCQNAHQEFRFWP

SEQ ID NO: 165 - protein, 670 aa, Homo Sapiens
QDPWAAEPRAACGPSSCYALFPRRRTFLEAWRACRELGGDLATPRTPEEAQRVDSLVGAGPASRLLWIGLQRQARQCQLQRPLRGFTWTTGDQDTAFTNWAQPASGGPCPAQRCVALEASGEHRWLEGSCTLAVDGYLCQFGFEGACPALQDEAGQAGPAVYTTPFHLVSTEFEWLPFGSVAAVQCQAGRGASLLCVKQPEGGVGWSRAGPLCLGTGCSPDNGGCEHECVEEVDGHVSCRCTEGFRLAADGRSCEDPCAQAPCEQQCEPGGPQGYSCHCRLGFRPAEDDPHRCVDTDECQIAGVCQQMCVNYVGGFECYCSEGHELEADGISCSPAGAMGAQASQDLGDELLDDGEDEEDEDEAWKAFNGGWTEMPGILWMEPTQPPDFALAYRPSFPEDREPQIPYPEPTWPPPLSAPRVPYHSSVLSVTRPVVVSATHPTLPSAHQPPVIPATHPALSRDHQIPVIAANYPDLPSAYQPGILSVSHSAQPPAHQPPMISTKYPELFPAHQSPMFPDTRVAGTQTTTHLPGIPPNHAPLVTTLGAQLPPQAPDALVLRTQATQLPIIPTAQPSLTTTSRSPVSPAHQISVPAATQPAALPTLLPSQSPTNQTSPISPTHPHSKAPQIPREDGPSPKLALWLPSPAPTAAPTALGEAGLAEHSQRDDRWL

SEQ ID NO: 166 - protein, 220 aa, Homo Sapiens
FTVTVPKDLYVVEYGSNMTIECKFPVEKQLDLAALIVYWEMEDKNIIQFVHGEEDLKVQHSSYRQRARLLKDQLSLGNAALQITDVKLQDAGVYRCMISYGGADYKRITVKVNAPYNKINQRILVVDPVTSEHELTCQAEGYPKAEVIWTSSDHQVLSGKTTTTNSKREEKLFNVTSTLRINTTTNEIFYCTFRRLDPEENHTAELVIPELPLAHPPNER

SEQ ID NO: 167 - protein, 428 aa, Homo Sapiens
LEVQVPEDPVVALVGTDATLCCSFSPEPGFSLAQLNLIWQLTDTKQLVHSFAEGQDQGSAYANRTALFPDLLAQGNASLRLQRVRVADEGSFTCFVSIRDFGSAAVSLQVAAPYSKPSMTLEPNKDLRPGDTVTITCSSYQGYPEAEVFWQDGQGVPLTGNVTTSQMANEQGLFDVHSILRVVLGANGTYSCLVRNPVLQQDAHSSVTITPQRSPTGAVEVQVPEDPVVALVGTDATLRCSFSPEPGFSLAQLNLIWQLTDTKQLVHSFTEGRDQGSAYANRTALFPDLLAQGNASLRLQRVRVADEGSFTCFVSIRDFGSAAVSLQVAAPYSKPSMTLEPNKDLRPGDTVTITCSSYRGYPEAEVFWQDGQGVPLTGNVTTSQMANEQGLFDVHSVLRVVLGANGTYSCLVRNPVLQQDAHGSVTIT

SEQ ID NO: 168 - protein, 134 aa, Homo Sapiens
NKILVKQSPMLVAYDNAVNLSCKYSYNLFSREFRASLHKGLDSAVEVCVVYGNYSQQLQVYSKTGFNCDGKLGNESVTFYLQNLYVNQTDIYFCKIEVMYPPPYLDNEKSNGTIIHVKGKHLCPSPLFPGPSKP

SEQ ID NO: 169 - protein, 163 aa, Homo Sapiens [sequence omitted]

SEQ ID NO: 170 - protein, 163 aa, Homo Sapiens
GYFPLSHPMTVAGPVGGSLSVQCRYEKEHRTLNKFWCRPPQILRCDKIVETKGSAGKRNGRVSIRDSPANLSFTVTLENLTEEDAGTYWCGVDTPWLRDFHDPIVEVEVSVFPAGTTTASSPQSSMGTSGPPTKLPVHTWPSVTRKDSPEPSPHPGSLFSNVR

SEQ ID NO: 171 - protein, 156 aa, Homo Sapiens
LKGPGSVTGTAGDSLTVWCQYESMYKGYNKYWCRGQYDTSCESIVETKGEEKVERNGRVSIRDHPEALAFTVTMQNLNEDDAGSYWCKIQTVWVLDSWSRDPSDLVRVYVSPAITTPRRTTHPATPPIFLVVNPGRNLSTREVLTQNSGFRLSSPH

SEQ ID NO: 172 - protein, 134 aa, Homo Sapiens
IQGPESVRAPEQGSLTVQCHYKQGWETYIKWWCRGVRWDTCKILIETRGSEQGEKSDRVSIKDNQKDRTFTVTMEGLRRDDADVYWCGIERRGPDLGTQVKVIVDPEGAASTTASSPTNSNMAVFIGSHKRNHY

SEQ ID NO: 173 - protein, 147 aa, Homo Sapiens
AKITGPTTVNGSEQGSLTVQCAYGSGWETYLKWRCQGADWNYCNILVKTNGSEQEVKKNRVSIRDNQKNHVFTVTMENLKRDDADSYWCGTERPGIDLGVKVQVTINPGTQTAVSEWTTTTASLAFTAAATQKTSSPLTRSPLKSTH

SEQ ID NO: 174 - protein, 172 aa, Homo Sapiens
TQITGPTTVNGLERGSLTVQCVYRSGWETYLKWWCRGAIWRDCKILVKTSGSEQEVKRDRVSIKDNQKNRTFTVTMEDLMKTDADTYWCGIEKTGNDLGVTVQVTIDPAPVTQEETSSSPTLTGHHLDNSSRDVPRAGTAAPGGRPLLCRPDPAAGRNLPAKGYHEAFLCPG

SEQ ID NO: 175 - protein, 229 aa, Homo Sapiens
LEGPEEISGFEGDTVSLQCTYREELRDHRKYWCRKGGILFSRCSGTIYAEEEGQETMKGRVSIRDSRQELSLIVTLWNLTLQDAGEYWCGVEKRGPDESLLISLFVFPGPCCPPSPSPTFQPLATTRLQPKAKAQQTQPPGLTSPGLYPAATTAKQGKTGAEAPPLPGTSQYGHERTSQYTGTSPHPATSPPAGSSRPPMQLNSTSAEDTSPALSSGSSKPRVSIPMVR

SEQ ID NO: 176 - protein, 137 aa, Homo Sapiens
FQDSCYIFLQEAIKVESIEDVRNQCTDHGADMISIHNEEENAFILDTLKKQWKGPDDILLGMFYDTDDASFKWFDNSNMTFDKWTDQDDDEDLVDTCAFLHIKTGEWKKGNCEVSSVEGTLCKTAIPYKRKYLSDNH

SEQ ID NO: 177 - protein, 194 aa, Homo Sapiens
SPLSTPTSAQAAGPSSGSCPPTKFQCRTSGLCVPLTWRCDRDLDCSDGSDEEECRIEPCTQKGQCPPPPGLPCPCTGVSDCSGGTDKKLRNCSRLACLAGELRCTLSDDCIPLTWRCDGHPDCPDSSDELGCGTNEILPEGDATTMGPPVTLESVTSLRNATTMGPPVTLESVPSVGNATSSSAGDQSGSPTAY

SEQ ID NO: 178 - protein, 242 aa, Homo Sapiens
DPNFWLQVQESVTVQEGLCVLVPCTFFHPIPYYDKNSPVHGYWFREGAIISGDSPVATNKLDQEVQEETQGRFRLLGDPSRNNCSLSIVDARRRDNGSYFFRMERGSTKYSYKSPQLSVHVTDLTHRPKILIPGTLEPGHSKNLTCSVSWACEQGTPPIFSWLSAAPTSLGPRTTHSSVLIITPRPQDHGTNLTCQVKFAGAGVTTERTIQLNVTYVPQNPTTGIFPGDGSGKQETRAGVVH

SEQ ID NO: 179 - protein, 259 aa, Homo Sapiens
SLDNNGTATPELPTQGTFSNVSTNVSYQETTTPSTLGSTSLHPVSQHGNEATTNITETTVKFTSTSVITSVYGNTNSSVQSQTSVISTVFTTPANVSTPETTLKPSLSPGNVSDLSTTSTSLATSPTKPYTSSSPILSDIKAEIKCSGIREVKLTQGICLEQNKTSSCAEFKKDRGEGLARVLCGEEQADADAGAQVCSLLLAQSEVRPQCLLLVLANRTEISSKLQLMKKHQSDLKKLGILDFTEQDVASHQSYSQKT

SEQ ID NO: 180 - protein, 405 aa, Homo Sapiens
QKTIKKQVVLEEGTIAFKNWVKTGTEVYRQFWIFDVQNPQEVMMNSSNIQVKQRGPYTYRVRFLAKENVTQDAEDNTVSFLQPNGAIFEPSLSVGTEADNFTVLNLAVAAASHIYQNQFVQMILNSLINKSKSSMFQVRTLRELLWGYRDPFLSLVPYPVTTTVGLFYPYNNTADGVYKVFNGKDNISKVAIIDTYKGKRNLSYWESHCDMINGTDAASFPPFVEKSQVLQFFSSDICRSIYAVFESDVNLKGIPVYRFVLPSKAFASPVENPDNYCFCTEKIISKNCTSYGVLDISKCKEGRPVYISLPHFLYASPDVSEPIDGLNPNEEEHRTYLDIEPITGFTLQFAKRLQVNLLVKPSEKIQVLKNLKRNYIVPILWLNETGTIGDEKANMFRSQVTGKIN

SEQ ID NO: 181 - protein, 130 aa, Homo Sapiens
RAQLERSLRDVVEKTIQKYGTNPEETAAEESWDYVQFQLRCCGWHYPQDWFQVLILRGNGSEAHRVPCSCYNLSATNDSTILDKVILPQLSRLGHLARSRHSADICAVPAESHIYREGCAQGLQKWLHNN

SEQ ID NO: 182 - protein, 258 aa, Homo Sapiens
VPRWRQQWSGPGTTKRFPETVLARCVKYTEIHPEMRHVDCQSVWDAFKGAFISKHPCNITEEDYQPLMKLGTQTVPCNKILLWSRIKDLAHQFTQVQRDMFTLEDTLLGYLADDLTWCGEFNTSKINYQSCPDWRKDCSNNPVSVFWKTVSRRFAEAACDVVHVMLNGSRSKIFDKNSTFGSVEVHNLQPEKVQTLEAWVIHGGREDSRDLCQDPTIKELESIISKRNIQFSCKNIYRPDKFLQCVKNPEDSSCTSEI

SEQ ID NO: 183 - protein, 84 aa, Homo Sapiens [sequence omitted]

SEQ ID NO: 184 - protein, 104 aa, Homo Sapiens
DGNEEMGGITQTPYKVSISGTTVILTCPQYPGSEILWQHNDKNIGGDEDDKNIGSDEDHLSLKEFSELEQSGYYVCYPRGSKPEDANFYLYLRARVCENCMEMD

SEQ ID NO: 185 - protein, 94 aa, Homo Sapiens
QSIKGNHLVKVYDYQEDGSVLLTCDAEAKNITWFKDGKMIGFLTEDKKKWNLGSNAKDPRGMYQCKGSQNKSKPLQVYYRMCQNCIELNAATIS

SEQ ID NO: 186 - protein, 371 aa, Homo Sapiens
KKVVLGKKGDTVELTCTASQKKSIQFHWKNSNQIKILGNQGSFLTKGPSKLNDRADSRRSLWDQGNFPLIIKNLKIEDSDTYICEVEDQKEEVQLLVFGLTANSDTHLLQGQSLTLTLESPPGSSPSVQCRSPRGKNIQGGKTLSVSQLELQDSGTWTCTVLQNQKKVEFKIDIVVLAFQKASSIVYKKEGEQVEFSFPLAFTVEKLTGSGELWWQAERASSSKSWITFDLKNKEVSVKRVTQDPKLQMGKKLPLHLTLPQALPQYAGSGNLTLALEAKTGKLHQEVNLVVMRATQLQKNLTCEVWGPTSPKLMLSLKLENKEAKVSKREKAVWVLNPEAGMWQCLLSDSGQVLLESNIKVLPTWSTPVQP

SEQ ID NO: 187 - protein, 149 aa, Homo Sapiens
MQKGDQNPQIAAHVISEASSKTTSVLQWAEKGYYTMSNNLVTLENGKQLTVKRQGLYYIYAQVTFCSNREASSQAPFIASLCLKSPGRFERILLRAANTHSSAKPCGQQSIHLGGVFELQPGASVFVNVTDPSQVSHGTGFTSFGLLKL

SEQ ID NO: 188 - protein, 586 aa, Homo Sapiens
QIDLNITCRFAGVFHVEKNGRYSISRTEAADLCKAFNSTLPTMAQMEKALSIGFETCRYGFIEGHVVIPRIHPNSICAANNTGVYILTSNTSQYDTYCFNASAPPEEDCTSVTDLPNAFDGPITITIVNRDGTRYVQKGEYRTNPEDIYPSNPTDDDVSSGSSSERSSTSGGYIFYTFSTVHPIPDEDSPWITDSTDRIPATSTSSNTISAGWEPNEENEDERDRHLSFSGSGIDDDEDFISSTISTTPRAFDHTKQNQDWTQWNPSHSNPEVLLQTTTRMTDVDRNGTTAYEGNWNPEAHPPLIHHEHHEEEETPHSTSTIQATPSSTTEETATQKEQWFGNRWHEGYRQTPREDSHSTTGTAAASAHTSHPMQGRTTPSPEDSSWTDFFNPISHPMGRGHQAGRRMDMDSSHSTTLQPTANPNTGLVEDLDRTGPLSMTTQQSNSQSFSTSHEGLEEDKDHPTTSTLTSSNRNDVTGGRRDPNHSEGSTTLLEGYTSHYPHTKESRTFIPVTSAKTGSFGVTAVTVGDSNSNVNRSLSGDQDTFHPSGGSHTTHGSESDGHSHGSQEGGANTTSGPIRTPQIPE

SEQ ID NO: 189 - protein, 123 aa, Homo Sapiens
QLLFNKTKSVEFTFCNDTVVIPCFVTNMEAQNTTEVYVKWKFKGRDIYTFDGALNKSTVPTDFSSAKIEVSQLLKGDASLKMDKSDAVSHTGNYTCEVTELTREGETIIELKYRVVSWFSPNE

SEQ ID NO: 190 - protein, 169 aa, Homo Sapiens
MCSRGWDSCLALELLLLPLSLLVTSIQGHLVHMTVVSGSNVTLNISESLPENYKQLTWFYTFDQKIVEWDSRKSKYFESKFKGRVRLDPQSGALYISKVQKEDNSTYIMRVLKKTGNEQEWKIKLQVLGESGEPKSKSPLQWPQMDHCRASWEAWGTLGEEERKTSGQV

SEQ ID NO: 191 - protein, 348 aa, Homo Sapiens
RLSWYDPDFQARLTRSNSKCQGQLEVYLKDGWHMVCSQSWGRSSKQWEDPSQASKVCQRLNCGVPLSLGPFLVTYTPQSSIICYGQLGSFSNCSHSRNDMCHSLGLTCLEPQKTTPPTTRPPPTTTPEPTAPPRLQLVAQSGGQHCAGVVEFYSGSLGGTISYEAQDKTQDLENFLCNNLQCGSFLKHLPETEAGRAQDPGEPREHQPLPIQWKIQNSSCTSLEHCFRKIKPQKSGRVLALLCSGFQPKVQSRLVGGSSICEGTVEVRQGAQWAALCDSSSARSSLRWEEVCREQQCGSVNSYRVLDAGDPTSRGLFCPHQKLSQCHELWERNSYCKKVFVTCQDPNP

SEQ ID NO: 192 - protein, 75 aa, Homo Sapiens
EQKLNEYVAKGLTDSIHRYHSDNSTKAAWDSIQSFLQCCGINGTSDWTSGPPASCPSDRKVEGCYAKARLWFHSN

SEQ ID NO: 193 - protein, 319 aa, Homo Sapiens
DCGLPPDVPNAQPALEGRTSFPEDTVITYKCEESFVKIPGEKDSVICLKGSQWSDIEEFCNRSCEVPTRLNSASLKQPYITQNYFPVGTVVEYECRPGYRREPSLSPKLTCLQNLKWSTAVEFCKKKSCPNPGEIRNGQIDVPGGILFGATISFSCNTGYKLFGSTSSFCLISGSSVQWSDPLPECREIYCPAPPQIDNGIIQGERDHYGYRQSVTYACNKGFTMIGEHSIYCTVNNDEGEWSGPPPECRGKSLTSKVPPTVQKPTTVNVPTTEVSPTSQKTTTKTTTPNAQATRSTPVSRTTKHFHETTPNKGSGTTS

SEQ ID NO: 194 - protein, 187 aa, Homo Sapiens
FSQQIYGVVYGNVTFHVPSNVPLKEVLWKKQKDKVAELENSEFRAFSSFKNRVYLDTVSGSLTIYNLTSSDEDEYEMESPNITDTMKFFLYVLESLPSPTLTCALTNGSIEVQCMIPEHYNSHRGLIMYSWDCPMEQCKRNSTSIYFKMENDLPQKIQCTLSNPLFNTTSSIILTTCIPSSGHSRHR

SEQ ID NO: 195 - protein, 77 aa, Homo Sapiens
LQCYNCPNPTADCKTAVNCSSDFDACLITKAGLQVYNKCWKFEHCNFNDVTTRLRENELTYYCCKKDLCNFNEQLEN

SEQ ID NO: 196 - protein, 385 aa, Homo Sapiens
HPSPAPPDQLNTSSAESELWEPGERLPVRLTNGSSSCSGTVEVRLEASWEPACGALWDSRAAEAVCRALGCGGAEAASQLAPPTPELPPPPAAGNTSVAANATLAGAPALLCSGAEWRLCEVVEHACRSDGRRARVTCAENRALRLVDGGGACAGRVEMLEHGEWGSVCDDTWDLEDAHVVCRQLGCGWAVQALPGLHFMPGRGPIHRDQVNCSGAEAYLWDCPGLPGQHYCGHKEDAGVVCSEHQSWRLTGGADRCEGQVEVHFRGVWNTVCDSEWYPSEAKVLCQSLGCGTAVERPKGLPHSLSGRMYYSCNGEELTLSNCSWRFNNSNLCSQSLAARVLCSASRSLHNLSTPEVPASVQTVTIESSVTVKIENKESRELMLL

SEQ ID NO: 197 - protein, 101 aa, Homo Sapiens
AGYVFRDKVMSEFNNNFRQQMENYPKNNHTASILDRMQADFKCCGAANYTDWEKIPSMSKNRVPDSCCINVTVGCGINFNEKAIHKEGCVEKIGGWLRKNV

SEQ ID NO: 198 - protein, 138 aa, Homo Sapiens
SVGQYNCPGQYTFSMPSDSHVSSCSEDWVGYQRKCYFISTVKRSWTSAQNACSEHGATLAVIDSEKDMNFLKRYAGREEHWVGLKKEPGHPWKWSNGKEFNNWFNVTGSDKCVFLKNTEVSSMECEKNLYWICNKPYK

SEQ ID NO: 199 - protein, 155 aa, Homo Sapiens
AQEVQQSPHCTTVPVGASVNITCSTSGGLRGIYLRQLGPQPQDIIYYEDGVVPTTDRRFRGRIDFSGSQDNLTITMHRLQLSDTGTYTCQAITEVNVYGSGTLVLVTEEQSQGWHRCSDAPPRASALPAPPTGSALPDPQTASALPDPPAASALP

SEQ ID NO: 200 - protein, 155 aa, Homo Sapiens
QRFAQAQQQLPLESLGWDVAELQLNHTGPQQDPRLYWQGGPALGRSFLHGPELDKGQLRIHRDGIYMVHIQVTLAICSSTTASRHHPTTLAVGICSPASRSISLLRLSFHQGCTIASQRLTPLARGDTLCTNLTGTLLPSRNTDETFFGVQWVRP

SEQ ID NO: 201 - protein, 243 aa, Homo Sapiens
RYLQVSQQLQQTNRVLEVTNSSLRQQLRLKITQLGQSAEDLQGSRRELAQSQEALQVEQRAHQAAEGQLQACQADRQKTKETLQSEEQQRRALEQKLSNMENRLKPFFTCGSADTCCPSGWIMHQKSCFYISLTSKNWQESQKQCETLSSKLATFSEIYPQSHSYYFLNSLLPNGGSGNSYWTGLSSNKDWKLTDDTQRTRTYAQSSKCNKVHKTWSWWTLESESCRSSLPYICEMTAFRFPD

SEQ ID NO: 202 - protein, 160 aa, Homo Sapiens
QQQGRLDKLTVTSQNLQLENLRMKLPKPPKPVSKMRMATPLLMQALPMGALPQGPMQNATKYGNMTEDHVMHLLQNADPLKVYPPLKGSFPENLRHLKNTMETIDWKVFESWMHHWLLFEMSRHSLEQKPTDAPPKESLELEDPSSGLGVTKQDLGPVPM

SEQ ID NO: 203 - protein, 111 aa, Homo Sapiens
LWMHKVPASLMVSLGEDAHFQCPHNSSNNANVTWWRVLHGNYTWPPEFLGPGEDPNGTLIIQNVNKSHGGIYVCRVQEGNESYQQSCGTYLRVRQPPPRPFLDMGEGTKNR

SEQ ID NO: 204 - protein, 131 aa, Homo Sapiens
ARSEDRYRNPKGSACSRIWQSPRFIARKRGFTVKMHCYMNSASGNVSWLWKQEMDENPQQLKLEKGRMEESQNESLATLTIQGIRFEDNGIYFCQQKCNNTSEVYQGCGTELRVMGFSTLAQLKQRNTLKD

SEQ ID NO: 205 - protein, 208 aa, Homo Sapiens [sequence omitted]

SEQ ID NO: 206 - protein, 89 aa, Homo Sapiens
FVNKDQIAKDVKQFYDQALQQAVVDDDANNAKAVVKTFHETLDCCGSSTLTALTTSVLKNNLCPSGSNIISNLFKEDCHQKIDDLFSGK

SEQ ID NO: 207 - protein, 118 aa, Homo Sapiens
GKLKQEMGGIVTELIRDYNSSREDSLQDAWDYVQAQVKCCGWVSFYNWTDNAELMNRPEVTYPCSCEVKGEEDNSLSVRKGFCEAPGNRTQSGNHPEDWPVYQEGCMEKVQAWLQENL

SEQ ID NO: 208 - protein, 125 aa, Homo Sapiens
TPEVKVACSEDVDLPCTAPWDPQVPYTVSWVKLLEGGEERMETPQEDHLRGQHYHQKGQNGSFDAPNERPYSLKIRNTTSCNSGTYRCTLQDPDGQRNLSGKVILRVTGCPAQRKEETFKKYRAE

SEQ ID NO: 209 - protein, 204 aa, Homo Sapiens
KDSEIFTVNGILGESVTFPVNIQEPRQVKIIAWTSKTSVAYVTPGDSETAPVVTVTHRNYYERIHALGPNYNLVISDLRMEDAGDYKADINTQADPYTTTKRYNLQIYRRLGKPKITQSLMASVNSTCNVTLTCSVEKEEKNVTYNWSPLGEEGNVLQIFQTPEDQELTYTCTAQNPVSNNSDSISARQLCADIAMGFRTHHTG

SEQ ID NO: 210 - protein, 224 aa, Homo Sapiens
APLKIQAYFNETADLPCQFANSQNQSLSELVVFWQDQENLVLNEVYLGKEKFDSVHSKYMGRTSFDSDSWTLRLHNLQIKDKGLYQCIIHHKKPTGMIRIHQMNSELSVLANFSQPEIVPISNITENVYINLTCSSIHGYPEPKKMSVLLRTKNSTIEYDGIMQKSQDNVTELYDVSISLSVSFPDVTSNMTIFCILETDKTRLLSSPFSIELEDPQPPPDHIP

SEQ ID NO: 211 - protein, 161 aa, Homo Sapiens
SQFRVSPLDRTWNLGETVELKCQVLLSNPTSGCSWLFQPRGAAASPTFLLYLSQNKPKAAEGLDTQRFSGKRLGDTFVLTLSDFRRENEGCYFCSALSNSIMYFSHFVPVFLPAKPTTTPAPRPPTPAPTIASQPLSLRPEACRPAAGGAVHTRGLDFACD

SEQ ID NO: 212 - protein, 149 aa, Homo Sapiens
LQQTPAYIKVQTNKMVMLSCEAKISLSNMRIYWLRQRQAPSSDSHHEFLALWDSAKGTIHGEEVEQEKIAVFRDASRFILNLTSVKPEDSGIYFCMIVGSPELTFGKGTQLSVVDFLPTTAQPTKKSTLKKRVCRLPRPETQKGPLCSP

SEQ ID NO: 213 - protein, 153 aa, Homo Sapiens
NSVLQQTPAYIKVQTNKMVMLSCEAKISLSNMCIYWLRQRQAPSSDSHHEFLTLWDSAKGTIHGEEVEQEKIAVFRDASRFILNLTSVKPEDSGIYFCMIVGSPELTFGKGTQLSVVVDFLPTTAQPTKKSTLKKRVCRLPRPETQKGPLCSP

SEQ ID NO: 214 - protein, 84 aa, Homo Sapiens
SHKDEVIKEVQEFYKDTYNKLKTKDEPQRETLKAIHYALNCCGLAGGVEQFISDICPKKDVLETFTVKSCPDAIKEVFDNKFHI

SEQ ID NO: 215 - protein, 381 aa, Homo Sapiens
VWEKTVNTEENVYATLGSDVNLTCQTQTVGFFVQMQWSKVTNKIDLIAVYHPQYGFYCAYGRPCESLVTFTETPENGSKWTLHLRNMSCSVSGRYECMLVLYPEGIQTKIYNLLIQTHVTADEWNSNHTIEIEINQTLEIPCFQNSSSKISSEFTYAWSVEDNGTQETLISQNHLISNSTLLKDRVKLGTDYRLHLSPVQIFDDGRKFSCHIRVGPNKILRSSTTVKVFAKPEIPVIVENNSTDVLVERRFTCLLKNVFPKANITWFIDGSFLHDEKEGIYITNEERKGKDGFLELKSVLTRVHSNKPAQSDNLTIWCMALSPVPGNKVWNISSEKITFLLGSEISSTDPPLSVTESTLDTQPSPASSVSPASKNVFTLSY

SEQ ID NO: 216 - protein, 100 aa, Homo Sapiens
DGGFDLSDALPDNENKKPTAIPKKPSAGDDFDLGDAVVDGENDDPRPPNPPKPMPNPNPNHPSSSGSFSDADLADGVSGGEGKGGSDGGGSHRKEGEEAD

SEQ ID NO: 217 - protein, 439 aa, Homo Sapiens
DWVIPPISCPENEKGPFPKNLVQIKSNKDKEGKVFYSITGQGADTPPVGVFIIERETGWLKVTEPLDRERIATYTLFSHAVSSNGNAVEDPMEILITVTDQNDNKPEFTQEVFKGSVMEGALPGTSVMEVTATDADDDVNTYNAAIAYTILSQDPELPDKNMFTINRNTGVISVVTTGLDRESFPAYTLVVQAADLQGEGLSTTATAVITVTDTNDNPPIFNPTTYKGQVPENEANVVITTLKVTDADAPNTPAWEAVYTILNDDGGQFVVTTNPVNNDGILKTAKGLDFEAKQQYILHVAVTNVVPFEVSLTTSTATVTVDVLDVNEAPIFVPPEKRVEVSEDFGVGQEITSYTAQEPDTFMEQKITYRIWRDTANWLEINPDTGAISTRAELDREDFEHVKNSTYTALIIATDNGSPVATGTGTLLLILSDVNDNAP

SEQ ID NO: 218 - protein, 559 aa, Homo Sapiens
GWMWNQFFLLEEYTGSDYQYVGKLHSDQDKGDGSLKYILSGDGAGTLFIIDEKTGDIHATRRIDREEKAFYTLRAQAINRRTLRPVEPESEFVIKIHDINDNEPTFPEEIYTASVPEMSVVGTSVVQVTATDADDPSYGNSARVIYSILQGQPYFSVEPETGIIRTALPNMNRENREQYQVVIQAKDMGGQMGGLSGTTTVNITLTDVNDNPPRFPQNTIHLRVLESSPVGTAIGSVKATDADTGKNAEVEYRIIDGDGTDMFDIVTEKDTQEGIITVKKPLDYESRRLYTLKVEAENTHVDPRFYYLGPFKDTTIVKISIEDVDEPPVFSRSSYLFEVHEDIEVGTIIGTVMARDPDSISSPIRFSLDRHTDLDRIFNIHSGNGSLYTSKPLDRELSQWHNLTVIAAEINNPKETTRVAVFVRILDVNDNAPQFAVFYDTFVCENARPGQLIQTISAVDKDDPLGGQKFFFSLAAVNPNFTVQDNEDNTARILTRKNGFNRHEISTYLLPVVISDNDYPIQSSTGTLTIRVCACDSQGNMQSCSAEALLLPAGLSTGA

SEQ ID NO: 219 - protein, 564 aa, Homo Sapiens
GWVWNQFFVIEEYTGPDPVLVGRLHSDIDSGDGNIKYILSGEGAGTIFVIDDKSGNIHATKTLDREERAQYTLMAQAVDRDTNRPLEPPSEFIVKVQDINDNPPEFLHETYHANVPERSNVGTSVIQVTASDADDPTYGNSAKLVYSILEGQPYFSVEAQTGIIRTALPNMDREAKEEYHVVIQAKDMGGHMGGLSGTTKVMITLTDVNDNPPKFPQSVYQMSVSEAAVPGEEVGRVKAKDPDIGENGLVTYNIVDGDGMESFEITTDYETQEGVIKLKKPVDFETKRAYSLKVEAANVHIDPKFISNGPFKDTVTVKIAVEDADEPPMFLAPSYIHEVQENAAAGTVVGRVHAKDPDAANSPIRYSIDRHTDLDRFFTINPEDGFIKTTKPLDREETAWLNITVFAAEIHNRHQEAKVPVAIRVLDVNDNAPKFAAPYEGFICESDQTKPLSNQPIVTISADDKDDTANGPRFIFSLPPEIIHNPNFTVRDNRDNTAGVYARRGGFSRQKQDLYLLPIVISDGGIPPMSSTNTLTIKVCGCDVNGALLSCNAEAYILNAGLST

SEQ ID NO: 220 - protein, 555 aa, Homo Sapiens
GWVWNQFFVLEEYVGSEPQYVGKLHSDLDKGEGTVKYTLSGDGAGTVFTIDETTGDIHAIRSLDREEKPFYTLRAQAVDIETRKPLEPESEFIIKVQDINDNEPKFLDGPYVATVPEMSPVGAYVLQVKATDADDPTYGNSARVVYSILQGQPYFSIDPKTGVIRTALPNMDREVKEQYQVLIQAKDMGGQLGGLAGTTIVNITLTDVNDNPPRFPKSIFHLKVPESSPIGSAIGRIRAVDPDFGQNAEIEYNIVPGDGGNLFDIVTDEDTQEGVIKLKKPLDFETKKAYTFKVEASNLHLDHRFHSAGPFKDTATVKISVLDVDEPPVFSKPLYTMEVYEDTPVGTIIGAVTAQDLDVGSSAVRYFIDWKSDGDSYFTIDGNEGTIATNELLDRESTAQYNFSIIASKVSNPLLTSKVNILINVLDVNEFPPEISVPYETAVCENAKPGQIIQIVSAADRDLSPAGQQFSFRLSPEAAIKPNFTVRDFRNNTAGIETRRNGYSRRQQELYFLPVVIEDSSYPVQSSTNTMTIRVCRCDSDGTILSCNVEAIFLP

SEQ ID NO: 221 - protein, 555 aa, Homo Sapiens
SIVVSPILIPENQRQPFPRDVGKVVDSDRPERSKFRLTGKGVDQEPKGIFRINENTGSVSMTRTLDREVIAVYQLFVETTDVNGKTLEGPVPLEVIVIDQNDNRPIFREGPYIGHVMEGSPTGTTVMRMTAFDADDPATDNALLRYNIRRQTPDKPSPNMFYIDPEKGDIVTVVSPALLDRETLENPKYELIIEAQDMAGLDVGLTGTATATIMIDDKNDHSPKFTKKEFQATVEEGAVGVIVNLTVEDKDDPATGAWRAAYTIINGNPGQSFEIHTNPQTNEGMLSVVKPLDYEISAFHTLLIKVENEDPLVPDVSYGPSSTATVHITVLDVNEGPVFYPDPMMVTRQEDLSVGSVLLTVNATDPDSLQHQTIRYSVYKDPAGWLNINPINGTVDTTAVLDRESTFVDNSVYTALFLAIDSGNPPATGTGTLLITLEDVNDNAPFIYPTVAEVCDDAKNLSVVILGASDKDLHPNTDPFKFEIHKQAVPDKVWKISKINNTHALVSLLQNLNKANYNLPIMVTDSGKPPMTNITDLRVQVCSCRNSKVDCNAAG

SEQ ID NO: 222 - protein, 546 aa, Homo Sapiens
LPYPLVQIKSDKQQLGSVIYSIQGPGVDEEPRGVFSIDKFTGKVFLNAMLDREKTDRFRLRAFALDLGGSTLEDPTDLEIVVVDQNDNRPAFLQEAFTGRVLEGAVPGTYVTRAEATDADDPETDNAALRFSILQQGSPELFSIDELTGEIRTVQVGLDREVVAVYNLTLQVADMSGDGLTATASAIITLDDINDNAPEFTRDEFFMEAIEAVSGVDVGRLEVEDRDLPGSPNWVARFTILEGDPDGQFTIRTDPKTNEGVLSIVKALDYESCEHYELKVSVQNEAPLQAAALRAERGQAKVRVHVQDTNEPPVFQENPLRTSLAEGAPPGTLVATFSARDPDTEQLQRLSYSKDYDPEDWLQVDAATGRIQTQHVLSPASPFLKGGWYRAIVLAQDDASQPRTATGTLSIEILEVNDHAPVLAPPPPGSLCSEPHQGPGLLLGATDEDLPPHGAPFHFQLSPRLPELGRNWSLSQVNVSHARLRPRHQVPEGLHRLSLLLRDSGQPPQQREQPLNVTVCRCGKDGVCLPGAAALLAGGTGLSLGA

SEQ ID NO: 223 - protein, 768 aa, Homo Sapiens
KAQPAELSVEVPENYGGNFPLYLTKLPLPREGAEGQIVLSGDSGKATEGPFAMDPDSGFLLVTRALDREEQAEYQLQVTLEMQDGHVLWGPQPVLVHVKDENDQVPHFSQAIYRARLSRGTRPGIPFLFLEASDRDEPGTANSDLRFHILSQAPAQPSPDMFQLEPRLGALALSPKGSTSLDHALERTYQLLVQVKDMGDQASGHQATATVEVSIIESTWVSLEPIHLAENLKVLYPHHMAQVHWSGGDVHYHLESHPPGPFEVNAEGNLYVTRELDREAQAEYLLQVRAQNSHGEDYAAPLELHVLVMDENDNVPICPPRDPTVSIPELSPPGTEVTRLSAEDADAPGSPNSHVVYQLLSPEPEDGVEGRAFQVDPTSGSVTLGVLPLRAGQNILLLVLAMDLAGAEGGFSSTCEVEVAVTDINDHAPEFITSQIGPISLPEDVEPGTLVAMLTAIDADLEPAFRLMDFAIERGDTEGTFGLDWEPDSGHVRLRLCKNLSYEAAPSHEVVVVVQSVAKLVGPGPGPGATATVTVLVERVMPPPKLDQESYEASVPISAPAGSFLLTIQPSDPISRTLRFSLVNDSEGWLCIEKFSGEVHTAQSLQGAQPGDTYTVLVEAQDTDEPRLSASAPLVIHFLKAPPAPALTLAPVPSQYLCTPRQDHGLIVSGPSKDPDLASGHGPYSFTLGPNPTVQRDWRLQTLNGSHAYLTLALHWVEPREHIIPVVVSHNAQMWQLLVRVIVCRCNVEGQCMRKVGRMKGMPTKLSA

SEQ ID NO: 224 - protein, 765 aa, Homo Sapiens
QEGKFSGPLKPMTFSIYEGQEPSQIIFQFKANPPAVTFELTGETDNIFVIEREGLLYYNRALDRETRSTHNLQVAALDANGIIVEGPVPITIEVKDINDNRPTFLQSKYEGSVRQNSRPGKPFLYVNATDLDDPATPNGQLYYQIVIQLPMINNVMYFQINNKTGAISLTREGSQELNPAKNPSYNLVISVKDMGGQSENSFSDTTSVDIIVTENIWKAPKPVEMVENSTDPHPIKITQVRWNDPGAQYSLVDKEKLPRFPFSIDQEGDIYVTQPLDREEKDAYVFYAVAKDEYGKPLSYPLEIHVKVKDINDNPPTCPSPVTVFEVQENERLGNSIGTLTAHDRDEENTANSFLNYRIVEQTPKLPMDGLFLIQTYAGMLQLAKQSLKKQDTPQYNLTIEVSDKDFKTLCFVQINVIDINDQIPIFEKSDYGNLTLAEDTNIGSTILTIQATDADEPFTGSSKILYHIIKGDSEGRLGVDTDPHTNTGYVIIKKPLDFETAAVSNIVFKAENPEPLVFGVKYNASSFAKFTLIVTDVNEAPQFSQHVFQAKVSEDVAIGTKVGNVTAKDPEGLDISYSLRGDTRGWLKIDHVTGEIFSVAPLDREAGSPYRVQVVATEVGGSSLSSVSEFHLILMDVNDNPPRLAKDYTGLFFCHPLSAPGSLIFEATDDDQHLFRGPHFTFSLGSGSLQNDWEVSKINGTHARLSTRHTDFEEREYVVLIRINDGGRPPLEGIVSLPVTFCSCVEGSCFRPAGHQTGIPTVGM

SEQ ID NO: 225 - protein, 555 aa, Homo Sapiens
GWVWNQFFVLEEHMGPDPQYVGKLHSNSDKGDGSVKYILTGEGAGTIFIIDDTTGDIHSTKSLDREQKTHYVLHAQAIDRRTNKPLEPESEFIIKVQDINDNAPKFTDGPYIVTVPEMSDMGTSVLQVTATDADDPTYGNSARVVYSILQGQPYFSVDPKTGVIRTALHNMDGEAREHYSVVIQAKDMAGQVGGLSGSTTVNITLTDVNDNTPRFPQKHYQLYVPESAQVGSAVGKIKANDADTGSNADMTYSIINGDGMGIFSISTDKETREGILSLKKPLNYEKKKSYTLNIEGANTHLDFRFSHLGPFKDATMLKIIVGDVDEPPLFSMPSYLMEVYENAKIGTVVGTVLAQDPDSINSLVRYFINYNVEDDRFFNIDANTGTIRTTKVLDREETPWYNITVTASEIDNPDLLSHVTVGIRVLDVNDNPPELAREYDIIVCENSKPGQVIHTISATDKDDFANGPRFNFFLDERLPVNPNFTLKDNEDNTASILTRRRRFSRTVQDVYYLPIMISDGGIPSLSSSSTLTIRVCACERDGRVRTCHAEAFLSS

SEQ ID NO: 226 - protein, 327 aa, Homo Sapiens
GWVWNQFFVPEEMNTTSHHIGQLRSDLDNGNNSFQYKLLGAGAGSTFIIDERTGDIYAIQKLDREERSLYILRAQVIDIATGRAVEPESEFVIKVSDINDNEPKFLDEPYEAIVPEMSPEGTLVIQVTASDADDPSSGNNARLLYSLLQGQPYFSVEPTTGVIRISSKMDRELQDEYWVIIQAKDMIGQPGALSGTTSVLIKLSDVNDNKPIFKESLYRLTVSESAPTGTSIGTIMAYDNDIGENAEMDYSIEEDDSQTFDIITNHETQEGIVILKKKVDFEHQNHYGIRAKVKNHHVPEQLMKYHTEASTTFIKIQVEDVDEPPLF

SEQ ID NO: 227 - protein, 565 aa, Homo Sapiens
DWVISPINLPENSRGPFPQELVRIRSDRDKNLSLRYSVTGPGADQPPTGIFIINPISGQLSVTKPLDREQIARFHLRAHAVDINGNQVENPIDIVINVIDMNDNRPEFLHQVWNGTVPEGSKPGTYVMTVTAIDADDPNALNGMLRYRIVSQAPSTPSPNMFTINNETGDIITVAAGLDREKVQQYTLIIQATDMEGNPTYGLSNTATAVITVTDVNDNPPEFTAMTFYGEVPENRVDIIVANLTVTDKDQPHTPAWNAVYRISGGDPTGRFAIQTDQNSNDGLVTVVKPIDFEANRMFVLTVAAENQVPLAKGIQHPPQSTATMSVTVIDVNENPYFAPNPKIIRQEEGLHAGTMLTTFTAQDPDRYMQQNIRYTKLSDPANWLKIDPVNGQITTIAVLDRESPNVKNNIYNATFLASDNGIPPMSGTGTLQIYLLDINDNAPQVLPQEAETCETPDPNSINITALDYGIDPNAGPFAFDLPLSPVTIKRNWTITRLNGDFAQLNLKIKFLEAGIYEVPIIITDSGNPPKSNISILRVKVCQCDSNGDCTDVDRIVGAGLGTGA

SEQ ID NO: 228 - protein, 560 aa, Homo Sapiens
SWVWNQFFVLEEYTGTDPLYVGKLHSDMDRGDGSIKYILSGEGAGIVFTIDDTTGDIHAIQRLDREERAQYTLRAQALDRRTGRPMEPESEFIIKIQDINDNEPKFLDGPYVATVPEMSPVGTSVIQVTATDADDPTYGNSARVVYSILQGQPYFSVDSKTGVIRTALMNMDREAKEYYEVIIQAKDMGGQLGGLAGTTTVNITLSDVNDNPPRFPQKHYQMSVLESAPISSTVGRVFAKDLDEGINAEMKYTIVDGDGADAFDISTDPNFQVGIITVKKPLSFESKKSYTLKVEGANPHLEMRFLNLGPFQDTTTVHISVEDVDEPPVFEPGFYFVEVPEDVAIGTTIQIISAKDPDVTNNSIRYSIDRSSDPGRFFYVDITTGALMTARPLDREEFSWHNITVLAMEMNNPSQVGSVPVTIKVLDVNDNAPEFPRFYEAFVCENAKAGQLIQTVSAVDQDDPRNGQHFYYSLAPEAANNPNFTIRDNQDNTARILTRRSGFRQQEQSVFHLPILIADSGQPVLSSTGTLTIQVCSCDDDGHVMSCSPEAYMLPVSLSR

SEQ ID NO: 229 - protein, 126 aa, Homo Sapiens
LATPYEAAVCEDAKPGQLIQTISVVDRDEPQGGHRFYFRLVPEAPSNPHFSLLDIQDNTAAVHTQHVGFNRQEQDVFFLPILVVDSGPPTLSSTGTLTIRICGCDSSGTIQSCNTTAFVMAASLSP

SEQ ID NO: 230 - protein, 972 aa, Homo Sapiens
QVNRLPFFTNHFFDTYLLISEDTPVGSSVTQLLAQDMDNDPLVFGVSGEEASRFFAVEPDTGVVWLRQPLDRETKSEFTVEFSVSDHQGVITRKVNIQVGDVNDNAPTFHNQPYSVRIPENTPVGTPIFIVNATDPDLGAGGSVLYSFQPPSQFFAIDSARGIVTVIRELDYETTQAYQLTVNATDQDKTRPLSTLANLAIIITDVQDMDPIFINLPYSTNIYEHSPPGTTVRIITAIDQDKGRPRGIGYTIVSGNTNSIFALDYISGVLTLNGLLDRENPLYSHGFILTVKGTELNDDRTPSDATVTTTFNILVIDINDNAPEFNSSEYSVAITELAQVGFALPLFIQVVDKDENLGLNSMFEVYLVGNNSHHFIISPTSVQGKADIRIRVAIPLDYETVDRYDFDLFANESVPDHVGYAKVKITLINENDNRPIFSQPLYNISLYENVTVGTSVLTVLATDNDAGTFGEVSYFFSDDPDRFSLDKDTGLIMLIARLDYELIQRFTLTIIARDGGGEETTGRVRINVLDVNDNVPTFQKDAYVGALRENEPSVTQLVRLRATDEDSPPNNQITYSIVSASAFGSYFDISLYEGYGVISVSRPLDYEQISNGLIYLTVMAMDAGNPPLNSTVPVTIEVFDENDNPPTFSKPAYFVSVVENIMAGATVLFLNATDLDRSREYGQESIIYSLEGSTQFRINARSGEITTTSLLDRETKSEYILIVRAVDGGVGHNQKTGIATVNITLLDINDNHPTWKDAPYYINLVEMTPPDSDVTTVVAVDPDLGENGTLVYSIQPPNKFYSLNSTTGKIRTTHAMLDRENPDPHEAELMRKIVVSVTDCGRPPLKATSSATVFVNLLDLNDNDPTFQNLPFVAEVLEGIPAGVSIYQVVAIDLDEGLNGLVSYRMPVGMPRMDFLINSSSGVVVTTTELDRERIAEYQLRVVASDAGTPTKSSTSTLTIHVLDVNDETPTF

SEQ ID NO: 231 - protein, 559 aa, Homo Sapiens
SWVWNQFFVIEEYAGPEPVLIGKLHSDVDRGEGRTKYLLTGEGAGTVFVIDEATGNIHVTKSLDREEKAQYVLLAQAVDRASNRPLEPPSEFIIKVQDINDNPPIFPLGPYHATVPEMSNVGTSVIQVTAHDADDPSYGNSAKLVYTVLDGLPFFSVDPQTGVVRTAIPNMDRETQEEFLVVIQAKDMGGHMGGLSGSTTVTVTLSDVNDNPPKFPQSLYQFSVVETAGPGTLVGRLRAQDPDLGDNALMAYSILDGEGSEAFSISTDLQGRDGLLTVRKPLDFESQRSYSFRVEATNTLIDPAYLRRGPFKDVASVRVAVQDAPEPPAFTQAAYHLTVPENKAPGTLVGQISAADLDSPASPIRYSILPHSDPERCFSIQPEEGTIHTAAPLDREARAWHNLTVLATELDSSAQASRVQVAIQTLDENDNAPQLAEPYDTFVCDSAAPGQLIQVIRALDRDEVGNSSHVSFQGPLGPDANFTVQDNRDGSASLLLPSRPAPPRHAPYLVPIELWDWGQPALSSTATVTVSVCRCQPDGSVASCWPEAHLSAAGLSTGA

SEQ ID NO: 232 - protein, 594 aa, Homo Sapiens
IDSVQQETDDLTKQTKCHYKFQEKIYQPLRRSKRRWVITTLEMEEEDPGPFPKLIGELFNNMSYNMSLMYLISGPGVDEYPEIGLFSLEDHENGRIYVHRPVDREMTPSFTVYFDVVERSTGKIVDTSLIFNIRISDVNDHAPQFPEKEFNITVQENQSAGQPIFQMLAVDLDEENTPNSQVLYFLISQTPLLKESGFRVDRLSGEIRLSGCLDYETAPQFTLLIRARDCGEPSLSSTTTVHVDVQEGNNHRPAFTQENYKVQIPEGRASQGVLRLLVQDRDSPFTSAWRAKFNILHGNEEGHFDISTDPETNEGILNVIKPLDYETRPAQSLIIVVENEERLVFCERGKLQPPRKAAASATVSVQVTDANDPPAFHPQSFIVNKEEGARPGTLLGTFNAMDPDSQIRYELVHDPANWVSVDKNSGVVITVEPIDRESPHVNNSFYVIIIHAVDDGFPPQTATGTLMLFLSDINDNVPTLRPRSRYMEVCESAVHEPLHIEAEDPDLEPFSDPFTFELDNTWGNAEDTWKLGRNWGQSVELLTLRSLPRGNYLVPLFIGDKQGLSQKQTVHVRICPCASGLTCVELADAEVGLH

SEQ ID NO: 233 - protein, 547 aa, Homo Sapiens
DWVVAPISVPENGKGPFPQRLNQLKSNKDRDTKIFYSITGPGADSPPEGVFAVEKETGWLLLNKPLDREEIAKYELFGHAVSENGASVEDPMNISIIVTDQNDHKPKFTQDTFRGSVLEGVLPGTSVMQMTATDEDDAIYTYNGVVAYSIHSQEPKDPHDLMFTIHRSTGTISVISSGLDREKVPEYTLTIQATDMDGDGSTTTAVAVVEILDANDNAPMFDPQKYEAHVPENAVGHEVQRLTVTDLDAPNSPAWRATYLIMGGDDGDHFTITTHPESNQGILTTRKGLDFEAKNQHTLYVEVTNEAPFVLKLPTSTATIVVHVEDVNEAPVFVPPSKVVEVQEGIPTGEPVCVYTAEDPDKENQKISYRILRDPAGWLAMDPDSGQVTAVGTLDREDEQFVRNNIYEVMVLAMDNGSPPTTGTGTLLLTLIDVNDHGPVPEPRQITICNQSPVRQVLNITDKDLSPHTSPFQAQLTDDSDIYWTAEVNEEGDTVVLSLKKFLKQDTYDVHLSLSDHGNKEQLTVIRATVCDCHGHVETCPGPWKGG

SEQ ID NO: 234 - protein, 565 aa, Homo Sapiens
DWVIPPINVPENSRGPFPQQLVRIRSDKDNDIPIRYSITGVGADQPPMEVFSIDSMSGRMYVTRPMDREEHASYHLRAHAVDMNGNKVENPIDLYIYVIDMNDNRPEFINQVYNGSVDEGSKPGTYVMTVTANDADDSTTANGMVRYRIVTQTPQSPSQNMFTINSETGDIVTVAAGLDREKVQQYTVIVQATDMEGNLNYGLSNTATAIITVTDVNDNPPEFTASTFAGEVPENRVETVVANLTVMDRDQPHSPNWNAVYRIISGDPSGHFSVRTDPVTNEGMVTVVKAVDYELNRAFMLTVMVSNQAPLASGIQMSFQSTAGVTISIMDINEAPYFPSNHKLIRLEEGVPPGTVLTTFSAVDPDRFMQQAVRYSKLSDPASWLHINATNGQITTAAVLDRESLYTKNNVYEATFLAADNGIPPASGTGTLQIYLIDINDNAPELLPKEAQICEKPNLNAINITAADADVDPNIGPYVFELPFVPAAVRKNWTITRLNGDYAQLSLRILYLEAGMYDVPIIVTDSGNPPLSNTSIIKVKVCPCDDNGDCTTIGAVAAAGLGTGA

SEQ ID NO: 235 - protein, 430 aa, Homo Sapiens
DWIWNQMHIDEEKNTSLPHHVGKIKSSVSRKNAKYLLKGEYVGKVFRVDAETGDVFAIERLDRENISEYHLTAVIVDKDTGENLETPSSFTIKVHDVNDNWPVFTHRLFNASVPESSAVGTSVISVTAVDADDPTVGDHASVMYQILKGKEYFAIDNSGRIITITKSLDREKQARYEIVVEARDAQGLRGDSGTATVLVTLQDINDNFPFFTQTKYTFVVPEDTRVGTSVGSLFVEDPDEPQNRMTKYSILRGDYQDAFTIETNPAHNEGIIKPMKPLDYEYIQQYSFIVEATDPTIDLRYMSPPAGNRAQVIINITDVDEPPIFQLVLQISAIDKDITPRNVKFKFTLNTENNFTLTDNHDNTANITVKYGQFDREHTKVHFLPVVISDNGMPSRTGTSTLTVAVCKCNEQGEFTFCEDMAAQVDVSIQ

SEQ ID NO: 236 - protein, 562 aa, Homo Sapiens
SWMWNQFFLLEEYTGSDYQYVGKLHSDQDRGDGSLKYILSGDGAGDLFIINENTGDIQATKRLDREEKPVYILRAQAINRRTGRPVEPESEFIIKIHDINDNEPIFTKEVYTATVPEMSDVGTFVVQVTATDADDPTYGNSAKVVYSILQGQPYFSVESETGIIKTALLNMDRENREQYQVVIQAKDMGGQMGGLSGTTTVNITLTDVNDNPPRFPQSTYQFKTPESSPPGTPIGRIKASDADVGENAEIEYSITDGEGLDMFDVITDQETQEGIITVKKLLDFEKKKVYTLKVEASNPYVEPRFLYLGPFKDSATVRIVVEDVDEPPVFSKLAYILQIREDAQINTTIGSVTAQDPDAARNPVKYSVDRHTDMDRIFNIDSGNGSIFTSKLLDRETLLWHNITVIATEINNPKQSSRVPLYIKVLDVNDNAPEFAEFYETFVCEKAKADQLIQTLHAVDKDDPYSGHQFSFSLAPEAASGSNFTIQDNKDNTAGILTRKNGYNRHEMSTYLLPVVISDNDYPVQSSTGTVTVRVCACDHHGNMQSCHAEALIHPTGLSTGA

SEQ ID NO: 237 - protein, 560 aa, Homo Sapiens
SWVWNQFFVLEEYMGSDPLYVGKLHSDVDKGDGSIKYILSGEGASSIFIIDENTGDIHATKRLDREEQAYYTLRAQALDRLTNEPVEPESEFVIKIQDINDNEPKFLDGPYTAGVPEMSPVGTSVVQVTATDADDPTYGNSARVVYSILQGQPYFSVEPKTGVIKTALPNMDREAKDQYLLVIQAKDMVGQNGGLSGTTSVTVTLTDVNDNPPRFPRRSYQYNVPESLPVASVVARIKAADADIGANAEMEYKIVDGDGLGIFKISVDKETQEGIITIQKELDFEAKTSYTLRIEAANKDADPRFLSLGPFSDTTTVKIIVEDVDEPPVFSSPLYPMEVSEATQVGNIIGTVAAHDPDSSNSPVRYSIDRNTDLERYFNIDANSGVITTAKSLDRETNAIHNITVLAMESQNPSQVGRGYVAITILDINDNAPEFAMDYETTVCENAQPGQVIQKISAVDKDEPSNGHQFYFSLTTDATNNHNFSLKDNKDNTASILTRRNGFRRQEQSVYYLPIFIVDSGSPSLSSTSTLTIRVCDCDADGVAQTCNAEAYVLPAGLST

SEQ ID NO: 238 - protein, 560 aa, Homo Sapiens
GWVWNQMFVLEEFSGPEPILVGRLHTDLDPGSKKIKYILSGDGAGTIFQINDVTGDIHAIKRLDREEKAEYTLTAQAVDWETSKPLEPPSEFIIKVQDINDNAPEFLNGPYHATVPEMSILGTSVTNVTATDADDPVYGNSAKLVYSILEGQPYFSIEPETAIIKTALPNMDREAKEEYLVVIQAKDMGGHSGGLSGTTTLTVTLTDVNDNPPKFAQSLYHFSVPEDVVLGTAIGRVKANDQDIGENAQSSYDIIDGDGTALFEITSDAQAQDGIIRLRKPLDFETKKSYTLKVEAANVHIDPRFSGRGPFKDTATVKIVVEDADEPPVFSSPTYLLEVHENAALNSVIGQVTARDPDITSSPIRFSIDRHTDLERQFNINADDGKITLATPLDRELSVWHNITIIATEIRNHSQISRVPVAIKVLDVNDNAPEFASEYEAFLCENGKPGQVIQTVSAMDKDDPKNGHYFLYSLLPEMVNNPNFTIKKNEDNSLSILAKHNGFNRQKQEVYLLPIIISDSGNPPLSSTSTLTIRVCGCSNDGVVQSCNVEAYVLPIGLSM

SEQ ID NO: 239 - protein, 562 aa, Homo Sapiens
GWMWNQFFLLEEYTGTDTQYVGKLHTDQDKGDGNLKYILTGDGAGSLFVIDENTGDIHAAKKLDREEKSLYILRAKAIDRKTGRQVEPESEFIIKIHDINDNEPKFTKDLYTASVPEMSGVGTSVIQVTATDADDANYGNSAKVVYSILQGQPYFSVDPESGIIKTALPDMSRENREQYQVVIQAKDMGGQMGGLSGTTTVNITLTDVNNNPPRFPQSTYQFNSPESVPLGTHLGRIKANDPDVGENAEMEYSIAEGDGADMFDVITDKDTQEGIITVKQNLDFENQMLYTLRVDASNTHPDPRFLHLGPFKDTAVVKISVEDIDEPPVFTKVSYLIEVDEDVKEGSIIGQVTAYDPDARNNLIKYSVDRHTDMDRIFGIHSENGSIFTLKALDRESSPWHNITVTATEINNPKQSSHIPVFIRILDINDHAPEFAMYYETFVCENAKPGQLIQTVSVMDKDDPPRGHKFFFEPVPEFTLNPNFTIVDNKDNTAGIMTRKDGYSRNKMSTYLLPILIFDNDYPIQSSTGTLTIRVCACDNQGNMQSCTAEALILSAGLSTGA

SEQ ID NO: 240 - protein, 938 aa, Homo Sapiens
DLAPYFTSEPLSAVQKLGGPVVLHCSAQPVTTRISWLHNGKTLDGNLEHIKIHQGTLTILSLNSSLLGYYQCLANNSIGAIVSGPATVSVAVLGDFGSSTKHVITAEEKSAGFIGCRVPESNPKAEVRYKIRGKWLEHSTENYLILPSGNLQILNVSLEDKGSYKCAAYNPVTHQLKVEPIGRKLLVSRPSSDDVHILHPTHSQALAVLSRSPVTLECVVSGVPAPQVYWLKDGQDIAPESNWRRLYSHLATDSVDPADSGNYSCMAGNKSGDVKYVTYMVNVLEHASISKGLQDQIVSLGATVHFTCDVHGNPAPNCTWFHNAQPIHPSARHLTAGNGLKISGVTVEDVGMYQCVADNGIGFMHSTGRLEIENDGGFKPVIITAPVSAKVADGDFVTLSCNASGLPVPVIRWYDSHGLITSHPSQVLRSKSRKSQLSRPEGLNLEPVYFVLSQAGASSLHIQAVTQEHAGKYICEAANEHGTTQAEASLMVVPFETNTKAETVTLPDAAQNDDRSKRDGSETGLLSSFPVKVHPSAVESAPEKNASGISVPDAPIILSPPQTHTPDTYNLVWRAGKDGGLPINAYFVKYRKLDDGVGMLGSWHTVRVPGSENELHLAELEPSSLYEVLMVARSAAGEGQPAMLTFRTSKEKTASSKNTQASSPPVGIPKYPVVSEAANNNFGVVLTDSSRHSGVPEAPDRPTISTASETSVYVTWIPRANGGSPITAFKVEYKRMRTSNWLVAAEDIPPSKLSVEVRSLEPGSTYKFRVIAINHYGESFRSSASRPYQVVGFPNRFSSRPITGPHIAYTEAVSDTQIMLKWTYIPSSNNNTPIQGFYIYYRPTDSDNDSDYKRDVVEGSKQWHMIGHLQPETSYDIKMQCFNEGGESEFSNVMICETKVKRVPGASEYPVKDLSTPPNSLGSGGNVGPATSPARSSD

SEQ ID NO: 241 - protein, 320 aa, Homo Sapiens
QKLSKHKTPAQPQLKAANCCEEVKELKAQVANLSSLLSELNKKQERDWVSVVMQVMELESNSKRMESRLTDAESKYSEMNNQIDIMQLQAAQTVTQTSADAIYDCSSLYQKNYRISGVYKLPPDDFLGSPELEVFCDMETSGGGWTIIQRRKSGLVSFYRDWKQYKQGFGSIRGDFWLGNEHIHRLSRQPTRLRVEMEDWEGNLRYAEYSHFVLGNELNSYRLFLGNYTGNVGNDALQYHNNTAFSTKDKDNDNCLDKCAQLRKGGYWYNCCTDSNLNGVYYRLGEHNKHLDGITWYGWHGSTYSLKRVEMKIRPEDFKP

SEQ ID NO: 242 - protein, 394 aa, Homo Sapiens
QLTTESMPFNVAEGKEVLLLVHNLPQQLFGYSWYKGERVDGNRQIVGYAIGTQQATPGPANSGRETIYPNASLLIQNVTQNDTGFYTLQVIKSDLVNEEATGQFHVYPELPKPSISSNNSNPVEDKDAVAFTCEPETQDTTYLWWINNQSLPVSPRLQLSNGNRTLTLLSVTRNDTGPYECEIQNPVSANRSDPVTLNVTYGPDTPTISPSDTYYRPGANLSLSCYAASNPPAQYSWLINGTFQQSTQELFIPNITVNNSGSYTCHANNSVTGCNRTTVKTIIVTELSPVVAKPQIKASKTTVTGDKDSVNLTCSTNDTGISIRWFFKNQSLPSSERMKLSQGNTTLSINPVKREDAGTYWCEVFNPISKNQSDPIMLNVNYNALPQENGLSPG

SEQ ID NO: 243 - protein, 405 aa, Homo Sapiens
EISITLEPAQPSEGDNVTLVVHGLSGELLAYSWYAGPTLSVSYLVASYIVSTGDETPGPAHTGREAVRPDGSLDIQGILPRHSGTYILQTFNRQLQTEVGYGHVQVHEILAQPTVLANSTALVERRDTLRLMCSSPSPTAEVRWFFNGGALPVALRLGLSPDGRVLARHGIRREEAGAYQCEVWNPVSVSRSEPINLTVYFGPERVAILQDSTTRTGCTIKVDFNTSLTLWCVSRSCPEPEYVWTFNGQALKNGQDHLNISSMTAAQEGTYTCIAKNTKTLLSGSASVVVKLSAAAVATMIVPVPTKPTEGQDVTLTVQGYPKDLLVYAWYRGPASEPNRLLSQLPSGTWIAGPAHTGREVGFPNCSLLVQKLNLTDTGRYTLKTVTVQGKTETLEVELQVAPLG

SEQ ID NO: 244 - protein, 354 aa, Homo Sapiens
QIFITQTLGIKGYRTVVALDKVPEDVQEYSWYWGANDSAGNMIISHKPPSAQQPGPMYTGRERVNREGSLLIRPTALNDTGNYTVRVVAGNETQRATGWLEVLELGSNLGISVNASSLVENMDSVAADCLTNVTNITWYVNDVPTSSSDRMTISPDGKTLVILRVSRYDRTIQCMIESFPEIFQRSERISLTVAYGPDYVLLRSNPDDFNGIVTAEIGSQVEMECICYSFLDLKYHWIHNGSLLNFSDAKMNLSSLAWEQMGRYRCTVENPVTQLIMYMDVRIQAPHEDLTCCPQRFLHLRIHGDVPHHADSAGWRLHLWSPDPCSDQPLLNQDKSGSMSVHPRPEDKTRRASR

SEQ ID NO: 245 - protein, 125 aa, Homo Sapiens
ALYIQKIPEQPQKNQDLLLSVQGVPDTFQDFNWYLGEETYGGTRLFTYIPGIQRPQRDGSAMGQRDIVGFPNGSMLLRRAQPTDSGTYQVAITINSEWTMKAKTEVQVAEKNKELPSTHLPTNAG

SEQ ID NO: 246 - protein, 420 aa, Homo Sapiens
QLTLNANPLDATQSEDVVLPVFGTPRTPQIHGRSRELAKPSIAVSPGTAIEQKDMVTFYCTTKDVNITIHWVSNNLSIVFHERMQLSKDGKILTILIVQREDSGTYQCEARDALLSQRSDPIFLDVKYGPDPVEIKLESGVASGEVVEVMEGSSMTFLAETKSHPPCAYTWFLLDSILSHTTRTFTIHAVSREHEGLYRCLVSNSATHLSSLGTLKVRVLETLTMPQVVPSSLNLVENARSVDLTCQTVNQSVNVQWFLSGQPLLPSEHLQLSADNRTLIIHGLQRNDTGPYACEVWNWGSRARSEPLELTINYGPDQVHITRESASEMISTIEAELNSSLTLQCWAESKPGAEYRWTLEHSTGEHLGEQLIIRALTWEHDGIYNCTASNSLTGLARSTSVLVKVVGPQSSSLSSGAIAG

SEQ ID NO: 247 - protein, 206 aa, Homo Sapiens
WLFIASAPFEVAEGENVHLSVVYLPENLYSYGWYKGKTVEPNQLIAAYVIDTHVRTPGPAYSGRETISPSGDLHFQNVTLEDTGYYNLQVTYRNSQIEQASHHLRVYESVAQPSIQASSTTVTEKGSVVLTCHTNNTGTSFQWIFNNQRLQVTKRMKLSWFNHVLTIDPIRQEDAGEYQCEVSNPVSSNRSDPLKLTVKSDDNTLG

SEQ ID NO: 248 - protein, 121 aa, Homo Sapiens
KLTIESMPLSVAEGKEVLLLVHNLPQHLFGYSWYKGERVDGNSLIVGYVIGTQQATPGAAYSGRETIYTNASLLIQNVTQNDIGFYTLQVIKSDLVNEEATGQFHVYQENAPGLPVGAVAG

SEQ ID NO: 249 - protein, 120 aa, Homo Sapiens
FTIEALPSSAAEGKDVLLLACNISETIQAYYWHKGKTAEGSPLIAGYITDIQANIPGAAYSGRETVYPNGSLLFQNITLEDAGSYTLRTINASYDSDQATGQLHVHQNNVPGLPVGAVAG

SEQ ID NO: 250 - protein, 651 aa, Homo Sapiens
KLTIESTPFNVAEGKEVLLLVHNLPQHLFGYSWYKGERVDGNRQIIGYVIGTQQATPGPAYSGREIIYPNASLLIQNIIQNDTGFYTLHVIKSDLVNEEATGQFRVYPELPKPSISSNNSKPVEDKDAVAFTCEPETQDATYLWWVNNQSLPVSPRLQLSNGNRTLTLFNVTRNDSASYKCETQNPVSARRSDSVILNVLYGPDAPTISPLNTSYRSGENLNLSCHAASNPPAQYSWFVNGTFQQSTQELFIPNITVNNSGSYTCQAHNSDTGLNRTTVTTITVYAEPPKPFITSNNSNPVEDEDAVALTCEPEIQNTTYLWWVNNQSLPVSPRLQLSNDNRTLTLLSVTRNDVGPYECGIQNELSVDHSDPVILNVLYGPDDPTISPSYTYYRPGVNLSLSCHAASNPPAQYSWLIDGNIQQHTQELFISNITEKNSGLYTCQANNSASGHSRTTVKTITVSAELPKPSISSNNSKPVEDKDAVAFTCEPEAQNTTYLWWVNGQSLPVSPRLQLSNGNRTLTLFNVTRNDARAYVCGIQNSVSANRSDPVTLDVLYGPDTPIISPPDSSYLSGANLNLSCHSASNPSPQYSWRINGIPQQHTQVLFIAKITPNNNGTYACFVSNLATGRNNSIVKSITVSASGTSPGLSA

SEQ ID NO: 251 - protein, 286 aa, Homo Sapiens
KLTIESTPFNVAEGKEVLLLAHNLPQNRIGYSWYKGERVDGNSLIVGYVIGTQQATPGPAYSGRETIYPNASLLIQNVTQNDTGFYTLQVIKSDLVNEEATGQFHVYPELPKPSISSNNSNPVEDKDAVAFTCEPEVQNTTYLWWVNGQSLPVSPRLQLSNGNMTLTLLSVKRNDAGSYECEIQNPASANRSDPVTLNVLYGPDVPTISPSKANYRPGENLNLSCHAASNPPAQYSWFINGTFQQSTQELFIPNITVNNSGSYMCQAHNSATGLNRTTVTMITVSG

SEQ ID NO: 252 - protein, 207 aa, Homo Sapiens
TNIDVVPFNVAEGKEVLLVVHNESQNLYGYNWYKGERVHANYRIIGYVKNISQENAPGPAHNGRETIYPNGTLLIQNVTHNDAGIYTLHVIKENLVNEEVTRQFYVFSEPPKPSITSNNFNPVENKDIVVLTCQPETQNTTYLWWVNNQSLLVSPRLLLSTDNRTLVLLSATKNDIGPYECEIQNPVGASRSDPVTLNVRYESVQAS

SEQ ID NO: 253 - protein, 286 aa, Homo Sapiens
QLTIEAVPSNAAEGKEVLLLVHNLPQDPRGYNWYKGETVDANRRIIGYVISNQQITPGPAYSNRETIYPNASLLMRNVTRNDTGSYTLQVIKLNLMSEEVTGQFSVHPETPKPSISSNNSNPVEDKDAVAFTCEPETQNTTYLWWVNGQSLPVSPRLQLSNGNRTLTLLSVTRNDVGPYECEIQNPASANFSDPVTLNVLYGPDAPTISPSDTYYHAGVNLNLSCHAASNPPSQYSWSVNGTFQQYTQKLFIPNITTKNSGSYACHTTNSATGRNRTTVRMITVSD

SEQ ID NO: 254 - protein, 133 aa, Homo Sapiens
YQREKHNGGREEVTKVATQKHRQSPLNWTSSHFGEVTGSAEGWGPEEPLPYSRAFGEGASARPRCCRNGGTCVLGSFCVCPAHFTGRYCEHDQRRSECGALEHGAWTLRACHLCRCIFGALHCLPLQTPDRCD

SEQ ID NO: 255 - protein, 198 aa, Homo Sapiens
YQREKHNGGREEVTKVATQKHRQSPLNWTSSHFGEVTGSAEGWGPEEPLPYSWAFGEGASARPRCCRNGGTCVLGSFCVCPAHFTGRYCEHDQRRSECGALEHGAWTLRACHLCRCIFGALHCLPLQTPDRCDPKDFLASHAHGPSAGGAPSLLLLLPCALLHRLLRPDAPAHPRSLVPSVLQRERRPCGRPGLGHRL

SEQ ID NO: 256 - protein, 228 aa, Homo Sapiens
ILGGREAEAHARPYMASVQLNGAHLCGGVLVAEQWVLSAAHCLEDAADGKVQVLLGAHSLSQPEPSKRLYDVLRAVPHPDSQPDTIDHDLLLLQLSEKATLGPAVRPLPWQRVDRDVAPGTLCDVAGWGIVNHAGRRPDSLQHVLLPVLDRATCNRRTHHDGAITERLMCAESNRRDSCKGDSGGPLVCGGVLEGVVTSGSRVCGNRKKPGIYTRVASYAAWIDSVLA

SEQ ID NO: 257 - protein, 1213 aa, Homo Sapiens
EDCNELPPRRNTEILTGSWSDQTYPEGTQAIYKCRPGYRSLGNIIMVCRKGEWVALNPLRKCQKRPCGHPGDTPFGTFTLTGGNVFEYGVKAVYTCNEGYQLLGEINYRECDTDGWTNDIPICEVVKCLPVTAPENGKIVSSAMEPDREYHFGQAVRFVCNSGYKIEGDEEMHCSDDGFWSKEKPKCVEISCKSPDVINGSPISQKIIYKENERFQYKCNMGYEYSERGDAVCTESGWRPLPSCEEKSCDNPYIPNGDYSPLRIKHRTGDEITYQCRNGFYPATRGNTAKCTSTGWIPAPRCTLKPCDYPDIKHGGLYHENMRRPYFPVAVGKYYSYYCDEHFETPSGSYWDHIHCTQDGWSPAVPCLRKCYFPYLENGYNQNYGRKFVQGKSIDVACHPGYALPKAQTTVTCMENGWSPTPRCIRVKTCSKSSIDIENGFISESQYTYALKEKAKYQCKLGYVTADGETSGSITCGKDGWSAQPTCIKSCDIPVFMNARTKNDFTWFKLNDTLDYECHDGYESNTGSTTGSIVCGYNGWSDLPICYERECELPKIDVHLVPDRKKDQYKVGEVLKFSCKPGFTIVGPNSVQCYHFGLSPDLPICKEQVQSCGPPPELLNGNVKEKTKEEYGHSEVVEYYCNPRFLMKGPNKIQCVDGEWTTLPVCIVEESTCGDIPELEHGWAQLSSPPYYYGDSVEFNCSESFTMIGHRSITCIHGVWTQLPQCVAIDKLKKCKSSNLIILEEHLKNKKEFDHNSNIRYRCRGKEGWIHTVCINGRWDPEVNCSMAQIQLCPPPPQIPNSHNMTTTLNYRDGEKVSVLCQENYLIQEGEEITCKDGRWQSIPLCVEKIPCSQPPQIEHGTINSSRSSQESYAHGTKLSYTCEGGFRISEENETTCYMGKWSSPPQCEGLPCKSPPEISHGVVAHMSDSYQYGEEVTYKCFEGFGIDGPAIAKCLGEKWSHPPSCIKTDCLSLPSFENAIPMGEKKDVYKAGEQVTYTCATYYKMDGASNVTCINSRWTGRPTCRDTSCVNPPTVQNAYIVSRQMSKYPSGERVRYQCRSPYEMFGDEEVMCLNGNWTEPPQCKDSTGKCGPPPPIDNGDITSFPLSVYAPASSVEYQCQNLYQLEGNKRITCRNGQWSEPPKCLHPCVISREIMENYNIALRWTAKQKLYSRTGESVEFVCKRGYRLSSRSHTLRTTCWDGKLEYPTCAKR

SEQ ID NO: 258 - protein, 312 aa, Homo Sapiens
EVKPCDFPEIQHGGLYYKSLRRLYFPAAAGQSYSYYCDQNFVTPSGSYWDYIHCTQDGWLPTVPCLRTCSKSDIEIENGFISESSSIYILNKEIQYKCKPGYATADGNSSGSITCLQNGWSAQPICIKFCDMPVFENSRAKSNGMRFKLHDTLDYECYDGYEISYGNTTGSIVCGEDGWSHFPTCYNSSEKCGPPPPISNGDTTSFLLKVYVPQSRVEYQCQSYYELQGSNYVTCSNGEWSEPPRCIHPCIITEENMNKNNIQLKGKSDIKYYAKTGDTIEFMCKLGYNANTSVLSFQAVCREGIVEYPRCE

SEQ ID NO: 259 - protein, 359 aa, Homo Sapiens
KVTYTSQEDLVEKKCLAKKYTHLSCDKVFCQPWQRCIEGTCVCKLPYQCPKNGTAVCATNRRSFPTYCQQKSLECLHPGTKFLNNGTCTAEGKFSVSLKHGNTDSEGIVEVKLVDQDKTMFICKSSWSMREANVACLDLGFQQGADTQRRFKLSDLSINSTECLHVHCRGLETSLAECTFTKRRTMGYQDFADVVCYTQKADSPMDDFFQCVNGKYISQMKACDGINDCGDQSDELCCKACQGKGFHCKSGVCIPSQYQCNGEVDCITGEDEVGCAGFASVAQEETEILTADMDAERRRIKSLLPKLSCGVKNRMHIRRKRIVGGKRAQLGKMKQISLDIFKGLHRVYAILEFCCIILK

SEQ ID NO: 260 - protein, 337 aa, Homo Sapiens
CPQNCHCHSDLQHVICDKVGLQKIPKVSEKTKLLNLQRNNFPVLAANSFRAMPNLVSLHLQHCQIREVAAGAFRGLKQLIYLYLSHNDIRVLRAGAFDDLTELTYLYLDHNKVTELPRGLLSPLVNLFILQLNNNKIRELRAGAFQGAKDLRWLYLSENALSSLQPGALDDVENLAKFHVDRNQLSSYPSAALSKLRVVEELKLSHNPLKSIPDNAFQSFGRYLETLWLDNTNLEKFSDGAFLGVTTLKHVHLENNRLNQLPSNFPFDSLETLALTNNPWKCTCQLRGLRRWLEAKASRPDATCASPAKFKGQHIRDTDAFRSCKFPTKRSKKAGRH

SEQ ID NO: 261 - protein, 732 aa, Homo Sapiens
QRCPQACICDNSRRHVACRYQNLTEVPDAIPELTQRLDLQGNLLKVIPAAAFQGVPHLTHLDLRHCEVELVAEGAFRGLGRLLLLNLASNHLRELPQEALDGLGSLRRLELEGNALEELRPGTFGALGALATLNLAHNALVYLPAMAFQGLLRVRWLRLSHNALSVLAPEALAGLPALRRLSLHHNELQALPGPVLSQARGLARLELGHNPLTYAGEEDGLALPGLRELLLDGGALQALGPRAFAHCPRLHTLDLRGNQLDTLPPLQGPGQLRRLRLQGNPLWCGCQARPLLEWLARARVRSDGACQGPRRLRGEALDALRPWDLRCPGDAAQEEEELEERAVAGPRAPPRGPPRGPGEERAVAPCPRACVCVPESRHSSCEGCGLQAVPRGFRSDTQLLDLRRNHFPSVPRAAFPGLGHLVSLHLQHCGIAELEAGALAGLGRLIYLYLSDNQLAGLSAAALEGAPRLGYLYLERNRFLQVPGAALRALPSLFSLHLHDNAVDRLAPGDLGRTRALRWVYLSGNRITEVSLGALGPARELEKLHLDRNQLREVPTGALEGLPALLELQLSGNPLRALRDGAFQPVGRSLQHLFLNSSGLEQICPGAFSGLGPGLQSLHLQKNQLRALPALPSLSQLELIDLSSNPFHCDCQLLPLHRWLTGLNLRVGATCATPPNARGQRVKAAAAVFEDCPGWAARKAKRTPASRPSARRTPIKGRQCGADKVGKEKGRL

SEQ ID NO: 262 - protein, 1058 aa, Homo Sapiens
IEIPSSVQQVPTIIKQSKVQVAFPFDEYFQIECEAKGNPEPTFSWTKDGNPFYFTDHRIIPSNNSGTFRIPNEGHISHFQGKYRCFASNKLGIAMSEEIEFIVPSVPKFPKEKIDPLEVEEGDPIVLPCNPPKGLPPLHIYWMNIELEHIEQDERVYMSQKGDLYFANVEEKDSRNDYCCFAAFPRLRTIVQKMPMKLTVNSSNSIKQRKPKLLLPPTESGSESSITILKGEILLLECFAEGLPTPQVDWNKIGGDLPKGREAKENYGKTLKIENVSYQDKGNYRCTASNFLGTATHDFHVIVEEPPRWTKKPQSAVYSTGSNGILLCEAEGEPQPTIKWRVNGSPVDNHPFAGDVVFPREISFTNLQPNHTAVYQCEASNVHGTILANANIDVVDVRPLIQTKDGENYATVVGYSAFLHCEFFASPEAVVSWQKVEEVKPLEGRRYHIYENGTLQINRTTEEDAGSYSCWVENAIGKTAVTANLDIRNATKLRVSPKNPRIPKLHMLELHCESKCDSHLKHSLKLSWSKDGEAFEINGTEDGRIIIDGANLTISNVTLEDQGIYCCSAHTALDSAADITQVTVLDVPDPPENLHLSERQNRSVRLTWEAGADHNSNISEYIVEFEGNKEEPGRWEELTRVQGKKTTVILPLAPFVRYQFRVIAVNEVGRSQPSQPSDHHETPPAAPDRNPQNIRVQASQPKEMIIKWEPLKSMEQNGPGLEYRVTWKPQGAPVEWEEETVTNHTLRVMTPAVYAPYDVKVQAINQLGSGPDPQSVTLYSGEDYPDTAPVIHGVDVINSTLVKVTWSTVPKDRVHGRLKGYQINWWKTKSLLDGRTHPKEVNILRFSGQRNSGMVPSLDAFSEFHLTVLAYNSKGAGPESEPYIFQTPEGVPEQPTFLKVIKVDKDTATLSWGLPKKLNGNLTGYLLQYQIINDTYEIGELNDINITTPSKPSWHLSNLNATTKYKFYLRACTSQGCGKPITEESSTLGEGSKGIGKISGVNLTQKTHPVEVFEPGAEHIVRLMTKNWGDNDSIFQDVIETRGREYAGLYDDISTQGW

SEQ ID NO: 263 - protein, 195 aa, Homo Sapiens
RRVVSGQKVCFADFKHPCYKMAYFHELSSRVSFQEARLACESEGGVLLSLENEAEQKLIESMLQNLTKPGTGISDGDFWIGLWRNGDGQTSGACPDLYQWSDGSNSQYRNWYTDEPSCGSEKCVVMYHQPTANPGLGGPYLYQWNDDRCNMKHNYICKYEPEINPTAPVEKPYLTNQPGDTHQNVVVTEAGIIPN

SEQ ID NO: 264 - protein, 1163 aa, Homo Sapiens
RQTMLTQSVRRVQPGKKNPSIFAKPADTLESPGEWTTWFNIDYPGGKGDYERLDAIRFYYGDRVCARPLRLEARTTDWTPAGSTGQVVHGSPREGFWCLNREQRPGQNCSNYTVRFLCPPGSLRRDTERIWSPWSPWSKCSAACGQTGVQTRTRICLAEMVSLCSEASEEGQHCMGQDCTACDLTCPMGQVNADCDACMCQDFMLHGAVSLPGGAPASGAAIYLLTKTPKLLTQTDSDGRFRIPGLCPDGKSILKITKVKFAPIVLTMPKTSLKAATIKAEFVRAETPYMVMNPETKARRAGQSVSLCCKATGKPRPDKYFWYHNDTLLDPSLYKHESKLVLRKLQQHQAGEYFCKAQSDAGAVKSKVAQLIVIASDETPCNPVPESYLIRLPHDCFQNATNSFYYDVGRCPVKTCAGQQDNGIRCRDAVQNCCGISKTEEREIQCSGYTLPTKVAKECSCQRCTETRSIVRGRVSAADNGEPMRFGHVYMGNSRVSMTGYKGTFTLHVPQDTERLVLTFVDRLQKFVNTTKVLPFNKKGSAVFHEIKMLRRKEPITLEAMETNIIPLGEVVGEDPMAELEIPSRSFYRQNGEPYIGKVKASVTFLDPRNISTATAAQTDLNFINDEGDTFPLRTYGMFSVDFRDEVTSEPLNAGKVKVHLDSTQVKMPEHISTVKLWSLNPDTGLWEEEGDFKFENQRRNKREDRTFLVGNLEIRERRLFNLDVPESRRCFVKVRAYRSERFLPSEQIQGVVISVINLEPRTGFLSNPRAWGRFDSVITGPNGACVPAFCDDQSPDAYSAYVLASLAGEELQAVESSPKFNPNAIGVPQPYLNKLNYRRTDHEDPRVKKTAFQISMAKPRPNSAEESNGPIYAFENLRACEEAPPSAAHFRFYQIEGDRYDYNTVPFNEDDPMSWTEDYLAWWPKPMEFRACYIKVKIVGPLEVNVRSRNMGGTHRRTVGKLYGIRDVRSTRDRDQPNVSAACLEFKCSGMLYDQDRVDRTLVKVIPQGSCRRASVNPMLHEYLVNHLPLAVNNDTSEYTMLAPLDPLGHNYGIYTVTDQDPRTAKEIALGRCFDGTSDGSSRIMKSNVGVALTFNCVERQVGRQSAFQYLQSTPAQSPAAGTVQGRVPSRRQQRASRGGQRQSGVVASLRFPRVAQQPLIN

SEQ ID NO: 265 - protein, 447 aa, Homo Sapiens
EERVFLVGNVEIRERRLFNLDVPERRRCFVKVRAYANDKFTPSEQVEGVVVTLVNLEPAPGFSANPRAWGRFDSAVTGPNGACLPAFCDADRPDAYTALVTATLGGEELEPAPSLPRPLPATVGVTQPYLDRLGYRRTDHDDPAFKRNGFRINLAKPRPGDPAEANGPVYPWRSLRECQGAPVTASHFRFARVEADKYEYNVVPFREGTPASWTGDLLAWWPNPQEFRACFLKVKIQGPQEYMVRSHNAGGSHPRTRGQLYGLRDARSVRDPERPGTSAACVEFKCSGMLFDQRQVDRTLVTIMPQGSCRRVAVNGLLRDYLTRHPPPVPAEDPAAFSMLAPLDPLGHNYGVYTVTDQSPRLAKEIAIGRCFDGSSDGFSREMKADAGTAVTFQCREPPAGRPSLFQRLLESPATALGDIRREMSEAAQAQARASGPLRTRRGRVRQ

SEQ ID NO: 266 - protein, 870 aa, Homo Sapiens
GVQLQDNGYNGLLIAINPQVPENQNLISNIKEMITEASFYLFNATKRRVFFRNIKILIPATWKANNNSKIKQESYEKANVIVTDWYGAHGDDPYTLQYRGCGKEGKYIHFTPNFLLNDNLTAGYGSRGRVFVHEWAHLRWGVFDEYNNDKPFYINGQNQIKVTRCSSDITGIFVCEKGPCPQENCIISKLFKEGCTFIYNSTQNATASIMFMQSLSSVVEFCNASTHNQEAPNLQNQMCSLRSAWDVITDSADFHHSFPMNGTELPPPPTFSLVQAGDKVVCLVLDVSSKMAEADRLLQLQQAAEFYLMQIVEIHTFVGIASFDSKGEIRAQLHQINSNDDRKLLVSYLPTTVSAKTDISICSGLKKGFEVVEKLNGKAYGSVMILVTSGDDKLLGNCLPTVLSSGSTIHSIALGSSAAPNLEELSRLTGGLKFFVPDISNSNSMIDAFSRISSGTGDIFQQHIQLESTGENVKPHHQLKNTVTVDNTVGNDTMFLVTWQASGPPEIILFDPDGRKYYTNNFITNLTFRTASLWIPGTAKPGHWTYTLNNTHHSLQALKVTVTSRASNSAVPPATVEAFVERDSLHFPHPVMIYANVKQGFYPILNATVTATVEPETGDPVTLRLLDDGAGADVIKNDGIYSRYFFSFAANGRYSLKVHVNHSPSISTPAHSIPGSHAMYVPGYTANGNIQMNAPRKSVGRNEEERKWGFSRVSSGGSFSVLGVPAGPHPDVFPPCKIIDLEAVKVEEELTLSWTAPGEDFDQGQATSYEIRMSKSLQNIQDDFNNAILVNTSKRNPQQAGIREIFTFSPQISTNGPEHQPNGETHESHRIYVAIRAMDRNSLQSAVSNIAQAPLFIPPNSDPVPARDYL

SEQ ID NO: 267 - protein, 871 aa, Homo Sapiens
SFIKLNNNGFEDIVIVIDPSVPEDEKIIEQIEDMVTTASTYLFEATEKRFFFKNVSILIPENWKENPQYKRPKHENHKHADVIVAPPTLPGRDEPYTKQFTECGEKGEYIHFTPDLLLGKKQNEYGPPGKLFVHEWAHLRWGVFDEYNEDQPFYRAKSKKIEATRCSAGISGRNRVYKCQGGSCLSRACRIDSTTKLYGKDCQFFPDKVQTEKASIMFMQSIDSVVEFCNEKTHNQEAPSLQNIKCNFRSTWEVISNSEDFKNTIPMVTPPPPPVFSLLKISQRIVCLVLDKSGSMGGKDRLNRMNQAAKHFLLQTVENGSWVGMVHFDSTATIVNKLIQIKSSDERNTLMAGLPTYPLGGTSICSGIKYAFQVIGELHSQLDGSEVLLLTDGEDNTASSCIDEVKQSGAIVHFIALGRAADEAVIEMSKITGGSHFYVSDEAQNNGLIDAFGALTSGNTDLSQKSLQLESKGLTLNSNAWMNDTVIIDSTVGKDTFFLITWNSLPPSISLWDPSGTIMENFTVDATSKMAYLSIPGTAKVGTWAYNLQAKANPETLTITVTSRAANSSVPPITVNAKMNKDVNSFPSPMIVYAEILQGYVPVLGANVTAFIESQNGHTEVLELLDNGAGADSFKNDGVYSRYFTAYTENGRYSLKVRAHGGANTARLKLRPPLNRAAYIPGWVVNGEIEANPPRPEIDEDTQTTLEDFSRTASGGAFVVSQVPSLPLPDQYPPSQITDLDATVHEDKIILTWTAPGDNFDVGKVQRYIIRISASILDLRDSFDDALQLNTTDLSPKEANSKESFAFKPENISEENATHIFIAIKSIDKSNLTSKVSNIAQVTLFIPQANPDDIDPTPTPTPTPDKSHNSG

SEQ ID NO: 268 - protein, 177 aa, Homo Sapiens
CLVTHHNFSRCKRGTGVHKLEHHAKLKCIKEKSELKSAEGSTWNCCPIDWRAFQSNCYFPLTDNKTWAESERNCSGMGAHLMTISTEAEQNFIIQFLDRRLSYFLGLRDENAKGQWRWVDQTPFNPRRVFWHKNEPDNSQGENCVVLVYNQDKWAWNDVPCNFEASRICKIPGTTLN

SEQ ID NO: 269 - protein, 256 aa, Homo Sapiens
QNSKFQRDLVTLRTDFSNFTSNTVAEIQALTSQGSSLEETIASLKAEVEGFKQERQAGVSELQEHTTQKAHLGHCPHCPSVCVPVHSEMLLRVQQLVQDLKKLTCQVATLNNNASTEGTCCPVNWVEHQDSCYWFSHSGMSWAEAEKYCQLKNAHLVVINSREEQNFVQKYLGSAYTWMGLSDPEGAWKWVDGTDYATGFQNWKPGQPDDWQGHGLGGGEDCAHFHPDGRWNDDVCQRPYHWVCEAGLGQTSQESH

SEQ ID NO: 270 - protein, 302 aa, Homo Sapiens
ARGAEREWEGGWGGAQEEEREREALMLKHLQEALGLPAGRGDENPAGTVEGKEDWEMEEDQGEEEEEEATPTPSSGPSPSPTPEDIVTYILGRLAGLDAGLHQLHVRLHALDTRVVELTQGLRQLRNAAGDTRDAVQALQEAQGRAEREHGRLEGCLKGLRLGHKCFLLSRDFEAQAAAQARCTARGGSLAQPADRQQMEALTRYLRAALAPYNWPVWLGVHDRRAEGLYLFENGQRVSFFAWHRSPRPELGAQPSASPHPLSPDQPNGGTLENCVAQASDDGSWWDHDCQRRLYYVCEFPF

SEQ ID NO: 271 - protein, 201 aa, Homo Sapiens
HVTLKIEMKKMNKLQNISEELQRNISLQLMSNMNISNKIRNLSTTLQTIATKLCRELYSKEQEHKCKPCPRRWIWHKDSCYFLSDDVQTWQESKMACAAQNASLLKINNKNALEFIKSQSRSYDYWLGLSPEEDSTRGMRVDNIINSSAWVIRNAPDLNNMYCGYINRLYVQYYHCTYKQRMICEKMANPVQLGSTYFREA

SEQ ID NO: 272 - protein, 168 aa, Homo Sapiens
LQISNDINSDSEKLSQLQKTIQQQQDNLSQQLGNSNNLSMEEEFLKSQISSLLKRQEQMAIKLCQELIIHTSDHRCNPCPKMWQWYQNSCYYFTTNEEKTWANSRKDCIDKNSTLVKIDSLEEKDFLMSQPLLMFSFFWLGLSWDSSGRSWFWEDGSVPSPSLYVSNY

SEQ ID NO: 273 - protein, 353 aa, Homo Sapiens
MKRQAAEEACILRGGALSTVRAGAELRAVLALLRAGPGPGGGSKDLLFWVALERRRSHCTLENEPLRGFSWLSSDPGGLESDTLQWVEEPQRSCTARRCAVLQATGGVEPAGWKEMRCHLRANGYLCKYQFEVLCPAPRPGAASNLSYRAPFQLHSAALDFSPPGTEVSALCRGQLPISVTCIADEIGARWDKLSGDVLCPCPGRYLRAGKCAELPNCLDDLGGFACECATGFELGKDGRSCVTSGEGQPTLGGTGVPTRRPPATATSPVPQRTWPIRVDEKLGETPLVPEQDNSVTSIPEIPRWGSQSTMSTLQMSLQAESKATITPSGSVISKFNSTTSSATPQAFDSSSA

SEQ ID NO: 274 - protein, 185 aa, Homo Sapiens
KYQELMEELRMLSFQQMTWRTNMTGMAGLAGLKHDIARVRADTNQSLVELWGLLDCRRITCPEGWLPFEGKCYYFSPSTKSWDEARMFCQENYSHLVIINSFAEHNFVAKAHGSPRVYWLGLNDRAQEGDWRWLDGSPVTLSFWEPEEPNNIHDEDCATMNKGGTWNDLSCYKTTYWICERKCSC

SEQ ID NO: 275 - protein, 420 aa, Homo Sapiens
EVWPPQLQEQAPMAGALNRKESFLLLSLHNRLRSWVQPPAADMRRLDWSDSLAQLAQARAALCGTPTPSLASGLWRTLQVGWNMQLLPAGLVSFVEVVSLWFAEGQRYSHAAGECARNATCTHYTQLVWATSSQLGCGRHLCSAGQAAIEAFVCAYSPRGNWEVNGKTIVPYKKGAWCSLCTASVSGCFKAWDHAGGLCEVPRNPCRMSCQNHGRLNISTCHCHCPPGYTGRYCQVRCSLQCVHGRLREEECSCVCDIGYGGAQCATKVHFPFHTCDLRIDGDCFMVSSEADTYYRARMKCQRKGGVLAQIKSQKVQDILAFYLGRLETTNEVIDSDFETRNFWIGLTYKTAKDSFRWATGEHQAFTSFAFGQPDNHGFGNCVELQASAAFNWNNQRCKTRNRYICQFAQEHISRWGPGS

SEQ ID NO: 276 - protein, 420 aa, Homo Sapiens
EVWPPQLQEQAPMAGALNRKESFLLLSLHNRLRSWVQPPAADMRRLDWSDSLAQLAQARAALCGTPTPSLASGLWRTLQVGWNMQLLPAGLASFVEVVSLWFAEGQRYSHAAGECARNATCTHYMQLVWATSSQLGCGRHLCSAGQAAIEAFVCAYSPRGNWEVNGKTIVPYKKGAWCSLCTASVSGCFKAWDHAGGLCEVPRNPCRMSCQNHGRLNISTCHCHCPPGYTGRYCQVRCSLQCVHGRFREEECSCVCDIGYGGAQCATKVHFPFHTCDLRIDGDCFMVSSEADTYYRARMKCQRKGGVLAQIKRQKVQDILAFYLGRLETTNEVIDSDFETRNFWIGLTYKTAKDSFRWATGEHQAFTSFAFGQPDNHGFGNCVELQASAAFNWNDQRCKTRNRYICQFAQEHISRWGPGS

SEQ ID NO: 277 - protein, 117 aa, Homo Sapiens
FPQTDISISPALPELPLPSLCPLFWMEFKGHCYRFFPLNKTWAEADLYCSEFSVGRKSAKLASIHSWEENVFVYDLVNSCVPGIPADVWTGLHDHRQVRKQWPLGPLGSSSQDSILI

SEQ ID NO: 278 - protein, 207 aa, Homo Sapiens
QYYQLSNTGQDTISQMEERLGNTSQELQSLQVQNIKLAGSLQHVAEKLCRELYNKAGAHRCSPCTEQWKWHGDNCYQFYKDSKSWEDCKYFCLSENSTMLKINKQEDLEFAASQSYSEFFYSYWTGLLRPDSGKAWLWMDGTPFTSELFHIIIDVTSPRSRDCVAILNGMIFSKDCKELKRCVCERRAGMVKPESLHVPPETLGEGD

SEQ ID NO: 279 - protein, 175 aa, Homo Sapiens
AVMQRNYLQDENENRTGTLQQLAKRFCQYVVKQSELKGTFKGHKCSPCDTNWRYYGDSCYGFFRHNLTWEESKQYCTDMNATLLKIDNRNIVEYIKARTHLIRWVGLSRQKSNEVWKWEDGSVISENMFEFLEDGKGNMNCAYFHNGKMHPTFCENKHYLMCERKAGMTKVDQLP

SEQ ID NO: 280 - protein, 124 aa, Homo Sapiens
KLTRDSQSLCPYDWIGFQNKCYYFSKEEGDWNSSKYNCSTQHADLTIIDNIEETNFLRRYKCSSDHWIGLKMAKNRTGQWVDGATFTKSFGMRGSEGCAYLSDDGAATARCYTERKWICRKRIH

SEQ ID NO: 281 - protein, 95 aa, Homo Sapiens
RANCHQEPSVCLQAACPESWIGFQRKCFYFSDDTKNWTSSQRFCDSQDADLAQVESFQELNFLLRYKGPSDHWIGLSREQGQPWKWINGTEWTRQ

SEQ ID NO: 282 - protein, 175 aa, Homo Sapiens
HTSRLKARKHSKRRVRDKDGDLKTQIEKLWTEVNALKEIQALQTVCLRGTKVHKKCYLASEGLKHFHEANEDCISKGGILVIPRNSDEINALQDYGKRSLPGVNDFWLGINDMVTEGKFVDVNGIAISFLNWDRAQPNGGKRENCVLFSQSAQGKWSDEACRSSKRYICEFTIPQ

SEQ ID NO: 283 - protein, 168 aa, Homo Sapiens
QKYSQLLEKKTTKELVHTTLECVKKNMPVEETAWSCCPKNWKSFSSNCYFISTESASWQDSEKDCARMEAHLLVINTQEEQDFIFQNLQEESAYFVGLSDPEGQRHWQWVDQTPYNESSTFWHPREPSDPNERCVVLNFRKSPKRWGWNDVNCLGPQRSVCEMMKIHL

SEQ ID NO: 284 - protein, 169 aa, Homo Sapiens
NFMYSKTVKRLSKLREYQQYHPSLTCVMEGKDIEDWSCCPTPWTSFQSSCYFISTGMQSWTKSQKNCSVMGADLVVINTREEQDFIIQNLKRNSSYFLGLSDPGGRRHWQWVDQTPYNENVTFWHSGEPNNLDERCAIINFRSSEEWGWNDIHCHVPQKSICKMKKIYI

SEQ ID NO: 285 - protein, 179 aa, Homo Sapiens
RCVVTFRIFQTCDEKKFQLPENFTELSCYNYGSGSVKNCCPLNWEYFQSSCYFFSTDTISWALSLKNCSAMGAHLVVINSQEEQEFLSYKKPKMREFFIGLSDQVVEGQWQWVDGTPLTKSLSFWDVGEPNNIATLEDCATMRDSSNPRQNWNDVTCFLNYFRICEMVGINPLNKGKSL

SEQ ID NO: 286 - protein, 507 aa, Homo Sapiens
QQQTRPVPKPVQAVILGDNITGHLPFEPNNHHHFGREAEMRELIQTFKGHMENSSAWVVEIQMLKCRVDNVNSQLQVLGDHLGNTNADIQMVKGVLKDATTLSLQTQMLRSSLEGTNAEIQRLKEDLEKADALTFQTLNFLKSSLENTSIELHVLSRGLENANSEIQMLNASLETANTQAQLANSSLKNANAEIYVLRGHLDSVNDLRTQNQVLRNSLEGANAEIQGLKENLQNTNALNSQTQAFIKSSFDNTSAEIQFLRGHLERAGDEIHVLKRDLKMVTAQTQKANGRLDQTDTQIQVFKSEMENVNTLNAQIQVLNGHMKNASREIQTLKQGMKNASALTSQTQMLDSNLQKASAEIQRLRGDLENTKALTMEIQQEQSRLKTLHVVITSQEQLQRTQSQLLQMVLQGWKFNGGSLYYFSSVKKSWHEAEQFCVSQGAHLASVASKEEQAFLVEFTSKVYYWIGLTDRGTEGSWRWTDGTPFNAAQNKASHSTRKGCCLHLTV

SEQ ID NO: 287 - protein, 241 aa, Homo Sapiens
LSKASTERAALLDGHDLLRTNASKQTAALGALKEEVGDCHSCCSGTQAQLQTTRAELGEAQAKLMEQESALRELRERVTQGLAEAGRGREDVRTELFRALEAVRLQNNSCEPCPTSWLSFEGSCYFFSVPKTTWAAAQDHCADASAHLVIVGGLDEQGFLTRNTRGRGYWLGLRAVRHLGKVQGYQWVDGVSLSFSHWNQGEPNDAWGRENCVMMLHTGLWNDAPCDSEKDGWICEKRHNC

SEQ ID NO: 288 - protein, 329 aa, Homo Sapiens
QVSKVPSSLSQEQSEQDAIYQNLTQLKAAVGELSEKSKLQEIYQELTQLKAAVGELPEKSKLQEIYQELTRLKAAVGELPEKSKLQEIYQELTRLKAAVGELPEKSKLQEIYQELTRLKAAVGELPEKSKLQEIYQELTELKAAVGELPEKSKLQEIYQELTQLKAAVGELPDQSKQQQIYQELTDLKTAFERLCRHCPKDWTFFQGNCYFMSNSQRNWHDSVTACQEVRAQLVVIKTAEEQNFLQLQTSRSNRFSWMGLSDLNQEGTWQWVDGSPLSPSFQRYWNSGEPNNSGNEDCAEFSGSGWNDNRCDVDNYWICKKPAACFRDE

SEQ ID NO: 289 - protein, 161 aa, Homo Sapiens
PQIFNKSNDGFTTTRSYGTVSQIFGSSSPSPNGFITTRSYGTVCPKDWEFYQARCFFLSTSESSWNESRDFCKGKGSTLAIVNTPEKLKFLQDITDAEKYFIGLIYHREEKRWRWINNSVFNGNVTNQNQNFNCATIGLTKTFDAASCDISYRRICEKNAK

SEQ ID NO: 290 - protein, 168 aa, Homo Sapiens
TYHFTYGETGKRLSELHSYHSSLTCFSEGTKVPAWGCCPASWKSFGSSCYFISSEEKVWSKSEQNCVEMGAHLVVFNTEAEQNFIVQQLNESFSYFLGLSDPQGNNNWQWIDKTPYEKNVRFWHLGEPNHSAEQCASIVFWKPTGWGWNDVICETRRNSICEMNKIYL

SEQ ID NO: 291 - protein, 67 aa, Homo Sapiens
TMGVLSSPCPPNWIIYEKSCYLFSMSLNSWDGSKRQCWQLGSNLLKIDSSNELVSVDFCYDYLWCVS

SEQ ID NO: 292 - protein, 185 aa, Homo Sapiens
KLLQVSTIAMQQQEKLIQQERALLNFTEWKRSCALQMKYCQAFMQNSLSSAHNSSPCPNNWIQNRESCYYVSEIWSIWHTSQENCLKEGSTLLQIESKEEMDFITGSLRKIKGSYDYWVGLSQDGHSGRWLWQDGSSPSPGLLPAERSQSANQVCGYVKSNSLLSSNCSTWKYFICEKYALRSSV

SEQ ID NO: 293 - protein, 79 aa, Homo Sapiens
KTVRTSPLELAFPLQRSVSFNFSTVHKSCPAKDWKVHKGKCYWIAETKKSWNKSQNDCAINNSYLMVIQDITAMVRFNI

SEQ ID NO: 294 - protein, 320 aa, Homo Sapiens
QRHSPQEAPHVQYERLGSDVTLPCGTANWDAAVTWRVNGTDLAPDLLNGSQLVLHGLELGHSGLYACFHRDSWHLRHQVLLHVGLPPREPVLSCRSNTYPKGFYCSWHLPTPTYIPNTFNVTVLHGSKIMVCEKDPALKNRCHIRYMHLFSTIKYKVSISVSNALGHNATAITFDEFTIVKPDPPENVVARPVPSNPRRLEVTWQTPSTWPDPESFPLKFFLRYRPLILDQWQHVELSDGTAHTITDAYAGKEYIIQVAAKDNEIGTWSDWSVAAHATPWTEEPRHLTTEAQAAETTTSTTSSLAPPPTTKICDPGELGS

SEQ ID NO: 295 - protein, 607 aa, Homo Sapiens
EFTWYRRYGHGVSEEDKGFGPIFEEQPINTIYPEESLEGKVSLNCRARASPFPVYKWRMNNGDVDLTSDRYSMVGGNLVINNPDKQKDAGIYYCLASNNYGMVRSTEATLSFGYLDPFPPEERPEVRVKEGKGMVLLCDPPYHFPDDLSYRWLLNEFPVFITMDKRRFVSQTNGNLYIANVEASDKGNYSCFVSSPSITKSVFSKFIPLIPIPERTTKPYPADIVVQFKDVYALMGQNVTLECFALGNPVPDIRWRKVLEPMPSTAEISTSGAVLKIFNIQLEDEGIYECEAENIRGKDKHQARIYVQAFPEWVEHINDTEVDIGSDLYWPCVATGKPIPTIRWLKNGYAYHKGELRLYDVTFENAGMYQCIAENTYGAIYANAELKILALAPTFEMNPMKKKILAAKGGRVIIECKPKAAPKPKFSWSKGTEWLVNSSRILIWEDGSLEINNITRNDGGIYTCFAENNRGKANSTGTLVITDPTRIILAPINADITVGENATMQCAASFDPALDLTFVWSFNGYVIDFNKENIHYQRNFMLDSNGELLIRNAQLKHAGRYTCTAQTIVDNSSASADLVVRGKNRKGGEKNMVDSFLPVCASLPPTW

SEQ ID NO: 296 - protein, 982 aa, Homo Sapiens
SQTTFGPVFEDQPLSVLFPEESTEEQVLLACRARASPPATYRWKMNGTEMKLEPGSRHQLVGGNLVIMNPTKAQDAGVYQCLASNPVGTVVSREAILRFGFLQEFSKEERDPVKAHEGWGVMLPCNPPAHYPGLSYRWLLNEFPNFIPTDGRHFVSQTTGNLYIARTNASDLGNYSCLATSHMDFSTKSVFSKFAQLNLAAEDTRLFAPSIKARFPAETYALVGQQVTLECFAFGNPVPRIKWRKVDGSLSPQWTTAEPTLQIPSVSFEDEGTYECEAENSKGRDTVQGRIIVQAQPEWLKVISDTEADIGSNLRWGCAAAGKPRPTVRWLRNGEPLASQNRVEVLAGDLRFSKLSLEDSGMYQCVAENKHGTIYASAELAVQALAPDFRLNPVRRLIPAARGGEILIPCQPRAAPKAVVLWSKGTEILVNSSRVTVTPDGTLIIRNISRSDEGKYTCFAENFMGKANSTGILSVRDATKITLAPSSADINLGDNLTLQCHASHDPTMDLTFTWTLDDFPIDFDKPGGHYRRTNVKETIGDLTILNAQLRHGGKYTCMAQTVVDSASKEATVLVRGPPGPPGGVVVRDIGDTTIQLSWSRGFDNHSPIAKYTLQARTPPAGKWKQVRTNPANIEGNAETAQVLGLTPWMDYEFRVIASNILGTGEPSGPSSKIRTREAAPSVAPSGLSGGGGAPGELIVNWTPMSREYQNGDGFGYLLSFRRQGSTHWQTARVPGADAQYFVYSNESVRPYTPFEVKIRSYNRRGDGPESLTALVYSAEEEPRVAPTKVWAKGVSSSEMNVTWEPVQQDMNGILLGYEIRYWKAGDKEAAADRVRTAGLDTSARVSGLHPNTKYHVTVRAYNRAGTGPASPSANATTMKPPPRRPPGNISWTFSSSSLSIKWDPVVPFRNESAVTGYKMLYQNDLHLTPTLHLTGKNWIEIPVPEDIGHALVQIRTTGPGGDGIPAEVHIVRNGGTSMMVEN

SEQ ID NO: 297 - protein, 983 aa, Homo Sapiens
ELLLQGPVFIKEPSNSIFPVGSEDKKITLHCEARGNPSPHYRWQLNGSDIDMSMEHRYKLNGGNLVVINPNRNWDTGTYQCFATNSLGTIVSREAKLQFAYLENFKTKMRSTVSVREGQGVVLLCGPPPHSGELSYAWIFNEYPSFVEEDSRRFVSQETGHLYISKVEPSDVGNYTCVVTSMVTNARVLGSPTPLVLRSDGVMGEYEPKIEVQFPETLPAAKGSTVKLECFALGNPIPQINWRRSDGLPFSSKIKLRKFSGVLEIPNFQQEDAGSYECIAENSRGKNVARGRLTYYAKPHWVQLIKDVEIAVEDSLYWECRASGKPKPSYRWLKNGAALVLEERTQIENGALTISNLSVTDSGMFQCIAENKHGLVYSSAELKVVASAPDFSKNPMKKLVQVQVGSLVSLDCKPRASPRALSSWKKGDVSVQEHERISLLNDGGLKIANVTKADAGTYTCMAENQFGKANGTTHLVVTEPTRITLAPSNMDVSVGESVILPCQVQHDPLLDIIFTWYFNGALADFKKDGSHFEKVGGSSSGDLMIRNIQLKHSGKYVCMVQTGVDSVSSAADLIVRGSPGPPENVKVDEITDTTAQLSWKEGKDNHSPVISYSIQARTPFSVGWQTVTTVPEVIDGKTHTATVVELNPWVEYEFRVVASNKIGGGEPSLPSEKVRTEEAVPEVPPSEVSGGGGSRSELVITWDPVPEELQNGEGFGYVVAFRPLGVTTWIQTVVTSPDTPRYVFRNESIVPYSPYEVKVGVYNNKGEGPFSPVTTVFSAEEEPTVAPSQVSANSLSSSEIEVSWNTIPWKLSNGHLLGYEVRYWNGGGKEESSSKMKVAGNETSARLRGLKSNLAYYTAVRAYNSAGAGPFSATVNVTTKKTPPSQPPGNVVWNATDTKVLLNWEQVKAMENESEVTGYKVFYRTSSQNNVQVLNTNKTSAELVLPIKEDYIIEVKATTDGGDGTSSEQIRIPRITSMDARGS

SEQ ID NO: 298 - protein, 671 aa, Homo Sapiens
MEENVFWECKANGRPKPTYKWLKNGEPLLTRDRIQIEQGTLNITIVNLSDAGMYQCLAENKHGVIFSNAELSVIAVGPDFSRTLLKRVTLVKVGGEVVIECKPKASPKPVYTWKKGRDILKENERITISEDGNLRIINVTKSDAGSYTCIATNHFGTASSTGNLVVKDPTRVMVPPSSMDVTVGESIVLPCQVTHDHSLDIVFTWSFNGHLIDFDRDGDHFERVGGDSAGDLMIRNIQLKHAGKYVCMVQTSVDRLSAAADLIVRGPPGPPEAVTIDEITDTTAQLSWRPGPDNHSPITMYVIQARTPFSVGWQAVSTVPELIDGKTFTATVVGLNPWVEYEFRTVAANVIGIGEPSRPSEKRRTEEALPEVTPANVSGGGGSKSELVITWETVPEELQNGRGFGYVVAFRPYGKMIWMLTVLASADASRYVFRNESVHPFSPFEVKVGVFNNKGEGPFSPTTVVYSAEEEPTKPPASIFARSLSATDIEVFWASPLEKNRGRIQGYEVKYWRHEDKEENARKIRTVGNQTSTKITNLKGSVLYHLAVKAYNSAGTGPSSATVNVTTRKPPPSQPPGNIIWNSSDSKIILNWDQVKALDNESEVKGYKVLYRWNRQSSTSVIETNKTSVELSLPFDEDYIIEIKPFSDGGDGSSSEQIRIPKISNAYARGS

SEQ ID NO: 299 - protein, 1054 aa, Homo Sapiens
EYSKSLPGLSTSYAALLRIKKSSSSSLFGSKTRPRYSSPSLGTLSASSPSWLGAAQNYYSPINLYHSSDAFKQDESVDYGPVFVQEPDDIIFPTDSDEKKVALNCEVRGNPVPSYRWLRNGTEIDLESDYRYSLIDGTFIISNPSEAKDSGHYQCLATNTVGSILSREATLQFAYLGNFSGRTRSAVSVREGQGVVLMCSPPPHSPEIIYSWVFNEFPSFVAEDSRRFISQETGNLYISKVQTSDVGSYICLVKNTVTNARVLSPPTPLTLRNDGVMGEYEPKIEVHFPFTVTAAKGTTVKMECFALGNPVPTITWMKVNGYIPSKARLRKSQAVLEIPNVQLDDAGIYECRAENSRGKNSFRGQLQVYTYPHWVEKLNDTQLDSGSPLRWECKATGKPRPTYRWLKNGVPLSPQSRVEMVNGVLMIHNVNQSDAGMYQCLAENKYGAIYASAELKILASAPTFALNQLKKTIIVTKDQEVVIECKPQGSPKPTISWKKGDRAVRENKRIAVLPDGSLRILNASKSDEGKYVCRGENVFGSAEIIASLSVKEPTRIELTPKRTELTVGESIVLNCKAIHDASLDVTFYWTLKGQPIDFEEEGGHFESIRAQASSADLMIRNILLMHAGRYGCRVQTTADSVSDEAELLVRGPPGPPGIVIVEEITESTATLSWSPAADNHSPISSYNLQARSPFSLGWQTVKTVPEIITGDMESAMAVDLNPWVEYEFRVVATNPIGTGDPSTPSRMIRTNEAVPKTAPTNVSGRSGRRHELVIAWEPVSEEFQNGEGFGYIVAFRPNGTRGWKEKMVTSSEASKFIYRDESVPPLTPFEVKVGVYNNKGDGPFSQIVVICSAEGEPSAAPTDVKATSVSVSEILVAWKHIKESLGRPQGFEVGYWKDMEQEDTAETVKTRGNESFVILTGLEGNTLYHFTVRAYNGAGYGPPSSEVSATTKKSPPSQAPSNLRWEQQGSQVSLGWEPVIPLANESEVVGYKVFYRQEGHSNSQVIETQKLQAVVPLPDAGVYIIEVRAYSEGGDGTASSQIRVPSYSGGKITS

SEQ ID NO: 300 - protein, 980 aa, Homo Sapiens
DGLLSRPIFTQEPHDVIFPLDLSKSEVILNCAANGYPSPHYRWKQNGTDIDFTMSYHYRLDGGSLAINSPHTDQDIGMYQCLATNLLGTILSRKAKLQFAYIEDFETKTRSTVSVREGQGVVLLCGPPPHFGDLSYAWTFNDNPLYVQEDNRRFVSQETGNLYIAKVEPSDVGNYTCFITNKEAQRSVQGPPTPLVQRTDGVMGEYEPKIEVRFPETIQAAKDSSVKLECFALGNPVPDISWRRLDGSPLPGKVKYSKSQAILEIPNFQQEDEGFYECIASNLRGRNLAKGQLIFYAPPEWEQKIQNTHLSIYDNLLWECKASGKPNPWYTWLKNGERLNPEERIQIENGTLIITMLNVSDSGVYQCAAENKYQIIYANAELRVLASAPDFSKSPVKKKSFVQVGGDIVIGCKPNAFPRAAISWKRGTETLRQSKRIFLLEDGSLKIYNITRSDAGSYTCIATNQFGTAKNTGSLIVKERTVITVPPSKMDVTVGESIVLPCQVSHDPSIEVVFVWFFNGDVIDLKKGVAHFERIGGESVGDLMIRNIQLHHSGKYLCTVQTTLESLSAVADIIVRGPPGPPEDVQVEDISSTTSQLSWRAGPDNNSPIQIFTIQTRTPFSVGWQAVATVPEILNGKTYNATVVGLSPWVEYEFRVVAGNSIGIGEPSEPSELLRTKASVPVVAPVNIHGGGGSRSELVITWESIPEELQNGEGFGYIIMFRPVGSTTWSKEKVSSVESSRFVYRNESIIPLSPFEVKVGVYNNEGEGSLSTVTIVYSGEDEPQLAPRGTSLQSFSASEMEVSWNAIAWNRNTGRVLGYEVLYWTDDSKESMIGKIRVSGNVTTKNITGLKANTIYFASVRAYNTAGTGPSSPPVNVTTKKSPPSQPPANIAWKLTNSKLCLNWEHVKTMENESEVLGYKILYRQNRQSKTHILETNNTSAELLVPFEEDYLIEIRTVSDGGDGSSSEEIRIPKMSSLSS

SEQ ID NO: 301 - protein, 558 aa, Homo Sapiens
WGYYGCDEELVGPLYARSLGASSYYSLLTAPRFARLHGISGWSPRIGDPNPWLQIDLMKKHRIRAVATQGSFNSWDWVTRYMLLYGDRVDSWTPFYQRGHNSTFFGNVNESAVVRHDLHFHFTARYIRIVPLAWNPRGKIGLRLGLYGCPYKADILYFDGDDAISYRFPRGVSRSLWDVFAFSFKTEEKDGLLLHAEGAQGDYVTLELEGAHLLLHMSLGSSPIQPRPGHTTVSAGGVLNDQHWHYVRVDRFGRDVNFTLDGYVQRFILNGDFERLNLDTEMFIGGLVGAARKNLAYRHNFRGCIENVIFNRVNIADLAVRRHSRITFEGKVAFRCLDPVPHPINFGGPHNFVQVPGFPRRGRLAVSFRFRTWDLTGLLLFSRLGDGLGHVELTLSEGQVNVSIAQSGRKKLQFAAGYRLNDGFWHEVNFVAQENHAVISIDDVEGAEVRVSYPLLIRTGTSYFFGGCPKPASRWDCHSNQTAFHGCMELLKVDGQLVNLTLVEGRRLGFYAEVLFDTCGITDRCSPNMCEHDGRCYQSWDDFICYCELTGYKGETCH

SEQ ID NO: 302 - protein, 1235 aa, Homo Sapiens
APSTSQKCDEPLVSGLPHVAFSSSSSISGSYSPGYAKINKRGGAGGWSPSDSDHYQWLQVDFGNRKQISAIATQGRYSSSDWVTQYRMLYSDTGRNWKPYHQDGNIWAFPGNINSDGVVRHELQHPIIARYVRIVPLDWNGEGRIGLRIEVYGCSYWADVINFDGHVVLPYRFRNKKMKTLKDVIALNFKTSESEGVILHGEGQQGDYITLELKKAKLVLSLNLGSNQLGPIYGHTSVMTGSLLDDHHWHSVVIERQGRSINLTLDRSMQHFRTNGEFDYLDLDYEITFGGIPFSGKPSSSSRKNFKGCMESINYNGVNITDLARRKKLEPSNVGNLSFSCVEPYTVPVFFNATSYLEVPGRLNQDLFSVSFQFRTWNPNGLLVFSHFADNLGNVEIDLTESKVGVHINITQTKMSQIDISSGSGLNDGQWHEVRFLAKENFAILTIDGDEASAVRTNSPLQVKTGEKYFFGGFLNQMNNSSHSVLQPSFQGCMQLIQVDDQLVNLYEVAQRKPGSFANVSIDMCAIIDRCVPNHCEHGGKCSQTWDSFKCTCDETGYSGATCHNSIYEPSCEAYKHLGQTSNYYWIDPDGSGPLGPLKVYCNMTEDKVWTIVSHDLQMQTPVVGYNPEKYSVTQLVYSASMDQISAITDSAEYCEQYVSYFCKMSRLLNTPDGSPYTWWVGKANEKHYYWGGSGPGIQKCACGIERNCTDPKYYCNCDADYKQWRKDAGFLSYKDHLPVSQVVVGDTDRQGSEAKLSVGPLRCQGDRNYWNAASFPNPSSYLHFSTFQGETSADISFYFKTLTPWGVFLENMGKEDFIKLELKSATEVSFSFDVGNGPVEIVVRSPTPLNDDQWHRVTAERNVKQASLQVDRLPQQIRKAPTEGHTRLELYSQLFVGGAGGQQGFLGCIRSLRMNGVTLDLEERAKVTSGFISGCSGHCTSYGTNCENGGKCLERYHGYSCDCSNTAYDGTFCNKDVGAFFEEGMWLRYNFQAPATNARDSSSRVDNAPDQQNSHPDLAQEEIRFSFSTTKAPCILLYISSFTTDFLAVLVKPTGSLQIRYNLGGTREPYNIDVDHRNMANGQPHSVNITRHEKTIFLKLDHYPSVSYHLPSSSDTLFNSPKSLFLGKVIETGKIDQEIHKYNTPGFTGCLSRVQFNQIAPLKAALRQTNASAHVHIQGELVESNCGASPLTLSPMSSATDPWHLDHLDSASADFPYNPGQGQAIRNGVNRNSA

SEQ ID NO: 303 - protein, 877 aa, Homo Sapiens
GNPPDCDAPLASALPRSSFSSSSELSSSHGPGFSRLNRRDGAGGWTPLVSNKYQWLQIDLGERMEVTAVATQGGYGSSDWVTSYLLMFSDGGRNWKQYRREESIWGFPGNTNADSVVHYRLQPPFEARFLRFLPLAWNPRGRIGMRIEVYGCAYKSEVVYFDGQSALLYRLDKKPLKPIRDVISLKFKAMQSNGILLHREGQHGNHITLELIKGKLVFFLNSGNAKLPSTIAPVTLTLGSLLDDQHWHSVLIELLDTQVNFTVDKHTHHFQAKGDSSYLDLNFEISFGGIPTPGRSRAFRRKSFHGCLENLYYNGVDVTELAKKHKPQILMMGNVSFSCPQPQTVPVTFLSSRSYLALPGNSGEDKVSVTFQFRTWNRAGHLLFGELRRGSGSFVLFLKDGKLKLSLFQPGQSPRNVTAGAGLNDGQWHSVSFSAKWSHMNVVVDDDTAVQPLVAVLIDSGDTYYFGALYEQSCEAHKHRGNPSGLYYIDADGSGPLGPFLVYCNMTDAAWTVVQHGGPDAVTLRGAPSGHPRSAVSFAYAAGAGQLRSAVNLAERCEQRLALRCGTARRPDSRDGTPLSWWVGRTNETHTYWGVSLPDAQKCTCGLEGNCIDSQYYCNCDAGRNEWTSDTIVLSQKEHLPVTQIVMTDAGRPHSEAAYTLGPLLCRGDQSFWNSASFNTETSYLHFPAFHGELTADVCFFFKTTVSSGVFMENLGITDFIRIELRAPTEVTFSFDVGNGPCEVTVQSPTPFNDNQWHHVRAERNVKGASLQVDQLPQKMQPAPADGHVRLQLNSQLFIGGTATRQRGFLGCIRSLQLNGVALDLEERATVTPGVEPGCAGHCSTYGHLCRNGGRCREKRRGVTCDCAFSAYDGPFC

SEQ ID NO: 304 - protein, 1216 aa, Homo Sapiens
GNSYDCDDPLVSALPQASFSSSSELSSSHGPGFARLNRRDGAGGWSPLVSNKYQWLQIDLGERMEVTAVATQGGYGSSNWVTSYLLMFSDSGWNWKQYRQEDSIWGFSGNANADSVVYYRLQPSIKARFLRFIPLEWNPKGRIGMRIEVFGCAYRSEVVDLDGKSSLLYRFDQKSLSPIKDIISLKFKTMQSDGILLHREGPNGDHITLQLRRARLFLLINSGEAKLPSTSTLVNLTLGSLLDDQHWHSVLIQRLGKQVNFTVDEHRHHFHARGEFNLMNLDYEISFGGIPAPGKSVSFPHRNFHGCLENLYYNGVDIIDLAKQQKPQIIAMGNVSFSCSQPQSMPVTFLSSRSYLALPDFSGEEEVSATFQFRTWNKAGLLLFSELQLISGGILLFLSDGKLKSNLYQPGKLPSDITAGVELNDGQWHSVSLSAKKNHLSVAVDGQMASAAPLLGPEQIYSGGTYYFGGCPDKSFGSKCKSPLGGFQGCMRLISISGKVVDLISVQQGSLGNFSDLQIDSCGISDRCLPNYCEHGGECSQSWSTFHCNCTNTGYRGATCHNSIYEQSCEAYKHRGNTSGFYYIDSDGSGPLEPFLLYCNMTETAWTIIQHNGSDLTRVRNTNPENPYAGFFEYVASMEQLQATINRAEHCEQEFTYYCKKSRLVNKQDGTPLSWWVGRTNETQTYWGGSSPDLQKCTCGLEGNCIDSQYYCNCDADRNEWTNDTGLLAYKEHLPVTKIVITDTGRLHSEAAYKLGPLLCQGDRSFWNSASFDTEASYLHFPTFHGELSADVSFFFKTTASSGVFLENLGIADFIRIELRSPTVVTFSFDVGNGPFEISVQSPTHFNDNQWHHVRVERNMKEASLQVDQLTPKTQPAPADGHVLLQLNSQLFVGGTATRQRGFLGCIRSLQLNGMTLDLEERAQVTPEVQPGCRGHCSSYGKLCRNGGKCRERPIGFFCDCTFSAYTGPFCSNEISAYFGSGSSVIYNFQENYLLSKNSSSHAASFHGDMKLSREMIKFSFRTTRTPSLLLFVSSFYKEYLSVIIAKNGSLQIRYKLNKYQEPDVVNFDFKNMADGQLHHIMINREEGVVFIEIDDNRRRQVHLSSGTEFSAVKSLVLGRILEHSDVDQDTALAGAQGFTGCLSAVQLSHVAPLKAALHPSHPDPVTVTGHVTESSCMAQPGTDATSRERTHSFADHSGTIDDREPLANAIKSDSA

SEQ ID NO: 305 - protein, 1213 aa, Homo Sapiens
ATNYNCDDPLASLLSPMAFSSSSDLTGTHSPAQLNWRVGTGGWSPADSNAQQWLQMDLGNRVEITAVATQGRYGSSDWVTSYSLMFSDTGRNWKQYKQEDSIWTFAGNMNADSVVHHKLLHSVRARFVRFVPLEWNPSGKIGMRVEVYGCSYKSDVADFDGRSSLLYRFNQKLMSTLKDVISLKFKSMQGDGVLFHGEGQRGDHITLELQKGRLALHLNLGDSKARLSSSLPSATLGSLLDDQHWHSVLIERVGKQVNFTVDKHTQHFRTKGETDALDIDYELSFGGIPVPGKPGTFLKKNFHGCIENLYYNGVNIIDLAKRRKHQIYTGNVTFSCSEPQIVPITFVNSSGSYLLLPGTPQIDGLSVSFQFRTWNKDGLLLSTELSEGSGTLLLSLEGGILRLVIQKMTERVAEILTGSNLNDGLWHSVSINARRNRITLTLDDEAAPPAPDSTWVQIYSGNSYYFGGCPDNLTDSQCLNPIKAFQGCMRLIFIDNQPKDLISVQQGSLGNFSDLHIDLCSIKDRCLPNYCEHGGSCSQSWTTFYCNCSDTSYTGATCHNSIYEQSCEVYRHQGNTAGFFYIDSDGSGPLGPLQVYCNITEDKIWTSVQHNNTELTRVRGANPEKPYAMALDYGGSMEQLEAVIDGSEHCEQEVAYHCRRSRLLNTPDGTPFTWWIGRSNERHPYWGGSPPGVQQCECGLDESCLDIQHFCNCDADKDEWTNDTGFLSFKDHLPVTQIVITDTDRSNSEAAWRIGPLRCYGDRRFWNAVSFYTEASYLHFPTFHAEFSADISFFFKTTALSGVFLENLGIKDFIRLEISSPSEITFAIDVGNGPVELVVQSPSLLNDNQWHYVRAERNLKETSLQVDNLPRSTRETSEEGHFRLQLNSQLFVGGTSSRQKGFLGCIRSLHLNGQKMDLEERAKVTSGVRPGCPGHCSSYGSICHNGGKCVEKHNGYLCDCTNSPYEGPFCKKEVSAVFEAGTSVTYMFQEPYPVTKNISLSSSAIYTDSAPSKENIALSFVTTQAPSLLLFINSSSQDFVVVLLCKNGSLQVRYHLNKEETHVFTIDADNFANRRMHHLKINREGRELTIQMDQQLRLSYNFSPEVEFRVIRSLTLGKVTENLGLDSEVAKANAMGFAGCMSSVQYNHIAPLKAALRHATVAPVTVHGTLTESSCGFMVDSDVNAVTTVHSSSDPFGKTDEREPLTNAVRSDS

SEQ ID NO: 306 - protein, 759 aa, Homo Sapiens
MDPGALEMKNFNKIISFLYSTVGALNKIGTDGTQVAMVQFTDDPRTEFKLNAYKTKETLLDAIKHISYKGGNTKTGKAIKYVRDTLFTAESGTRRGIPKVIVVITDGRSQDDVNKISREMQLDGYSIFAIGVADADYSELVSIGSKPSARHVFFVDDFDAFKKIEDELITFVCETASATCPVVHKDGIDLAGFKMMEMFGLVEKDFSSVEGVSMEPGTFNVFPCYQLHKDALVSQPTRYLHPEGLPSDYTISFLFRILPDTPQEPFALWEILNKNSDPLVGVILDNGGKTLTYFNYDQSGDFQTLTFEGPEIRKIFYGSFHKLHIVVSETLVKVVIDCKQVGEKAMNASANITSDGVEVLGKMVRSRGPGGNSAPFQLQMFDIVCSTSWANTDKCCELPGLRDDESCPDLPHSCSCSETNEVALGPAGPPGGPGLRGPKGQQGEPGPKGPDGPRGEIGLPGPQGPPGPQGPSGLSIQGMPGMPGEKGEKGDTGLPGPQGIPGGVGSPGRDGSPGQRGLPGKDGSSGPPGPPGPIGIPGTPGVPGITGSMGPQGALGPPGVPGAKGERGERGDLQSQAMVRSVARQVCEQLIQSHMARYTAILNQIPSHSSSIRTVQGPPGEPGRPGSPGAPGEQGPPGTPGFPGNAGVPGTPGERGLTGIKGEKGNPGVGTQGPRGPPGPAGPSGESRPGSPGPPGSPGPRGPPGHLGVPGPQGPSGQPGYCDPSSCSAYGVRAPHPDQPEFTPVQDELEAMELWGPGV

SEQ ID NO: 307 - protein, 1262 aa, Homo Sapiens
REQVQASGLLRLAVLPEDRLQMKWRESEGSGLGYLVQVKPMAGDSEQEVILTTKTHKATVGGLSPSKGYTLQIFELTGSGRFLLARREFVIEDLKSSSLDRSSQRPLGSGAPEPTPSHTGSPDPEQASEPQVAFTPSQDPRTPAGPQFRCLPPVPADMVFLVDGSWSIGHSHFQQVKDFLASVIAPFEIGPDKVQVGLTQYSGDAQTEWDLNSLSTKEQVLAAVRRLRYKGGNTFTGLALTHVLGQNLQPAAGLRPEAAKVVILVTDGKSQDDVHTAARVLKDLGVNVFAVGVKNADEAELRLLASPPRDITVHSVLDFLQLGALAGLLSRLICQRLQGGSPRQGPAAAPALDTLPAPTSLVLSQVTSSSIRLSWTPAPRHPLKYLIVWRASRGGTPREVVVEGPAASTELHNLASRTEYLVSVFPIYEGGVGEGLRGLVTTAPLPPPRALTLAAVTPRTVHLTWQPSAGATHYLVRCSPASPKGEEEEREVQVGRPEVLLDGLEPGRDYEVSVQSLRGPEGSEARGIRARTPTLAPPRHLGFSDVSHDAARVFWEGAPRPVRLVRVTYVSSEGGHSGQTEAPGNATSATLGPLSSSTTYTVRVTCLYPGGGSSTLTGRVTTKKAPSPSQLSMTELPGDAVQLAWVAAAPSGVLVYQITWTPLGEGKAHEISVPGNLGTAVLPGLGRHTEYDVTILAYYRDGARSDPVSLRYTPSTVSRSPPSNLALASETPDSLQVSWTPPLGRVLHYWLTYAPASGLGPEKSVSVPGARSHVTLPDLQAATKYRVLVSAIYAAGRSEAVSATGQTACPALRPDGSLPGFDLMVAFSLVEKAYASIRGVAMEPSAFGGTPTFTLFKDAQLTRRVSDVYPAPLPPEHTIVFLVRLLPETPREAFALWQMTAKDFQPLLGVLLDAGKKSLTYFHRDPRAALQEATFDPQEVRKIFFGSFHKVHVAVGRSKVRLYVDCRKVAERPLGEMGSPPAAGFVTLGRLAKARGPRSSSAAFQLQMLQIVCSDTWADEDRCCELPASRDGETCPAFVSACSCSSETPGPPGPQGPPGLPGRNGTPGEQGFPGPRGPPGVKGEKGDHGLPGLQGHPGHQGIPGRVGLQGPKGMRGLEGTAGLPGPPGPRGFQGMAGARGTSGERGPPGTVGPTGLPGPKGERGEKGEQQSLATLYQLVSQASHVSKFDSFHENTRPPMPILEQKLEPGTEPLGSPGTRSKALVPGEWGRGGRHLEGRGEPGAVGQMGSPGQQGASTQGLWE

SEQ ID NO: 308 - protein, 250 aa, Homo Sapiens
LDIDSRPTAEVCATHTISPGPKGDDGEKGDPGEEGKHGKVGRMGPKGIKGELGDMGDQGNIGKTGPIGKKGDKGEKGLLGIPGEKGKAGTVCDCGRYRKFVGQLDISIARLKTSMKFVKNVIAGIRETEEKFYYIVQEEKNYRESLTHCRIRGGMLAMPKDEAANTLIADYVAKSGFFRVFIGVNDLEREGQYMFTDNTPLQNYSNWNEGEPSDPYGHEDCVEMLSSGRWNDTECHLTMYFVCEFIKKKK

SEQ ID NO: 309 - protein, 246 aa, Homo Sapiens
QPAGDDACSVQILVPGLKGDAGEKGDKGAPGRPGRVGPTGEKGDMGDKGQKGSVGRHGKIGPIGSKGEKGDSGDIGPPGPNGEPGLPCECSQLRKAIGEMDNQVSQLTSELKFIKNAVAGVRETESKIYLLVKEEKRYADAQLSCQGRGGTLSMPKDEAANGLMAAYLAQAGLARVFIGINDLEKEGAFVYSDHSPMRTFNKWRSGEPNNAYDEEDCVEMVASGGWNDVACHTTMYFMCEFDKENM

SEQ ID NO: 310 - protein, 684 aa, Homo Sapiens
YKVVEKMDNVTGGMETSRQTYDDKLTAVESDLEKLGDQTGKKAISTNSELSTFRSDILDLRQQLREITEKTSKNKDTLEKLQASGDALVDRQSQLKETLENNSFLITTVNKTLQAYNGYVTNLQQDTSVLQGNLQNQMYSHNVVIMNLNNLNLTQVQQRNLITNLQRSVDDTSQAIQRIKNDFQNLQQVFLQAKKDTDWLKEKVQSLQTLAANNSALAKANNDTLEDMNSQLNSFTGQMENITTISQANEQNLKDLQDLHKDAENRTAIKFNQLEERFQLFETDIVNIISNISYTAHHLRTLTSNLNEVRTTCTDTLTKHTDDLTSLNNTLANIRLDSVSLRMQQDLMRSRLDTEVANLSVIMEEMKLVDSKHGQLIKNFTILQGPPGPRGPRGDRGSQGPPGPTGNKGQKGEKGEPGPPGPAGERGPIGPAGPPGERGGKGSKGSQGPKGSRGSPGKPGPQGPSGDPGPPGPPGKEGLPGPQGPPGFQGLQGTVGEPGVPGPRGLPGLPGVPGMPGPKGPPGPPGPSGAVVPLALQNEPTPAPEDNSCPPHWKNFTDKCYYFSVEKEIFEDAKLFCEDKSSHLVFINTREEQQWIKKQMVGRESHWIGLTDSERENEWKWLDGTSPDYKNWKAGQPDNWGHGHGPGEDCAGLIYAGQWNDFQCEDVNNFICEKDRETVLSSAL

SEQ ID NO: 311 - protein, 737 aa, Homo Sapiens
QGQSPLGSDLGPQMLRELQETNAALQDVRELLRQQVREITFLKNTVMECDACGMQQSVRTGLPSVRPLLHCAPGFCFPGVACIQTESGARCGPCPAGFTGNGSHCTDVNECNAHPCFPRVRCINTSPGFRCEACPPGYSGPTHQGVGLAFAKANKQVCTDINECETGQHNCVPNSVCINTRGSFQCGPCQPGFVGDQASGCQRRAQRFCPDGSPSECHEHADCVLERDGSRSCVCAVGWAGNGILCGRDTDLDGFPDEKLRCPERQCRKDNCVTVPNSGQEDVDRDGIGDACDPDADGDGVPNEKDNCPLVRNPDQRNTDEDKWGDACDNCRSQKNDDQKDTDQDGRGDACDDDIDGDRIRNQADNCPRVPNSDQKDSDGDGIGDACDNCPQKSNPDQADVDHDFVGDACDSDQDQDGDGHQDSRDNCPTVPNSAQEDSDHDGQGDACDDDDDNDGVPDSRDNCRLVPNPGQEDADRDGVGDVCQDDFDADKVVDKIDVCPENAEVTLTDFRAFQTVVLDPEGDAQIDPNWVVLNQGREIVQTMNSDPGLAVGYTAFNGVDFEGTFHVNTVTDDDYAGFIFGYQDSSSFYVVMWKQMEQTYWQANPFRAVAEPGIQLKAVKSSTGPGEQLRNALWHTGDTESQVRLLWKDPRNVGWKDKKSYRWFLQHRPQVGYIRVRFYEGPELVADSNVVLDTTMRGGRLGVFCFSQENIIWANLRYRCNDTIPEDYETHQLRQA

SEQ ID NO: 312 - protein, 432 aa, Homo Sapiens
AQPQAPGYLIAAPSVFRAGVEEVISVTIFNSPREVTVQAQLVAQGEPVVQSQGAILDKGTIKLKVPTGLRGQALLKVWGRGWQAEEGPLFHNQTSVTVDGRGASVFIQTDKPVYRPQHRVLISIFTVSPNLRPVNEKLEAYILDPRGSRMIEWRHLKPFCCGITNMSFPLSDQPVLGEWFIFVEMQGHAYNKSFEVQKYVLPKFELLIDPPRYIQDLDACETGTVRARYTFGKPVAGALTINMTVNGVGYYSHEVGRPVLRTTKILGSQDFDICVRDMIPADVPEHFRGRVSIWAMVTSVDGSQQVAFDDSTPVQRQLVDIRYSKDTRKQFKPGLAYVGKVELSYPDGSPAEGVTVQIKAELTPKDNIYTSEVVSQRGLVGFEIPSIPTSAQHVWLEVFQELEDYDVSDSFGVSREDGPFWWAGLTAQRRRR

SEQ ID NO: 313 - protein, 524 aa, Homo Sapiens
CPMGCDCFVQEVFCSDEELATVPLDIPPYTKNIIFVETSFTTLETRAFGSNPNLTKVVFLNTQLCQFRPDAFGGLPRLEDLEVTGSSFLNLSTNIFSNLTSLGKLTLNFNMLEALPEGLFQHLAALESLHLQGNQLQALPRRLFQPLTHLKTLNLAQNLLAQLPEELFHPLTSLQTLKLSNNALSGLPQGVFGKLGSLQELFLDSNNISELPPQVFSQLFCLERLWLQRNAITHLPLSIFASLGNLTFLSLQWNMLRVLPAGLFAHTPCLVGLSLTHNQLETVAEGTFAHLSNLRSLMLSYNAITHLPAGIFRDLEELVKLYLGSNNLTALHPALFQNLSKLELLSLSKNQLTTLPEGIFDTNYNLFNLALHGNPWQCDCHLAYLFNWLQQYTDRLLNIQTYCAGPAYLKGQVVPALNEKQLVCPVTRDHLGFQVTWPDESKAGGSWDLAVQERAARSQCTYSNPEGTVVLACDQAQCRWLNVQLSPWQGSLGLQYNASQEWDLRSSCGSLRLTVSIEARAAGP

SEQ ID NO: 314 - protein, 1322 aa, Homo Sapiens
FCNKNNTRCLSNSCQNNSTCKDFSKDNDCSCSDTANNLDKDCDNMKDPCFSNPCQGSATCVNTPGERSFLCKCPPGYSGTICETTIGSCGKNSCQHGGICHQDPIYPVCICPAGYAGRFCEIDHDECASSPCQNGAVCQDGIDGYSCFCVPGYQGRHCDLEVDECASDPCKNEATCLNEIGRYTCICPHNYSGVNCELEIDECWSQPCLNGATCQDALGAYFCDCAPGFLGDHCELNTDECASQPCLHGGLCVDGENRYSCNCTGSGFTGTHCETLMPLCWSKPCHNNATCEDSVDNYTCHCWPGYTGAQCEIDLNECNSNPCQSNGECVELSSEKQYGRITGLPSSFSYHEASGYVCICQPGFTGIHCEEDVNECSSNPCQNGGTCENLPGNYTCHCPFDNLSRTFYGGRDCSDILLGCTHQQCLNNGTCIPHFQDGQHGFSCLCPSGYTGSLCEIATTLSFEGDGFLWVKSGSVTTKGSVCNIALRFQTVQPMALLLFRSNRDVFVKLELLSGYIHLSIQVNNQSKVLLFISHNTSDGEWHFVEVIFAEAVTLTLIDDSCKEKCIAKAPTPLESDQSICAFQNSFLGGLPVGMTSNGVALLNFYNMPSTPSFVGCLQDIKIDWNHITLENISSGSSLNVKAGCVRKDWCESQPCQSRGRCINLWLSYQCDCHRPYEGPNCLREYVAGRFGQDDSTGYVIFTLDESYGDTISLSMFVRTLQPSGLLLALENSTYQYIRVWLERGRLAMLTPNSPKLVVKFVLNDGNVHLISLKIKPYKIELYQSSQNLGFISASTWKIEKGDVIYIGGLPDKQETELNGGFFKGCIQDVRLNNQNLEFFPNPTNNASLNPVLVNVTQGCAGDNSCKSNPCHNGGVCHSRWDDFSCSCPALTSGKACEEVQWCGFSPCPHGAQCQPVLQGFECIANAVFNGQSGQILFRSNGNITRELTNITFGFRTRDANVIILHAEKEPEFLNISIQDSRLFFQLQSGNSFYMLSLTSLQSVNDGTWHEVTLSMTDPLSQTSRWQMEVDNETPFVTSTIATGSLNFLKDNTDIYVGDRAIDNIKGLQGCLSTIEIGGIYLSYFENVHGFINKPQEEQFLKISTNSVVTGCLQLNVCNSNPCLHGGNCEDIYSSYHCSCPLGWSGKHCELNIDECFSNPCIHGNCSDRVAAYHCTCEPGYTGVNCEVDIDNCQSHQCANGATCISHTNGYSCLCFGNFTGKFCRQSRLPSTVCGNEKTNLTCYNGGNCTEFQTELKCMCRPGFTGEWCEKDIDECASDPCVNGGLCQDLLNKFQCLCDVAFAGERCEVDLADDLISDIFTT

SEQ ID NO: 315 - protein, 393 aa, Homo Sapiens
QPSPPPQSSPPPQPHPCHTCRGLVDSFNKGLERTIRDNFGGGNTAWEEENLSKYKDSETRLVEVLEGVCSKSDFECHRLLELSEELVESWWFHKQQEAPDLFQWLCSDSLKLCCPAGTFGPSCLPCPGGTERPCGGYGQCEGEGTRGGSGHCDCQAGYGGEACGQCGLGYFEAERNASHLVCSACFGPCARCSGPEESNCLQCKKGWALHHLKCVDIDECGTEGANCGADQFCVNTEGSYECRDCAKACLGCMGAGPGRCKKCSPGYQQVGSKCLDVDECETEVCPGENKQCENTEGGYRCICAEGYKQMEGICVKEQIPGAFPILTDLTPETTRRWKLGSHPHSTYVKMKMQRDEATFPGLYGKQVAKLGSQSRQSDRGTRLIHSQQASSQR

SEQ ID NO: 316 - protein, 329 aa, Homo Sapiens
AKKPTPCHRCRGLVDKFNQGMVDTAKKNFGGGNTAWEEKTLSKYESSEIRLLEILEGLCESSDFECNQMLEAQEEHLEAWWLQLKSEYPDLFEWFCVKTLKVCCSPGTYGPDCLACQGGSQRPCSGNGHCSGDGSRQGDGSCRCHMGYQGPLCTDCMDGYFSSLRNETHSICTACDESCKTCSGLTNRDCGECEVGWVLDEGACVDVDECAAEPPPCSAAQFCKNANGSYTCEECDSSCVGCTGEGPGNCKECISGYAREHGQCADVDECALAEKTCVRKNENCYNTPGSYVCVCPDGFEGTEDACVPPAEAEATEGESPTQLPSREDL

SEQ ID NO: 317 - protein, 385 aa, Homo Sapiens
AHTAVISPQDPTLLIGSSLLATCSVHGDPPGATAEGLYWTLNGRRLPPELSRVLNASTLALALANLNGSRQRSGDNLVCHARDGSILAGSCLYVGLPPEKPVNISCWSKNMKDLTCRWTPGAHGETFLHTNYSLKYKLRWYGQDNTCEEYHTVGPHSCHIPKDLALFTPYEIWVEATNRLGSARSDVLTLDILDVVTTDPPPDVHVSRVGGLEDQLSVRWVSPPALKDFLFQAKYQIRYRVEDSVDWKVVDDVSNQTSCRLAGLKPGTVYFVQVRCNPFGIYGSKKAGIWSEWSHPTAASTPRSERPGPGGGACEPRGGEPSSGPVRRELKQFLGWLKKHAYCSNLSFRLYDQWRAWMQKSHKTRNQDEGILPSGRRGTARGPAR

SEQ ID NO: 318 - protein, 209 aa, Homo Sapiens
QGGAAEGVQIQIIYFNLETVQVTWNASKYSRTNLTFHYRFNGDEAYDQCTNYLLQEGHTSGCLLDAEQRDDILYFSIRNGTHPVFTASRWMVYYLKPSSPKHVRFSWHQDAVTVTCSDLSYGDLLYEVQYRSPFDTEWQSKQENTCNVTIEGLDAEKCYSFWVRVKAMEDVYGPDTYPSDWSEVTCWQRGEIRDACAETPTPPKPKLSK

SEQ ID NO: 319 - protein, 103 aa, Homo Sapiens
DTNECIQFPFVCPRDKPVCVNTYGSYRCRTNKKCSRGYEPNEDGTACVGTLGQSPGPRPTTPTAAAATAAAAAAAGAATAAPVLVDGDLNLGSVVKESCEPSC

SEQ ID NO: 320 - protein, 270 aa, Homo Sapiens
SLTNHTETITVEEGQTLTLKCVTSLRKNSSLQWLTPSGFTIFLNEYPVLKNSKYQLLHHSANQLSITVPNVTLQDEGVYKCLHYSDSVSTKEVKVIVLATPFKPILEASVIRKQNGEEHVVLMCSTMRSKPPPQITWLLGNSMEVSGGTLHEFETDGKKCNTTSTLIIHTYGKNSTVDCIIRHRGLQGRKLVAPFRFEDLVTDEETASDALERNSLSSQDPQQPTSTVSVTEDSSTSEIDKEEKEQTTQDPDLTTEANPQYLGLARKKSG

SEQ ID NO: 321 - protein, 498 aa, Homo Sapiens
IPVIEPSVPELVVKPGATVTLRCVGNGSVEWDGPPSPHWTLYSDGSSSILSTNNATFQNTGTYRCTEPGDPLGGSAAIHLYVKDPARPWNVLAQEVVVFEDQDALLPCLLTDPVLEAGVSLVRVRGRPLMRHTNYSFSPWHGFTIHRAKFIQSQDYQCSALMGGRKVMSISIRLKVQKVIPGPPALTLVPAELVRIRGEAAQIVCSASSVDVNFDVFLQHNNTKLAIHQQSDFHNNRYQKVLTLNLDQVDFQHAGNYSCVASNVQGKHSTSMFFRVVESAYLNLSSEQNLIQEVTVGEGLNLKVMVEAYPGLQGFNWTYLGPFSDHQPEPKLANVTTKDTYRHTFTLSLPRLKPSEAGRYSFLARNPGGWRALTFELTLRYPPEVSVIWTFINGSGTLLCAASGYPQPNVTWLQCSGHTDRCDEAQVLQVWDDPYPEVLSQEPFHKVTVQSLLTVETLEHNQTYECRAHNSVGSGSWAFIPISAGAHTHPPDEFLFTP

SEQ ID NO: 322 - protein, 127 aa, Homo Sapiens [sequence omitted]

SEQ ID NO: 323 - protein, 298 aa, Homo Sapiens
EKSDLRTVAPASSLNVRFDSRTMNLSWDCQENTTFSKCFLTDKKNRVVEPRLSNNECSCTFREICLHEGVTFEVHVNTSQRGFQQKLLYPNSGREGTAAQNFSCFIYNADLMNCTWARGPTAPRDVQYFLYIRNSKRRREIRCPYYIQDSGTHVGCHLDNLSGLTSRNYFLVNGTSREIGIQFFDSLLDTKKIERFNPPSNVTVRCNTTHCLVRWKQPRTYQKLSYLDFQYQLDVHRKNTQPGTENLLINVSGDLENRYNFPSSEPRAKHSVKIRAADVRILNWSSWSEAIEFGSDDG

SEQ ID NO: 324 - protein, 425 aa, Homo Sapiens
EETIPLQTLRCYNDYTSHITCRWADTQDAQRLVNVTLIRRVNEDLLEPVSCDLSDDMPWSACPHPRCVPRRCVIPCQSFVVTDVDYFSFQPDRPLGTRLTVTLTQHVQPPEPRDLQISTDQDHFLLTWSVALGSPQSHWLSPGDLEFEVVYKRLQDSWEDAAILLSNTSQATLGPEHLMPSSTYVARVRTRLAPGSRLSGRPSKWSPEVCWDSQPGDEAQPQNLECFFDGAAVLSCSWEVRKEVASSVSFGLFYKPSPDAGSAVLLREEECSPVLREGLGSLHTRHHCQIPVPDPATHGQYIVSVQPRRAEKHIKSSVNIQMAPPSLNVTKDGDSYSLRWETMKMRYEHIDHTFEIQYRKDTATWKDSKTETLQNAHSMALPALEPSTRYWARVRVRTSRTGYNGIWSEWSEARSWDTESVLPMW

SEQ ID NO: 325 - protein, 175 aa, Homo Sapiens
ATPLGPASSLPQSFLLKCLEQVRKIQGDGAALQEKLCATYKLCHPEELVLLGHSLGIPWAPLSSCPSQALQLAGCLSQLHSGLFLYQGLLQALEGISPELGPTLDTLQLDVADFATTIWQQMEELGMAPALQPTQGAMPAFASAFQRRAGGVLVASHLQSFLEVSYRVLRHLAQP

SEQ ID NO: 326 - protein, 603 aa, Homo Sapiens
ECGHISVSAPIVHLGDPITASCIIKQNCSHLDPEPQILWRLGAELQPGGRQQRLSDGTQESIITLPHLNHTQAFLSCCLNWGNSLQILDQVELRAGYPPAIPHNLSCLMNLTTSSLICQWEPGPETHLPTSFTLKSFKSRGNCQTQGDSILDCVPKDGQSHCCIPRKHLLLYQNMGIWVQAENALGTSMSPQLCLDPMDVVKLEPPMLRTMDPSPEAAPPQAGCLQLCWEPWQPGLHINQKCELRHKPQRGEASWALVGPLPLEALQYELCGLLPATAYTLQIRCIRWPLPGHWSDWSPSLELRTTERAPTVRLDTWWRQRQLDPRTVQLFWKPVPLEEDSGRIQGYVVSWRPSGQAGAILPLCNTTELSCTFHLPSEAQEVALVAYNSAGTSRPTPVVFSESRGPALTRLHAMARDPHSLWVGWEPPNPWPQGYVIEWGLGPPSASNSNKTWRMEQNGRATGFLLKENIRPFQLYEIIVTPLYQDTMGPSQHVYAYSQEMAPSHAPELHLKHIGKTWAQLEWVPEPPELGKSPLTHYTIFWTNAQNQSFSAILNASSRGFVLHGLEPASLYHIHLMAASQAGATNSTVLTLMTLTPEGSELH

SEQ ID NO: 327 - protein, 393 aa, Homo Sapiens
VPAREAGSAVEAEELVKGSPAWEPPANDTREEAGPPAAGEDEASWTAPGGELAGPEEVLQESAAVTGTAWLEADSPGLGGVTAEAGSGDAQALPATLQAPHEVLGQSIMPPAIPEATEASGPPSPTPGDKLSPASELPKESPLEVWLNLGGSTPDPQGPELTYPFQGTLEPQPASDIIDIDYFEGLDGEGRGADLGSFPGSPGTSENHPDTEGETPSWSLLDLYDDFTPFDESDFYPTTSFYDDLDEEEEEEEDDKDAVGGGDLEDENELLVPTGKPGLGPGTGQPTSRWHAVPPQHTLGSVPGSSIALRPRPGEPGRDLASSENGTECRSGFVRHNGSCRSVCDLFPSYCHNGGQCYLVENIGAFCRCNTQDYIWHKGMRCESIITDFQVMC

SEQ ID NO: 328 - protein, 126 aa, Homo Sapiens [sequence omitted]

SEQ ID NO: 329 - protein, 315 aa, Homo Sapiens
QHHGVTKCNITCSKMTSKIPVALLIHYQQNQASCGKRAIILETRQHRLFCADPKEQWVKDAMQHLDRQAAALTRNGGTFEKQIGEVKPRTTPAAGGMDESVVLEPEATGESSSLEPTPSSQEAQRALGTSPELPTGVTGSSGTRLPPTPKAQDGGPVGTELFRVPPVSTAATWQSSAPHQPGPSLWAEAKTSEAPSTQDPSTQASTASSPAPEENAPSEGQRVWGQGQSPRPENSLEREEMGPVPAHTDAFQDWGPGSMAHVSVVPVSSEGTPSREPVASGSWTPKAEEPIHATMDPQRLGVLITPVPDAQAATR

SEQ ID NO: 330 - protein, 218 aa, Homo Sapiens [sequence omitted]

SEQ ID NO: 331 - protein, 73 aa, Homo Sapiens
ASVATELRCQCLQTLQGIHPKNIQSVNVKSPGPHCAQTEVIATLKNGRKACLNPASPIVKKIIEKMLNSDKSN

SEQ ID NO: 332 - protein, 77 aa, Homo Sapiens
VPLSRTVRCTCISISNQPVNPRSLEKLEIIPASQFCPRVEIIATMKKKGEKRCLNPESKAIKNLLKAVSKERSKRSP

SEQ ID NO: 333 - protein, 73 aa, Homo Sapiens
FPMFKRGRCLCIGPGVKAVKVADIEKASIMYPSNNCDKIEVIITLKENKGQRCLNPKSKQARLIIKKVERKNF

SEQ ID NO: 334 - protein, 68 aa, Homo Sapiens
KPVSLSYRCPCRFFESHVARANVKHLKILNTPNCALQIVARLKNNNRQVCIDPKLKWIQEYLEKALNK

SEQ ID NO: 335 - protein, 87 aa, Homo Sapiens
VLEVYYTSLRCRCVQESSVFIPRRFIDRIQILPRGNGCPRKEIIVWKKNKSIVCVDPQAEWIQRMMEVLRKRSSSTLPVPVFKRKIP

SEQ ID NO: 336 - protein, 77 aa, Homo Sapiens
SKCKCSRKGPKIRYSDVKKLEMKPKYPHCEEKMVIITTKSVSRYRGQEHCLHPKLQSTKRFIKWYNAWNEKRRVYEE

SEQ ID NO: 337 - protein, 176 aa, Homo Sapiens
NEGSVTGSCYCGKRISSDSPPSVQFMNRLRKHLRAYHRCLYYTRFQLLSWSVCGGNKDPWVQELMSCLDLKECGHAYSGIVAHQKHLLPTSPPISQASEGASSDIHTPAQMLLSTLQSTQRPTLPVGSLSSDKELTRPNETTIHTAGHSLAAGPEAGENQKQPEKNAGPTARTSAT

SEQ ID NO: 338 - protein, 56 aa, Homo Sapiens
FMTVSGLPKKQCPCDHFKGNVKKTRHQRHHRKPNKHSRACQQFLKQCQLRSFALPL

SEQ ID NO: 339 - protein, 69 aa, Homo Sapiens
TELRCQCLQTLQGIHLKNIQSVKVKSPGPHCAQTEVIATLKNGQKACLNPASPMVKKIIEKMLKNGKSN

SEQ ID NO: 340 - protein, 73 aa, Homo Sapiens
ASVVTELRCQCLQTLQGIHLKNIQSVNVRSPGPHCAQTEVIATLKNGKKACLNPASPMVQKIIEKILNKGSTN

SEQ ID NO: 341 - protein, 71 aa, Homo Sapiens
LRELRCVCLQTTQGVHPKMISNLQVFAIGPQCSKVEVVASLKNGKEICLDPEAPFLKKVIQKILDGGNKEN

SEQ ID NO: 342 - protein, 77 aa, Homo Sapiens
GPVSAVLTELRCTCLRVTLRVNPKTIGKLQVFPAGPQCSKVEVVASLKNGKQVCLDPEAPFLKKVIQKILDSGNKKN

SEQ ID NO: 343 - protein, 103 aa, Homo Sapiens
TPVVRKGRCSCISTNQGTIHLQSLKDLKQFAPSPSCEKIEIIATLKNGVQTCLNPDSADVKELIKKWEKQVSQKKKQKNGKKHQKKKVLKVRKSQRSRQKKTT

SEQ ID NO: 344 - protein, 624 aa, Homo Sapiens
HWPSEPSEAVRDWENQLEASMHSVLSDLHEAVPTVVGIPDGTAVVGRSFRVTIPTDLIASSGDIIKVSAAGKEALPSWLHWDSQSHTLEGLPLDTDKGVHYISVSATRLGANGSHIPQTSSVFSIEVYPEDHSELQSVRTASPDPGEVVSSACAADEPVTVLTVILDADLTKMTPKQRIDLLHRMRSFSEVELHNMKLVPVVNNRLFDMSAFMAGPGNAKKVVENGALLSWKLGCSLNQNSVPDIHGVEAPAREGAMSAQLGYPVVGWHIANKKPPLPKRVRRQIHATPTPVTAIGPPTTAIQEPPSRIVPTPTSPAIAPPTETMAPPVRDPVPGKPTVTIRTRGAIIQTPTLGPIQPTRVSEAGTTVPGQIRPTMTIPGYVEPTAVATPPTTTTKKPRVSTPKPATPSTDSTTTTTRRPTKKPRTPRPVPRVTTKVSITRLETASPPTRIRTTTSGVPRGGEPNQRPELKNHIDRVDAWVGTYFEVKIPSDTFYDHEDTTTDKLKLTLKLREQQLVGEKSWVQFNSNSQLMYGLPDSSHVGKHEYFMHATDKGGLSAVDAFEIHVHRRPQGDRAPARFKAKFVGDPALVLNDIHKKIALVKKLAFAFGDRNCSTITLQNITRG

SEQ ID NO: 345 - protein, 167 aa, Homo Sapiens
RPEPQSPRPQSWAAANQTWALGPGALPPLVPASALGSWKAFLGLQKARQLGMGRLQRGQDEVAAVTLPLNPQEVIQGMCKAVPFVQVFSRPGCSAIRLRNHLCFGHCSSLYIPGSDPTPLVLCNSCMPARKRWAPVVLWCLTGSSASRRRVKISTMLIEGCHCSPKA

SEQ ID NO: 346 - protein, 329 aa, Homo Sapiens
DEASGIGPEVPDDRDFEPSLGPVCPFRCQCHLRVVQCSDLGLDKVPKDLPPDTTLLDLQNNKITEIKDGDFKNLKNLHALILVNNKISKVSPGAFTPLVKLERLYLSKNQLKELPEKMPKTLQELRAHENEITKVRKVTFNGLNQMIVIELGTNPLKSSGIENGAFQGMKKLSYIRIADTNITSIPQGLPPSLTELHLDGNKISRVDAASLKGLNNLAKLGLSFNSISAVDNGSLANTPHLRELHLDNNKLTRVPGGLAEHKYIQVVYLHNNNISVVGSSDFCPPGHNTKKASYSGVSLFSNPVQYWEIQPSTFRCVYVRSAIQLGNYK

SEQ ID NO: 347 - protein, 236 aa, Homo Sapiens
RHNLNNVIASLGCTVELQINNTRAAWRISTAPLRAMFKDLLSSKELLRAETRNISATFEDLDAQVNSETGYTPEDTMDSGETAQGREARQAPASRLHLSTQKMYELKTKLRCSYVVNQAILSCRRWFDRKHEQCMKHIWVPLLTHLLCLPMKFKFFCGIAKVMEVWCRNRIPVEGNFGQTYDSLNQSIRGLDGEFSANIDFKEEKQAGVLGLNTSWERVSTEVRDYVYRQEARLEW

SEQ ID NO: 348 - protein, 91 aa, Homo Sapiens
KGLLDGMTCNLRAKSFSIHFPLLKKYIEAIQWIYGLATPLSVFDDLVSWNQTLAVSLFSPSHVLEAQLNDSKGEVLSVLYQMATTTEVLSS

SEQ ID NO: 349 - protein, 56 aa, Homo Sapiens
DIPEVVVSLAWDESLAPKHPGSRKNMACYCRIPACIAGERRYGTCIYQGRLWAFCC

SEQ ID NO: 350 - protein, 500 aa, Homo Sapiens
SGVFQLQLQEFINERGVLASGRPCEPGCRTFFRVCLKHFQAVVSPGPCTFGTVSTPVLGTNSFAVRDDSSGGGRNPLQLPFNFTWPGTFSLIIEAWHAPGDDLRPEALPPDALISKIAIQGSLAVGQNWLLDEQTSTLTRLRYSYRVICSDNYYGDNCSRLCKKRNDHFGHYVCQPDGNLSCLPGWTGEYCQQPICLSGCHEQNGYCSKPAECLCRPGWQGRLCNECIPHNGCRHGTCSTPWQCTCDEGWGGLFCDQDLNYCTHHSPCKNGATCSNSGQRSYTCTCRPGYTGVDCELELSECDSNPCRNGGSCKDQEDGYHCLCPPGYYGLHCEHSTLSCADSPCFNGGSCRERNQGANYACECPPNFTGSNCEKKVDRCTSNPCANGGQCLNRGPSRMCRCRPGFTGTYCELHVSDCARNPCAHGGTCHDLENGLMCTCPAGFSGRRCEVRTSIDACASSPCFNRATCYTDLSTDTFVCNCPYGFVGSRCEFPVGLPPS

SEQ ID NO: 351 - protein, 329 aa, Homo Sapiens
TEPLRPELRCNPGQFACRSGTIQCIPLPWQCDGWATCEDESDEANCPEVTGEVRPHHGKEAVDPRQGRARGGDPSHFHAVNVAQPVRFSSFLGKCPTGWHHYEGTASCYRVYLSGENYWDAAQTCQRLNGSLATFSTDQELRFVLAQEWDQPERSFGWKDQRKLWVGYQYVITGRNRSLEGRWEVAFKGSSEVFLPPDPIFASAMSENDNVFCAQLQCFHFPTLRHHDLHSWHAESCYEKSSFLCKRSQTCVDIKDNVVDEGFYFTPKGDDPCLSCTCHGGEPEMCVAALCERPQGCQQYRKDPKECCKFMCLDPDGNSLFDSMASGMR

SEQ ID NO: 352 - protein, 238 aa, Homo Sapiens
DLKVEMMAGGTQITPLNDNVTIFCNIFYSQPLNITSMGITWFWKSLTFDKEVKVFEFFGDHQEAFRPGAIVSPWRLKSGDASLRLPGIQLEEAGEYRCEVVVTPLKAQGTVQLEVVASPASRLLLDQVGMKENEDKYMCESSGFYPEAINITWEKQTQKFPHPIEISEDVITGPTIKNMDGTFNVTSCLKLNSSQEDPGTVYQCVVRHASLHTPLRSNFTLTAARHSLSETEKTDNFS

SEQ ID NO: 353 - protein, 280 aa, Homo Sapiens
AECFPACNPQNGFCEDDNVCRCQPGWQGPLCDQCVTSPGCLHGLCGEPGQCICTDGWDGELCDRDVRACSSAPCANNGTCVSLDDGLYECSCAPGYSGKDCQKKDGPCVINGSPCQHGGTCVDDEGRASHASCLCPPGFSGNFCEIVANSCTPNPCENDGVCTDIGGDFRCRCPAGFIDKTCSRPVTNCASSPCQNGGTCLQHTQVSYECLCKPEFTGLTCVKKRALSPQQVTRLPNGYGLAYRLTPGVHELPVQQPEHRILKVSMKELNKKTPLLTEGQ

SEQ ID NO: 354 - protein, 280 aa, Homo Sapiens
DDCSSHCDLAHGCCAPDGSCRCDPGWEGLHCERCVRMPGCQHGTCHQPWQCICHSGWAGKFCDKDEHICTTQSPCQNGGQCMYDGGGEYHCVCLPGFHGRDCERKAGPCEQAGSPCRNGGQCQDDQGFALNFTCRCLVGFVGARCEVNVDDCLMRPCANGATCLDGINRFSCLCPEGFAGRFCTINLDDCASRPCQRGARCRDRVHDFDCLCPSGYGGKTCELVLPVPDPPTTVDTPLGPTSAVVVPATGPAPHSAGAGLLRISVKEVVRRQEAGLGEPS

SEQ ID NO: 355 - protein, 528 aa, Homo Sapiens
QVWSSGVFELKLQEFVNKKGLLGNRNCCRGGAGPPPCACRTFFRVCLKHYQASVSPEPPCTYGSAVTPVLGVDSFSLPDGGGADSAFSNPIRFPFGFTWPGTFSLIIEALHTDSPDDLATENPERLISRLATQRHLTVGEEWSQDLHSSGRTDLKYSYRFVCDEHYYGEGCSVFCRPRDDAFGHFTCGERGEKVCNPGWKGPYCTEPICLPGCDEQHGFCDKPGECKCRVGWQGRYCDECIRYPGCLHGTCQQPWQCNCQEGWGGLFCNQDLNYCTHHKPCKNGATCTNTGQGSYTCSCRPGYTGATCELGIDECDPSPCKNGGSCTDLENSYSCTCPPGFYGKICELSAMTCADGPCFNGGRCSDSPDGGYSCRCPVGYSGFNCEKKIDYCSSSPCSNGAKCVDLGDAYLCRCQAGFSGRHCDDNVDDCASSPCANGGTCRDGVNDFSCTCPPGYTGRNCSAPVSRCEHAPCHNGATCHERGHRYVCECARGYGGPNCQFLLPELPPGPAVVDLTEKLEGQGGPFPW

SEQ ID NO: 356 - protein, 466 aa, Homo Sapiens
AGVFELQIHSFGPGPGPGAPRSPCSARLPCRLFFRVCLKPGLSEEAAESPCALGAALSARGPVYTEQPGAPAPDLPLPDGLLQVPFRDAWPGTFSFIIETWREELGDQIGGPAWSLLARVAGRRRLAAGGPWARDIQRAGAWELRFSYRARCEPPAVGTACTRLCRPRSAPSRCGPGLRPCAPLEDECEAPLVCRAGCSPEHGFCEQPGECRCLEGWTGPLCTVPVSTSSCLSPRGPSSATTGCLVPGPGPCDGNPCANGGSCSETPRSFECTCPRGFYGLRCEVSGVTCADGPCFNGGLCVGGADPDSAYICHCPPGFQGSNCEKRVDRCSLQPCRNGGLCLDLGHALRCRCRAGFAGPRCEHDLDDCAGRACANGGTCVEGGGAHRCSCALGFGGRDCRERADPCAARPCAHGGRCYAHFSGLVCACAPGYMGARCEFPVHPDGASALPAAPPGLRPGDPQRYL

SEQ ID NO: 357 - protein, 503 aa, Homo Sapiens
SGVFQLQLQEFINERGVLASGRPCEPGCRTFFRVCLKHFQAVVSPGPCTFGTVSTPVLGTNSFAVRDDSSGGGRNPLQLPFNFTWPGTFSLIIEAWHAPGDDLRPEALPPDALISKIAIQGSLAVGQNWLLDEQTSTLTRLRYSYRVICSDNYYGDNCSRLCKKRNDHFGHYVCQPDGNLSCLPGWTGEYCQQPICLSGCHEQNGYCSKPAECLCRPGWQGRLCNECIPHNGCRHGTCSTPWQCTCDEGWGGLFCDQDLNYCTHHSPCKNGATCSNSGQRSYTCTCRPGYTGVDCELELSECDSNPCRNGGSCKDQEDGYHCLCPPGYYGLHCEHSTLSCADSPCFNGGSCRERNQGANYACECPPNFTGSNCEKKVDRCTSNPCANGGQCLNRGPSRMCRCRPGFTGTYCELHVSDCARNPCAHGGTCHDLENGLMCTCPAGFSGRRCEVRTSIDACASSPCFNRATCYTDLSTDTFVCNCPYGFVGSRCEFPVGLPPSFPW

SEQ ID NO: 358 - protein, 606 aa, Homo Sapiens
NPVPAAPLSAPGPCAAQPCRNGGVCTSRPEPDPQHPAPAGEPGYSCTCPAGISGANCQLVADPCASNPCHHGNCSSSSSSSSDGYLCICNEGYEGPNCEQALPSLPATGWTESMAPRQLQPVPATQEPDKILPRSQATVTLPTWQPKTGQKVVEMKWDQVEVIPDIACGNASSNSSAGGRLVSFEVPQNTSVKIRQDATASLILLWKVTATGFQQCSLIDGRSVTPLQASGGLVLLEEMLALGNNHFIGFVNDSVTKSIVALRLTLVVKVSTCVPGESHANDLECSGKGKCTTKPSEATFSCTCEEQYVGTFCEEYDACQRKPCQNNASCIDANEKQDGSNFTCVCLPGYTGELCQSKIDYCILDPCRNGATCISSLSGFTCQCPEGYFGSACEEKVDLCASSPCQNNGTCYVDGVHFTCNCSPGFTGPTCAQLIDFCALSPCAHGTCRSVGTSYKCLCDPGYHGLYCEEEYNECLSAPCLNAATCRDLVNGYECVCLAEYKGTHCELYKDPCANVSCLNGATCDSDGLNGTCICAPGFTGEECDIDINECDSNPCHHGGSCLDQPNGYNCHCPHGWVGANCEIHLQWKSGHMAESLTNMPRHSLY

SEQ ID NO: 359 - protein, 559 aa, Homo Sapiens
RWAPIPCSMLENSLGPFPLFLQQVQSDTAQNYTIYYSIRGPGVDQEPRNLFYVERDTGNLYCTRPVDREQYESFEIIAFATTPDGYTPELPLPLIIKIEDENDNYPIFTEETYTFTIFENCRVGTTVGQVCATDKDEPDTMHTRLKYSIIGQVPPSPTLFSMHPTTGVITTTSSQLDRELIDKYQLKIKVQDMDGQYFGLQTTSTCIINIDDVNDHLPTFTRTSYVTSVEENTVDVEILRVTVEDKDLVNTANWRANYTILKGNENGNFKIVTDAKTNEGVLCVVKPLNYEEKQQMILQIGVVNEAPFSREASPRSAMSTATVTVNVEDQDEGPECNPPIQTVRMKENAEVGTTSNGYKAYDPETRSSSGIRYKKLTDPTGWVTIDENTGSIKVFRSLDREAETIKNGIYNITVLASDQGGRTCTGTLGIILQDVNDNSPFIPKKTVIICKPTMSSAEIVAVDPDEPIHGPPFDFSLESSTSEVQRMWRLKAINDTAARLSYQNDPPFGSYVVPITVRDRLGMSSVTSLDVTLCDCITENDCTHRVDPRIGGGGVQLGK

SEQ ID NO: 360 - protein, 555 aa, Homo Sapiens
RWAPIPCSMQENSLGPFPLFLQQVESDAAQNYTVFYSISGRGVDKEPLNLFYIERDTGNLFCTRPVDREEYDVFDLIAYASTADGYSADLPLPLPIRVEDENDNHPVFTEAIYNFEVLESSRPGTTVGVVCATDRDEPDTMHTRLKYSILQQTPRSPGLFSVHPSTGVITTVSHYLDREVVDKYSLIMKVQDMDGQFFGLIGTSTCIITVTDSNDNAPTFRQNAYEAFVEENAFNVEILRIPIEDKDLINTANWRVNFTILKGNENGHFKISTDKETNEGVLSVVKPLNYEENRQVNLEIGVNNEAPFARDIPRVTALNRALVTVHVRDLDEGPECTPAAQYVRIKENLAVGSKINGYKAYDPENRNGNGLRYKKLHDPKGWITIDEISGSIITSKILDREVETPKNELYNITVLAIDKDDRSCTGTLAVNIEDVNDNPPEILQEYVVICKPKMGYTDILAVDPDEPVHGAPFYFSLPNTSPEISRLWSLTKVNDTAARLSYQKNAGFQEYTIPITVKDRAGQAATKLLRVNLCECTHPTQCRATSRSTGVILGK

SEQ ID NO: 361 - protein, 560 aa, Homo Sapiens
AWITAPVALREGEDLSKKNPIAKIHSDLAEERGLKITYKYTGKGITEPPFGIFVFNKDTGELNVTSILDREETPFFLLTGYALDARGNNVEKPLELRIKVLDINDNEPVFTQDVFVGSVEELSAAHTLVMKINATDADEPNTLNSKISYRIVSLEPAYPPVFYLNKDTGEIYTTSVTLDREEHSSYTLTVEARDGNGEVTDKPVKQAQVQIRILDVNDNIPVVENKVLEGMVEENQVNVEVTRIKVFDADEIGSDNWLANFTFASGNEGGYFHIETDAQTNEGIVTLIKEVDYEEMKNLDFSVIVANKAAFHKSIRSKYKPTPIPIKVKVKNVKEGIHFKSSVISIYVSESMDRSSKGQIIGNFQAFDEDTGLPAHARYVKLEDRDNWISVDSVTSEIKLAKLPDFESRYVQNGTYTVKIVAISEDYPRKTITGTVLINVEDINDNCPTLIEPVQTICHDAEYVNVTAEDLDGHPNSGPFSFSVIDKPPGMAEKWKIARQESTSVLLQQSEKKLGRSEIQFLISDNQGFSCPEKQVLTLTVCECLHGSGCREAQHDSYVG

SEQ ID NO: 362 - protein, 566 aa, Homo Sapiens
EWVKFAKPCREGEDNSKRNPIAKITSDYQATQKITYRISGVGIDQPPFGIFVVDKNTGDINITAIVDREETPSFLITCRALNAQGLDVEKPLILTVKILDINDNPPVFSQQIFMGEIEENSASNSLVMILNATDADEPNHLNSKIAFKIVSQEPAGTPMFLLSRNTGEVRTLTNSLDREQASSYRLVVSGADKDGEGLSTQCECNIKVKDVNDNFPMFRDSQYSARIEENILSSELLRFQVTDLDEEYTDNWLAVYFFTSGNEGNWFEIQTDPRTNEGILKVVKALDYEQLQSVKLSIAVKNKAEFHQSVISRYRVQSTPVTIQVINVREGIAFRPASKTFTVQKGISSKKLVDYILGTYQAIDEDTNKAASNVKYVMGRNDGGYLMIDSKTAEIKFVKNMNRDSTFIVNKTITAEVLAIDEYTGKTSTGTVYVRVPDFNDNCPTAVLEKDAVCSSSPSVVVSARTLNNRYTGPYTFALEDQPVKLPAVWSITTLNATSALLRAQEQIPPGVYHISLVLTDSQNNRCEMPRSLTLEVCQCDNRGICGTSYPTTSPGTRYGRPHSGR

SEQ ID NO: 363 - protein, 582 aa, Homo Sapiens
EWIKFAAACREGEDNSKRNPIAKIRSDCESNQKITYRISGVGIDRPPYGVFTINPRTGEINITSVVDREITPLFLIYCRALNSRGEDLERPLELRVKVMDINDNAPVFSQSVYTASIEENSDANTLVVKLCATDADEENHLNSKIAYKIVSQEPSGAPMFILNRYTGEVCTMSSFLDREQHSMYNLVVRGSDRDGAADGLSSECDCRIKVLDVNDNFPTLEKTSYSASIEENCLSSELIRLQAIDLDEEGTDNWLAQYLILSGNDGNWFDIQTDPQTNEGILKVVKMLDYEQAPNIQLSIGVKNQADFHYSVASQFQMHPTPVRIQVVDVREGPAFHPSTMAFSVREGIKGSSLLNYVLGTYTAIDLDTGNPATDVRYIIGHDAGSWLKIDSRTGEIQFSREFDKKSKYIINGIYTAEILAIDDGSGKTATGTICIEVPDINDYCPNIFPERRTICIDSPSVLISVNEHSYGSPFTFCVVDEPPGIADMWDVRSTNATSAILTAKQVLSPGFYEIPILVKDSYNRACELAQMVQLYACDCDDNHMCLDSGAAGIYTEDITGDTYGPVTEDQAGVSNVGLGPA

SEQ ID NO: 364 - protein, 209 aa, Homo Sapiens
RKGPPAALTLPRVQCRASRYPIAVDCSWTLPPAPNSTSPVSFIATYRLGMAARGHSWPCLQQTPTSTSCTITDVQLFSMAPYVLNVTAVHPWGSSSSFVPFITEHIIKPDPPEGVRLSPLAERQLQVQWEPPGSWPFPEIFSLKYWIRYKRQGAARFHRVGPIEATSFILRAVRPRARYYVQVAAQDLTDYGELSDWSLPATATMSLGK

SEQ ID NO: 365 - protein, 623 aa, Homo Sapiens
KNEEIPRKQRRKIYHRRLRKSSTSHKHRSNRQLGIPQTTVFTPVARLPIVNFDYSMEEKFESFSSFPGVESSYNVLPGKKGHCLVKGITMYNKAVWSPEPCTTCLCSDGRVLCDETMCHPQRCPQTVIPEGECCPVCSATEQREPTNLLHKQLPPPQVGMDRIVRKEALQSEEDEEVKEEDPEQKRETPESRNQGQLYSEGDSRGGDRKQRPGEERRLAHQQQRQGREEEEDEEEEGEEGEEDEEDEEDPVRGDMFRMPSRSPLPAPPRGTLRLPSGCSLSYRTISCINAMLTQIPPLTAPQITSLELTGNSIASIPDEAFNGLPNLERLDLSKNNITSSGIGPKAFKLLKKLMRLNMDGNNLIQIPSQLPSTLEELKVNENNLQAIDEESLSDLNQLVTLELEGNNLSEANVNPLAFKPLKSLAYLRLGKNKFRIIPQGLPGSIEELYLENNQIEEITEICFNHTRKINVIVLRYNKIEENRIAPLAWINQENLESIDLSYNKLYHVPSYLPKSLLHLVLLGNQIERIPGYVFGHMEPGLEYLYLSFNKLADDGMDRVSFYGAYHSLRELFLDHNDLKSIPPGIQEMKALHFLRLNNNKIRCVSDAVLETVTNRSDVAFPLW

SEQ ID NO: 366 - protein, 232 aa, Homo Sapiens
SKSNEGADGPVKNKKKGKKAGPPGPNGPPGPPGPPGPQGPPGIPGIPGIPGTTVMGPPGPPGPPGPQGPPGLQGPSGAADKAGTRENQPAVVHLQGQGSAIQVKNDLSGGVLNDWSRITMNPKVFKLHPRSGELEVLVDGTYFIYSQVEVYYINFTDFASYEVVVDEKPFLQCTRSIETGKTNYNTCYTAGVCLLKARQKIAVKMVHADISINMSKHTTFFGAIRLGEAPAS

SEQ ID NO: 367 - protein, 138 aa, Homo Sapiens
MDCQENEYWDQWGRCVTCQRCGPGQELSKDCGYGEGGDAYCTACPPRRYKSSWGHHRCQSCITCAVINRVQKVNCTATSNAVCGDCLPRFYRKTRIGGLQDQECIPCTKQTPTSEVQCAFQLSLVEADAPTVPPQEAT

SEQ ID NO: 368 - protein, 161 aa, Homo Sapiens
EYSNCGENEYYNQTTGLCQECPPCGPGEEPYLSCGYGTKDEDYGCVPCPAEKFSKGGYQICRRHKDCEGFFRATVLTPGDVENDAECGPCLPGYYMLENRPRNIYGMVCYSCLLAPPNTKECVGATSGASANFPGTSGSSTLSPFQHAHKELSGQGHLATA

SEQ ID NO: 369 - protein, 457 aa, Homo Sapiens
DICDPNPCENGGICLPGLADGSFSCECPDGFTDPNCSSVVEVASDEEEPTSAGPCTPNPCHNGGTCEISEAYRGDTFIGYVCKCPRGFNGIHCQHNINECEVEPCKNGGICTDLVANYSCECPGEFMGRNCQYKCSGPLGIEGGIISNQQITASSTHRALFGLQKWYPYYARLNKKGLINAWTAAENDRWPWIQINLQRKMRVTGVITQGAKRIGSPEYIKSYKIAYSNDGKTWAMYKVKGTNEDMVFRGNIDNNTPYANSFTPPIKAQYVRLYPQVCRRHCTLRMELLGCELSGCSEPLGMKSGHIQDYQITASSIFRTLNMDMFTWEPRKARLDKQGKVNAWTSGHNDQSQWLQVDLLVPTKVTGIITQGAKDFGHVQFVGSYKLAYSNDGEHWTVYQDEKQRKDKVFQGNFDNDTHRKNVIDPPIYARHIRILPWSWYGRITLRSELLGCTEEE

SEQ ID NO: 370 - protein, 476 aa, Homo Sapiens
QDTEETITYTQCTDGYEWDPVRQQCKDIDECDIVPDACKGGMKCVNHYGGYLCLPKTAQIIVNNEQPQQETQPAEGTSGATTGVVAASSMATSGVLPGGGFVASAAAVAGPEMQTGRNNFVIRRNPADPQRIPSNPSHRIQCAAGYEQSEHNVCQDIDECTAGTHNCRADQVCINLRGSFACQCPPGYQKRGEQCVDIDECTIPPYCHQRCVNTPGSFYCQCSPGFQLAANNYTCVDINECDASNQCAQQCYNILGSFICQCNQGYELSSDRLNCEDIDECRTSSYLCQYQCVNEPGKFSCMCPQGYQVVRSRTCQDINECETTNECREDEMCWNYHGGFRCYPRNPCQDPYILTPENRCVCPVSNAMCRELPQSIVYKYMSIRSDRSVPSDIFQIQATTIYANTINTFRIKSGNENGEFYLRQTSPVSAMLVLVKSLSGPREHIVDLEMLTVSSIGTFRTSSVLRLTIIVGPFSF

SEQ ID NO: 371 - protein, 418 aa, Homo Sapiens
SPQDSEEPDSYTECTDGYEWDPDSQHCRDVNECLTIPEACKGEMKCINHYGGYLCLPRSAAVINDLHGEGPPPPVPPAQHPNPCPPGYEPDDQDSCVDVDECAQALHDCRPSQDCHNLPGSYQCTCPDGYRKIGPECVDIDECRYRYCQHRCVNLPGSFRCQCEPGFQLGPNNRSCVDVNECDMGAPCEQRCFNSYGTFLCRCHQGYELHRDGFSCSDIDECSYSSYLCQYRCVNEPGRFSCHCPQGYQLLATRLCQDIDECESGAHQCSEAQTCVNFHGGYRCVDTNRCVEPYIQVSENRCLCPASNPLCREQPSSIVHRYMTITSERSVPADVFQIQATSVYPGAYNAFQIRAGNSQGDFYIRQINNVSAMLVLARPVTGPREYVLDLEMVTMNSLMSYRASSVLRLTVFVGAYTF

SEQ ID NO: 372 - protein, 164 aa, Homo Sapiens
DRHTVFWNSSNPKFRNEDYTIHVQLNDYVDIICPHYEDHSVADAAMEQYILYLVEHEEYQLCQPQSKDQVRWQCNRPSAKHGPEKLSEKFQRFTPFTLGKEFKEGHSYYYISKPIHQHEDRCLRLKVTVSGKITHSPQAHVNPQEKRLAADDPEVRVLHSIAHS

SEQ ID NO: 373 - protein, 164 aa, Homo Sapiens
RAEDAARANSDRYAVYWNRSNPRFHAGAGDDGGGYTVEVSINDYLDIYCPHYGAPLPPAERMEHYVLYMVNGEGHASCDHRQRGFKRWECNRPAAPGGPLKFSEKFQLFTPFSLGFEFRPGHEYYYISATPPNAVDRPCLRLKVYVRPTNETLYEAPEPIFTSN

SEQ ID NO: 374 - protein, 192 aa, Homo Sapiens
QGPGGALGNRHAVYWNSSNQHLRREGYTVQVNVNDYLDIYCPHYNSSGVGPGAGPGPGGGAEQYVLYMVSRNGYRTCNASQGFKRWECNRPHAPHSPIKFSEKFQRYSAFSLGYEFHAGHEYYYISTPTHNLHWKCLRMKVFVCCASTSHSGEKPVPTLPQFTMGPNVKINVLEDFEGENPQVPKLEKSISG

SEQ ID NO: 375 - protein, 183 aa, Homo Sapiens
QDPGSKAVADRYAVYWNSSNPRFQRGDYHIDVCINDYLDVFCPHYEDSVPEDKTERYVLYMVNFDGYSACDHTSKGFKRWECNRPHSPNGPLKFSEKFQLFTPFSLGFEFRPGREYFYISSAIPDNGRRSCLKLKVFVRPTNSCMKTIGVHDRVFDVNDKVENSLEPADDTVHESAEPSRGEN

SEQ ID NO: 376 - protein, 210 aa, Homo Sapiens
LAKNLEPVSWSSLNPKFLSGKGLVIYPKIGDKLDIICPRAEAGRPYEYYKLYLVRPEQAAACSTVLDPNVLVTCNRPEQEIRFTIKFQEFSPNYMGLEFKKHHDYYITSTSNGSLEGLENREGGVCRTRTMKIIMKVGQDPNAVTPEQLTTSRPSKEADNTVKMATQAPGSRGSLGDSDGKHETVNQEEKSGPGASGGSSGDPDGFFNSK

SEQ ID NO: 377 - protein, 202 aa, Homo Sapiens
IVLEPIYWNSSNSKFLPGQGLVLYPQIGDKLDIICPKVDSKTVGQYEYYKVYMVDKDQADRCTIKKENTPLLNCAKPDQDIKFTIKFQEFSPNLWGLEFQKNKDYYIISTSNGSLEGLDNQEGGVCQTRAMKILMKVGQDASSAGSTRNKDPTRRPELEAGTNGRSSTTSPFVKPNPGSSTDGNSAGHSGNNILGSEVALFA

SEQ ID NO: 378 - protein, 199 aa, Homo Sapiens
LSLEPVYWNSANKRFQAEGGYVLYPQIGDRLDLLCPRARPPGPHSSPNYEFYKLYLVGGAQGRRCEAPPAPNLLLTCDRPDLDLRFTIKFQEYSPNLWGHEFRSHHDYYIIATSDGTREGLESLQGGVCLTRGMKVLLRVGQSPRGGAVPRKPVSEMPMERDRGAAHSLEPGKENLPGDPTSNATSRGAEGPLPPPSMP

SEQ ID NO: 379 - protein, 53 aa, Homo Sapiens
NSDSECPLSHDGYCLHDGVCMYIEALDKYACNCVVGYIGERCQYRDLKWWELR

SEQ ID NO: 380 - protein, 197 aa, Homo Sapiens
HLECSCHNNSTCEPATGTCRCGPGFYGQACEHPCPPGFHGAGCQGLCWCQHGAPCDPISGRCLCPAGFHGHFCERGCEPGSFGEGCHQRCDCDGGAPCDPVTGLCLCPPGRSGATCNLDCRRGQFGPSCTLHCDCGGGADCDPVSGQCHCVDGYMGPTCREGGPLRLPENPSLAQGSAGTLPASSRPTSRSGGPARH

SEQ ID NO: 381 - protein, 532 aa, Homo Sapiens
NAASARHHGLLASARQPGVCHYGTKLACCYGWRRNSKGVCEATCEPGCKFGECVGPNKCRCFPGYTGKTCSQDVNECGMKPRPCQHRCVNTHGSYKCFCLSGHMLMPDATCVNSRTCAMINCQYSCEDTEEGPQCLCPSSGLRLAPNGRDCLDIDECASGKVICPYNRRCVNTFGSYYCKCHIGFELQYISGRYDCIDINECTMDSHTCSHHANCFNTQGSFKCKCKQGYKGNGLRCSAIPENSVKEVLRAPGTIKDRIKKLLAHKNSMKKKAKIKNVTPEPTRTPTPKVNLQPFNYEEIVSRGGNSHGGKKGNEEKMKEGLEDEKREEKALKNDIEERSLRGDVFFPKVNEAGEFGLILVQRKALTSKLEHKDLNISVDCSFNHGICDWKQDREDDFDWNPADRDNAIGFYMAVPALAGHKKDIGRLKLLLPDLQPQSNFCLLFDYRLAGDKVGKLRVFVKNSNNALAWEKTTSEDEKWKTGKIQLYQGTDATKSIIFEAERGKGKTGEIAVDGVLLVSGLCPDSLLSVDD

SEQ ID NO: 382 - protein, 250 aa, Homo Sapiens
YRPGRRVCAVRAHGDPVSESFVQRVYQPFLTTCDGHRACSTYRTIYRTAYRRSPGLAPARPRYACCPGWKRTSGLPGACGAAICQPPCRNGGSCVQPGRCRCPAGWRGDTCQSDVDECSARRGGCPQRCINTAGSYWCQCWEGHSLSADGTLCVPKGGPPRVAPNPTGVDSAMKEEVQRLQSRVDLLEEKLQLVLAPLHSLASQALEHGLPDPGSLLVHSFQQLGRIDSLSEQISFLEEQLGSCSCKKDS

SEQ ID NO: 383 - protein, 985 aa, Homo Sapiens
LRAAIRKPGKVGPPLDIKLGALNCTAFSIQWKMPRHPGSPILGYTVFYSEVGADKSLQEQLHSVPLSRDIPTTEEVIGDLKPGTEYRVSIAAYSQAGKGRLSSPRHVTTLSQDSCLPPAAPQQPHVIVVSDSEVALSWKPGASEGSAPIQYYSVEFIRPDFDKKWTSIHERIQMDSMVIKGLDPDTNYQFAVRAMNSHGPSPRSWPSDIIRTLCPEEAGSGRYGPRYITDMGAGEDDEGFEDDLDLDISFEEVKPLPATKGGNKKFLVESKKMSISNPKTISRLIPPTSASLPVTTVAPQPIPIQRKGKNGVAIMSRLFDMPCDETLCSADSFCVNDYTWGGSRCQCTLGKGGESCSEDIVIQYPQFFGHSYVTFEPLKNSYQAFQITLEFRAEAEDGLLLYCGENEHGRGDFMSLAIIRRSLQFRFNCGTGVAIIVSETKIKLGGWHMVMLYRDGLNGLLQLNNGTPVTGQSQGQYSKITFRTPLYLGGAPSAYWLVRATGTNRGFQGCVQSLAVNGRRIDMRPWPLGKALSGADVGECSSGICDEASCIHGGTCTAIKADSYICLCPLGFKGRHCEDAFTLTIPQFRESLRSYAATPWPLEPQHYLSFMEFEITFRPDSGDGVLLYSYDTGSKDFLSINLAGGHVEFRFDCGSGTGVLRSEDPLTLGNWHELRVSRTAKNGILQVDKQKIVEGMAEGGFTQIKCNTDIFIGGVPNYDDVKKNSGVLKPFSGSIQKIILNDRTIHVKHDFTSGVNVENAAHPCVRAPCAHGGSCRPRKEGYDCDCPLGFEGLHCQKAIIEAIEIPQFIGRSYLTYDNPDILKRVSGSRSNVFMRFKTTAKDGLLLWRGDSPMRPNSDFISLGLRDGALVFSYNLGSGVASIMVNGSFNDGRWHRVKAVRDGQSGKITVDDYGARTGKSPGMMRQLNINGALYVGGMKEIALHTNRQYMRGLVGCISHFTLSTDYHISLVEDAVDGKNINTCGAK

SEQ ID NO: 384 - protein, 621 aa, Homo Sapiens [sequence omitted]

SEQ ID NO: 385 - protein, 391 aa, Homo Sapiens
DCWLIEGDKGFVWLAICSQNQPPYEAIPQQINSTIVDLRLNENRIRSVQYASLSRFGNLTYLNLTKNEIGYIEDGAFSGQFNLQVLQLGYNRLRNLTEGMLRGLGKLEYLYLQANLIEVVMASSFWECPNIVNIDLSMNRIQQLNSGTFAGLAKLSVCELYSNPFYCSCELLGFLRWLAAFTNATQTYDRMQCESPPVYSGYYLLGQGRRGHRSILSKLQSVCTEDSYAAEVVGPPRPASGRSQPGRSPPPPPPPEPSDMPCADDECFSGDGTTPLVALPTLATQAEARPLIKVKQLTQNSATITVQLPSPFHRMYTLEHFNNSKASTVSRLTKAQEEIRLTNLFTLTNYTYCVVSTSAGLRHNHTCLTICLPRLPSPPGPVPSPSTATHY

SEQ ID NO: 386 - protein, 375 aa, Homo Sapiens
DCWLIEGDKGYVWLAICSQNQPPYETIPQHINSTVHDLRLNENKLKAVLYSSLNRFGNLTDLNLTKNEISYIEDGAFLGQSSLQVLQLGYNKLSNLTEGMLRGMSRLQFLFVQHNLIEVVTPTAFSECPSLISIDLSSNRLSRLDGATFASLASLMVCELAGNPFNCECDLFGFLAWLVVFNNVTKNYDRLQCESPREFAGYPLLVPRPYHSLNAITVLQAKCRNGSLPARPVSHPTPYSTDAQREPDENSGFNPDEILSVEPPASSTTDASAGPAIKLHHVTFTSATLVVIIPHPYSKMYILVQYNNSYFSDVMTLKNKKEIVTLDKLRAHTEYTFCVTSLRNSRRFNHTCLTFTTRDPVPGDLAPSTSTTTHY

SEQ ID NO: 387 - protein, 199 aa, Homo Sapiens
MHEECVFPFTYKGSVYFTCTHIHSLSPWCATRAVYNGQWKYCQSEDYPRCIFPFIYRGKAYNSCISQGSFLGSLWCSVTSVFDEKQQWKFCETNEYGGNSLRKPCIFPSIYRNNVVSDCMEDESNKLWCPTTENMDKDGKWSFCADTRISALVPGFPCHFPFNYKNKNYFNCTNKGSKENLVWCATSYNYDQDHTWVYC

SEQ ID NO: 388 - protein, 413 aa, Homo Sapiens
QNCTKTPCLPNAKCEIRNGIEACYCNMGFSGNGVTICEDDNECGNLTQSCGENANCTNTEGSYYCMCVPGFRSSSNQDRFITNDGTVCIENVNANCHLDNVCIAANINKTLTKIRSIKEPVALLQEVYRNSVTDLSPTDIITYIEILAESSSLLGYKNNTISAKDTLSNSTLTEFVKTVNNFVQRDTFVVWDKLSVNHRRTHLTKLMHTVEQATLRISQSFQKTTEFDTNSTDIALKVFFFDSYNMKHIHPHMNMDGDYINIFPKRKAAYDSNGNVAVAFVYYKSIGPLLSSSDNFLLKPQNYDNSEEEERVISSVISVSMSSNPPTLYELEKITFTLSHRKVTDRYRSLCAFWNYSPDTMNGSWSSEGCELTYSNETHTSCRCNHLTHFAILMSSGPSIGIKDYNILTRITQ

SEQ ID NO: 389 - protein, 228 aa, Homo Sapiens
DGSAPDSPFTSPPLREEIMANNFSLESHNISLTEHSSMPVEKNITLERPSNVNLTCQFTTSGDLNAVNVTWKKDGEQLENNYLVSATGSTLYTQYRFTIINSKQMGSYSCFFREEKEQRGTFNFKVPELHGKNKPLISYVGDSTVLTCKCQNCFPLNWTWYSSNGSVKVPVGVQMNKYVINGTYANETKLKITQLLEEDGESYWCRALFQLGESEEHIELVVLSYLVP

SEQ ID NO: 390 - protein, 160 aa, Homo Sapiens
NSTGVLEAANNSLVVTTTKPSITTPNTESLQKNVVTPTTGTTPKGTITNELLKMSLMSTATFLTSKDEGLKATTTDVRKNDSIISNVTVTSVTLPNAVSTLQSSKPKTETQSSIKTTEIPGTPENGNDQPQSDKESVKLLTVKTISHESGEHSAQGKTKN

SEQ ID NO: 391 - protein, 579 aa, Homo Sapiens
HIRPTRKPNTKGNNCRDSTLCPAYATCTNTVDSYYCACKQGFLSSNGQNHFKDPGVRCKDIDECSQSPQPCGPNSSCKNLSGRYKCSCLDGFSSPTGNDWVPGKPGNFSCTDINECLTSSVCPEHSDCVNSMGSYSCSCQVGFISRNSTCEDVDECADPRACPEHATCNNTVGNYSCFCNPGFESSSGHLSFQGLKASCEDIDECTEMCPINSTCTNTPGSYFCTCHPGFAPSNGQLNFTDQGVECRDIDECRQDPSTCGPNSICTNALGSYSCGCIAGFHPNPEGSQKDGNFSCQRVLFKCKEDVIPDNKQIQQCQEGTAVKPAYVSFCAQINNIFSVLDKVCENKTTVVSLKNTTESFVPVLKQISTWTKFTKEETSSLATVFLESVESMTLASFWKPSANITPAVRTEYLDIESKVINKECSEENVTLDLVAKGDKMKIGCSTIEESESTETTGVAFVSFVGMESVLNERFFKDHQAPLTTSEIKLKMNSRVVGGIMTGEKKDGFSDPIIYTLENIQPKQKFERPICVSWSTDVKGGRWTSFGCVILEASETYTICSCNQMANLAVIMASGELTMD

SEQ ID NO: 392 - protein, 828 aa, Homo Sapiens [sequence omitted]

SEQ ID NO: 393 - protein, 340 aa, Homo Sapiens
MESEELADRVLDVVERSLSNYPFDFQGARIITGQEEGAYGWITINYLLGKFSQKTRWFSIVPYETNNQETFGALDLGGASTQVTFVPQNQTIESPDNALQFRLYGKDYNVYTHSFLCYGKDQALWQKLAKDIQVASNEILRDPCFHPGYKKVVNVSDLYKTPCTKRFEMTLPFQQFEIQGIGNYQQCHQSILELFNTSYCPYSQCAFNGIFLPPLQGDFGAFSAFYFVMKFLNLTSEKVSQEKVTEMMKKFCAQPWEEIKTSYAGVKEKYLSEYCFSGTYILSLLLQGYHFTADSWEHIHFIGKIQGSDAGWTLGYMLNLTNMIPAEQPLSTPLSHSTYV

SEQ ID NO: 394 - protein, 409 aa, Homo Sapiens
QIHKQEVLPPGLKYGIVLDAGSSRTTVYVYQWPAEKENNTGVVSQTFKCSVKGSGISSYGNNPQDVPRAFEECMQKVKGQVPSHLHGSTPIHLGATAGMRLLRLQNETAANEVLESIQSYFKSQPFDFRGAQIISGQEEGVYGWITANYLMGNFLEKNLWHMWVHPHGVETTGALDLGGASTQISFVAGEKMDLNTSDIMQVSLYGYVYTLYTHSFQCYGRNEAEKKFLAMLLQNSPTKNHLTNPCYPRDYSISFTMGHVFDSLCTVDQRPESYNPNDVITFEGTGDPSLCKEKVASIFDFKACHDQETCSFDGVYQPKIKGPFVAFAGFYYTASALNLSGSFSLDTFNSSTWNFCSQNWSQLPLLLPKFDEVYARSYCFSANYIYHLFVNGYKFTEETWPQIHFEKEE

SEQ ID NO: 395 - protein, 79 aa, Homo Sapiens
AAVTVTPPITAQQADNIEGPIALKFSHLCLEDHNSYCINGACAFHHELEKAICRCFTGYTGERCEHLTLTSYAVDSYEK

SEQ ID NO: 396 - protein, 522 aa, Homo Sapiens
KEVTLMDTSKAQGELGWLLDPPKDGWSEQQQILNGTPLYMYQDCPMQGRRDTDHWLRSNWIYRGEEASRVHVELQFTVRDCKSFPGGAGPLGCKETFNLLYMESDQDVGIQLRRPLFQKVTTVAADQSFTIRDLASGSVKLNVERCSLGRLTRRGLYLAFHNPGACVALVSVRVFYQRCPETLNGLAQFPDTLPGPAGLVEVAGTCLPHARASPRPSGAPRMHCSPDGEWLVPVGRCHCEPGYEEGGSGEACVACPSGSYRMDMDTPHCLTCPQQSTAESEGATICTCESGHYRAPGEGPQVACTGPPSAPRNLSFSASGTQLSLRWEPPADTGGRQDVRYSVRCSQCQGTAQDGGPCQPCGVGVHFSPGARGLTTPAVHVNGLEPYANYTFNVEAQNGVSGLGSSGHASTSVSISMGHAESLSGLSLRLVKKEPRQLELTWAGSRPRSPGANLTYELHVLNQDEERYQMVLEPRVLLTELQPDTTYIVRVRMLTPLGPGPFSPDHEFRTSPPVSRGLTGGE

SEQ ID NO: 397 - protein, 532 aa, Homo Sapiens
EEVILLDSKASQAELGWTALPSNGWEEISGVDEHDRPIRTYQVCNVLEPNQDNWLQTGWISRGRGQRIFVELQFTLRDCSSIPGAAGTCKETFNVYYLETEADLGRGRPRLGGSRPRKIDTIAADESFTQGDLGERKMKLNTEVREIGPLSRRGFHLAFQDVGACVALVSVRVYYKQCRATVRGLATFPATAAESAFSTLVEVAGTCVAHSEGEPGSPPRMHCGADGEWLVPVGRCSCSAGFQERGDFCEACPPGFYKVSPRRPLCSPCPEHSRALENASTFCVCQDSYARSPTDPPSASCTRPPSAPRDLQYSLSRSPLVLRLRWLPPADSGGRSDVTYSLLCLRCGREGPAGACEPCGPRVAFLPRQAGLRERAATLLHLRPGARYTVRVAALNGVSGPAAAAGTTYAQVTVSTGPGAPWEEDEIRRDRVEPQSVSLSWREPIPAGAPGANDTEYEIRYYEKGQSEQTYSMVKTGAPTVTVTNLKPATRYVFQIRAASPGPSWEAQSFNPSIEVQTLGEAASGSRDQSPA

SEQ ID NO: 398 - protein, 514 aa, Homo Sapiens
AQGKEVVLLDFAAAGGELGWLTHPYGKGWDLMQNIMNDMPIYMYSVCNVMSGDQDNWLRTNWVYRGEAERIFIELKFTVRDCNSFPGGASSCKETFNLYYAESDLDYGTNFQKRLFTKIDTIAPDEITVSSDFEARHVKLNVEERSVGPLTRKGFYLAFQDIGACVALLSVRVYYKKCPELLQGLAHFPETIAGSDAPSLATVAGTCVDHAVVPPGGEEPRMHCAVDGEWLVPIGQCLCQAGYEKVEDACQACSPGFFKFEASESPCLECPEHTLPSPEGATSCECEEGFFRAPQDPASMPCTRPPSAPHYLTAVGMGAKVELRWTPPQDSGGREDIVYSVTCEQCWPESGECGPCEASVRYSEPPHGLTRTSVTVSDLEPHMNYTFTVEARNGVSGLVTSRSFRTASVSINQTEPPKVRLEGRSTTSLSVSWSIPPPQQSRVWKYEVTYRKKGDSNSYNVRRTEGFSVTLDDLAPDTTYLVQVQALTQEGQGAGSKVHEFQTLSPEGSGNLAV

SEQ ID NO: 399 - protein, 521 aa, Homo Sapiens
ELIPQPSNEVNLLDSKTIQGELGWISYPSHGWEEISGVDEHYTPIRTYQVCNVMDHSQNNWLRTNWVPRNSAQKIYVELKFTLRDCNSIPLVLGTCKETFNLYYMESDDDHGVKFREHQFTKIDTIAADESFTQMDLGDRILKLNTEIREVGPVNKKGFYLAFQDVGACVALVSVRVYFKKCPFTVKNLAMFPDTVPMDSQSLVEVRGSCVNNSKEEDPPRMYCSTEGEWLVPIGKCSCNAGYEERGFMCQACRPGFYKALDGNMKCAKCPPHSSTQEDGSMNCRCENNYFRADKDPPSMACTRPPSSPRNVISNINETSVILDWSWPLDTGGRKDVTFNIICKKCGWNIKQCEPCSPNVRFLPRQFGLTNTTVTVTDLLAHTNYTFEIDAVNGVSELSSPPRQFAAVSITTNQAAPSPVLTIKKDRTSRNSISLSWQEPEHPNGIILDYEVKYYEKQEQETSYTILRARGTNVTISSLKPDTIYVFQIRARTAAGYGTNSRKFEFETSPDSFSISGESSQ

SEQ ID NO: 400 - protein, 528 aa, Homo Sapiens
VTGSRVYPANEVTLLDSRSVQGELGWIASPLEGGWEEVSIMDEKNTPIRTYQVCNVMEPSQNNWLRTDWITREGAQRVYIEIKFTLRDCNSLPGVMGTCKETFNLYYYESDNDKERFIRENQFVKIDTIAADESFTQVDIGDRIMKLNTEIRDVGPLSKKGFYLAFQDVGACIALVSVRVFYKKCPLTVRNLAQFPDTITGADTSSLVEVRGSCVNNSEEKDVPKMYCGADGEWLVPIGNCLCNAGHEERSGECQACKIGYYKALSTDATCAKCPPHSYSVWEGATSCTCDRGFFRADNDAASMPCTRPPSAPLNLISNVNETSVNLEWSSPQNTGGRQDISYNVVCKKCGAGDPSKCRPCGSGVHYTPQQNGLKTTKVSITDLLAHTNYTFEIWAVNGVSKYNPNPDQSVSVTVTTNQAAPSSIALVQAKEVTRYSVALAWLEPDRPNGVILEYEVKYYEKDQNERSYRIVRTAARNTDIKGLNPLTSYVFHVRARTAAGYGDFSEPLEVTTNTVPSRIIGDGANST

SEQ ID NO: 401 - protein, 550 aa, Homo Sapiens
PASLAGCYSAPRRAPLWTCLLLCAALRTLLASPSNEVNLLDSRTVMGDLGWIAFPKNGWEEIGEVDENYAPIHTYQVCKVMEQNQNNWLLTSWISNEGASRIFIELKFTLRDCNSLPGGLGTCKETFNMYYFESDDQNGRNIKENQYIKIDTIAADESFTELDLGDRVMKLNTEVRDVGPLSKKGFYLAFQDVGACIALVSVRVYYKKCPSVVRHLAVFPDTITGADSSQLLEVSGSCVNHSVTDEPPKMHCSAEGEWLVPIGKCMCKAGYEEKNGTCQVCRPGFFKASPHIQSCGKCPPHSYTHEEASTSCVCEKDYFRRESDPPTMACTRPPSAPRNAISNVNETSVFLEWIPPADTGGRKDVSYYIACKKCNSHAGVCEECGGHVRYLPRQSGLKNTSVMMVDLLAHTNYTFEIEAVNGVSDLSPGARQYVSVNVTTNQAAPSPVTNVKKGKIAKNSISLSWQEPDRPNGIILEYEIKYFEKDQETSYTIIKSKETTITAEGLKPASVYVFQIRARTAAGYGVFSRRFEFETTPVSVAASSDQSQIP

SEQ ID NO: 402 - protein, 36 aa, Homo Sapiens
MKDSPFQVTKLYWLNEKWDFIASASDMAAEQGQILV

SEQ ID NO: 403 - protein, 528 aa, Homo Sapiens
QAAKEVLLLDSKAQQTELEWISSPPNGWEEISGLDENYTPIRTYQVCQVMEPNQNNWLRTNWISKGNAQRIFVELKFTLRDCNSLPGVLGTCKETFNLYYYETDYDTGRNIRENLYVKIDTIAADESFTQGDLGERKMKLNTEVREIGPLSKKGFYLAFQDVGACIALVSVKVYYKKCWSIIENLAIFPDTVTGSEFSSLVEVRGTCVSSAEEEAENAPRMHCSAEGEWLVPIGKCICKAGYQQKGDTCEPCGRGFYKSSSQDLQCSRCPTHSFSDKEGSSRCECEDGYYRAPSDPPYVACTRPPSAPQNLIFNINQTTVSLEWSPPADNGGRNDVTYRILCKRCSWEQGECVPCGSNIGYMPQQTGLEDNYVTVMDLLAHANYTFEVEAVNGVSDLSRSQRLFAAVSITTGQAAPSQVSGVMKERVLQRSVELSWQEPEHPNGVITEYEIKYYEKDQRERTYSTVKTKSTSASINNLKPGTVYVFQIRAFTAAGYGNYSPRLDVATLEEATGKMFEATAVSSEQNPV

SEQ ID NO: 404 - protein, 515 aa, Homo Sapiens
ARGEVNLLDTSTIHGDWGWLTYPAHGWDSINEVDESFQPIHTYQVCNVMSPNQNNWLRTSWVPRDGARRVYAEIKFTLRDCNSMPGVLGTCKETFNLYYLESDRDLGASTQESQFLKIDTIAADESFTGADLGVRRLKLNTEVRSVGPLSKRGFYLAFQDIGACLAILSLRIYYKKCPAMVRNLAAFSEAVTGADSSSLVEVRGQCVRHSEERDTPKMYCSAEGEWLVPIGKCVCSAGYEERRDACVACELGFYKSAPGDQLCARCPPHSHSAAPAAQACHCDLSYYRAALDPPSSACTRPPSAPVNLISSVNGTSVTLEWAPPLDPGGRSDITYNAVCRRCPWALSRCEACGSGTRFVPQQTSLVQASLLVANLLAHMNYSFWIEAVNGVSDLSPEPRRAAVVNITTNQAAPSQVVVIRQERAGQTSVSLLWQEPEQPNGIILEYEIKYYEKDKEMQSYSTLKAVTTRATVSGLKPGTRYVFQVRARTSAGCGRFSQAMEVETGKPRPRYDTRT

SEQ ID NO: 405 - protein, 523 aa, Homo Sapiens
MEETLMDTRTATAELGWTANPASGWEEVSGYDENLNTIRTYQVCNVFEPNQNNWLLTTFINRRGAHRIYTEMRFTVRDCSSLPNVPGSCKETFNLYYYETDSVIATKKSAFWSEAPYLKVDTIAADESFSQVDFGGRLMKVNTEVRSFGPLTRNGFYLAFQDYGACMSLLSVRVFFKKCPSIVQNFAVFPETMTGAESTSLVIARGTCIPNAEEVDVPIKLYCNGDGEWMVPIGRCTCKPGYEPENSVACKACPAGTFKASQEAEGCSHCPSNSRSPAEASPICTCRTGYYRADFDPPEVACTSVPSGPRNVISIVNETSIILEWHPPRETGGRDDVTYNIICKKCRADRRSCSRCDDNVEFVPRQLGLTECRVSISSLWAHTPYTFDIQAINGVSSKSPFPPQHVSVNITTNQAAPSTVPIMHQVSATMRSITLSWPQPEQPNGIILDYEIRYYEKEHNEFNSSMARSQTNTARIDGLRPGMVYVVQVRARTVAGYGKFSGKMCFQTLTDDDYKSELREQLP

SEQ ID NO: 406 - protein, 525 aa, Homo Sapiens
VEETLMDSTTATAELGWMVHPPSGWEEVSGYDENMNTIRTYQVCNVFESSQNNWLRTKFIRRRGAHRIHVEMKFSVRDCSSIPSVPGSCKETFNLYYYEADFDSATKTFPNWMENPWVKVDTIAADESFSQVDLGGRVMKINTEVRSFGPVSRSGFYLAFQDYGGCMSLIAVRVFYRKCPRIIQNGAIFQETLSGAESTSLVAARGSCIANAEEVDVPIKLYCNGDGEWLVPIGRCMCKAGFEAVENGTVCRGCPSGTFKANQGDEACTHCPINSRTTSEGATNCVCRNGYYRADLDPLDMPCTTIPSAPQAVISSVNETSLMLEWTPPRDSGGREDLVYNIICKSCGSGRGACTRCGDNVQYAPRQLGLTEPRIYISDLLAHTQYTFEIQAVNGVTDQSPFSPQFASVNITTNQAAPSAVSIMHQVSRTVDSITLSWSQPDQPNGVILDYELQYYEKELSEYNATAIKSPTNTVTVQGLKAGAIYVFQVRARTVAGYGRYSGKMYFQTMTEAEYQTSIQEKLPL

SEQ ID NO: 407 - protein, 526 aa, Homo Sapiens
GCRALEETLMDTKWVTSELAWTSHPESGWEEVSGYDEAMNPIRTYQVCNVRESSQNNWLRTGFIWRRDVQRVYVELKFTVRDCNSIPNIPGSCKETFNLFYYEADSDVASASSPFWMENPYVKVDTIAPDESFSRLDAGRVNTKVRSFGPLSKAGFYLAFQDQGACMSLISVRAFYKKCASTTAGFALFPETLTGAEPTSLVIAPGTCIPNAVEVSVPLKLYCNGDGEWMVPVGACTCATGHEPAAKESQCRPCPPGSYKAKQGEGPCLPCPPNSRTTSPAASICTCHNNFYRADSDSADSACTTVPSPPRGVISNVNETSLILEWSEPRDLGGRDDLLYNVICKKCHGAGGASACSRCDDNVEFVPRQLGLTERRVHISHLLAHTRYTFEVQAVNGVSGKSPLPPRYAAVNITTNQAAPSEVPTLRLHSSSGSSLTLSWAPPERPNGVILDYEMKYFEKSEGIASTVTSQMNSVQLDGLRPDARYVVQVRARTVAGYGQYSRPAEFETTSERGSGAQQLQEQLPL

SEQ ID NO: 408 - protein, 524 aa, Homo Sapiens
LEETLLNTKLETADLKWVTFPQVDGQWEELSGLDEEQHSVRTYEVCDVQRAPGQAHWLRTGWVPRRGAVHVYATLRFTMLECLSLPRAGRSCKETFTVFYYESDADTATALTPAWMENPYIKVDTVAAEHLTRKRPGAEATGKVNVRTLRLGPLSKAGFYLAFQDQGACMALLSLHLFYKKCAQLTVNLTRFPETVPRELVVPVAGSCVVDAVPAPGPSPSLYCREDGQWAEQPVTGCSCAPGFEAAEGNTKCRACAQGTFKPLSGEGSCQPCPANSHSNTIGSAVCQCRVGYFRARTDPRGAPCTTPPSAPRSVVSRLNGSSLHLEWSAPLESGGREDLTYALRCRECRPGGSCAPCGGDLTFDPGPRDLVEPWVVVRGLRPDFTYTFEVTALNGVSSLATGPVPFEPVNVTTDREVPPAVSDIRVTRSSPSSLSLAWAVPRAPSGAVLDYEVKYHEKGAEGPSSVRFLKTSENRAELRGLKRGASYLVQVRARSEAGYGPFGQEHHSQTQLDESEGWREQLA

SEQ ID NO: 409 - protein, 226 aa, Homo Sapiens
PPSAPQELWFEVQGSALMLHWRLPRELGGRGDLLFNVVCKECEGRQEPASGGGGTCHRCRDEVHFDPRQRGLTESRVLVGGLRAHVPYILEVQAVNGVSELSPDPPQAAAINVSTSHEVPSAVPVVHQVSRASNSITVSWPQPDQTNGNILDYQLRYYDQAEDESHSFTLTSETNTATVTQLSPGHIYGFQVRARTAAGHGPYGGKVYFQTLPQGELSSQLPERLS

SEQ ID NO: 410 - protein, 166 aa, Homo Sapiens
APPRLICDSRVLERYLLEAKEAENITTGCAEHCSLNENITVPDTKVNFYAWKRMEVGQQAVEVWQGLALLSEAVLRGQALLVNSSQPWEPLQLHVDKAVSGLRSLTTLLRALGAQKEAISPPDAASAAPLRTITADTFRKLFRVYSNFLRGKLKLYTGEACRTGDR

SEQ ID NO: 411 - protein, 226 aa, Homo Sapiens
APPPNLPDPKFESKAALLAARGPEELLCFTERLEDLVCFWEEAASAGVGPGNYSFSYQLEDEPWKLCRLHQAPTARGAVRFWCSLPTADTSSFVPLELRVTAASGAPRYHRVIHINEVVLLDAPVGLVARLADESGHVVLRWLPPPETPMTSHIRYEVDVSAGNGAGSVQRVEILEGRTECVLSNLRGRTRYTFAVRARMAEPSFGGFWSAWSEPVSLLTPSDLDP

SEQ ID NO: 412 - protein, 303 aa, Homo Sapiens
APTLESINYDSETYDATLEDLDNLYNYENIPVGKVEIEIATVMPSGNRELLTPPPQPEKAQEEEEEEESTPRLIDGSSPQEPEFTGVLGPHTNEDFPTCLLCTCISTTVYCDDHELDAIPPLPKNTAYFYSRFNRIKKINKNDFASLSDLKRIDLTSNLISEIDEDAFRKLPQLRELVLRDNKIRQLPELPTTLTFIDISNNRLGRKGIKQEAFKDMYDLHHLYLTDNNLDHIPLPLPENLRALHLQNNNILEMHEDTFCNVKNLTYIRKALEDIRLDGNPINLSKTPQAYMCLPRLPVGSLV

SEQ ID NO: 413 - protein, 630 aa, Homo Sapiens
TQVCTGTDMKLRLPASPETHLDMLRHLYQGCQVVQGNLELTYLPTNASLSFLQDIQEVQGYVLIAHNQVRQVPLQRLRIVRGTQLFEDNYALAVLDNGDPLNNTTPVTGASPGGLRELQLRSLTEILKGGVLIQRNPQLCYQDTILWKDIFHKNNQLALTLIDTNRSRACHPCSPMCKGSRCWGESSEDCQSLTRTVCAGGCARCKGPLPTDCCHEQCAAGCTGPKHSDCLACLHFNHSGICELHCPALVTYNTDTFESMPNPEGRYTFGASCVTACPYNYLSTDVGSCTLVCPLHNQEVTAEDGTQRCEKCSKPCARVCYGLGMEHLREVRAVTSANIQEFAGCKKIFGSLAFLPESFDGDPASNTAPLQPEQLQVFETLEEITGYLYISAWPDSLPDLSVFQNLQVIRGRILHNGAYSLTLQGLGISWLGLRSLRELGSGLALIHHNTHLCFVHTVPWDQLFRNPHQALLHTANRPEDECVGEGLACHQLCARGHCWGPGPTQCVNCSQFLRGQECVEECRVLQGLPREYVNARHCLPCHPECQPQNGSVTCFGPEADQCVACAHYKDPPFCVARCPSGVKPDLSYMPIWKFPDEEGACQPCPINCTHSCVDLDDKGCPAEQRASPLT

SEQ ID NO: 414 - protein, 624 aa, Homo Sapiens
SEVGNSQAVCPGTLNGLSVTGDAENQYQTLYKLYERCEVVMGNLEIVLTGHNADLSFLQWIREVTGYVLVAMNEFSTLPLPNLRVVRGTQVYDGKFAIFVMLNYNTNSSHALRQLRLTQLTEILSGGVYIEKNDKLCHMDTIDWRDIVRDRDAEIVVKDNGRSCPPCHEVCKGRCWGPGSEDCQTLTKTICAPQCNGHCFGPNPNQCCHDECAGGCSGPQDTDCFACRHFNDSGACVPRCPQPLVYNKLTFQLEPNPHTKYQYGGVCVASCPHNFVVDQTSCVRACPPDKMEVDKNGLKMCEPCGGLCPKACEGTGSGSRFQTVDSSNIDGFVNCTKILGNLDFLITGLNGDPWHKIPALDPEKLNVFRTVREITGYLNIQSWPPHMHNFSVFSNLTTIGGRSLYNRGFSLLIMKNLNVTSLGFRSLKEISAGRIYISANRQLCYHHSLNWTKVLRGPTEERLDIKHNRPRRDCVAEGKVCDPLCSSGGCWGPGPGQCLSCRNYSRGGVCVTHCNFLNGEPREFAHEAECFSCHPECQPMEGTATCNGSGSDTCAQCAHFRDGPHCVSSCPHGVLGAKGPIYKYPDVQNECRPCHENCTQGCKGPELQDCLGQTLVLIGKTHLT

SEQ ID NO: 415 - protein, 626 aa, Homo Sapiens
QSVCAGTENKLSSLSDLEQQYRALRKYYENCEVVMGNLEITSIEHNRDLSFLRSVREVTGYVLVALNQFRYLPLENLRIIRGTKLYEDRYALAIFLNYRKDGNFGLQELGLKNLTEILNGGVYVDQNKFLCYADTIHWQDIVRNPWPSNLTLVSTNGSSGCGRCHKSCTGRCWGPTENHCQTLTRTVCAEQCDGRCYGPYVSDCCHRECAGGCSGPKDTDCFACMNFNDSGACVTQCPQTFVYNPTTFQLEHNFNAKYTYGAFCVKKCPHNFVVDSSSCVRACPSSKMEVEENGIKMCKPCTDICPKACDGIGTGSLMSAQTVDSSNIDKFINCTKINGNLIFLVTGIHGDPYNAIEAIDPEKLNVFRTVREITGFLNIQSWPPNMTDFSVFSNLVTIGGRVLYSGLSLLILKQQGITSLQFQSLKEISAGNIYITDNSNLCYYHTINWTTLFSTINQRIVIRDNRKAENCTAEGMVCNHLCSSDGCWGPGPDQCLSCRRFSRGRICIESCNLYDGEFREFENGSICVECDPQCEKMEDGLLTCHGPGPDNCTKCSHFKDGPNCVEKCPDGLQGANSFIFKYADPDRECHPCHPNCTQGCNGPTSHDCIYYPWTGHSTLPQHARTP

SEQ ID NO: 416 - protein, 46 aa, Homo Sapiens
VSITKCSSDMNGYCLHGQCIYLVDMSQNYCRCEVGYTGVRCEHFFL

SEQ ID NO: 417 - protein, 126 aa, Homo Sapiens
HAGDAGKFHVALLGGTAELLCPLSLWPGTVPKEVRWLRSPFPQRSQAVHIFRDGKDQDEDLMPEYKGRTVLVRDAQEGSVTLQILDVRLEDQGSYRCLIQVGNLSKEDTVILQVAAPSVGSLSPSA

SEQ ID NO: 418 - protein, 219 aa, Homo Sapiens
QLQLHLPANRLQAVEGGEVVLPAWYTLHGEVSSSQPWEVPFVMWFFKQKEKEDQVLSYINGVTTSKPGVSLVYSMPSRNLSLRLEGLQEKDSGPYSCSVNVQDKQGKSRGHSIKTLELNVLVPPAPPSCRLQGVPHVGANVTLSCQSPRSKPAVQYQWDRQLPSFQTFFAPALDVIRGSLSLTNLSSSMAGVYVCKAHNEVGTAQCNVTLEVSTGPGAA

SEQ ID NO: 419 - protein, 573 aa, Homo Sapiens
KTCRRQLVEEWHPQPSSYVVNWTLTENICLDFYRDCWFLGVNTKIDTSGNQAVPQICPLQIQLGDILVISSEPSLQFPEINLMNVSETSFVGCVQNTTMEDQLLFGCRLKGMHTVNSKWLSVGTHYFITVMASGPSPCPLGLRLNVTVKQQFCQESLSSEFCSGHGKCLSEAWSKTYSCHCQPPFSGKYCQELDACSFKPCKNNGSCINKRENWDEQAYECVCHPPFTGKNCSEIIGQCQPHVCFHGNCSNITSNSFICECDEQFSGPFCEVSAKPCVSLLFWKRGICPNSSSAYTYECPKGSSSQNGETDVSEFSLVPCQNGTDCIKISNDVMCICSPIFTDLLCKSIQTSCESFPLRNNATCKKCEKDYPCSCISGFTEKNCEKAIDHCKLLSINCLNEEWCFNIIGRFKYVCIPGCTKNPCWFLKNVYLIHQHLCYCGVTFHGICQDKGPAQFEYVWQLGFAGSEGEKCQGVIDAYFFLAANCTEDATYVNDPEDNNSSCWFPHEGTKEICANGCSCLSEEDSQEYRYLCFLRWAGNMYLENTTDDQENECQHEAVCKDEINRPRYLCII

SEQ ID NO: 420 - protein, 1464 aa, Homo Sapiens
ATGGGGCGCCCACTGCACCTCGTCCTGCTCAGTGCCTCCCTGGCTGGCCTCCTGCTGCTCGGGGAAAGTCTGTTCATCCGCAGGGAGCAGGCCAACAACATCCTGGCGAGGGTCACGAGGGCCAATTCCTTTCTTGAAGAGATGAAGAAAGGACACCTCGAAAGAGAGTGCATGGAAGAGACCTGCTCATACGAAGAGGCCCGCGAGGTCTTTGAGGACAGCGACAAGACGAATGAATTCTGGAATAAATACAAAGATGGCGACCAGTGTGAGACCAGTCCTTGCCAGAACCAGGGCAAATGTAAAGACGGCCTCGGGGAATACACCTGCACCTGTTTAGAAGGATTCGAAGGCAAAAACTGTGAATTATTCACACGGAAGCTCTGCAGCCTGGACAACGGGGACTGTGACCAGTTCTGCCACGAGGAACAGAACTCTGTGGTGTGCTCCTGCGCCCGCGGGTACACCCTGGCTGACAACGGCAAGGCCTGCATTCCCACAGGGCCCTACCCCTGTGGGAAACAGACCCTGGAACGCAGGAAGAGGTCAGTGGCCCAGGCCACCAGCAGCAGCGGGGAGGCCCCTGACAGCATCACATGGAAGCCATATGATGCAGCCGACCTGGACCCCACCGAGAACCCCTTCGACCTGCTTGACTTCAACCAGACGCAGCCTGAGAGGGGCGACAACAACCTCACCAGGATCGTGGGAGGCCAGGAATGCAAGGACGGGGAGTGTCCCTGGCAGGCCCTGCTCATCAATGAGGAAAACGAGGGTTTCTGTGGTGGAACTATTCTGAGCGAGTTCTACATCCTAACGGCAGCCCACTGTCTCTACCAAGCCAAGAGATTCAAGGTGAGGGTAGGGGACCGGAACACGGAGCAGGAGGAGGGCGGTGAGGCGGTGCACGAGGTGGAGGTGGTCATCAAGCACAACCGGTTCACAAAGGAGACCTATGACTTCGACATCGCCGTGCTCCGGCTCAAGACCCCCATCACCTTCCGCATGAACGTGGCGCCTGCCTGCCTCCCCGAGCGTGACTGGGCCGAGTCCACGCTGATGACGCAGAAGACGGGGATTGTGAGCGGCTTCGGGCGCACCCACGAGAAGGGCCGGCAGTCCACCAGGCTCAAGATGCTGGAGGTGCCCTACGTGGACCGCAACAGCTGCAAGCTGTCCAGCAGCTTCATCATCACCCAGAACATGTTCTGTGCCGGCTACGACACCAAGCAGGAGGATGCCTGCCAGGGGGACAGCGGGGGCCCGCACGTCACCCGCTTCAAGGACACCTACTTCGTGACAGGCATCGTCAGCTGGGGAGAGGGCTGTGCCCGTAAGGGGAAGTACGGGATCTACACCAAGGTCACCGCCTTCCTCAAGTGGATCGACAGGTCCATGAAAACCAGGGGCTTGCCCAAGGCCAAGAGCCATGCCCCGGAGGTCATAACGTCCTCTCCATTAAAG

SEQ ID NO: 421 - protein, 211 aa, Homo Sapiens
SVTVHSSEPEVRIPENNPVKLSCAYSGFSSPRVEWKFDQGDTTRLVCYNNKITASYEDRVTFLPTGITFKSVTREDTGTYTCMVSEEGGNSYGEVKVKLIVLVPPSKPTVNIPSSATIGNRAVLTCSEQDGSPPSEYTWFKDGIVMPTNPKSTRAFSNSSYVLNPTTGELVFDPLSASDTGEYSCEARNGYGTPMTSNAVRMEAVERNVGV

SEQ ID NO: 422 - protein, 243 aa, Homo Sapiens
VVGGLVALRGAHPYIAALYWGHSFCAGSLIAPCWVLTAAHCLQDRPAPEDLTVVLGQERRNHSCEPCQTLAVRSYRLHEAFSPVSYQHDLALLRLQEDADGSCALLSPYVQPVCLPSGAARPSETTLCQVAGWGHQFEGAEEYASFLQEAQVPFLSLERCSAPDVHGSSILPGMLCAGFLEGGTDACQGDSGGPLVCEDQAAERRLTLQGIISWGSGCGDRNKPGVYTDVAYYLAWIREHTVS

SEQ ID NO: 423 - protein, 694 aa, Homo Sapiens
GVNLQEFLNVTSVHLFKERWDTNKVDHHTDKYENNKLIVRRGQSFYVQIDFSRPYDPRRDLFRVEYVIGRYPQENKGTYIPVPIVSELQSGKWGAKIVMREDRSVRLSIQSSPKCIVGKFRMYVAVWTPYGVLRTSRNPETDTYILFNPWCEDDAVYLDNEKEREEYVLNDIGVIFYGEVNDIKTRSWSYGQFEDGILDTCLYVMDRAQMDLSGRGNPIKVSRVGSAMVNAKDDEGVLVGSWDNIYAYGVPPSAWTGSVDILLEYRSSENPVRYGQCWVFAGVFNTFLRCLGIPARIVTNYFSAHDNDANLQMDIFLEEDGNVNSKLTKDSVWNYHCWNEAWMTRPDLPVGFGGWQAVDSTPQENSDGMYRCGPASVQAIKHGHVCFQFDAPFVFAEVNSDLIYITAKKDGTHVVENVDATHIGKLIVTKQIGGDGMMDITDTYKFQEGQEEERLALETALMYGAKKPLNTEGVMKSRSNVDMDFEVENAVLGKDFKLSITFRNNSHNRYTITAYLSANITFYTGVPKAEFKKETFDVTLEPLSFKKEAVLIQAGEYMGQLLEQASLHFFVTARINETRDVLAKQKSTVLTIPEIIIKVRGTQVVGSDMTVIVEFTNPLKETLRNVWVHLDGPGVTRPMKKMFREIRPNSTVQWEEVCRPWVSGHRKLIASMSSDSLRHVYGELDVQIQRRPSM

SEQ ID NO: 424 - protein, 219 aa, Homo Sapiens
SGTTNTVAAYNLTWKSTNFKTILEWEPKPVNQVYTVQISTKSGDWKSKCFYTTDTECDLTDEIVKDVKQTYLARVFSYPAGNVESTGSAGEPLYENSPEFTPYLETNLGQPTIQSFEQVGTKVNVTVEDERTLVRRNNTFLSLRDVFGKDLIYTLYYWKSSSSGKKTAKTNTNEFLIDVDKGENYCFSVQAVIPSRTVNRKSTDSPVECMGQEKGEFRE

SEQ ID NO: 425 - protein, 406 aa, Homo Sapiens [sequence omitted]

SEQ ID NO: 426 - protein, 415 aa, Homo Sapiens
YNSGKLEEFVQGNLERECMEEKCSFEEAREVFENTERTTEFWKQYVDGDQCESNPCLNGGSCKDDINSYECWCPFGFEGKNCELDVTCNIKNGRCEQFCKNSADNKVVCSCTEGYRLAENQKSCEPAVPFPCGRVSVSQTSKLTRAETVFPDVDYVNSTEAETILDNITQSTQSFNDFTRVVGGEDAKPGQFPWQVVLNGKVDAFCGGSIVNEKWIVTAAHCVETGVKITVVAGEHNIEETEHTEQKRNVIRIIPHHNYNAAINKYNHDIALLELDEPLVLNSYVTPICIADKEYTNIFLKFGSGYVSGWGRVFHKGRSALVLQYLRVPLVDRATCLRSTKFTIYNNMFCAGFHEGGRDSCQGDSGGPHVTEVEGTSFLTGIISWGEECAMKGKYGIYTKVSRYVNWIKEKTKLT

SEQ ID NO: 427 - protein, 326 aa, Homo Sapiens
SPEPGAPSRSRARREPPPGNELPRGPGESRAGPAARPPEPTAERAHSVDPRDAWMLFVRQSDKGVNGKKRSRGKAKKLKFGLPGPPGPPGPQGPPGPIIPPEALLKEFQLLLKGAVRQRERAEPEPCTCGPAGPVAASLAPVSATAGEDDDDVVGDVLALLAAPLAPGPRAPRVEAAFLCRLRRDALVERRALHELGVYYLPDAEGAFRRGPGLNLTSGQYRAPVAGFYALAATLHVALGEPPRRGPPRPRDHLRLLICIQSRCQRNASLEAIMGLESSSELFTISVNGVLYLQMGQWTSVFLDNASGCSLTVRSGSHFSAVLLGV

SEQ ID NO: 428 - protein, 282 aa, Homo Sapiens
KTLREPGAGAQEVTLKVHISDASTHQPVADALIEIFTNQASIASGTSGTDGVAFIKFQYKLGSQLIVTASKHAYVPNSAPWKPIRLPVFSSLSLGLLPERSATLMVYEDVVQIVSGFQGARPQPRVHFQRRALRLPENTSYSDLTAFLTAASSPSEVDSFPYLRGLDGNGTGNSTRHDLTPVTAVSVHLLSSNGTPVLVDGPIYVTVPLATQSSLRHNAYVAAWRFDQKLGTWLKSGLGLVHQEGSQLTWTYIAPQLGYWVAAMSPPIPGPVVTQDITTYHT

SEQ ID NO: 429 - protein, 359 aa, Homo Sapiens
FEIVEKENIFQRTPCPAFLMFENAAYLADMSFELPCHCKPEEVPAVVWFYQKHLGSSHTKVLTDFDGRVLTEAAQVRVGSDMLTRFSIRMFSLLVFRAQSEDSGLYFCGTRKGDYFYAYDVDIQNSEGMVATFQDKGQEPFADEYYGHLHVFTTFWEWTPCDRCGVRGEQWRIGLCYLQSPDLSPRYLKAVPDVVSCGSRAVPRKLRTKARDHTPEVLVRSCLVPCEKTKTIREGVLAIINYVSKVGSRPWVPQVPIQFHQQRLGHGLIISCPGARPEHAVAWDKDRQHLYRTQYLKGVNRSMRVFIDHGNQLHIRFTQLDDRGIYYCWRQGVLVAGFRLGVTSHGHYPASFSDPETRS

SEQ ID NO: 430 - protein, 318 aa, Homo Sapiens
FYFSISCPSGKQCQQALLSGNDILLYCNSSGAHWYYLFTQGKKGRLTSLTNISNMEIMPEGSLLIKDPLPSQTGLYHCWNKNGRQVVQYEIDFQDVTTLHITHKDLGQRPLQNETLHLGSKQLIFTWWEPWQDCNRCEEPGERKRLGYRYIEEPLEEAMPCWLYLGEVLVWSSRLRPELQVEACHVQCTNNTQLRVDYVIFDNFRLDEKTEFVWLDCPLGSMYRPVNWRANDTPLTWESQLSGQDFTTFLDPSTGGRQLQVFQPAVYKCFVQQELVAQFKPAASLETLEAQWRENDAQWREARKALRGRADSVLKGLK

SEQ ID NO: 431 - protein, 492 aa, Homo Sapiens
DFSSDPSSNLSSHSLEKLPPAAEPAERALRGRDPGALRPHDPAHRPLLRDPGPRRSESPPGPGGDASLLARLFEHPLYRVAVPPLTEEDVLFNVNSDTRLSPKAAENPDWPHAGAEGAEFLSPGEAAVDSYPNWLKFHIGINRYELYSRHNPAIEALLHDLSSQRITSVAMKSGGTQLKLIMTFQNYGQALFKPMKQTREQETPPDFFYFSDYERHNAEIAAFHLDRILDFRRVPPVAGRMVNMTKEIRDVTRDKKLWRTFFISPANNICFYGECSYYCSTEHALCGKPDQIEGSLAAFLPDLSLAKRKTWRNPWRRSYHKRKKAEWEVDPDYCEEVKQTPPYDSSHRILDVMDMTIFDFLMGNMDRHHYETFEKFGNETFIIHLDNGRGFGKYSHDELSILVPLQQCCRIRKSTYLRLQLLAKEEYKLSLLMAESLRGDQVAPVLYQPHLEALDRRLRVVLKAVRDCVERNGLHSVVDDDLDTEHRAASAR

SEQ ID NO: 432 - protein, 276 aa, Homo Sapiens
GTATRFSGQSYVRYRAPAARNWHIHFYLKTLQPQAILLFTNETASVSLKLASGVPQLEYHCLGGFYGNLSSQRHVNDHEWHSILVEEMDASIRLMVDSMGNTSLVVPENCRGLRPERHLLLGGLILLHSSSNVSQGFEGCLDAVVVNEEALDLLAPGKTVAGLLETQALTQCCLHSDYCSQNTCLNGGKCSWTHGAGYVCKCPPQFSGKHCEQGRENCTFAPCLEGGTCILSPKGASCNCPHPYTGDRCEMEARGCSEGHCLVTPEIQRGDWGQQE

SEQ ID NO: 433 - protein, 654 aa, Homo Sapiens
DVLLEACCADGHRMATHQKDCSLPYATESKECRMVQEQCCHSQLEELHCATGISLANEQDRCATPHGDNASLEATFVKRCCHCCLLGRAAQAQGQSCEYSLMVGYQCGQVFRACCVKSQETGDLDVGGLQETDKIIEVEEEQEDPYLNDRCRGGGPCKQQCRDTGDEVVCSCFVGYQLLSDGVSCEDVNECITGSHSCRLGESCINTVGSFRCQRDSSCGTGYELTEDNSCKDIDECESGIHNCLPDFICQNTLGSFRCRPKLQCKSGFIQDALGNCIDINECLSISAPCPIGHTCINTEGSYTCQKNVPNCGRGYHLNEEGTRCVDVDECAPPAEPCGKGHRCVNSPGSFRCECKTGYYFDGISRMCVDVNECQRYPGRLCGHKCENTLGSYLCSCSVGFRLSVDGRSCEDINECSSSPCSQECANVYGSYQCYCRRGYQLSDVDGVTCEDIDECALPTGGHICSYRCINIPGSFQCSCPSSGYRLAPNGSNCQDIDECVTGIHNCSINETCFNIQGGFRCLAFECPENYRRSAATRCERLPCHENRECSKLPLRITYYHLSFPTNIQAPAVVFRMGPSSAVPGDSMQLAITGGNEEGFFTTRKVSPHSGVVALTKPVPEPRDLLLTVKMDLSRHGTVSSFVAKLFIFVSAEL

SEQ ID NO: 434 - protein, 1157 aa, Homo Sapiens
APRQDCTGVECPPLENCIEEALEPGACCATCVQQGCACEGYQYYDCLQGGFVRGRVPAGQSYFVDFGSTECSCPPGGGKISCQFMLCPELPPNCIEAVVVADSCPQCGQVGCVHAGHKYAAGHTVHLPPCRACHCPDAGGELICYQLPGCHGNFSDAEEGDPERHYEDPYSYDQEVAEVEAATALGGEVQAGAVQAGAGGPPAALGGGSQPLSTIQAPPWPAVLPRPTAAAALGPPAPVQAKARRVTEDSEEEEEEEEEREEMAVTEQLAAGGHRGLDGLPTTAPAGPSLPIQEERAEAGARAEAGARPEENLILDAQATSRSTGPEGVTHAPSLGKAALVPTQAVPGSPRDPVKPSPHNILSTSLPDAAWIPPTREVPRKPQVLPHSHVEEDTDPNSVHSIPRSSPEGSTKDLIETCCAAGQQWAIDNDECLEIPESGTEDNVCRTAQRHCCVSYLQEKSCMAGVLGAKEGETCGAEDNDSCGISLYKQCCDCCGLGLRVRAEGQSCESNPNLGYPCNHVMLSCCEGEEPLIVPEVRRPPEPAAAPRRVSEAEMAGREALSLGTEAELPNSLPGDDQDECLLLPGELCQHLCINTVGSYHCACFPGFSLQDDGRTCRPEGHPPQPEAPQEPALKSEFSQVASNTIPLPLPQPNTCKDNGPCKQVCSTVGGSAICSCFPGYAIMADGVSCEDINECVTDLHTCSRGEHCVNTLGSFHCYKALTCEPGYALKDGECEDVDECAMGTHTCQPGFLCQNTKGSFYCQARQRCMDGFLQDPEGNCVDINECTSLSEPCRPGFSCINTVGSYTCQRNPLICARGYHASDDGAKCVDVNECETGVHRCGEGQVCHNLPGSYRCDCKAGFQRDAFGRGCIDVNECWASPGRLCQHTCENTLGSYRCSCASGFLLAADGKRCEDVNECEAQRCSQECANIYGSYQCYCRQGYQLAEDGHTCTDIDECAQGAGILCTFRCLNVPGSYQCACPEQGYTMTANGRSCKDVDECALGTHNCSEAETCHNIQGSFRCLRLECPPNYVQVSKTKCERTTCHDFLECQNSPARITHYQLNFQTGLLVPAHIFRIGPAPAFTGDTIALNIIKGNEEGYFGTRRLNAYTGVVYLQRAVLEPRDFALDVEMKLWRQGSVTTFLAKMHIFFTTFAL

SEQ ID NO: 435 - protein, 425 aa, Homo Sapiens
QAQCTNGFDLDRQSGQCLDIDECRTIPEACRGDMMCVNQNGGYLCIPRTNPVYRGPYSNPYSTPYSGPYPAAAPPLSAPNYPTISRPLICRFGYQMDESNQCVDVDECATDSHQCNPTQICINTEGGYTCSCTDGYWLLEGQCLDIDECRYGYCQQLCANVPGSYSCTCNPGFTLNEDGRSCQDVNECATENPCVQTCVNTYGSFICRCDPGYELEEDGVHCSDMDECSFSEFLCQHECVNQPGTYFCSCPPGYILLDDNRSCQDINECEHRNHTCNLQQTCYNLQGGFKCIDPIRCEEPYLRISDNRCMCPAENPGCRDQPFTILYRDMDVVSGRSVPADIFQMQATTRYPGAYYIFQIKSGNEGREFYMRQTGPISATLVMTRPIKGPREIQLDLEMITVNTVINFRGSSVIRLRIYVSQYPF

SEQ ID NO: 436 - protein, 415 aa, Homo Sapiens
QNCLSKQQLLSAIRQLQQLLKGQETRFAEGIRHMKSRLAALQNSVGRVGPDALPVSCPALNTPADGRKFGSKYLVDHEVHFTCNPGFRLVGPSSVVCLPNGTWTGEQPHCRGISECSSQPCQNGGTCVEGVNQYRCICPPGRTGNRCQHQAQTAAPEGSVAGDSAFSRAPRCAQVERAQHCSCEAGFHLSGAAGDSVCQDVNECELYGQEGRPRLCMHACVNTPGSYRCTCPGGYRTLADGKSCEDVDECVGLQPVCPQGTTCINTGGSFQCVSPECPEGSGNVSYVKTSPFQCERNPCPMDSRPCRHLPKTISFHYLSLPSNLKTPITLFRMATASAPGRAGPNSLRFGIVGGNSRGHFVMQRSDRQTGDLILVQNLEGPQTLEVDVDMSEYLDRSFQANHVSKVTIFVSPYDF

SEQ ID NO: 437 - protein, 282 aa, Homo Sapiens
GQQDVLRGPNVCGSRFHSYCCPGWKTLPGGNQCIVPICRNSCGDGFCSRPNMCTCSSGQISSTCGSKSIQQCSVRCMNGGTCADDHCQCQKGYIGTYCGQPVCENGCQNGGRCIGPNRCACVYGFTGPQCERDYRTGPCFTQVNNQMCQGQLTGIVCTKTLCCATIGRAWGHPCEMCPAQPQPCRRGFIPNIRTGACQDVDECQAIPGICQGGNCINTVGSFECRCPAGHKQSETTQKCEDIDECSIIPGICETGECSNTVGSYFCVCPRGYVTSTDGSRCI

SEQ ID NO: 438 - protein, 120 aa, Homo Sapiens
SAHRDHQVNLATLDSEALLTLGLNLSHLGRAERILELRPALEGLEGRIRYVIVRGNEQGFFRMHHLRGVSSLQLGRRRPGPGTYRLEVVSHMAGPWGVQPEGQPGPWGQALRLKVQLQLL

SEQ ID NO: 439 - protein, 434 aa, Homo Sapiens
LPQKRPHPRWLWEGSLPSRTHLRAMGTLRPSSPLCWREESSFAAPNSLKGSRLVSGEPGGAVTIQCHYAPSSVNRHQRKYWCRLGPPRWICQTIVSTNQYTHHRYRDRVALTDFPQRGLFVVRLSQLSPDDIGCYLCGIGSENNMLFLSMNLTISAGPASTLPTATPAAGELTMRSYGTASPVANRWTPGTTQTLGQGTAWDTVASTPGTSKTTASAEGRRTPGATRPAAPGTGSWAEGSVKAPAPIPESPPSKSRSMSNTTEGVWEGTRSSVTNRARASKDRREMTTTKADRPREDIEGVRIALDAAKKVLGTIGPPALVSETLAWEILPQATPVSKQQSQGSIGETTPAAGMWTLGTPAADVWILGTPAADVWTSMEAASGEGSAAGDLDAATGDRGPQATLSQTPAVGPWGPPGKESSVKRTFPEDESSSR

SEQ ID NO: 440 - protein, 206 aa, Homo Sapiens
QEGDFPMPFISAKSSPVIPLDGSVKIQCQAIREAYLTQLMIIKNSTYREIGRRLKFWNETDPEFVIDHMDANKAGRYQCQYRIGHYRFRYSDTLELVVTGLYGKPFLSADRGLVLMPGENISLTCSSAHIPFDRFSLAKEGELSLPQHQSGEHPANFSLGPVDLNVSGIYRCYGWYNRSPYLWSFPSNALELVVTDSIHQDYTTQN

SEQ ID NO: 441 - protein, 180 aa, Homo Sapiens
VPQKPKVSLNPPWNRIFKGENVTLTCNGNNFFEVSSTKWFHNGSLSEETNSSLNIVNAKFEDSGEYKCQHQQVNESEPVYLEVFSDWLLLQASAEVVMEGQPLFLRCHGWRNWDVYKVIYYKDGEALKYWYENHNISITNATVEDSGTYYCTGKVWQLDYESEPLNITVIKAPREKYWLQ

SEQ ID NO: 442 - protein, 172 aa, Homo Sapiens
MELQVSSGFVCNTCPEKWINFQRKCYYFGKGTKQWVHARYACDDMEGQLVSIHSPEEQDFLTKHASHTGSWIGLRNLDLKGEFIWVDGSHVDYSNWAPGEPTSRSQGEDCVMMRGSGRWNDAFCDRKLGAWVCDRLATCTPPASEGSAESMGPDSRPDPDGRLPTPSAPLHS

SEQ ID NO: 443 - protein, 277 aa, Homo Sapiens [sequence omitted]

SEQ ID NO: 444 - protein, 183 aa, Homo Sapiens
QVDTTKAVITLQPPWVSVFQEETVTLHCEVLHLPGSSSTQWFLNGTATQTSTPSYRITSASVNDSGEYRCQRGLSGRSDPIQLEIHRGWLLLQVSSRVFMEGEPLALRCHAWKDKLVYNVLYYRNGKAFKFFHWNSNLTILKTNISHNGTYHCSGMGKHRYTSAGISQYTVKGLQLPTPVWFH

SEQ ID NO: 445 - protein, 183 aa, Homo Sapiens
QAAPPKAVLKLEPPWINVLQEDSVTLTCQGARSPESDSIQWFHNGNLIPTHTQPSYRFKANNNDSGEYTCQTGQTSLSDPVHLTVLSEWLVLQTPHLEFQEGETIMLRCHSWKDKPLVKVTFFQNGKSQKFSHLDPTFSIPQANHSHSGDYHCTGNIGYTLFSSKPVTITVQVPSMGSSSPMG

SEQ ID NO: 446 - protein, 175 aa, Homo Sapiens
TPAAPPKAVLKLEPQWINVLQEDSVTLTCRGTHSPESDSIQWFHNGNLIPTHTQPSYRFKANNNDSGEYTCQTGQTSLSDPVHLTVLSEWLVLQTPHLEFQEGETIVLRCHSWKDKPLVKVTFFQNGKSKKFSRSDPNFSIPQANHSHSGDYHCTGNIGYTLYSSKPVTITVQAP

SEQ ID NO: 447 - protein, 175 aa, Homo Sapiens; identical to SEQ ID NO: 446

SEQ ID NO: 448 - protein, 181 aa, Homo Sapiens
TPAAPPKAVLKLEPQWINVLQEDSVTLTCRGTHSPESDSIQWFHNGNLIPTHTQPSYRFKANNNDSGEYTCQTGQTSLSDPVHLTVLSEWLVLQTPHLEFQEGETIVLRCHSWKDKPLVKVTFFQNGKSKKFSRSDPNFSIPQANHSHSGDYHCTGNIGYTLYSSKPVTITVQAPSSSPMG

SEQ ID NO: 449 - protein, 192 aa, Homo Sapiens
GMRTEDLPKAVVFLEPQWYRVLEKDSVTLKCQGAYSPEDNSTQWFHNESLISSQASSYFIDAATVDDSGEYRCQTNLSTLSDPVQLEVHIGWLLLQAPRWVFKEEDPIHLRCHSWKNTALHKVTYLQNGKGRKYFHHNSDFYIPKATLKDSGSYFCRGLVGSKNVSSETVNITITQGLAVSTISSFFPPGYQ

SEQ ID NO: 450 - protein, 192 aa, Homo Sapiens
GMRTEDLPKAVVFLEPQWYRVLEKDSVTLKCQGAYSPEDNSTQWFHNESLISSQASSYFIDAATVDDSGEYRCQTNLSTLSDPVQLEVHIGWLLLQAPRWVFKEEDPIHLRCHSWKNTALHKVTYLQNGKGRKYFHHNSDFYIPKATLKDSGSYFCRGLVGSKNVSSETVNITITQGLSVSTISSFFPPGYQ

SEQ ID NO: 451 - protein, 274 aa, Homo Sapiens
AESHLSLLYHLTAVSSPAPGTPAFWVSGWLGPQQYLSYNSLRGEAEPCGAWVWENQVSWYWEKETTDLRIKEKLFLEAFKALGGKGPYTLQGLLGCELGPDNTSVPTAKFALNGEEFMNFDLKQGTWGGDWPEALAISQRWQQQDKAANKELTFLLFSCPHRLREHLERGRGNLEWKEPPSMRLKARPSSPGFSVLTCSAFSFYPPELQLRFLRNGLAAGTGQGDFGPNSDGSFHASSSLTVKSGDEHHYCCIVQHAGLAQPLRVELESPAKSS

SEQ ID NO: 452 - protein, 234 aa, Homo Sapiens
RILPEVKVEGELGGSVTIKCPLPEMHVRIYLCREMAGSGTCGTVVSTTNFIKAEYKGRVTLKQYPRKNLFLVEVTQLTESDSGVYACGAGMNTDRGKTQKVTLNVHSEYEPSWEEQPMPETPKWFHLPYLFQMPAYASSSKFVTRVTTPAQRGKVPPVHHSSPTTQITHRPRVSRASSVAGDKPRTFLPSTTASKISALEGLLKPQTPSYNHHTRLHRQRALDYGSQSGREGQG

SEQ ID NO: 453 - protein, 291 aa, Homo Sapiens
AELFLIASPSHPTEGSPVTLTCKMPFLQSSDAQFQFCFFRDTRALGPGWSSSPKLQIAAMWKEDTGSYWCEAQTMASKVLRSRRSQINVHRVPVADVSLETQPPGGQVMEGDRLVLICSVAMGTGDITFLWYKGAVGLNLQSKTQRSLTAEYEIPSVRESDAEQYYCVAENGYGPSPSGLVSITVRIPVSRPILMLRAPRAQAAVEDVLELHCEALRGSPPILYWFYHEDITLGSRSAPSGGGASFNLSLTEEHSGNYSCEANNGLGAQRSEAVTLNFTVPTGARSNHLTS

SEQ ID NO: 454 - protein, 98 aa, Homo Sapiens
LTLVAPSSVFEGDSIVLKCQGEQNWKIQKMAYHKDNKELSVFKKFSDFLIQSAVLSDSGNYFCSTKGQLFLWDKTSNIVKIKVQGPDGYRRDLMTAGV

SEQ ID NO: 455 - protein, 556 aa, Homo Sapiens
GVAPKAVLLLNPPWSTAFKGEKVALICSSISHSLAQGDTYWYHDEKLLKIKHDKIQITEPGNYQCKTRGSSLSDAVHVEFSPDWLILQALHPVFEGDNVILRCQGKDNKNTHQKVYYKDGKQLPNSYNLEKITVNSVSRDNSKYHCTAYRKFYILDIEVTSKPLNIQVQELFLHPVLRASSSTPIEGSPMTLTCETQLSPQRPDVQLQFSLFRDSQTLGLGWSRSPRLQIPAMWTEDSGSYWCEVETVTHSIKKRSLRSQIRVQRVPVSNVNLEIRPTGGQLIEGENMVLICSVAQGSGTVTFSWHKEGRVRSLGRKTQRSLLAELHVLTVKESDAGRYYCAADNVHSPILSTWIRVTVRIPVSHPVLTFRAPRAHTVVGDLLELHCESLRGSPPILYRFYHEDVTLGNSSAPSGGGASFNLSLTAEHSGNYSCDADNGLGAQHSHGVSLRVTVPVSRPVLTLRAPGAQAVVGDLLELHCESLRGSFPILYWFYHEDDTLGNISAHSGGGASFNLSLTTEHSGNYSCEADNGLGAQHSKVVTLNVTGTSRNRTGLT

SEQ ID NO: 456 - protein, 368 aa, Homo Sapiens
AHKPVISVHPPWTTFFKGERVTLTCNGFQFYATEKTTWYHRHYWGEKLTLTPGNTLEVRESGLYRCQARGSPRSNPVRLLFSSDSLILQAPYSVFEGDTLVLRCHRRRKEKLTAVKYTWNGNILSISNKSWDLLIPQASSNNNGNYRCIGYGDENDVFRSNFKIIKIQELFPHPELKATDSQPTEGNSVNLSCETQLPPERSDTPLHFNFFRDGEVILSDWSTYPELQLPTVWRENSGSYWCGAETVRGNIHKHSPSLQIHVQRIPVSGVLLETQPSGGQAVEGEMLVLVCSVAEGTGDTTFSWHREDMQESLGRKTQRSLRAELELPAIRQSHAGGYYCTADNSYGPVQSMVLNVTVRETPGNRDGL

SEQ ID NO: 457 - protein, 836 aa, Homo Sapiens
QFARTPRPIIFLQPPWTTVFQGERVTLTCKGFRFYSPQKTKWYHRYLGKEILRETPDNILEVQESGEYRCQAQGSPLSSPVHLDFSSASLILQAPLSVFEGDSVVLRCRAKAEVTLNNTIYKNDNVLAFLNKRTDFHIPHACLKDNGAYRCTGYKESCCPVSSNTVKIQVQEPFTRPVLRASSFQPISGNPVTLTCETQLSLERSDVPLRFRFFRDDQTLGLGWSLSPNFQITAMWSKDSGFYWCKAATMPHSIISDSPRSWIQVQIPASHPVLTLSPEKALNFEGTKVTLHCETQEDSLRTLYRFYHEGVPLRHKSVRCERGASISFSLTTENSGNYYCTADNGLGAKPSKAVSLSVTVPVSHPVLNLSSPEDLIFEGAKVTLHCEAQRGSLPILYQFHHEDAALERRSANSAGGVAISFSLTAEHSGNYYCTADNGFGPQRSKAVSLSITVPVSHPVLTLSSAEALTFEGATVTLHCEVQRGSPQILYQFYHEDMPLWSSSTPSVGRVSFSFSLTEGHSGNYYCTADNGFGPQRSEVVSLFVTVPVSRPILTLRVPRAQAVVGDLLELHCEAPRGSPPILYWFYHEDVTLGSSSAPSGGEASFNLSLTAEHSGNYSCEANNGLVAQHSDTISLSVIVPVSRPILTFRAPRAQAVVGDLLELHCEALRGSSPILYWFYHEDVTLGKISAPSGGGASFNLSLTTEHSGIYSCEADNGLEAQRSEMVTLKVAVPVSRPVLTLRAPGTHAAVGDLLELHCEALRGSPLILYRFFHEDVTLGNRSSPSGGASLNLSLTAEHSGNYSCEADNGLGAQRSETVTLYITGLTANRSGPFATG

SEQ ID NO: 458 - protein, 288 aa, Homo Sapiens
LYLQAWPNPVFEGDALTLRCQGWKNTPLSQVKFYRDGKFLHFSKENQTLSMGAATVQSRGQYSCSGQVMYIPQTFTQTSETAMVQVQELFPPPVLSAIPSPEPREGSLVTLRCQTKLHPLRSALRLLFSFHKDGHTLQDRGPHPELCIPGAKEGDSGLYWCEVAPEGGQVQKQSPQLEVRVQAPVSRPVLTLHHGPADPAVGDMVQLLCEAQRGSPPILYSFYLDEKIVGNHSAPCGGTTSLLFPVKSEQDAGNYSCEAENSVSRERSEPKKLSLKGSQVLFTPASNW

SEQ ID NO: 459 - protein, 409 aa, Homo Sapiens
ATLEKPILSLHPPWTTIFKGERVTLKCDGYHPLLLELQPISTLWYLGHLLLPSHKKSIEVQTPGVYRCQTRGAPVSDPIHLSVSNDWLILQVPYAPVFEGEPLVLRCRGWYDKVVYKLHYYHDGQAVRYFHSSANYTVLQARASDSGRYQCSGTMRIPVESAPMFSAKVAVTVQELFRAPVLRVMGPREARGAALGGVVLRCDTRLHPQKRDTPLQFAFYKYSRAVRRFDWGAEYTVPEPEVEELESYWCEAATATRSVRKRSPWLQLPGPGSPLDPASTTAPAPWAAALAPGNRPLSFRKPPVSRSVPLVTSVRNTTSTGLQFPASGAPTAGPPACAPPTPLEQSAGALKPDVDLLLREMQLLKGLLSRVVLELKEPQALRELRGTPETPTSHFAVSPGTPETTPVES

SEQ ID NO: 460 - protein, 332 aa, Homo Sapiens
ASFETLQCEGPVCTEESSCHTEDDLTDAREAGFQVKAYTFSEPFHLIVSYDWLILQGPAKPVFEGDLLVLRCQAWQDWPLTQVTFYRDGSALGPPGPNREFSITVVQKADSGHYHCSGIFQSPGPGIPETASVVAITVQELFPAPILRAVPSAEPQAGSPMTLSCQTKLPLQRSAARLLFSFYKDGRIVQSRGLSSEFQIPTASEDHSGSYWCEAATEDNQVWKQSPQLEIRVQGASSSAAPPTLNPAPQKSAAPGTAPEEAPGPLPPPPTPSSEDPGFSSPLGMPDPHLYHQMGLLLKHMQDVRVLLGHLLMELRELSGHQKPGTTKATAE

SEQ ID NO: 461 - protein, 140 aa, Homo Sapiens
FNLPPGNYKKPKLLYCSNGGHFLRILPDGTVDGTRDRSDQHIQLQLSAESVGEVYIKSTETGQYLAMDTDGLLYGSQTPNEECLFLERLEENHYNTYISKKHAEKNWFVGLKKNGSCKRGPRTHYGQKAILFLPLPVSSD

SEQ ID NO: 462 - protein, 171 aa, Homo Sapiens
QALGQDMVSPEATNSSSSSFSSPSSAGRHVRSYNHLQGDVRWRKLFSFTKYFLKIEKNGKVSGTKKENCPYSILEITSVEIGVVAVKAINSNYYLAMNKKGKLYGSKEFNNDCKLKERIEENGYNTYASFNWQHNGRQMYVALNGKGAPRRGQKTRRKNTSAHFLPMVVHS

SEQ ID NO: 463 - protein, 207 aa, Homo Sapiens
MAEVGGVFASLDWDLHGFSSSLGNVPLADSPGFLNERLGQIEGKLQRGSPTDFAHLKGILRRRQLYCRTGFHLEIFPNGTVHGTRHDHSRFGILEFISLAVGLISIRGVDSGLYLGMNERGELYGSKKLTRECVFREQFEENWYNTYASTLYKHSDSERQYYVALNKDGSPREGYRTKRHQKFTHFLPRPVDPSKLPSMSRDLFHYR

SEQ ID NO: 464 - protein, 194 aa, Homo Sapiens
TQGENHPSPNFNQYVRDQGAMTDQLSRRQIREYQLYSRTSGKHVQVTGRRISATAEDGNKFAKLIVETDTFGSRVRIKGAESEKYICMNKRGKLIGKPSGKSKDCVFTEIVLENNYTAFQNARHEGWFMAFTRQGRPRQASRSRQNQREAHFIKRLYQGQLPFPNHAEKQKQFEFVGSAPTRRTKRTRRPQPLT

SEQ ID NO: 465 - protein, 180 aa, Homo Sapiens
EENVDFRIHVENQTRARDDVSRKQLRLYQLYSRTSGKHIQVLGRRISARGEDGDKYAQLLVETDTFGSQVRIKGKETEFYLCMNRKGKLVGKPDGTSKECVFIEKVLENNYTALMSAKYSGWYVGFTKKGRPRKGPKTRENQQDVHFMKRYPKGQPELQKPFKYTTVTKRSRRIRPTHPA

SEQ ID NO: 466 - protein, 192 aa, Homo Sapiens
LAFSDAGPHVHYGWGDPIRLRHLYTSGPHGLSSCFLRIRADGVVDCARGQSAHSLLEIKAVALRTVAIKGVHSVRYLCMGADGKMQGLLQYSEEDCAFEEEIRPDGYNVYRSEKHRLPVSLSSAKQRQLYKNRGFLPLSHFLPMLPMVPEEPEDLRGHLESDMFSSPLETDSMDPFGLVTGLEAVRSPSFEK

SEQ ID NO: 467 - protein, 211 aa, Homo Sapiens
MAPLAEVGGFLGGLEGLGQQVGSHFLLPPAGERPPLLGERRSAAERSARGGPGAAQLAHLHGILRRRQLYCRTGFHLQILPDGSVQGTRQDHSLFGILEFISVAVGLVSIRGVDSGLYLGMNDKGELYGSEKLTSECIFREQFEENWYNTYSSNIYKHGDTGRRYFVALNKDGTPRDGARSKRHQKFTHFLPRPVDPERVPELYKDLLMYT

SEQ ID NO: 468 - protein, 181 aa, Homo Sapiens
HPIPDSSPLLQFGGQVRQRYLYTDDAQQTEAHLEIREDGTVGGAADQSPESLLQLKALKPGVIQILGVKTSRFLCQRPDGALYGSLHFDPEACSFRELLLEDGYNVYQSEAHGLPLHLPGNKSPHRDPAPRGPARFLPLPGLPPAPPEPPGILAPQPPDVGSSDPLSMVGPSQGRSPSYAS

SEQ ID NO: 469 - protein, 227 aa, Homo Sapiens
YPNASPLLGSSWGGLIHLYTATARNSYHLQIHKNGHVDGAPHQTIYSALMIRSEDAGFVVITGVMSRRYLCMDFRGNIFGSHYFDPENCRFQHQTLENGYDVYHSPQYHFLVSLGRAKRAFLPGMNPPPYSQFLSRRNEIPLIHFNTPIPRRHTRSAEDDSERDPLNVLKPRARMTPAPASCSQELPSAEDNSPMASDPLGVVRGGRVNTHAGGTGPEGCRPFAKFI

SEQ ID NO: 470 - protein, 222 aa, Homo Sapiens
AAGPGARLRRDAGGRGGVYEHLGGAPRRRKLYCATKYHLQLHPSGRVNGSLENSAYSILEITAVEVGIVAIRGLFSGRYLAMNKRGRLYASEHYSAECEFVERIHELGYNTYASRLYRTVSSTPGARRQPSAERLWYVSVNGKGRPRRGFKTRRTQKSSLFLPRVLDHRDHEMVRQLQSGLPRPPGKGVQPRRRRQKQSPDNLEPSHVQASRLGSQLEASAH

SEQ ID NO: 471 - protein, 248 aa, Homo Sapiens
HGEKRLAPKGQPGPAATDRNPRGSSSRQSSSSAMSSSSASSSPAASLGSQGSGLEQSSFQWSPSGRRTGSLYCRVGIGFHLQIYPDGKVNGSHEANMLSVLEIFAVSQGIVGIRGVFSNKFLAMSKKGKLHASAKFTDDCKFRERFQENSYNTYASAIHRTEKTGREWYVALNKRGKAKRGCSPRVKPQHISTHFLPRFKQSEQPELSFTVTVPEKKKPPSPIKPKIPLSAPRKNTNSVKYRLKFRFG

SEQ ID NO: 472 - protein, 171 aa, Homo Sapiens
SPAGTRANNTLLDSRGWGTLLSRSRAGLAGEIAGVNWESGYLVGIKRQRRLYCNVGIGFHLQVLPDGRISGTHEENPYSLLEISTVERGVVSLFGVRSALFVAMNSKGRLYATPSFQEECKFRETLLPNNYNAYESDLYQGTYIALSKYGRVKRGSKVSPIMTVTHFLPRI

SEQ ID NO: 473 - protein, 163 aa, Homo Sapiens
CNDMTPEQMATNVNCSSPERHTRSYDYMEGGDIRVRRLFCRTQWYLRIDKRGKVKGTQEMKNNYNIMEIRTVAVGIVAIKGVESEFYLAMNKEGKLYAKKECNEDCNFKELILENHYNTYASAKWTHNGGEMFVALNQKGIPVRGKKTKKEQKTAHFLPMAIT

SEQ ID NO: 474 - protein, 205 aa, Homo Sapiens
LGEVGNYFGVQDAVPFGNVPVLPVDSPVLLSDHLGQSEAGGLPRGPAVTDLDHLKGILRRRQLYCRTGFHLEIFPNGTIQGTRKDHSRFGILEFISIAVGLVSIRGVDSGLYLGMNEKGELYGSEKLTQECVFREQFEENWYNTYSSNLYKHVDTGRRYYVALNKDGTPREGTRTKRHQKFTHFLPRPVDPDKVPELYKDILSQS

SEQ ID NO: 475 - protein, 211 aa, Homo Sapiens
KKKVKNGLHSKVVSEQKDTLGNTQIKQKSRPGNKGKFVTKDQANCRWAATEQEEGISLKVECTQLDHEFSCVFAGNPTSCLKLKDERVYWKQVARNLRSQKDICRYSKTAVKTRVCRKDFPESSLKLVSSTLFGNTKPRKEKTEMSPREHIKGKETTPSSLAVTQTMATKAPECVEDPDMANQRKTALEFCGETWSSLCTFFLSIVQDTSC

SEQ ID NO: 476 - protein, 232 aa, Homo Sapiens
RREKGAASNVAEPVPGPTGGSSGRFLSPEQHACSWQLLLPAPEAAAGSELALRCQSPDGARHQCAYRGHPERCAAYAARRAHFWKQVLGGLRKKRRPCHDPAPLQARLCAGKKGHGAELRLVPRASPPARPTVAGFAGESKPRARNRGRTRERASGPAAGTPPPQSAPPKENPSERKTNEGKRKAALVPNEERPMGTGPDPDGLDGNAELTETYCAEKWHSLCNFFVNFWNG

SEQ ID NO: 477 - protein, 353 aa, Homo Sapiens
RPSPTLPEQAQPWGAPVEVESFLVHPGDLLQLRCRLRDDVQSINWLRDGVQLAESNRTRITGEEVEVQDSVPADSGLYACVTSSPSGSDTTYFSVNVSDALPSSEDDDDDDDSSSEEKETDNTKPNPVAPYWTSPEKMEKKLHAVPAAKTVKFKCPSSGTPNPTLRWLKNGKEFKPDHRIGGYKVRYATGSIIMDSVVPSDKGNYTCIVENEYGSINHTYQLDVVERSPHRPILQAGLPANKTVALGSNVEFMCKVYSDPQPHIQWLKHIEVNGSKIGPDNLPYVQILKTAGVNTTDKEMEVLHLRNVSFEDAGEYTCLAGNSIGLSHHSAWLTVLEALEERPAVMTSPLYLE

SEQ ID NO: 478 - protein, 241 aa, Homo Sapiens
RPSFSLVEDTTLEPEGAPYWTNTEKMEKRLHAVPAANTVKFRCPAGGNPMPTMRWLKNGKEFKQEHRIGGYKVRNQHWSLIMESVVPSDKGNYTCVVENEYGSINHTYHLDVVERSPHRPILQAGLPANASTVVGGDVEFVCKVYSDAQPHIQWIKHVEKNGSKYGPDGLPYLKVLKAAGVNTTDKEIEVLYIRNVTFEDAGEYTCLAGNSIGISFHSAWLTVLPAPGREKEITASPDYLE

SEQ ID NO: 479 - protein, 353 aa, Homo Sapiens
ESLGTEQRVVGRAAEVPGPEPGQQEQLVFGSGDAVELSCPPPGGGPMGPTVWVKDGTGLVPSERVLVGPQRLQVLNASHEDSGAYSCRQRLTQRVLCHFSVRVTDAPSSGDDEDGEDEAEDTGVDTGAPYWTRPERMDKKLLAVPAANTVRFRCPAAGNPTPSISWLKNGREFRGEHRIGGIKLRHQQWSLVMESVVPSDRGNYTCVVENKFGSIRQTYTLDVLERSPHRPILQAGLPANQTAVLGSDVEFHCKVYSDAQPHIQWLKHVEVNGSKVGPDGTPYVTVLKTAGANTTDKELEVLSLHNVTFEDAGEYTCLAGNSIGFSHHSAWLVVLPAEEELVEADEAGSVYAG

SEQ ID NO: 480 - protein, 348 aa, Homo Sapiens
LEASEEVELEPCLAPSLEQQEQELTVALGQPVRLCCGRAERGGHWYKEGSRLAPAGRVRGWRGRLEIASFLPEDAGRYLCLARGSMIVLQNLTLITGDSLTSSNDDEDPKSHRDPSNRHSYPQQAPYWTHPQRMEKKLHAVPAGNTVKFRCPAAGNPTPTIRWLKDGQAFHGENRIGGIRLRHQHWSLVMESVVPSDRGTYTCLVENAVGSIRYNYLLDVLERSPHRPILQAGLPANTTAVVGSDVELLCKVYSDAQPHIQWLKHIVINGSSFGADGFPYVQVLKTADINSSEVEVLYLRNVSAEDAGEYTCLAGNSIGLSYQSAWLTVLPEEDPTWTAAAPEARYTD

SEQ ID NO: 481 - protein, 354 aa, Homo Sapiens
ARGPPKMADKVVPRQVARLGRTVRLQCPVEGDPPPLTMWTKDGRTIHSGWSRFRVLPQGLKVKQVEREDAGVYVCKATNGFGSLSVNYTLVVLDDISPGKESLGPDSSSGGQEDPASQQWARPRFTQPSKMRRRVIARPVGSSVRLKCVASGHPRPDITWMKDDQALTRPEAAEPRKKKWTLSLKNLRPEDSGKYTCRVSNRAGAINATYKVDVIQRTRSKPVLTGTHPVNTTVDFGGTTSFQCKVRSDVKPVIQWLKRVEYGAEGRHNSTIDVGGQKFVVLPTGDVWSRPDGSYLNKLLITRARQDDAGMYICLGANTMGYSFRSAFLTVLPDPKPPGPPVASSSSATSLPWP

SEQ ID NO: 482 - protein, 117 aa, Homo Sapiens
FAATFYDIETLKVIDEEWQRTQCSPRETCVEVASELGKSTNTFFKPPCVNVFRCGGCCNEESLICMNTSTSYISKQLFEISVPLTSVPELVPVKVANHTGCKCLPTAPRHPYSIIRR

SEQ ID NO: 483 - protein, 73 aa, Homo Sapiens
TLQVTQDKIICLPNHELQENLSEAPCQQLLPRGIPEQIGALQEVKGLKNNLDLQQYSFINQLCYETALHWYAK

SEQ ID NO: 484 - protein, 504 aa, Homo Sapiens
IDSTTCPSVCRCDNGFIYCNDRGLTSIPADIPDDATTLYLQNNQINNAGIPQDLKTKVNVQVIYLYENDLDEFPINLPRSLRELHLQDNNVRTIARDSLARIPLLEKLHLDDNSVSTVSIEEDAFADSKQLKLLFLSRNHLSSIPSGLPHTLEELRLDDNRISTIPLHAFKGLNSLRRLVLDGNLLANQRIADDTFSRLQNLTELSLVRNSLAAPPLNLPSAHLQKLYLQDNAISHIPYNTLAKMRELERLDLSNNNLTTLPRGLFDDLGNLAQLLLRNNPWFCGCNLMWLRDWVKARAAVVNVRGLMCQGPEKVRGMAIKDITSEMDECFETGPQGGVANAAAKTTASNHASATTPQGSLFTLKAKRPGLRLPDSNIDYPMATGDGAKTLAIHVKALTADSIRITWKATLPASSFRLSWLRLGHSPAVGSITETLVQGDKTEYLLTALEPKSTYIICMVTMETSNAYVADETPVCAKAETADSYGPTTTLNQEQNAGPMASLP

SEQ ID NO: 485 - protein, 506 aa, Homo Sapiens
CPSVCRCDRNFVYCNERSLTSVPLGIPEGVTVLYLHNNQINNAGFPAELHNVQSVHTVYLYGNQLDEFPMNLPKNVRVLHLQENNIQTISRAALAQLLKLEELHLDDNSISTVGVEDGAFREAISLKLLFLSKNHLSSVPVGLPVDLQELRVDENRIAVISDMAFQNLTSLERLIVDGNLLTNKGIAEGTFSHLTKLKEFSIVRNSLSHPPPDLPGTHLIRLYLQDNQINHIPLTAFSNLRKLERLDISNNQLRMLTQGVFDNLSNLKQLTARNNPWFCDCSIKWVTEWLKYIPSSLNVRGFMCQGPEQVRGMAVRELNMNLLSCPTTTPGLPLFTPAPSTASPTTQPPTLSIPNPSRSYTPPTPTTSKLPTIPDWDGRERVTPPISERIQLSIHFVNDTSIQVSWLSLFTVMAYKLTWVKMGHSLVGGIVQERIVSGEKQHLSLVNLEPRSTYRICLVPLDAFNYRAVEDTICSEATTHASYLNNGSNTASSHEQTTSHSMGSPF

SEQ ID NO: 486 - protein, 500 aa, Homo Sapiens
KSCPSVCRCDAGFIYCNDRFLTSIPTGIPEDATTLYLQNNQINNAGIPSDLKNLLKVERIYLYHNSLDEFPTNLPKYVKELHLQENNIRTITYDSLSKIPYLEELHLDDNSVSAVSIEEGAFRDSNYLRLLFLSRNHLSTIPWGLPRTIEELRLDDNRISTISSPSLQGLTSLKRLVLDGNLLNNHGLGDKVFFNLVNLTELSLVRNSLTAAPVNLPGTNLRKLYLQDNHINRVPPNAFSYLRQLYRLDMSNNNLSNLPQGIFDDLDNITQLILRNNPWYCGCKMKWVRDWLQSLPVKVNVRGLMCQAPEKVRGMAIKDLNAELFDCKDSGIVSTIQITTAIPNTVYPAQGQWPAPVTKQPDIKNPKLTKDHQTTGSPSRKTITITVKSVTSDTIHISWKLALPMTALRLSWLKLGHSPAFGSITETIVTGERSEYLVTALEPDSPYKVCMVPMETSNLYLFDETPVCIETETAPLRMYNPTTTLNREQEKEPYKNPNLP

SEQ ID NO: 487 - protein, 661 aa, Homo Sapiens
SKLKDPELSLKGTQHIMQAGQTLHLQCRGEAAHKWSLPEMVSKESERLSITKSACGRNGKQFCSTLTLNTAQANHTGFYSCKYLAVPTSKKKETESAIYIFISDTGRPFVEMYSEIPEIIHMTEGRELVIPCRVTSPNITVTLKKFPLDTLIPDGKRIIWDSRKGFIISNATYKEIGLLTCEATVNGHLYKTNYLTHRQTNTIIDVQISTPRPVKLLRGHTLVLNCTATTPLNTRVQMTWSYPDEKNKRASVRRRIDQSNSHANIFYSVLTIDKMQNKDKGLYTCRVRSGPSFKSVNTSVHIYDKAFITVKHRKQQVLETVAGKRSYRLSMKVKAFPSPEVVWLKDGLPATEKSARYLTRGYSLIIKDVTEEDAGNYTILLSIKQSNVFKNLTATLIVNVKPQIYEKAVSSFPDPALYPLGSRQILTCTAYGIPQPTIKWFWHPCNHNHSEARCDFCSNNEESFILDADSNMGNRIESITQRMAIIEGKNKMASTLVVADSRISGIYICIASNKVGTVGRNISFYITDVPNGFHVNLEKMPTEGEDLKLSCTVNKFLYRDVTWILLRTVNNRTMHYSISKQKMAITKEHSITLNLTIMNVSLQDSGTYACRARNVYTGEEILQKKEITIRGEHCNKKAVFSRISKFKSTRNDCTTQSNVKH

SEQ ID NO: 488 - protein, 517 aa, Homo Sapiens
NQDLPVIKCVLINHKNNDSSVGKSSSYPMVSESPEDLGCALRPQSSGTVYEAAAVEVDVSASITLQVLVDAPGNISCLWVFKHSSLNCQPHFDLQNRGVVSMVILKMTETQAGEYLLFIQSEATNYTILFTVSIRNTLLYTLRRPYFRKMENQDALVCISESVPEPIVEWVLCDSQGESCKEESPAVVKKEEKVLHELFGMDIRCCARNELGRECTRLFTIDLNQTPQTTLPQLFLKVGEPLWIRCKAVHVNHGFGLTWELENKALEEGNYFEMSTYSTNRTMIRILFAFVSSVARNDTGYYTCSSSKHPSQSALVTIVEKGFINATNSSEDYEIDQYEEFCFSVRFKAYPQIRCTWTFSRKSFPCEQKGLDNGYSISKFCNHKHQPGEYIFHAENDDAQFTKMFTLNIRRKPQVLAEASASQASCFSDGYPLPSWTWKKCSDKSPNCTEEITEGVWNRKANRKVFGQWVSSSTLNMSEAIKGFLVKCCAYNSLGTSCETILLNSPGPFPFIQDNIS

SEQ ID NO: 489 - protein, 358 aa, Homo Sapiens
QYEDDPHWWFHYLRSQQSTYYDPYDPYPYETYEPYPYGVDEGPAYTYGSPSPPDPRDCPQECDCPPNFPTAMYCDNRNLKYLPFVPSRMKYVYFQNNQITSIQEGVFDNATGLLWIALHGNQITSDKVGRKVFSKLRHLERLYLDHNNLTRMPGPLPRSLRELHLDHNQISRVPNNALEGLENLTALYLQHNEIQEVGSSMRGLRSLILLDLSYNHLRKVPDGLPSALEQLYMEHNNVYTVPDSYFRGAPKLLYVRLSHNSLTNNGLASNTFNSSSLLELDLSYNQLQKIPPVNTNLENLYLQGNRINEFSISSFCTVVDVVNFSKLQVLRLDGNEIKRSAMPADAPLCLRLASLIEI

SEQ ID NO: 490 - protein, 2145 aa, Homo Sapiens
QAQQMVQPQSPVAVSQSKPGCYDNGKHYQINQQWERTYLGNALVCTCYGGSRGFNCESKPEAEETCFDKYTGNTYRVGDTYERPKDSMIWDCTCIGAGRGRISCTIANRCHEGGQSYKIGDTWRRPHETGGYMLECVCLGNGKGEWTCKPIAEKCFDHAAGTSYVVGETWEKPYQGWMMVDCTCLGEGSGRITCTSRNRCNDQDTRTSYRIGDTWSKKDNRGNLLQCICTGNGRGEWKCERHTSVQTTSSGSGPFTDVRAAVYQPQPHPQPPPYGHCVTDSGVVYSVGMQWLKTQGNKQMLCTCLGNGVSCQETAVTQTYGGNSNGEPCVLPFTYNGRTFYSCTTEGRQDGHLWCSTTSNYEQDQKYSFCTDHTVLVQTRGGNSNGALCHFPFLYNNHNYTDCTSEGRRDNMKWCGTTQNYDADQKFGFCPMAAHEEICTTNEGVMYRIGDQWDKQHDMGHMMRCTCVGNGRGEWTCIAYSQLRDQCIVDDITYNVNDTFHKRHEEGHMLNCTCFGQGRGRWKCDPVDQCQDSETGTFYQIGDSWEKYVHGVRYQCYCYGRGIGEWHCQPLQTYPSSSGPVEVFITETPSQPNSHPIQWNAPQPSHISKYILRWRPKNSVGRWKEATIPGHLNSYTIKGLKPGVVYEGQLISIQQYGHQEVTRFDFTTTSTSTPVTSNTVTGETTPFSPLVATSESVTEITASSFVVSWVSASDTVSGFRVEYELSEEGDEPQYLDLPSTATSVNIPDLLPGRKYIVNVYQISEDGEQSLILSTSQTTAPDAPPDPTVDQVDDTSIVVRWSRPQAPITGYRIVYSPSVEGSSTELNLPETANSVTLSDLQPGVQYNITIYAVEENQESTPVVIQQETTGTPRSDTVPSPRDLQFVEVTDVKVTIMWTPPESAVTGYRVDVIPVNLPGEHGQRLPISRNTFAEVTGLSPGVTYYFKVFAVSHGRESKPLTAQQTTKLDAPTNLQFVNETDSTVLVRWTPPRAQITGYRLTVGLTRRGQPRQYNVGPSVSKYPLRNLQPASEYTVSLVAIKGNQESPKATGVFTTLQPGSSIPPYNTEVTETTIVITWTPAPRIGFKLGVRPSQGGEAPREVTSDSGSIVVSGLTPGVEYVYTIQVLRDGQERDAPIVNKVVTPLSPPTNLHLEANPDTGVLTVSWERSTTPDITGYRITTTPTNGQQGNSLEEVVHADQSSCTFDNLSPGLEYNVSVYTVKDDKESVPISDTIIPAVPPPTDLRFTNIGPDTMRVTWAPPPSIDLTNFLVRYSPVKNEEDVAELSISPSDNAVVLTNLLPGTEYVVSVSSVYEQHESTPLRGRQKTGLDSPTGIDFSDITANSFTVHWIAPRATITGYRIRHHPEHFSGRPREDRVPHSRNSITLTNLTPGTEYVVSIVALNGREESPLLIGQQSTVSDVPRDLEVVAATPTSLLISWDAPAVTVRYYRITYGETGGNSPVQEFTVPGSKSTATISGLKPGVDYTITVYAVTGRGDSPASSKPISINYRTEIDKPSQMQVTDVQDNSISVKWLPSSSPVTGYRVTTTPKNGPGPTKTKTAGPDQTEMTIEGLQPTVEYVVSVYAQNPSGESQPLVQTAVTTIPAPTDLKFTQVTPTSLSAQWTPPNVQLTGYRVRVTPKEKTGPMKEINLAPDSSSVVVSGLMVATKYEVSVYALKDTLTSRPAQGVVTTLENVSPPRRARVTDATETTITISWRTKTETITGFQVDAVPANGQTPIQRTIKPDVRSYTITGLQPGTDYKIYLYTLNDNARSSPVVIDASTAIDAPSNLRFLATTPNSLLVSWQPPRARITGYIIKYEKPGSPPREVVPRPRPGVTEATITGLEPGTEYTIYVIALKNNQKSEPLIGRKKTGQEALSQTTISWAPFQDTSEYIISCHPVGTDEEPLQFRVPGTSTSATLTGLTRGATYNIIVEALKDQQRHKVREEVVTVGNSVNEGLNQPTDDSCFDPYTVSHYAVGDEWERMSESGFKLLCQCLGFGSGHFRCDSSRWCHDNGVNYKIGEKWDRQGENGQMMSCTCLGNGKGEFKCDPHEATCYDDGKTYHVGEQWQKEYLGAICSCTCFGGQRGWRCDNCRRPGGEPSPEGTTGQSYNQYSQRYHQRTNTNVNCPIECFMPLDVQADREDSRE

SEQ ID NO: 491 - protein, 123 aa, Homo Sapiens
DRPPSPVNVTVTHLRANSATVSWDVPEGNIVIGYSISQQRQNGPGQRVIREVNTTTRACALWGLAEDSDYTVQVRSIGLRGESPPGPRVHFRTLKGSDRLPSNSSSPGDITVEGLDGERPLQT

SEQ ID NO: 492 - protein, 117 aa, Homo Sapiens
APVNVTVRHLKANSAVVSWDVLEDEVVIGFAISQQKKDVRMLRFIQEVNTTTRSCALWDLEEDTEYIVHVQAISIQGQSPASEPVLFKTPREAEKMASKNKDEVTMKEMGRNQQLRT

SEQ ID NO: 493 - protein, 445 aa, Homo Sapiens
APGRVTIQEDPPGHLSVAWSSVDLGDYYVVFVKSDDGLEVHCNTSLTQCNFLSECGFTYFISVFVYNKAGQSPLGDIFNYTTAPCCPSDINPVLVSSDRVEIVWSPVRGAELYETKAVDGYNMVECNDTTPACTLSALECDTKYNITVYSFNEVRGSNMSCTPQFITTAPCSPEIKNVSRDAFSMINVHWRSTNDDATYTVTAQGEKGLYQCSSTGESCTMRGLPCGSVFSVTAVAETQAGRSLPSYSVPLETVPCCPTGLTVTQITQSVINVSWTIGRVAQTHVAVLESHTGQSKCHTHQNHCLLGCITCGINYTVTLKAISATGLTADCSYQSYFSGACCPLGVKLYRLGPNGIRIYWQASRGSANYSTDLYGSKGIFTCTPSAGLSFCDVTEIPCGDVYTVMVSPVAKTGLKLTFCPKKIYSVTCSGSTLGMVIYRGKRNEE

SEQ ID NO: 494 - protein, 715 aa, Homo Sapiens
MVTQESMLKAALPLFTRFIISNGLRTEHGVFEITLETVDRALPVVTRNKGLRLAQGAVGLLSPDLLQLTDPDTPAENLTFLLVQLPQHGQLYLWGTGLLQHNFTQQDVDSKNVAYRHSGGDSQTDCFTFMATDGTNQGFIVNGRVWEEPVLFTIQVDQLDKTAPRITLLHSPSQVGLLKNGCYGIYITSRVLKASDPDTEDDQIIFKILQGPKHGHLENTTTGEFIHEKFSQKDLNSKTILYIINPSLEVNSDTVEFQIMDPTGNSATPQNLELKWSHIEWSQTEYEVCENVGLLPLEIIRRGYSMDSAFVGIKVNQVSAAVGKDFTVIPSKLIQFDPGMSTKMWNIAITYDGLEEDDEVFEVILNSPVNAVLGTKTKAAVKILDSKGGQCHPSYSSNQSKHSTWEKGIWHLLPPGSSSSTTSGSFHLERRPLPSSMQLAVIRGDTLRGFDSTDLSQRKLRTRGNGKTVRPSSVYRNGTDIIYNYHGIVSLKLEDDSFPTHKRKAKVSIISQPQKTIKVAELPQADKVESTTDSHFPRQDQLPSFPKNCTLELKGLFHFEEGIQKLYQCNGIAWKAWSPQTKDVEDKSCPAGWHQHSGYCHILITEQKGTWNAAAQACREQYLGNLVTVFSRQHMRWLWDIGGRKSFWIGLNDQVHAGHWEWIGGEPVAFTNGRRGPSPRSKLGKSCVLVQRQGKWQTKDCRRAKPHNYGCSRKL

SEQ ID NO: 495 - protein, 349 aa, Homo Sapiens
CHHRICHCSNRVFLCQESKVTEIPSDLPRNAIELRFVLTKLRVIQKGAFSGFGDLEKIEISQNDVLEVIEADVFSNLPKLHEIRIEKANNLLYINPEAFQNLPNLQYLLISNTGIKHLPDVHKIHSLQKVLLDIQDNINIHTIERNSFVGLSFESVILWLNKNGIQEIHNCAFNGTQLDELNLSDNNNLEELPNDVFHGASGPVILDISRTRIHSLPSYGLENLKKLRARSTYNLKKLPTLEKLVALMEASLTYPSHCCAFANWRRQISELHPICNKSILRQEVDYMTQTRGQRSSLAEDNESSYSRGFDMTYTEFDYDLCNEVVDVTCSPKPDAFNPCEDIMGYNILR

SEQ ID NO: 496 - protein, 583 aa, Homo Sapiens
WMDPGTSRGPDVGVGESQAEEPRSFEVTRREGLSSHNELLASCGKKFCSRGSRCVLSRKTGEPECQCLEACRPSYVPVCGSDGRFYENHCKLHRAACLLGKRITVIHSKDCFLKGDTCTMAGYARLKNVLLALQTRLQPLQEGDSRQDPASQKRLLVESLFRDLDADGNGHLSSSELAQHVLKKQDLDEDLLGCSPGDLLRFDDYNSDSSLTLREFYIAFQVVQLSLAPEDRVSVTTVTVGLSTVLTCAVHGDLRPPIIWKRNGLTLNFLDLEDINDFGEDDSLYITKVTTIHMGNYTCHASGHEQLFQTHVLQVNVPPVIRVYPESQAQEPGVAASLRCHAEGIPMPRITWLKNGVDVSTQMSKQLSLLANGSELHISSVRYEDTGAYTCIAKNEVGVDEDISSLFIEDSARKTLANILWREEGLSVGNMFYVFSDDGIIVIHPVDCEIQRHLKPTEKIFMSYEEICPQREKNATQPCQWVSAVNVRNRYIYVAQPALSRVLVVDIQAQKVLQSIGVDPLPAKLSYDKSHDQVWVLSWGDVHKSRPSLQVITEASTGQSQHLIRTPFAGVDDFFIPPINLEQ

SEQ ID NO: 497 - protein, 827 aa, Homo Sapiens
RPTKEGGYGLKSYQPLMRLRHKQEKNQESSRVKGFMIQDGPFGSCENKYCGLGRHCVTSRETGQAECACMDLCKRHYKPVCGSDGEFYENHCEVHRAACLKKQKITIVHNEDCFFKGDKCKTTEYSKMKNMLLDLQNQKYIMQENENPNGDDISRKKLLVDQMFKYFDADSNGLVDINELTQVIKQEELGKDLFDCTLYVLLKYDDFNADKHLALEEFYRAFQVIQLSLPEDQKLSITAATVGQSAVLSCAIQGTLRPPIIWKRNNIILNNLDLEDINDFGDDGSLYITKVTTTHVGNYTCYADGYEQVYQTHIFQVNVPPVIRVYPESQAREPGVTASLRCHAEGIPKPQLGWLKNGIDITPKLSKQLTLQANGSEVHISNVRYEDTGAYTCIAKNEAGVDEDISSLFVEDSARKTLANILWREEGLGIGNMFYVFYEDGIKVIQPIECEFQRHIKPSEKLLGFQDEVCPKAEGDEVQRCVWASAVNVKDKFIYVAQPTLDRVLIVDVQSQKVVQAVSTDPVPVKLHYDKSHDQVWVLSWGTLEKSSPTLQVITLASGNVPHHTIHTQPVGKQFDRVDDFFIPTTTLIITHMRFGFILHKDEAALQKIDIETMSYIKTINLKDYKCVPQSLAYTHLGGYYFIGCKPDSTGAVSPQVMVDGVTDSVIGFNSDVTGTPYVSPDGHYLVSINDVKGLVRVQYITIRGEIQEAFDIYTNLHISDLAFQPSFTEAHQYNIYGSSSTQTDVLFVELSSGKVKMIKSLKEPLKAEEWPWNRKNRQIQDSGLFGQYLMTPSKDSLFILDGRLNKLNCEITEVEKGNTVIWVGDA

SEQ ID NO: 498 - protein, 156 aa, Homo Sapiens
GWDLTVKMLAGNEFQVSLSSSMSVSELKAQITQKIGVHAFQQRLAVHPSGVALQDRVPLASQGLGPGSTVLLVVDKCDEPLSILVRNNKGRSSTYEVRLTQTVAHLKQQVSGLEGVQDDLFWLTFEGKPLEDQLPLGEYGLKPLSTVFMNLRLRGG

SEQ ID NO: 499 - protein, 648 aa, Homo Sapiens
ALLPAREATQFLRPRQRRAFQVFEEAKQGHLERECVEELCSREEAREVFENDPETDYFYPRYLDCINKYGSPYTKNSGFATCVQNLPDQCTPNPCDRKGTQACQDLMGNFFCLCKAGWGGRLCDKDVNECSQENGGCLQICHNKPGSFHCSCHSGFELSSDGRTCQDIDECADSEACGEARCKNLPGSYSCLCDEGFAYSSQEKACRDVDECLQGRCEQVCVNSPGSYTCHCDGRGGLKLSQDMDTCEDILPCVPFSVAKSVKSLYLGRMFSGTPVIRLRFKRLQPTRLVAEFDFRTFDPEGILLFAGGHQDSTWIVLALRAGRLELQLRYNGVGRVTSSGPVINHGMWQTISVEELARNLVIKVNRDAVMKIAVAGDLFQPERGLYHLNLTVGGIPFHEKDLVQPINPRLDGCMRSWNWLNGEDTTIQETVKVNTRMQCFSVTERGSFYPGSGFAFYSLDYMRTPLDVGTESTWEVEVVAHIRPAADTGVLFALWAPDLRAVPLSVALVDYHSTKKLKKQLVVLAVEHTALALMEIKVCDGQEHVVTVSLRDGEATLEVDGTRGQSEVSAAQLQERLAVLERHLRSPVLTFAGGLPDVPVTSAPVTAFYRGCMTLEVNRRLLDLDEAAYKHSDITAHSCPPVEPAAA

SEQ ID NO: 500 - protein, 110 aa, Homo Sapiens
QWDEPRVCSRRYLKVDFADIGWNEWIISPKSFDAYYCAGACEFPMPKIVRPSNHATIQSIVRAVGIIPGIPEPCCVPDKMNSLGVLFLDENRNVVLKVYPNMSVDTCACR

SEQ ID NO: 501 - protein, 109 aa, Homo Sapiens
NLGLDCDEHSSESRCCRYPLTVDFEAFGWDWIIAPKRYKANYCSGQCEYMFMQKYPHTHLVQQANPRGSAGPCCTPTKMSPINMLYFNDKQQIIYGKIPGMVVDRCGCS

SEQ ID NO: 502 - protein, 114 aa, Homo Sapiens
ARARNGDHCPLGPGRCCRLHTVRASLEDLGWADWVLSPREVQVTMCIGACPSQFRAANMHAQIKTSLHRLKPDTVPAPCCVPASYNPMVLIQKTDTGVSLQTYDDLLAKDCHCI

SEQ ID NO: 503 - protein, 110 aa, Homo Sapiens
SAGAGSHCQKTSLRVNFEDIGWDSWIIAPKEYEAYECKGGCFFPLADDVTPTKHAIVQTLVHLKFPTKVGKACCVPTKLSPISVLYKDDMGVPTLKYHYEGMSVAECGCR

SEQ ID NO: 504 - protein, 114 aa, Homo Sapiens
AAIPVPKLSCKNLCHRHQLFINFRDLGWHKWIIAPKGFMANYCHGECPFSLTISLNSSNYAFMQALMHAVDPEIPQAVCIPTKLSPISMLYQDNNDNVILRHYEDMVVDECGCG

SEQ ID NO: 505 - protein, 120 aa, Homo Sapiens
APLATRQGKRPSKNLKARCSRKALHVNFKDMGWDDWIIAPLEYEAFHCEGLCEFPLRSHLEPTNHAVIQTLMNSMDPESTPPTCCVPTRLSPISILFIDSANNVVYKQYEDMVVESCGCR

SEQ ID NO: 506 - protein, 120 aa, Homo Sapiens
TAFASRHGKRHGKKSRLRCSKKPLHVNFKELGWDDWIIAPLEYEAYHCEGVCDFPLRSHLEPTNHAIIQTLMNSMDPGSTPPSCCVPTKLTPISILYIDAGNNVVYKQYEDMVVESCGCR

SEQ ID NO: 507 - protein, 109 aa, Homo Sapiens
DFGLDCDEHSTESRCCRYPLTVDFEAFGWDWIIAPKRYKANYCSGECEFVFLQKYPHTHLVHQANPRGSAGPCCTPTKMSPINMLYFNGKEQIIYGKIPAMVVDRCGCS

SEQ ID NO: 508 - protein, 135 aa, Homo Sapiens
GQETVSSELKKPLGPASFNLSEYFRQFLLPQNECELHDFRLSFSQLKWDNWIVAPHRYNPRYCKGDCPRAVGHRYGSPVHTMVQNIIYEKLDSSVPRPSCVPAKYSPLSVLTIEPDGSIAYKEYEDMIATKCTCR

SEQ ID NO: 509 - protein, 134 aa, Homo Sapiens
SPDKQMAVLPRRERNRQAAAANPENSRGKGRRGQRGKNRGCVLTAIHLNVTDLGLGYETKEELIFRYCSGSCDAAETTYDKILKNLSRNRRLVSDKVGQACCRPIAFDDDLSFLDDNLVYHILRKHSAKRCGCI

SEQ ID NO: 510 - protein, 400 aa, Homo Sapiens
DRLDCVKASDQCLKEQSCSTKYRTLRQCVAGKETNFSLASGLEAKDECRSAMEALKQKSLYNCRCKRGMKKEKNCLRIYWSMYQSLQGNDLLEDSPYEPVNSRLSDIFRVVPFISVEHIPKGNNCLDAAKACNLDDICKKYRSAYITPCTTSVSNDVCNRRKCHKALRQFFDKVPAKHSYGMLFCSCRDIACTERRRQTIVPVCSYEEREKPNCLNLQDSCKTNYICRSRLADFFTNCQPESRSVSSCLKENYADCLLAYSGLIGTVMTPNYIDSSSLSVAPWCDCSNSGNDLEECLKFLNFFKDNTCLKNAIQAFGNGSDVTVWQPAFPVQTTTATTTTALRVKNKPLGPAGSENEIPTHVLPPCANLQAQKLKSNVSGNTHLCISNGNYEKEGLGASS

SEQ ID NO: 511 - protein, 423 aa, Homo Sapiens
SPSSLQGPELHGWRPPVDCVRANELCAAESNCSSRYRTLRQCLAGRDRNTMLANKECQAALEVLQESPLYDCRCKRGMKKELQCLQIYWSIHLGLTEGEEFYEASPYEPVTSRLSDIFRLASIFSGTGADPVVSAKSNHCLDAAKACNLNDNCKKLRSSYISICNREISPTERCNRRKCHKALRQFFDRVPSEYTYRMLFCSCQDQACAERRRQTILPSCSYEDKEKPNCLDLRGVCRTDHLCRSRLADFHANCRASYQTVTSCPADNYQACLGSYAGMIGFDMTPNYVDSSPTGIVVSPWCSCRGSGNMEEECEKFLRDFTENPCLRNAIQAFGNGTDVNVSPKGPSFQATQAPRVEKTPSLPDDLSDSTSLGTSVITTCTSVQEQGLKANNSKELSMCFTELTTNIIPGSNKVIKPNSGPS

SEQ ID NO: 512 - protein, 343 aa, Homo Sapiens
DPLPTESRLMNSCLQARRKCQADPTCSAAYHHLDSCTSSISTPLPSEEPSVPADCLEAAQQLRNSSLIGCMCHRRMKNQVACLDIYWTVHRARSLGNYELDVSPYEDTVTSKPWKMNLSKLNMLKPDSDLCLKFAMLCTLNDKCDRLRKAYGEACSGPHCQRHVCLRQLLTFFEKAAEPHAQGLLLCPCAPNDRGCGERRRNTIAPNCALPPVAPNCLELRRLCFSDPLCRSRLVDFQTHCHPMDILGTCATEQSRCLRAYLGLIGTAMTPNFVSNVNTSVALSCTCRGSGNLQEECEMLEGFFSHNPCLTEAIAAKMRFHSQLFSQDWPHPTFAVMAHQNEN

SEQ ID NO: 513 - protein, 258 aa, Homo Sapiens
VGGNRCVDAAEACTADARCQRLRSEYVAQCLGRAAQGGCPRARCRRALRRFFARGPPALTHALLFCPCAGPACAERRRQTFVPSCAFSGPGPAPPSCLEPLNFCERSRVCRCARAAAGPWRGWGRGLSPAHRPPAAQASPPGLSGLVHPSAQRPRRLPAGPGRPLPARLRGPRGVPAGTAVTPNYVDNVSARVAPWCDCGASGNRREDCEAFRGLFTRNRCLDGAIQAFASGWPPVLLDQLNPQGDPEHSLLQVSSTG

SEQ ID NO: 514 - protein, 246 aa, Homo Sapiens
FSGSEATAAILSRAPWSLQSVNPGLKTNSSKEPKFTKCRSPERETFSCHWTDEVHHGTKNLGPIQLFYTRRNTQEWTQEWKECPDYVSAGENSCYFNSSFTSIWIPYCIKLTSNGGTVDEKCFSVDEIVQPDPPIALNWTLLNVSLTGIHADIQVRWEAPRNADIQKGWMVLEYELQYKEVNETKWKMMDPILTTSVPVYSLKVDKEYEVRVRSKQRNSGNYGEFSEVLYVTLPQMSQFTCEEDFY

SEQ ID NO: 515 - protein, 137 aa, Homo Sapiens
QRPTGGPGCGPGRLLLGTGTDARCCRVHTTRCCRDYPGEECCSEWDCMCVQPEFHCGDPCCTTCRHHPCPPGQGVQSQGKFSFGFQCIDCASGTFSGGHEGHCKPWTDCTQFGFLTVFPGNKTHNAVCVPGSPPAEP

SEQ ID NO: 516 - protein, 116 aa, Homo Sapiens
SATMRAQWTYSLRCHDCAVINDFNCPNIRVCPYHIRRCMTISIRINSRELLVYKNCTNNCTFVYAAEQPPEAPGKIFKTNSFYWVCCCNSMVCNAGGPTNLERDMLPDEVTEEELP

SEQ ID NO: 517 - protein, 123 aa, Homo Sapiens
RLSPEYYDLARAHLRDEEKSCPCLAQEGPQGDLLTKTQELGRDYRTCLTIVQKLKKMVDKPTQRSVSNAATRVCRTGRSRWRDVCRNFMRRYQSRVTQGLVAGETAQQICEDLRLCIPSTGPL

SEQ ID NO: 518 - protein, 489 aa, Homo Sapiens
HPICEVSKVASHLEVNCDKRNLTALPPDLPKDTTILHLSENLLYTFSLATLMPYTRLTQLNLDRCELTKLQVDGTLPVLGTLDLSHNQLQSLPLLGQTLPALTVLDVSFNRLTSLPLGALRGLGELQELYLKGNELKTLPPGLLTPTPKLEKLSLANNNLTELPAGLLNGLENLDTLLLQENSLYTIPKGFFGSHLLPFAFLHGNPWLCNCEILYFRRWLQDNAENVYVWKQGVDVKAMTSNVASVQCDNSDKFPVYKYPGKGCPTLGDEGDTDLYDYYPEEDTEGDKVRATRTVVKFPTKAHTTPWGLFYSWSTASLDSQMPSSLHPTQESTKEQTTFPPRWTPNFTLHMESITFSKTPKSTTEPTPSPTTSEPVPEPAPNMTTLEPTPSPTTPEPTSEPAPSPTTPEPTPIPTIATSPTILVSATSLITPKSTFLTTTKPVSLLESTKKTIPELDQPPKLRGVLQGHLESSRNDPFLHPDFCCLLPL

SEQ ID NO: 519 - protein, 121 aa, Homo Sapiens
PAPCSCAGTLVDCGRRGLTWASLPTAFPVDTTELVLTGNNLTALPPGLLDALPALRTAHLGANPWRCDCRLVPLRAWLAGRPERAPYRDLRCVAPPALRGRLLPYLAEDELRAACAPGPLC

SEQ ID NO: 520 - protein, 327 aa, Homo Sapiens
VEDKCEKACRPEEECLALNSTWGCFCRQDLNSSDVHSLQPQLDCGPREIKVKVDKCLLGGLGLGEEVIAYLRDPNCSSILQTEERNWVSVTSPVQASACRNILERNQTHAIYKNTLSLVNDFIIRDTILNINFQCAYPLDMKVSLQAALQPIVSSLNVSVDGNGEFIVRMALFQDQNYTNPYQGDAVELSVESVLYVGAILEQGDTSRFNLVLRNCYATPTEDKADLVKYFIIRNSCSNQRDSTIHVEENGQSSESRFSVQMFMFAGHYDLVFLHCEIHLCDSLNEQCQPSCSRSQVRSEVPAIDLARVLDLGPITRRGAQSPGVMN

SEQ ID NO: 521 - protein, 507 aa, Homo Sapiens
QPFPCPPACKCVFRDAAQCSGGDVARISALGLPTNLTHILLFGMGRGVLQSQSFSGMTVLQRLMISDSHISAVAPGTFSDLIKLKTLRLSRNKITHLPGALLDKMVLLEQLFLDHNALRGIDQNMFQKLVNLQELALNQNQLDFLPASLFTNLENLKLLDLSGNNLTHLPKGLLGAQAKLERLLLHSNRLVSLDSGLLNSLGALTELQFHRNHIRSIAPGAFDRLPNLSSLTLSRNHLAFLPSALFLHSHNLTLLTLFENPLAELPGVLFGEMGGLQELWLNRTQLRTLPAAAFRNLSRLRYLGVTLSPRLSALPQGAFQGLGELQVLALHSNGLTALPDGLLRGLGKLRQVSLRRNRLRALPRALFRNLSSLESVQLDHNQLETLPGDVFGALPRLTEVLLGHNSWRCDCGLGPFLGWLRQHLGLVGGEEPPRCAGPGAHAGLPLWALPGGDAECPGPRGPPPRPAADSSSEAPVHPALAPNSSEPWVWAQPVTTGKGQDHSPFWG

SEQ ID NO: 522 - protein, 247 aa, Homo Sapiens
QSGPLPKPSLQALPSSLVPLEKPVTLRCQGPPGVDLYRLEKLSSSRYQDQAVLFIPAMKRSLAGRYRCSYQNGSLWSLPSDQLELVATGVFAKPSLSAQPGPAVSSGGDVTLQCQTRYGFDQFALYKEGDPAPYKNPERWYRASFPIITVTAAHSGTYRCYSFSSRDPYLWSAPSDPLELVVTGTSVTPSRLPTEPPSSVAEFSEATAELTVSFTNKVFTTETSRSITTSPKESDSPAGPARQYYTK

SEQ ID NO: 523 - protein, 131 aa, Homo Sapiens
TKDCPSPCTCRALETMGLWVDCRGHGLTALPALPARTRHLLLANNSLQSVPPGAFDHLPQLQTLDVTQNPWHCDCSLTYLRLWLEDRTPEALLQVRCASPSLAAHGPLGRLTGYQLGSCGWQLQASWVRPG

SEQ ID NO: 524 - protein, 214 aa, Homo Sapiens
ISVETPQDVLRASQGKSVTLPCTYHTSTSSREGLIQWDKLLLTHTERVVIWPFSNKNYIHGELYKNRVSISNNAEQSDASITIDQLTMADNGTYECSVSLMSDLEGNTKSRVRLLVLVPPSKPECGIEGETIIGNNIQLTCQSKEGSPTPQYSWKRYNILNQEQPLAQPASGQPVSLKNISTDTSGYYICTSSNEEGTQFCNITVAVRSPSMNV

SEQ ID NO: 525 - protein, 557 aa, Homo Sapiens
AALTRDPQFQKLQQWYREHRSELNLRRLFDANKDRFNHFSLTLNTNHGHILVDYSKNLVTEDVMRMLVDLAKSRGVEAARERMFNGEKINYTEGRAVLHVALRNRSNTPILVDGKDVMPEVNKVLDKMKSFCQRVRSGDWKGYTGKTITDVINIGIGGSDLGPLMVTEALKPYSSGGPRVWYVSNIDGTHIAKTLAQLNPESSLFIIASKTFTTQETITNAETAKEWFLQAAKDPSAVAKHFVALSTNTTKVKEFGIDPQNMFEFWDWVGGRYSLWSAIGLSIALHVGFDNFEQLLSGAHWMDQHFRTTPLEKNAPVLLALLGIWYINCFGCETHAMLPYDQYLHRFAAYFQQGDMESNGKYITKSGTRVDHQTGPIVWGEPGTNGQHAFYQLIHQGTKMIPCDFLIPVQTQHPIRKGLHHKILLANFLAQTEALMRGKSTEEARKELQAAGKSPEDLERLLPHKVFEGNRPTNSIVFTKLTPFMLGALVAMYEHKIFVQGIIWDINSFDQWGVELGKQLAKKIEPELDGSAQVTSHDASTNGLINFIKQQREARVQ

SEQ ID NO: 526 - protein, 131 aa, Homo Sapiens
QTQQEEEEEDEDHGPDDYDEEDEDEVEEEETNRLPGGRSRVLLRCYTCKSLPRDERCNLTQNCSHGQTCTTLIAHGNTESGLLTTHSTWCTDSCQPITKTVEGTQVTMTCCQSSLCNVPPWQSSRVQDPTG

SEQ ID NO: 527 - protein, 465 aa, Homo Sapiens
AKRFHDVLGNERPSAYMREHNQLNGWSSDENDWNEKLYPVWKRGDMRWKNSWKGGRVQAVLTSDSPALVGSNITFAVNLIFPRCQKEDANGNIVYEKNCRNEAGLSADPYVYNWTAWSEDSDGENGTGQSHHNVFPDGKPFPHHPGWRRWNFIYVFHTLGQYFQKLGRCSVRVSVNTANVTLGPQLMEVTVYRRHGRAYVPIAQVKDVYVVTDQIPVFVTMFQKNDRNSSDETFLKDLPIMFDVLIHDPSHFLNYSTINYKWSFGDNTGLFVSTNHTVNHTYVLNGTFSLNLTVKAAAPGPCPPPPPPPRPSKPTPSLATTLKSYDSNTPGPAGDNPLELSRIPDENCQINRYGHFQATITIVEGILEVNIIQMTDVLMPVPWPESSLIDFVVTCQGSIPTEVCTIISDPTCEITQNTVCSPVDVDEMCLLTVRRTFNGSGTYCVNLTLGDDTSLALTSTLISVP

SEQ ID NO: 528 - protein, 629 aa, Homo Sapiens
LQGGMLYPQESPSRECKELDGLWSFRADFSDNRRRGFEEQWYRRPLWESGPTVDMPVPSSFNDISQDWRLRHFVGWVWYEREVILPERWTQDLRTRVVLRIGSAHSYAIVWVNGVDTLEHEGGYLPFEADISNLVQVGPLPSRLRITIAINNTLTPTTLPPGTIQYLTDTSKYPKGYFVQNTYFDFFNYAGLQRSVLLYTTPTTYIDDITVTTSVEQDSGLVNYQISVKGSNLFKLEVRLLDAENKVVANGTGTQGQLKVPGVSLWWPYLMHERPAYLYSLEVQLTAQTSLGPVSDFYTLPVGIRTVAVTKSQFLINGKPFYFHGVNKHEDADIRGKGFDWPLLVKDFNLLRWLGANAFRTSHYPYAEEVMQMCDRYGIVVIDECPGVGLALPQFFNNVSLHHHMQVMEEVVRRDKNHPAVVMWSVANEPASHLESAGYYLKMVIAHTKSLDPSRPVTFVSNSNYAADKGAPYVDVICLNSYYSWYHDYGHLELIQLQLATQFENWYKKYQKPIIQSEYGAETIAGFHQDPPLMFTEEYQKSLLEQYHLGLDQKRRKYVVGELIWNFADFMTEQSPTRVLGNKKGIFTRQRQPKSAAFLLRERYWKIANETRYPHSVAKSQCLENSLFT

SEQ ID NO: 529 - protein, 537 aa, Homo Sapiens
FSLMSLLESLDPDWTPDQYDYSYEDYNQEENTSSTLTHAENPDWYYTEDQADPCQPNPCEHGGDCLVHGSTFTCSCLAPFSGNKCQKVQNTCKDNPCGRGQCLITQSPPYYRCVCKHPYTGPSCSQVVPVCRPNPCQNGATCSRHKRRSKFTCACPDQFKGKFCEIGSDDCYVGDGYSYRGKMNRTVNQHACLYWNSHLLLQENYNMFMEDAETHGIGEHNFCRNPDADEKPWCFIKVTNDKVKWEYCDVSACSAQDVAYPEESPTEPSTKLPGFDSCGKTEIAERKIKRIYGGFKSTAGKHPWQASLQSSLPLTISMPQGHFCGGALIHPCWVLTAAHCTDIKTRHLKVVLGDQDLKKEEFHEQSFRVEKIFKYSHYNERDEIPHNDIALLKLKPVDGHCALESKYVKTVCLPDGSFPSGSECHISGWGVTETGKGSRQLLDAKVKLIANTLCNSRQLYDHMIDDSMICAGNLQKPGQDTCQGDSGGPLTCEKDGTYYVYGIVSWGLECGKRPGVYTQVTKFLNWIKATIKSESGF

SEQ ID NO: 530 - protein, 25 aa, Homo Sapiens
DTHFPICIFCCGCCHRSKCGMCCKT

SEQ ID NO: 531 - protein, 339 aa, Homo Sapiens
DHLSDNYTLDHDRAIHIQAENGPHLLVEAEQAKVFSHRGGNVTLPCKFYRDPTAFGSGIHKIRIKWTKLTSDYLKEVDVFVSMGYHKKTYGGYQGRVFLKGGSDSDASLVITDLTLEDYGRYKCEVIEGLEDDTVVVALDLQGVVFPYFPRLGRYNLNFHEAQQACLDQDAVIASFDQLYDAWRGGLDWCNAGWLSDGSVQYPITKPREPCGGQNTVPGVRNYGFWDKDKSRYDVFCFTSNFNGRFYYLIHPTKLTYDVAVQACLNDGAQIAKVGQIFAAWKILGYDRCDAGWLADGSVRYPISRPRRRCSPTEAAVRFVGFPDKKHKLYGVYCFRAYN

SEQ ID NO: 532 - protein, 314 aa, Homo Sapiens
DPASHPGPHYLLPPIHEVIHSHRGATATLPCVLGTTPPSYKVRWSKVEPGELRETLILITNGLHARGYGPLGGRARMRRGHRLDASLVIAGVRLEDEGRYRCELINGIEDESVALTLSLEGVVFPYQPSRGRYQFNYYEAKQACEEQDGRLATYSQLYQAWTEGLDWCNAGWLLEGSVRYPVLTARAPCGGRGRPGIRSYGPRDRMRDRYDAFCFTSALAGQVFFVPGRLTLSEAHAACRRRGAVVAKVGHLYAAWKFSGLDQCDGGWLADGSVRFPITTPRPRCGGLPDPGVRSFGFPRPQQAAYGTYCYAEN

SEQ ID NO: 533 - protein, 343 aa, Homo Sapiens
LPFYNGFYYSNSANDQNLGNGHGKDLLNGVKLVVETPEETLFTYQGASVILPCRYRYEPALVSPRRVRVKWWKLSENGAPEKDVLVAIGLRHRSFGDYQGRVHLRQDKEHDVSLEIQDLRLEDYGRYRCEVIDGLEDESGLVELELRGVVFPYQSPNGRYQFNFHEGQQVCAEQAAVVASFEQLFRAWEEGLDWCNAGWLQDATVQYPIMLPRQPCGGPGLAPGVRSYGPRHRRLHRYDVFCFATALKGRVYYLEHPEKLTLTEAREACQEDDATIAKVGQLFAAWKFHGLDRCDAGWLADGSVRYPVVHPHPNCGPPEPGVRSFGFPDPQSRLYGVYCYRQH

SEQ ID NO: 534 - protein, 373 aa, Homo Sapiens
QRGRKKVVHVLEGESGSVVVQTAPGQVVSHRGGTIVLPCRYHYEAAAHGHDGVRLKWTKVVDPLAFTDVFVALGPQHRAFGSYRGRAELQGDGPGDASLVLRNVTLQDYGRYECEVTNELEDDAGMVKLDLEGVVFPYHPRGGRYKLTFAEAQRACAEQDGILASAEQLHAAWRDGLDWCNAGWLRDGSVQYPVNRPREPCGGLGGTGSAGGGGDANGGLRNYGYRHNAEERYDAFCFTSNLPGRVFFLKPLRPVPFSGAARACAARGAAVAKVGQLFAAWKLQLLDRCTAGWLADGSARYPIVNPRARCGGRRPGVRSLGFPDATRRLFGVYCYRAPGAPDPAPGGWGWGWAGGGGWAGGARDPAAWTPLHV

SEQ ID NO: 535 - protein, 275 aa, Homo Sapiens
SVKVGGEAGPSVTLPCHYSGAVTSMCWNRGSCSLFTCQNGIVWTNGTHVTYRKDTRYKLLGDLSRRDVSLTIENTAVSDSGVYCCRVEHRGWFNDMKITVSLEIVPPKVTTTPIVTTVPTVTTVRTSTTVPTTTTVPMTTVPTTTVPTTMSIPTTTTVLTTMTVSTTTSVPTTTSIPTTTSVPVTTTVSTFVPPMPLPRQNHEPVATSPSSPQPAETHPTTLQGAIRREPTSSPLYSYTTDGNDTVTESSDGLWNNNQTQLFLEHSLLTANTTKG

SEQ ID NO: 536 - protein, 181 aa, Homo Sapiens
SEVEYRAEVGQNAYLPCFYTPAAPGNLVPVCWGKGACPVFECGNVVLRTDERDVNYWTSRYWLNGDFRKGDVSLTIENVTLADSGIYCCRIQIPGIMNDEKFNLKLVIKPAKVTPAPTLQRDFTAAFPRMLTTRGHGPAETQTLGSLPDINLTQISTLANELRDSRLANDLRDSGATIRIG

SEQ ID NO: 537 - protein, 86 aa, Homo Sapiens
DLQEADLDLLRVTLSSKPQALATPNKEEHGKRKKKGKGLGKKRDPCLRKYKDFCIHGECKYVKELRAPSCICHPGYHGERCHGLSL

SEQ ID NO: 538 - protein, 207 aa, Homo Sapiens
VNITSPVRLIHGTVGKSALLSVQYSSTSSDRPVVKWQLKRDKPVTVVQSIGTEVIGTLRPDYRDRIRLFENGSLLLSDLQLADEGTYEVEISITDDTFTGEKTINLTVDVPISRPQVLVASTTVLELSEAFTLNCSHENGTKPSYTWLKDGKPLLNDSRMLLSPDQKVLTITRVLMEDDDLYSCMVENPISQGRSLPVKITVYRRSS

SEQ ID NO: 539 - protein, 320 aa, Homo Sapiens
LKVTVPSHTVHGVRGQALYLPVHYGFHTPASDIQIIWLFERPHTMPKYLLGSVNKSVVPDLEYQHKFTMMPPNASLLINPLQFPDEGNYIVKVNIQGNGTLSASQKIQVTVDDPVTKPVVQIHPPSGAVEYVGNMTLTCHVEGGTRLAYQWLKNGRPVHTSSTYSFSPQNNTLHIAPVTKEDIGNYSCLVRNPVSEMESDIIMPIIYYGPYGLQVNSDKGLKVGEVFTVDLGEAILFDCSADSHPPNTYSWIRRTDNTTYIIKHGPRLEVASEKVAQKTMDYVCCAYNNITGRQDETHFTVIITSVGLEKLAQKGKSLSP

SEQ ID NO: 540 - protein, 284 aa, Homo Sapiens
RLLRSHSLHYLFMGASEQDLGLSLFEALGYVDDQLFVFYDHESRRVEPRTPWVSSRISSQMWLQLSQSLKGWDHMFTVDFWTIMENHNHSKESHTLQVILGCEMQEDNSTEGYWKYGYDGQDHLEFCPDTLDWRAAEPRAWPTKLEWERHKIRARQNRAYLERDCPAQLQQLLELGRGVLDQQVPPLVKVTHHVTSSVTTLRCRALNYYPQNITMKWLKDKQPMDAKEFEPKDVLPNGDGTYQGWITLAVPPGEEQRYTCQVEHPGLDQPLIVIWEPSPSGTLV

SEQ ID NO: 541 - protein, 697 aa, Homo Sapiens
QRKRRNTIHEFKKSAKTTLIKIDPALKIKTKKVNTADQCANRCTRNKGLPFTCKAFVFDKARKQCLWFPFNSMSSGVKKEFGHEFDLYENKDYIRNCIIGKGRSYKGTVSITKSGIKCQPWSSMIPHEHSFLPSSYRGKDLQENYCRNPRGEEGGPWCFTSNPEVRYEVCDIPQCSEVECMTCNGESYRGLMDHTESGKICQRWDHQTPHRHKFLPERYPDKGFDDNYCRNPDGQPRPWCYTLDPHTRWEYCAIKTCADNTMNDTDVPLETTECIQGQGEGYRGTVNTIWNGIPCQRWDSQYPHEHDMTPENFKCKDLRENYCRNPDGSESPWCFTTDPNIRVGYCSQIPNCDMSHGQDCYRGNGKNYMGNLSQTRSGLTCSMWDKNMEDLHRHIFWEPDASKLNENYCRNPDDDAHGPWCYTGNPLIPWDYCPISRCEGDTTPTIVNLDHPVISCAKTKQLRVVNGIPTRTNIGWMVSLRYRNKHICGGSLIKESWVLTARQCFPSRDLKDYEAWLGIHDVHGRGDEKCKQVLNVSQLVYGPEGSDLVLMKLARPAVLDDFVSTIDLPNYGCTIPEKTSCSVYGWGYTGLINYDGLLRVAHLYIMGNEKCSQHHRGKVTLNESEICAGAEKIGSGPCEGDYGGPLVCEQHKMRMVLGVIVPGRGCAIPNRPGIFVRVAYYAKWIHKIILTYKVPQS

SEQ ID NO: 542 - protein, 283 aa, Homo Sapiens
VQLSPDLLATLPEPASPGRQACGRRHKKRTFLRPRIIGGSSSLPGSHPWLAAIYIGDSFCAGSLVHTCWVVSAAHCFSHSPPRDSVSVVLGQHFFNRTTDVTQTFGIEKYIPYTLYSVFNPSDHDLVLIRLKKKGDRCATRSQFVQPICLPEPGSTFPAGHKCQIAGWGHLDENVSGYSSSLREALVPLVADHKCSSPEVYGADISPNMLCAGYFDCKSDACQGDSGGPLACEKNGVAYLYGIISWGDGCGRLHKPGVYTRVANYVDWINDRIRPPRRLVAPS

SEQ ID NO: 543 - protein, 683 aa, Homo Sapiens
FFEGDAKFGERNEGSGARRRRCLNGNPPKRLKRRDRRMMSQLELLSGGEMLCGGFYPRLSCCLRSDSPGLGRLENKIFSVTNNTECGKLLEEIKCALCSPHSQSLFHSPEREVLERDLVLPLLCKDYCKEFFYTCRGHIPGFLQTTADEFCFYYARKDGGLCFPDFPRKQVRGPASNYLDQMEEYDKVEEISRKHKHNCFCIQEVVSGLRQPVGALHSGDGSQRLFILEKEGYVKILTPEGEIFKEPYLDIHKLVQSGIKGGDERGLLSLAFHPNYKKNGKLYVSYTTNQERWAIGPHDHILRVVEYTVSRKNPHQVDLRTARVFLEVAELHRKHLGGQLLFGPDGFLYIILGDGMITLDDMEEMDGLSDFTGSVLRLDVDTDMCNVPYSIPRSNPHFNSTNQPPEVFAHGLHDPGRCAVDRHPTDININLTILCSDSNGKNRSSARILQIIKGKDYESEPSLLEFKPFSNGPLVGGFVYRGCQSERLYGSYVFGDRNGNFLTLQQSPVTKQWQEKPLCLGTSGSCRGYFSGHILGFGEDELGEVYILSSSKSMTQTHNGKLYKIVDPKRPLMPEECRATVQPAQTLTSECSRLCRNGYCTPTGKCCCSPGWEGDFCRTAKCEPACRHGGVCVRPNKCLCKKGYLGPQCEQVDRNIRRVTRAGILDQIIDMTSYLLDLTSYIV

SEQ ID NO: 544 - protein, 322 aa, Homo Sapiens
IFPLAFFIYVPMNEQIVIGRLDEDIILPSSFERGSEVVIHWKYQDSYKVHSYYKGSDHLESQDPRYANRTSLFYNEIQNGNASLFFRRVSLLDEGIYTCYVGTAIQVITNKVVLKVGVFLTPVMKYEKRNTNSFLICSVLSVYPRPIITWKMDNTPISENNMEETGSLDSFSINSPLNITGSNSSYECTIENSLLKQTWTGRWTMKDGLHKMQSEHVSLSCQPVNDYFSPNQDFKVTWSRMKSGTFSVLAYYLSSSQNTIINESRFSWNKELINQSDFSMNLMDLNLSDSGEYLCNISSDEYTLLTIHTVHVEPSQETASHN

SEQ ID NO: 545 - protein, 284 aa, Homo Sapiens
RSHSMRYFYTTMSRPGAGEPRFISVGYVDDTQFVRFDSDDASPREEPRAPWMEREGPKYWDRNTQICKAQAQTERENLRIALRYYNQSEGGSHTMQVMYGCDVGPDGPFLRGYEQHAYDGKDYIALNEDLRSWTAADMAAQITKRKWEAARRAEQRRVYLEGEFVEWLRRYLENGKETLQRADPPKTHMTHHPISDHEATLRCWALGFYPAEITLTWQRDGEDQTQDTELVETRPAGDGTFQKWAAVVVPSGEEQRYTCHVQHEGLPEPLTLRWEPSSQPTVPI

SEQ ID NO: 546 - protein, 285 aa, Homo Sapiens
GSHSMRYFYTAMSRPGRGEPRFISVGYVDDTQFVRFDSDAASPREEPRAPWIEQEGPEYWDRNTQICKTNTQTYRESLRNLRGYYNQSEAGSHTLQRMYGCDVGPDGRLLRGHDQYAYDGKDYIALNEDLSSWTAADTAAQITQRKWEAAREAEQLRAYLEGLCVEWLRRYLENGKETLQRADPPKTHVTHHPISDHEATLRCWALGFYPAEITLTWQRDGEDQTQDTELVETRPAGDRTFQKWAAVVVPSGEEQRYTCHVQHEGLPKPLTLRWEPSSQSTIPIV

SEQ ID NO: 547 - protein, 284 aa, Homo Sapiens
GSHSMRYFYTSVSRPGRGEPRFIAVGYVDDTQFVRFDSDAASQRMEPRAPWIEQEGPEYWDRNTRNVKAHSQTDRESLRIALRYYNQSEDGSHTIQRMYGCDVGPDGRFLRGYQQDAYDGKDYIALNEDLRSWTAADMAAQITQRKWETAHEAEQWRAYLEGRCVEWLRRYLENGKETLQRTDAPKTHMTHHAVSDHEATLRCWALSFYPAEITLTWQRDGEDQTQDTELVETRPAGDGTFQKWASVVVPSGQEQRYTCHVQHEGLPKPLTLRWEPSSQPTIPI

SEQ ID NO: 548 - protein, 284 aa, Homo Sapiens
GSHSMRYFFTSVSRPGRGEPRFIAVGYVDDTQFVRFDSDAASQRMEPRAPWIEQEGPEYWDGETRKVKAHSQTHRVDLGTLRGYYNQSEAGSHTVQRMYGCDVGSDWRFLRGYHQYAYDGKDYIALKEDLRSWTAADMAAQTTKHKWEAAHVAEQLRAYLEGTCVEWLRRYLENGKETLQRTDAPKTHMTHHAVSDHEATLRCWALSFYPAEITLTWQRDGEDQTQDTELVETRPAGDGTFQKWAAVVVPSGQEQRYTCHVQHEGLPKPLTLRWEPSSQPTIPI

SEQ ID NO: 549 - protein, 284 aa, Homo Sapiens
GSHSMRYFYTAMSRPGRGEPRFIAVGYVDDTQFVRFDSDAASPRTEPRAPWIEQEGPEYWDRNTQIFKTNTQTYRESLRNLRGYYNQSEAGSHIIQRMYGCDLGPDGRLLRGHDQSAYDGKDYIALNEDLSSWTAADTAAQITQRKWEAARVAEQLRAYLEGLCVEWLRRYLENGKETLQRADPPKTHVTHHPVSDHEATLRCWALGFYPAEITLTWQRDGEDQTQDTELVETRPAGDRTFQKWAAVVVPSGEEQRYTCHVQHEGLPKPLTLRWEPSSQSTIPI

SEQ ID NO: 550 - protein, 284 aa, Homo Sapiens
GSHSMRYFFTSVSRPGRGEPRFIAVGYVDDTQFVRFDSDAASQKMEPRAPWIEQEGPEYWDQETRNMKAHSQTDRANLGTLRGYYNQSEDGSHTIQIMYGCDVGPDGRFLRGYRQDAYDGKDYIALNEDLRSWTAADMAAQITKRKWEAVHAAEQRRVYLEGRCVDGLRRYLENGKETLQRTDPPKTHMTHHPISDHEATLRCWALGFYPAEITLTWQRDGEDQTQDTELVETRPAGDGTFQKWAAVVVPSGEEQRYTCHVQHEGLPKPLTLRWELSSQPTIPI

SEQ ID NO: 551 - protein, 285 aa, Homo Sapiens; identical to SEQ ID NO: 546

SEQ ID NO: 552 - protein, 284 aa, Homo Sapiens
CSHSMRYFYTAVSRPGRGEPRFIAVGYVDDTQFVRFDSDAASPRGEPRAPWVEQEGPEYWDRETQKYKRQAQTDRVSLRNLRGYYNQSEAGSHTLQWMYGCDLGPDGRLLRGYDQSAYDGKDYIALNEDLRSWTAADTAAQITQRKWEAARAAEQQRAYLEGTCVEWLRRYLENGKETLQRAEHPKTHVTHHLVSDHEATLRCWALGFYPAEITLTWQRDGEDQTQDTELVETRPAGDGTFQKWAAVVVPSGEEQRYTCHVQHEGLPEPLTLRWEPSSQPTIPI

SEQ ID NO: 553 - protein, 207 aa, Homo Sapiens
VPEAPTPMWPDDLQNHTFLHTVYCQDGSPSVGLSEAYDEDQLFFFDFSQNTRVPRLPEFADWAQEQGDAPAILFDKEFCEWMIQQIGPKLDGKIPVSRGFPIAEVFTLKPLEFGKPNTLVCFVSNLFPPMLTVNWQHHSVPVEGFGPTFVSAVDGLSFQAFSYLNFTPEPSDIFSCIVTHEIDRYTAIAYWVPRNALPSDLLENVLC

SEQ ID NO: 554 - protein, 200 aa, Homo Sapiens
GGFVAHVESTCLLDDAGTPKDFTYCISFNKDLLTCWDPEENKMAPCEFGVLNSLANVLSQHLNQKDTLMQRLRNGLQNCATHTQPFWGSLTNRTRPPSVQVAKTTPFNTREPVMLACYVWGFYPAEVTITWRKNGKLVMPHSSAHKTAQPNGDWTYQTLSHLALTPSYGDTYTCVVEHIGAPEPILRDWTPGLSPMQTLK

SEQ ID NO: 555 - protein, 192 aa, Homo Sapiens
TKADHMGSYGPAFYQSYGASGQFTHEFDEEQLFSVDLKKSEAVWRLPEFGDFARFDPQGGLAGIAAIKAHLDILVERSNRSRAINVPPRVTVLPKSRVELGQPNILICIVDNIFPPVINITWLRNGQTVTEGVAQTSFYSQPDHLFRKFHYLPFVPSAEDVYDCQVEHWGLDAPLLRHWELQVPIPPPDAME

SEQ ID NO: 556 - protein, 198 aa, Homo Sapiens
TDSPEDFVIQAKADCYFTNGTEKVQFVVRFIFNLEEYVRFDSDVGMFVALTKLGQPDAEQWNSRLDLLERSRQAVDGVCRHNYRLGAPFTVGRKVQPEVTVYPERTPLLHQHNLLHCSVTGFYPGDIKIKWFLNGQEERAGVMSTGPIRNGDWTFQTVVMLEMTPELGHVYTCLVDHSSLLSPVSVEWRAQSEYSWRK

SEQ ID NO: 557 - protein, 194 aa, Homo Sapiens
AGAIKADHVSTYAAFVQTHRPTGEFMFEFDEDEQFYVDLDKKETVWHLEEFGRAFSFEAQGGLANIAILNNNLNTLIQRSNHTQAANDPPEVTVFPKEPVELGQPNTLICHIDRFFPPVLNVTWLCNGEPVTEGVAESLFLPRTDYSFHKFHYLTFVPSAEDVYDCRVEHWGLDQPLLKHWEAQEPIQMPETTE

SEQ ID NO: 558 - protein, 196 aa, Homo Sapiens
RATPENYLFQGRQECYAFNGTQRFLERYIYNREEFVRFDSDVGEFRAVTELGRPAAEYWNSQKDILEEKRAVPDRMCRHNYELGGPMTLQRRVQPRVNVSPSKKGPLQHHNLLVCHVTDFYPGSIQVRWFLNGQEETAGVVSTNLIRNGDWTFQILVMLEMTPQQGDVYTCQVEHTSLDSPVTVEWKAQSDSARSK

SEQ ID NO: 559 - protein, 193 aa, Homo Sapiens
EDIVADHVASYGVNLYQSYGPSGQYTHEFDGDEQFYVDLGRKETVWCLPVLRQFRFDPQFALTNIAVLKHNLNILIKRSNSTAATNEVPEVTVFSKSPVTLGQPNTLICLVDNIFPPVVNITWLSNGHSVTEGVSETSFLSKSDHSFFKISYLTFLPSADEIYDCKVEHWGLDEPLLKHWEPEIPAPMSELTE

SEQ ID NO: 560 - protein, 198 aa, Homo Sapiens
RDSPEDFVYQFKGMCYFTNGTERVRLVTRYIYNREEYARFDSDVGVYRAVTPLGPPAAEYWNSQKEVLERTRAELDTVCRHNYQLELRTTLQRRVEPTVTISPSRTEALNHHNLLVCSVTDFYPAQIKVRWFRNDQEETTGVVSTPLIRNGDWTFQILVMLEMTPQRGDVYTCHVEHPSLQNPIIVEWRAQSESAQSK

SEQ ID NO: 561 - protein, 191 aa, Homo Sapiens
IKEEHVIIQAEFYLNPDQSGEFMFDFDGDEIFHVDMAKKETVWRLEEFGRFASFEAQGALANIAVDKANLEIMTKRSNYTPITNVPPEVTVLTNSPVELREPNVLICFIDKFTPPVVNVTWLRNGKPVTTGVSETVFLPREDHLFRKFHYLPFLPSTEDVYDCRVEHWGLDEPLLKHWEFDAPSPLPETTE

SEQ ID NO: 562 - protein, 198 aa, Homo Sapiens
GDTRPRFLWQPKRECHFFNGTERVRFLDRYFYNQEESVRFDSDVGEFRAVTELGRPDAEYWNSQKDILEQARAAVDTYCRHNYGVGESFAVQRRVQPKVTVYPSKTQPLQHHNLLVCSVSGFYPGSIEVRWFLNGQEEKAGMVSTGLIQNGDWTFQTLVMLETVPRSGEVYTCQVEHPSVTSPLTVEWRARSESAQSK

SEQ ID NO: 563 - protein, 284 aa, Homo Sapiens
GSHSLKYFHTSVSRPGRGEPRFISVGYVDDTQFVRFDNDAASPRMVPRAPWMEQEGSEYWDRETRSARDTAQIFRVNLRTLRGYYNQSEAGSHTLQWMHGCELGPDRRFLRGYEQFAYDGKDYLTLNEDLRSWTAVDTAAQISEQKSNDASEAEHQRAYLEDTCVEWLHKYLEKGKETLLHLEPPKTHVTHHPISDHEATLRCWALGFYPAEITLTWQQDGEGHTQDTELVETRPAGDGTFQKWAAVVVPSGEEQRYTCHVQHEGLPEPVTLRWKPASQPTIPI

SEQ ID NO: 564 - protein, 284 aa, Homo Sapiens
GSHSLRYFSTAVSRPGRGEPRYIAVEYVDDTQFLRFDSDAAIPRMEPREPWVEQEGPQYWEWTTGYAKANAQTDRVALRNLLRRYNQSEAGSHTLQGMNGCDMGPDGRLLRGYHQHAYDGKDYISLNEDLRSWTAADTVAQITQRFYEAEEYAEEFRTYLEGECLELLRRYLENGKETLQRADPPKAHVAHHPISDHEATLRCWALGFYPAEITLTWQRDGEEQTQDTELVETRPAGDGTFQKWAAVVVPSGEEQRYTCHVQHEGLPQPLILRWEQSPQPTIPI

SEQ ID NO: 565 - protein, 284 aa, Homo Sapiens
GSHSMRYFSAAVSRPSRGEPRFIAMGYVDDTQFVRFDSDSACPRMEPRAPWVEREGPEYWEEETRNTKAHAQTDRMNLQTLRGYYNQSEASSHTLQWMIGCDLGSDGRLLRGYEQYAYDGKDYLALNEDLRSWTAADTAAQISKRKCEAANVAEQRRAYLEGTCVEWLHRYLENGKEMLQRADPPKTHVTHHPVFDYEATLRCWALGFYPAEIILTWQRDGEDQTQDVELVETKPAGDGTFQKWAAVVVPSGEEQRYTCHVQHEGLPEPLMLRWKQSSLPTIPI

SEQ ID NO: 566 - protein, 214 aa, Homo Sapiens
GKGDPKKPRGKMSSYAFFVQTCREEHKKKHPDASVNFSEFSKKCSERWKTMSAKEKGKFEDMAKADKARYEREMKTYIPPKGETKKKFKDPNAPKRPPSAFFLFCSEYRPKIKGEHPGLSIGDVAKKLGEMWNNTAADDKQPYEKKAAKLKEKYEKDIAAYRAKGKPDAAKKGVVKAEKSKKKKEEEEDEEDEEDEEEEEDEEDEDEEEDDDDE

SEQ ID NO: 567 - protein, 208 aa, Homo Sapiens
GKGDPNKPRGKMSSYAFFVQTCREEHKKKHPDSSVNFAEFSKKCSERWKTMSAKEKSKFEDMAKSDKARYDREMKNYVPPKGDKKGKKKDPNAPKRPPSAFFLFCSEHRPKIKSEHPGLSIGDTAKKLGEMWSEQSAKDKQPYEQKAAKLKEKYEKDIAAYRAKGKSEAGKKGPGRPTGSKKKNEPEDEEEEEEEEDEDEEEEDEDEE

SEQ ID NO: 568 - protein, 414 aa, Homo Sapiens
FRGPLLPNRPFTTVWNANTQWCLERHGVDVDVSVFDVVANPGQTFRGPDMTIFYSSQLGTYPYYTPTGEPVFGGLPQNASLIAHLARTFQDILAAIPAPDFSGLAVIDWEAWRPRWAFNWDTKDIYRQRSRALVQAQHPDWPAPQVEAVAQDQFQGAARAWMAGTLQLGRALRPRGLWGFYGFPDCYNYDFLSPNYTGQCPSGIRAQNDQLGWLWGQSRALYPSIYMPAVLEGTGKSQMYVQHRVAEAFRVAVAAGDPNLPVLPYVQIFYDTTNHFLPLDELEHSLGESAAQGAAGVVLWVSWENTRTKESCQAIKEYMDTTLGPFILNVTSGALLCSQALCSGHGRCVRRTSHPKALLLLNPASFSIQLTPGGGPLSLRGALSLEDQAQMAVEFKCRCYPGWQAPWCERKSMW

SEQ ID NO: 569 - protein, 428 aa, Homo Sapiens
MELKPTAPPIFTGRPFVVAWDVPTQDCGPRLKVPLDLNAFDVQASPNEGFVNQNITIFYRDRLGLYPRFDSAGRSVHGGVPQNVSLWAHRKMLQKRVEHYIRTQESAGLAVIDWEDWRPVWVRNWQDKDVYRRLSRQLVASRHPDWPPDRIVKQAQYEFEFAAQQFMLETLRYVKAVRPRHLWGFYLFPDCYNHDYVQNWESYTGRCPDVEVARNDQLAWLWAESTALFPSVYLDETLASSRHGRNFVSFRVQEALRVARTHHANHALPVYVFTRPTYSRRLTGLSEMDLISTIGESAALGAAGVILWGDAGYTTSTETCQYLKDYLTRLLVPYVVNVSWATQYCSRAQCHGHGRCVRRNPSASTFLHLSTNSFRLVPGHAPGEPQLRPVGELSWADIDHLQTHFRCQCYLGWSGEQCQWDHRQAAGG

SEQ ID NO: 570 - protein, 397 aa, Homo Sapiens
QPLPQVPERPFSVLWNVPSAHCEARFGVHLPLNSLGIIANRGQHFHGQNMTIFYKNQLGLYPYFGPRGTAHNGGIPQALPLDRHLALAAYQIHHSLRPGFAGPAVLDWEEWCPLWAGNWGRRRAYQAASWAWAQQVFPDLDPQEQLYKAYTGFEQAARALMEDTLRVAQALRPHGLWGFYHYPACGNGWHSMASNYTGRCHAATLARNTQLHWLWAASSALFPSIYLPPRLPPAHHQAFVRHRLEEAFRVALVGHRHPLPVLAYVRLTHRRSGRFLSQDDLVQSIGVSAALGAAGVVLWGDLSLSSSEEECWHLHDYLVDTLGPYVINVTRAAMACSHQRCHGHGRCARRDPGQMEAFLHLWPDGSLGDWKSFSCHCYWGWAGPTCQEPRPGPKEAV

SEQ ID NO: 571 - protein, 453 aa, Homo Sapiens
QTSVSPSKVILPRGGSVLVTCSTSCDQPKLLGIETPLPKKELLLPGNNRKVYELSNVQEDSQPMCYSNCPDGQSTAKTFLTVYWTPERVELAPLPSWQPVGKNLTLRCQVEGGAPRANLTVVLLRGEKELKREPAVGEPAEVTTTVLVRRDHHGANFSCRTELDLRPQGLELFENTSAPYQLQTFVLPATPPQLVSPRVLEVDTQGTVVCSLDGLFPVSEAQVHLALGDQRLNPTVTYGNDSFSAKASVSVTAEDEGTQRLTCAVILGNQSQETLQTVTIYSFPAPNVILTKPEVSEGTEVTVKCEAHPRAKVTLNGVPAQPLGPRAQLLLKATPEDNGRSFSCSATLEVAGQLIHKNQTRELRVLYGPRLDERDCPGNWTWPENSQQTPMCQAWGNPLPELKCLKDGTFPLPIGESVTVTRDLEGTYLCRARSTQGEVTRKVTVNVLSPRYE

SEQ ID NO: 572 - protein, 199 aa, Homo Sapiens
KVFEVHVRPKKLAVEPKGSLEVNCSTTCNQPEVGGLETSLDKILLDEQAQWKHYLVSNISHDTVLQCHFTCSGKQESMNSNVSVYQPPRQVILTLQPTLVAVGKSFTIECRVPTVEPLDSLTLFLFRGNETLHYETFGKAAPAPQEATATFNSTADREDGHRNFSCLAVLDLMSRGGNIFHKHSAPKMLEIYEPVSDSQ

SEQ ID NO: 573 - protein, 456 aa, Homo Sapiens
QEFLLRVEPQNPVLSAGGSLFVNCSTDCPSSEKIALETSLSKELVASGMGWAAFNLSNVTGNSRILCSVYCNGSQITGSSNITVYRLPERVELAPLPPWQPVGQNFTLRCQVEDGSPRTSLTVVLLRWEEELSRQPAVEEPAEVTATVLASRDDHGAPFSCRTELDMQPQGLGLFVNTSAPRQLRTFVLPVTPPRLVAPRFLEVETSWPVDCTLDGLFPASEAQVYLALGDQMLNATVMNHGDTLTATATATARADQEGAREIVCNVTLGGERREARENLTVFSFLGPIVNLSEPTAHEGSTVTVSCMAGARVQVTLDGVPAAAPGQPAQLQLNATESDDGRSFFCSATLEVDGEFLHRNSSVQLRVLYGPKIDRATCPQHLKWKDKTRHVLQCQARGNPYPELRCLKEGSSREVPVGIPFFVNVTHNGTYQCQASSSRGKYTLVVVMDIEAGSSH

SEQ ID NO: 574 - protein, 250 aa, Homo Sapiens
ALGRRTKRAQSPKGSPLAPSGTSVPFWVRMSPEFVAVQPGKSVQLNCSNSCPQPQNSSLRTPLRQGKTLRGPGWVSYQLLDVRAWSSLAHCLVTCAGKTRWATSRITAYSVPGGLLGGDPEAWKPGHLFRKPGALHRPGSGQRDLDLRVCCWTPRLLAARDLPRAPQSRRPGGPQQLGTHYTDARLEPRAHSFGLRFHRCPCRDPPHCGRCVPMQVPSYEVPGVKGDVLCRLSEKKRNMKQSGEMAIHGG

SEQ ID NO: 575 - protein, 804 aa, Homo Sapiens
EPFWADLQPRVAFVERGGSLWLNCSTNCPRPERGGLETSLRRNGTQRGLRWLARQLVDIREPETQPVCFFRCARRTLQARGLIRTFQRPDRVELMPLPPWQPVGENFTLSCRVPGAGPRASLTLTLLRGAQELIRRSFAGEPPRARGAVLTATVLARREDHGANFSCRAELDLRPHGLGLFENSSAPRELRTFSLSPDAPRLAAPRLLEVGSERPVSCTLDGLFPASEARVYLALGDQNLSPDVTLEGDAFVATATATASAEQEGARQLICNVTLGGENRETRENVTIYSFPAPLLTLSEPSVSEGQMVTVTCAAGTQALVTLEGVPAAVPGQPAQLQLNATENDDRRSFFCDATLDVDGETLIKNRSAELRVLYAPRLDDSDCPRSWTWPEGPEQTLRCEARGNPEPSVHCARSDGGAVLALGLLGPVTRALSGTYRCKAANDQGEAVKDVTLTVEYAPALDSVGCPERITWLEGTEASLSCVAHGVPPPDVICVRSGELGAVIEGLLRVAREHAGTYRCEATNPRGSAAKNVAVTVEYGPRFEEPSCPSNWTWVEGSGRLFSCEVDGKPQPSVKCVGSGGATEGVLLPLAPPDPSPRAPRIPRVLAPGIYVCNATNRHGSVAKTVVVSAESPPEMDESTCPSHQTWLEGAEASALACAARGRPSPGVRCSREGIPWPEQQRVSREDAGTYHCVATNAHGTDSRTVTVGVEYRPVVAELAASPPGGVRPGGNFTLTCRAEAWPPAQISWRAPPGALNIGLSSNNSTLSVAGAMGSHGGEYECAATNAHGRHARRITVRVAGPW

SEQ ID NO: 576 - protein, 120 aa, Homo Sapiens
EINGSANYEMFIFHNGGVQILCKYPDIVQQFKMQLLKGGQILCDLTKTKGSGNTVSIKSLKFCHSQLSNNSVSFFLYNLDHSHANYYFCNLSIFDPPPFKVTLTGGYLHIYESQLCCQLK

SEQ ID NO: 577 - protein, 238 aa, Homo Sapiens [sequence omitted]

SEQ ID NO: 578 - protein, 154 aa, Homo Sapiens
MREGKRGPPCILSFRGTLERVEAQWELEAQGPGQCPAPLGDPASTTDGAQEARVPLDGAFWIPRPPAGSPKGCFACVSKPPALQAPAAPAPEPSASPPMAPTLFPMESKSSKTDSVRAAGAPPACKHLAEKKTMTNPTTVIEVYPDTTEVNDYY

SEQ ID NO: 579 - protein, 166 aa, Homo Sapiens
CDLPQTHSLGNRRALILLGQMGRISPFSCLKDRHDFRIPQEEFDGNQFQKAQAISVLHEMIQQTFNLFSTEDSSAAWEQSLLEKFSTELYQQLNDLEACVIQEVGVEETPLMNEDSILAVRKYFQRITLYLIERKYSPCAWEVVRAEIMRSLSFSTNLQKRLRRKD

SEQ ID NO: 580 - protein, 166 aa, Homo Sapiens
CDLPETHSLDNRRTLMLLAQMSRISPSSCLMDRHDFGFPQEEFDGNQFQKAPAISVLHELIQQIFNLFTTKDSSAAWDEDLLDKFCTELYQQLNDLEACVMQEERVGETPLMNADSILAVKKYFRRITLYLTEKKYSPCAWEVVRAEIMRSLSLSTNLQERLRRKE

SEQ ID NO: 581 - protein, 166 aa, Homo Sapiens
CNLSQTHSLNNRRTLMLMAQMRRISPFSCLKDRHDFEFPQEEFDGNQFQKAQAISVLHEMMQQTFNLFSTKNSSAAWDETLLEKFYIELFQQMNDLEACVIQEVGVEETPLMNEDSILAVKKYFQRITLYLMEKKYSPCAWEVVRAEIMRSLSFSTNLQKRLRRKD

SEQ ID NO: 582 - protein, 166 aa, Homo Sapiens
CDLPQTHSLGNRRALILLAQMGRISHFSCLKDRYDFGFPQEVFDGNQFQKAQAISAFHEMIQQTFNLFSTKDSSAAWDETLLDKFYIELFQQLNDLEACVTQEVGVEEIALMNEDSILAVRKYFQRITLYLMGKKYSPCAWEVVRAEIMRSFSFSTNLQKGLRRKD

SEQ ID NO: 583 - protein, 166 aa, Homo Sapiens
CDLPQTHSLGNRRALILLAQMGRISPFSCLKDRHDFGLPQEEFDGNQFQKTQAISVLHEMIQQTFNLFSTEDSSAAWEQSLLEKFSTELYQQLNNLEACVIQEVGMEETPLMNEDSILAVRKYFQRITLYLTEKKYSPCAWEVVRAEIMRSLSFSTNLQKILRRKD

SEQ ID NO: 584 - protein, 166 aa, Homo Sapiens; identical to SEQ ID NO: 583

SEQ ID NO: 585 - protein, 165 aa, Homo Sapiens [sequence omitted]

SEQ ID NO: 586 - protein, 166 aa, Homo Sapiens
CDLPQTHSLGNRRALILLAQMGRISPFSCLKDRHDFGFPQEEFDGNQFQKAQAISVLHEMIQQTFNLFSTKDSSATWEQSLLEKFSTELNQQLNDLEACVIQEVGVEETPLMNVDSILAVKKYFQRITLYLTEKKYSPCAWEVVRAEIMRSFSLSKIFQERLRRKE

SEQ ID NO: 587 - protein, 166 aa, Homo Sapiens
CDLPQTHSLGNRRALILLAQMGRISHFSCLKDRHDFGFPEEEFDGHQFQKAQAISVLHEMIQQTFNLFSTEDSSAAWEQSLLEKFSTELYQQLNDLEACVIQEVGVEETPLMNEDSILAVRKYFQRITLYLTEKKYSPCAWEVVRAEIMRSLSFSTNLQKRLRRKD

SEQ ID NO: 588 - protein, 166 aa, Homo Sapiens
CDLPQTHSLSNRRTLMIMAQMGRISPFSCLKDRHDFGFPQEEFDGNQFQKAQAISVLHEMIQQTFNLFSTKDSSATWDETLLDKFYTELYQQLNDLEACMMQEVGVEDTPLMNVDSILTVRKYFQRITLYLTEKKYSPCAWEVVRAEIMRSFSLSANLQERLRRKE

SEQ ID NO: 589 - protein, 169 aa, Homo Sapiens
SLDCDLPQTHSLGHRRTMMLLAQMRRISLFSCLKDRHDFRFPQEEFDGNQFQKAEAISVLHEVIQQTFNLFSTKDSSVAWDERLLDKLYTELYQQLNDLEACVMQEVWVGGTPLMNEDSILAVRKYFQRITLYLTEKKYSPCAWEVVRAEIMRSFSSSRNLQERLRRKE

SEQ ID NO: 590 - protein, 166 aa, Homo Sapiens
CDLPQTHSLGNRRALILLAQMRRISPFSCLKDRHDFEFPQEEFDDKQFQKAQAISVLHEMIQQTFNLFSTKDSSAALDETLLDEFYIELDQQLNDLESCVMQEVGVIESPLMYEDSILAVRKYFQRITLYLTEKKYSSCAWEVVRAEIMRSFSLSINLQKRLKSKE

SEQ ID NO: 591 - protein, 409 aa, Homo Sapiens
KNLKSPQKVEVDIIDDNFILRWNRSDESVGNVTFSFDYQKTGMDNWIKLSGCQNITSTKCNFSSLKLNVYEEIKLRIRAEKENTSSWYEVDSFTPFRKAQIGPPEVHLEAEDKAIVIHISPGTKDSVMWALDGLSFTYSLVIWKNSSGVEERIENIYSRHKIYKLSPETTYCLKVKAALLTSWKIGVYSPVHCIKTTVENELPPPENIEVSVQNQNYVLKWDYTYANMTFQVQWLHAFLKRNPGNHLYKWKQIPDCENVKTTQCVFPQNVFQKGIYLLRVQASDGNNTSFWSEEIKFDTEIQAFLLPPVFNIRSLSDSFHIYIGAPKQSGNTPVIQDYPLIYEIIFWENTSNAERKIIEKKTDVTVPNLKPLTVYCVKARAHTMDEKLNKSSVFSDAVCEKTKPGNTSK

SEQ ID NO: 592 - protein, 217 aa, Homo Sapiens
ISYDSPDYTDESCTFKISLRNFRSILSWELKNHSIVPTHYTLLYTIMSKPEDLKVVKNCANTTRSFCDLTDEWRSTHEAYVTVLEGFSGNTTLFSCSHNFWLAIDMSFEPPEFEIVGFTNHINVMVKFPSIVEEELQFDLSLVIEEQSEGIVKKHKPEIKGNMSGNFTYIIDKLIPNTNYCVSVYLEHSDEQAVIKSPLKCTLLPPGQESESAESAK

SEQ ID NO: 593 - protein, 166 aa, Homo Sapiens
MSYNLLGFLQRSSNFQCQKLLWQLNGRLEYCLKDRMNFDIPEEIKQLQQFQKEDAALTIYEMLQNIFAIFRQDSSSTGWNETIVENLLANVYHQINHLKTVLEEKLEKEDFTRGKLMSSLHLKRYYGRILHYLKAKEYSHCAWTIVRVEILRNFYFINRLTGYLRN

SEQ ID NO: 594 - protein, 187 aa, Homo Sapiens
LDLKLIIFQQRQVNQESLKLLNKLQTLSIQQCLPHRKNFLLPQKSLSPQQYQKGHTLAILHEMLQQIFSLFRANISLDGWEENHTEKFLIQLHQQLEYLEALMGLEAEKLSGTLGSDNLRLQVKMYFRRIHDYLENQDYSTCAWAIVQVEISRCLFFVFSLTEKLSKQGRPLNDMKQELTTEFRSPR

SEQ ID NO: 595 - protein, 138 aa, Homo Sapiens
QDPYVKEAENLKKYFNAGHSDVADNGTLFLGILKNWKEESDRKIMQSQIVSFYFKLFKNFKDDQSIQKSVETIKEDMNVKFFNSNKKKRDDFEKLTNYSVTDLNVQRKAIHELIQVMAELSPAAKTGKRKRSQMLFRG

SEQ ID NO: 596 - protein, 228 aa, Homo Sapiens [sequence omitted]

SEQ ID NO: 597 - protein, 220 aa, Homo Sapiens
SQLPAPQHPKIRLYNAEQVLSWEPVALSNSTRPVVYQVQFKYTDSKWFTADIMSIGVNCTQITATECDFTAASPSAGFPMDFNVTLRLRAELGALHSAWVTMPWFQHYRNVTVGPPENIEVTPGEGSLIIRFSSPFDIADTSTAFFCYYVHYWEKGGIQQVKGPFRSNSISLDNLKPSRVYCLQVQAQLLWNKSNIFRVGHLSNISCYETMADASTELQQ

SEQ ID NO: 598 - protein, 180 aa, Homo Sapiens
LDCNLLNVHLRRVTWQNLRHLSSMSNSFPVECLRENIAFELPQEFLQYTQPMKRDIKKAFYEMSLQAFNIFSQHTFKYWKERHLKQIQIGLDQQAEYLNQCLEEDKNENEDMKEMKENEMKPSEARVPQLSSLELRRYFHRIDNFLKEKKYSDCAWEIVRVEIRRCLYYFYKFTALFRRK

SEQ ID NO: 599 - protein, 175 aa, Homo Sapiens
VPVARLHGALPDARGCHIAQFKSLSPQELQAFKRAKDALEESLLLKDCRCHSRLFPRTWDLRQLQVRERPMALEAELALTLKVLEATADTDPALVDVLDQPLHTLHHILSQFRACIQPQPTAGPRTRGRLHHWLYRLQEAPKKESPGCLEASVTFNLFRLLTRDLNCVASGDLCV

SEQ ID NO: 600 - protein, 174 aa, Homo Sapiens
LGCDLPQNHGLLSRNTLVLLHQMRRISPFLCLKDRRDFRFPQEMVKGSQLQKAHVMSVLHEMLQQIFSLFHTERSSAAWNMTLLDQLHTGLHQQLQHLETCLLQVVGEGESAGAISSPALTLRRYFQGIRVYLKEKKYSDCAWEVVRMEIMKSLFLSTNMQERLRSKDRDLGSS

SEQ ID NO: 601 - protein, 605 aa, Homo Sapiens
LGHSAELAFAVEPSDDVAVPGQPIVLDCRVEGTPPVRITWRKNGVELPESTHSTLLANGSLMIRHFRLEPGGSPSDEGDYECVAQNRFGLVVSRKARIQAATMSDFHVHPQATVGEEGGVARFQCQIHGLPKPLITWEKNRVPIDTDNERYTLLPKGVLQITGLRAEDGGIFHCVASNIASIRISHGARLTVSGSGSGAYKEPAILVGPENLTLTVHQTAVLECVATGNPRPIVSWSRLDGRPIGVEGIQVLGTGNLIISDVTVQHSGVYVCAANRPGTRVRRTAQGRLVVQAPAEFVQHPQSISRPAGTTAMFTCQAQGEPPPHVTWLKNGQVLGPGGHVRLKNNNSTLTISGIGPEDEAIYQCVAENSAGSSQASARLTVLWAEGLPGPPRNVRAVSVSSTEVRVSWSEPLANTKEIIGYVLHIRKAADPPELEYQEAVSKSTFQHLVSDLEPSTAYSFYIKAYTPRGASSASVPTLASTLGEAPAPPPLSVRVLGSSSLQLLWEPWPRLAQHEGGFKLFYRPASKTSFTGPILLPGTVSSYNLSQLDPTAVYEVKLLAYNQHGDGNATVRFVSLRGASERTALSPPCDCRKEEAANQTSTTG

SEQ ID NO: 602 - protein, 67 aa, Homo Sapiens
AYRPSETLCGGELVDTLQFVCGDRGFYFSRPASRVSRRSRGIVEECCFRSCDLALLETYCATPAKSE

SEQ ID NO: 603 - protein, 920 aa, Homo Sapiens
SRYSDNWEAITGTGDPEHYLINVCKSLAPQAGTEPCPPEAAACLLGGSKPVNLGRVRDGPQWRDGIIVLKYVDGDLCPDGIRKKSTTIRFTCSESQVNSRPMFISAVEDCEYTFAWPTATACPMKSNEHDDCQVTNPSTGHLFDLSSLSGRAGFTAAYSEKGLVYMSICGENENCPPGVGACFGQTRISVGKANKRLRYVDQVLQLVYKDGSPCPSKSGLSYKSVISFVCRPEAGPTNRPMLISLDKQTCTLFFSWHTPLACEQATECSVRNGSSIVDLSPLIHRTGGYEAYDESEDDASDTNPDFYINICQPLNPMHGVPCPAGAAVCKVPIDGPPIDIGRVAGPPILNPIANEIYLNFESSTPCLADKHFNYTSLIAFHCKRGVSMGTPKLLRTSECDFVFEWETPVVCPDEVRMDGCTLTDEQLLYSFNLSSLSTSTFKVTRDSRTYSVGVCTFAVGPEQGGCKDGGVCLLSGTKGASFGRLQSMKLDYRHQDEAVVLSYVNGDRCPPETDDGVPCVFPFIFNGKSYEECIIESRAKLWCSTTADYDRDHEWGFCRHSNSYRTSSIIFKCDEDEDIGRPQVFSEVRGCDVTFEWKTKVVCPPKKLECKFVQKHKTYDLRLLSSLTGSWSLVHNGVSYYINLCQKIYKGPLGCSERASICRRTTTGDVQVLGLVHTQKLGVIGDKVVVTYSKGYPCGGNKTASSVIELTCTKTVGRPAFKRFDIDSCTYYFSWDSRAACAVKPQEVQMVNGTITNPINGKSFSLGDIYFKLFRASGDMRTNGDNYLYEIQLSSITSSRNPACSGANICQVKPNDQHFSRKVGTSDKTKYYLQDGDLDVVFASSSKCGKDKTKSVSSTIFFHCDPLVEDGIPEFSHETADCQYLFSWYTSAVCPLGVGFDSENPGDDGQMHKGLSERSQ

SEQ ID NO: 604 - protein, 578 aa, Homo Sapiens
ADPGTPGEAEGPACPAACVCSYDDDADELSVFCSSRNLTRLPDGVPGGTQALWLDGNNLSSVPPAAFQNLSSLGFLNLQGGQLGSLEPQALLGLENLCHLHLERNQLRSLALGTFAHTPALASLGLSNNRLSRLEDGLFEGLGSLWDLNLGWNSLAVLPDAAFRGLGSLRELVLAGNRLAYLQPALFSGLAELRELDLSRNALRAIKANVFVQLPRLQKLYLDRNLIAAVAPGAFLGLKALRWLDLSHNRVAGLLEDTFPGLLGLRVLRLSHNAIASLRPRTFKDLHFLEELQLGHNRIRQLAERSFEGLGQLEVLTLDHNQLQEVKAGAFLGLTNMAVMNLSGNCLRNLPEQVFRGLGKLHSLHLEGSCLGRIRPHTFTGLSGLRRLFLKDNGLVGIEEQSLWGLAELLELDLTSNQLTHLPHRLFQGLGKLEYLLLSRNRLAELPADALGPLQRAFWLDVSHNRLEALPNSLLAPLGRLRYLSLRNNSLRTFTPQPPGLERLWLEGNPWDCGCPLKALRDFALQNPSAVPRFVQAICEGDDCQPPAYTYNNITCASPPEVVGLDLRDLSEAHFAPC

SEQ ID NO: 605 - protein, 256 aa, Homo Sapiens
SSSDTCGPCEPASCPPLPPLGCLLGETRDACGCCPMCARGEGEPCGGGGAGRGYCAPGMECVKSRKRRKGKAGAAAGGPGVSGVCVCKSRYPVCGSDGTTYPSGCQLRAASQRAESRGEKAITQVSKGTCEQGPSIVTPPKDIWNVTGAQVYLSCEVIGIPTPVLIWNKVKRGHYGVQRTELLPGDRDNLAIQTRGGPEKHEVTGWVLVSPLSKEDAGEYECHASNSQGQASASAKITVVDALHEIPVKKGEGAEL

SEQ ID NO: 606 - protein, 253 aa, Homo Sapiens
LGIRDVGGRRPKCGPCRPEGCPAPAPCPAPGISALDECGCCARCLGAEGASCGGRAGGRCGPGLVCASQAAGAAPEGTGLCVCAQRGTVCGSDGRSYPSVCALRLRARHTPRAHPGHLHKARDGPCEFAPVVVVPPRSVHNVTGAQVGLSCEVRAVPTPVITWRKVTKSPEGTQALEELPGDHVNIAVQVRGGPSDHEATAWILINPLRKEDEGVYQCHAANMVGEAESHSTVTVLDLSKYRSFHFPAPDDRM

SEQ ID NO: 607 - protein, 86 aa, Homo Sapiens
APVAPMTPYLMLCQPHKRCGDKFYDPLQHCCYDDAVVPLARTQTCGNCTFRVCFEQCCPWTFMVKLINQNCDSARTSDDRLCRSVS

SEQ ID NO: 608 - protein, 94 aa, Homo Sapiens
PAGSEPWLCQPAPRCGDKIYNPLEQCCYNDAIVSLSETRQCGPPCTFWPCFELCCLDSFGLTNDFVVKLKVQGVNSQCHSSPISSKCESRRRFP

SEQ ID NO: 609 - protein, 101 aa, Homo Sapiens
TTDAPVGSGLWLCQPTPRCGNKIYNPSEQCCYDDAILSLKETRRCGSTCTFWPCFELCCPESFGPQQKFLVKLRVLGMKSQCHLSPISRSCTRNRRHVLYP

SEQ ID NO: 610 - protein, 23 aa, Homo Sapiens
KSPCGNQANVLCISRLEFVQYQS

SEQ ID NO: 611 - protein, 176 aa, Homo Sapiens
LLRPTAASQSRALGPGAPGGSSRSSLRSRWGRFLLQRGSWTGPRCWPRGFQSKHNSVTHVFGSGTQLTVLSQPKATPSVTLFPPSSEELQANKATLVCLMNDFYPGILTVTWKADGTPITQGVEMTTPSKQSNNKYAASSYLSLTPEQWRSRRSYSCQVMHEGSTVEKTVAPAECS

SEQ ID NO: 612 - protein, 215 aa, Homo Sapiens
VLAQPPSVSGAPGQTVTISCTGSSTNIGAGYAVHWYQQFPGAAPKVLIYGNYNRPSGVPDRFSGSKSGTSASLAITGLQAEDEADYYCQSYDGSLSGSVFGAGTKVTVLGQPKANPTVTLFPPSSEELQANKATLVCLISDFYPGAVTVAWKADGSPVKAGVETTKPSKQSNNKYAASSYLSLTPEQWKSHRSYSCQVTHEGSTVEKTVAPTECS

SEQ ID NO: 613 - protein, 306 aa, Homo Sapiens
QSLEFNSPADNYTVCEGDNATLSCFIDEHVTRVAWLNRSNILYAGNDRWTSDPRVRLLINTPEEFSILITEVGLGDEGLYTCSFQTRHQPYTTQVYLIVHVPARIVNISSPVTVNEGGNVNLLCLAVGRPEPTVTWRQLRDGFTSEGEILEISDIQRGQAGEYECVTHNGVNSAPDSRRVLVTVNYPPTITDVTSARTALGRAALLRCEAMAVPPADFQWYKDDRLLSSGTAEGLKVQTERTRSMLLFANVSARHYGNYTCRAANRLGASSASMRLLRPGSLENSAPRPPGLLALLSALGWLWWRM

SEQ ID NO: 614 - protein, 490 aa, Homo Sapiens
MTSIVMDPQPELWIESNYPQAPWENITLWCRSPSRISSKFLLLKDKTQMTWIRPSHKTFQVSFLIGALTESNAGLYRCCYWKETGWSKPSKVLELEAPGQLPKPIFWIQAETPALPGCNVNILCHGWLQDLVFMLFKEGYAEPVDYQVPTGTMAIFSIDNLTPEDEGVYICRTHIQMLPTLWSEPSNPLKLVVAGLYPKPTLTAHPGPIMAPGESLNLRCQGPIYGMTFALMRVEDLEKSFYHKKTIKNEANFFFQSLKIQDTGHYLCFYYDASYRGSLLSDVLKIWVTDTFPKTWLLARPSAVVQMGQNVSLRCRGPVDGVGLALYKKGEDKPLQFLDATSIDDNTSFFLNNVTYSDTGIYSCHYLLTWKTSIRMPSHNTVELMVVDKPPKPSLSAWPSTVFKLGKAITLQCRVSHPVLEFSLEWEERETFQKFSVNGDFIISNVDGKGTGTYSCSYRVETHPNIWSHRSEPLKLMGPAGYLTWNYVLN

SEQ ID NO: 615 - protein, 390 aa, Homo Sapiens
PPLINGLYTNRTVIKATAVRHSKKHFDCRAEGTPSPEVMWIMPDNIFLTAPYYGSRITVHKNGTLEIRNVRLSDSADFICVARNEGGESVLVVQLEVLEMLRRPTFRNPFNEKIVAQLGKSTALNCSVDGNPPPEIIWILPNGTRFSNGPQSYQYLIASNGSFIISKTTREDAGKYRCAARNKVGYIEKLVILEIGQKPVILTYAPGTVKGISGESLSLHCVSDGIPKPNIKWTMPSGYVVDRPQINGKYILHDNGTLVIKEATAYDRGNYICKAQNSVGHTLITVPVMIVAYPPRITNRPPRSIVTRTGAAFQLHCVALGVPKPEITWEMPDHSLLSTASKERTHGSEQLHLQGTLVIQNPQTSDSGIYKCTAKNPLGSDYAATYIQVI

SEQ ID NO: 616 - protein, 219 aa, Homo Sapiens
LEVSESPGSIQVARGQTAVLPCTFTTSAALINLNVIWMVTPLSNANQPEQVILYQGGQMFDGAPRFHGRVGFTGTMPATNVSIFINNTQLSDTGTYQCLVNNLPDIGGRNIGVTGLTVLVPPSAPHCQIQGSQDIGSDVILLCSSEEGIPRPTYLWEKLDNTLKLPPTATQDQVQGTVTIRNISALSSGLYQCVASNAIGTSTCLLDLQVISPQPRNIG

SEQ ID NO: 617 - protein, 420 aa, Homo Sapiens
YLTVNIEPLPPVVAGDAVTLKCNFKTDGRMREIVWYRVTDGGTIKQKIFTFDAMFSTNYSHMENYRKREDLVYQSTVRLPEVRISDNGPYECHVGIYDRATREKVVLASGNIFLNVMAPPTSIEVVAADTPAPFSRYQAQNFTLVCIVSGGKPAPMVYFKRDGEPIDAVPLSEPPAASSGPLQDSRPFRSLLHRDLDDTKMQKSLSLLDAENRGGRPYTERPSRGLTPDPNILLQPTTENIPETVVSREFPRWVHSAEPTYFLRHSRTPSSDGTVEVRALLTWTLNPQIDNEALFSCEVKHPALSMPMQAEVTLVAPKGPKIVMTPSRARVGDTVRILVHGFQNEVFPEPMFTWTRVGSRLLDGSAEFDGKELVLERVPAELNGSMYRCTAQNPLGSTDTHTRLIVFENPNIPRGTEDSN

SEQ ID NO: 618 - protein, 1106 aa, Homo Sapiens
QRQVTVQEGPLYRTEGSHITIWCNVSGYQGPSEQNFQWSIYLPSSPEREVQIVSTMDSSFPYAIYTQRVRGGKIFIERVQGNSTLLHITDLQARDAGEYECHTPSTDKQYFGSYSAKMNLVVIPDSLQTTAMPQTLHRVEQDPLELTCEVASETIQHSHLSVAWLRQKVGEKPVEVISLSRDFMLHSSSEYAQRQSLGEVRLDKLGRTTFRLTIFHLQPSDQGEFYCEAAEWIQDPDGSWYAMTRKRSEGAVVNVQPTDKEFTVRLETEKRLHTVGEPVEFRCILEAQNVPDRYFAVSWAFNSSLIATMGPNAVPVLNSEFAHREARGQLKVAKESDSVFVLKIYHLRQEDSGKYNCRVTEREKTVTGEFIDKESKRPKNIPIIVLPLKSSISVEVASNASVILEGEDLRFSCSVRTAGRPQGRFSVIWQLVDRQNRRSNIMWLDRDGTVQPGSSYWERSSFGGVQMEQVQPNSFSLGIFNSRKEDEGQYECHVTEWVRAVDGEWQIVGERRASTPISITALEMGFAVTAISRTPGVTYSDSFDLQCIIKPHYPAWVPVSVTWRFQPVGTVEFHDLVTFTRDGGVQWGDRSSSFRTRTAIEKAESGNNVRLSISRASDTEAGKYQCVAELWRKNYNNTWTRLAERTSNLLEIRVLQPVTKLQVSKSKRTLTLVENKPIQLNCSVKSQTSQNSHFAVLWYVHKPSDADGKLILKTTHNSAFEYGTYAEEEGLRARLQFERHVSGGLFSLTVQRAEVSDSGSYYCHVEEWLLSPNYAWYKLAEEVSGRTEVTVKQPDSRLRLSQAQGNLSVLETRQVQLECVVLNRTSITSQLMVEWFVWKPNHPERETVARLSRDATFHYGEQAAKNNLKGRLHLESPSPGVYRLFIQNVAVQDSGTYSCHVEEWLPSPSGMWYKRAEDTAGQTALTVMRPDASLQVDTVVPNATVSEKAAFQLDCSIVSRSSQDSRFAVAWYSLRTKAGGKRSSPGLEEQEEEREEEEEEEEDDDDDDPTERTALLSVGPDAVFGPEGSPWEGRLRFQRLSPVLYRLTVLQASPQDTGNYSCHVEEWLPSPQKEWYRLTEEESAPIGIRVLDTSPTLQSIICSNDA

SEQ ID NO: 619 - protein, 306 aa, Homo Sapiens
NLSQDDSQPWTSDETVVAGGTVVLKCQVKDHEDSSLQWSNPAQQTLYFGEKRALRDNRIQLVTSTPHELSISISNVALADEGEYTCSIFTMPVRTAKSLVTVLGIPQKPIITGYKSSLREKDTATLNCQSSGSKPAARLTWRKGDQELHGEPTRIQEDPNGKTFTVSSSVTFQVTREDDGASIVCSVNHESLKGADRSTSQRIEVLYTPTAMIRPDPPHPREGQKLLLHCEGRGNPVPQQYLWEKEGSVPPLKMTQESALIFPFLNKSDSGTYGCTATSNMGSYKAYYTLNVNDPSPVPSSSSTYH

SEQ ID NO: 620 - protein, 304 aa, Homo Sapiens
PGAGQEVQTENVTVAEGGVAEITCRLHQYDGSIVVIQNPARQTLFFNGTRALKDERFQLEEFSPRRVRIRLSDARLEDEGGYFCQLYTEDTHHQIATLTVLVAPENPVVEVREQAVEGGEVELSCLVPRSRPAATLRWYRDRKELKGVSSSQENGKVWSVASTVRFRVDRKDDGGIIICEAQNQALPSGHSKQTQYVLDVQYSPTARIHASQAVVREGDTLVLTCAVTGNPRPNQIRWNRGNESLPERAEAVGETLTLPGLVSADNGTYTCEASNKHGHARALYVLVVYDPGAVVEAQTSVPYA

SEQ ID NO: 621 - protein, 266 aa, Homo Sapiens
MGQKERSTADTLPDLEEWKSAAGLRWWQTAVVDGSGSGNEVIEGPQNARVLKGSQARFNCTVSQGWKLIMWALSDMVVLSVRPMEPIITNDRFTSQRYDQGGNFTSEMIIHNVEPSDSGNIRCSLQNSRLHGSAYLTVQVMGELFIPSVNLVVAENEPCEVTCLPSHWTRLPDISWELGLLVSHSSYYFVPEPSDLQSAVSILALTPQSNGTLTCVATWKSLKARKSATVNLTVIRCPQDTGGGINIPGVLSSLPSLGFSLPTWGK

SEQ ID NO: 622 - protein, 126 aa, Homo Sapiens
CTLSVTQPWYLEVDYTHEAVTIKCTFSATGCPSEQPTCLWFRYGAHRPENLCLDGCKSEADKFTVREALKENQVSLTVNRVTSNDSAIYICGIAFPSVPEARAKQTGGGTTLVVREIKLLSKELRS

SEQ ID NO: 623 - protein, 552 aa, Homo Sapiens
REVLVPEGPLYRVAGTAVSISCNVTGYEGPAQQNFEWFLYRPEAPDTALGIVSTKDTQFSYAVFKSRVVAGEVQVQRLQGDAVVLKIARLQAQDAGIYECHTPSTDTRYLGSYSGKVELRVLPDVLQVSAAPPGPRGRQAPTSPPRMTVHEGQELALGCLARTSTQKHTHLAVSFGRSVPEAPVGRSTLQEVVGIRSDLAVEAGAPYAERLAAGELRLGKEGTDRYRMVVGGAQAGDAGTYHCTAAEWIQDPDGSWAQIAEKRAVLAHVDVQTLSSQLAVTVGPGERRIGPGEPLELLCNVSGALPPAGRHAAYSVGWEMAPAGAPGPGRLVAQLDTEGVGSLGPGYEGRHIAMEKVASRTYRLRLEAARPGDAGTYRCLAKAYVRGSGTRLREAASARSRPLPVHVREEGVVLEAVAWLAGGTVYRGETASLLCNISVRGGPPGLRLAASWWVERPEDGELSSVPAQLVGGVGQDGVAELGVRPGGGPVSVELVGPRSHRLRLHSLGPEDEGVYHCAPSAWVQHADYSWYQAGSARSGPVTVYPYMHALDT

SEQ ID NO: 624 - protein, 698 aa, Homo Sapiens
RGKPEVVSVVGRAEESVVLGCDLLPPAGRPPLHVIEWLRFGFLLPIFIQFGLYSPRIDPDYVGRVRLQKGASLQIEGLRVEDQGWYECRVFFLDQHIPEDDFANGSWVHLTVNSPPQFQETPPAVLEVQELEPVTLRCVARGSPLPHVTWKLRGKDLGQGQGQVQVQNGTLRIRRVERGSSGVYTCQASSTEGSATHATQLLVLGPPVIVVPPKNSTVNASQDVSLACHAEAYPANLTYSWFQDNINVFHISRLQPRVQILVDGSLRLLATQPDDAGCYTCVPSNGLLHPPSASAYLTVLCMPGVIRCPVRANPPLLFVSWTKDGKALQLDKFPGWSQGTEGSLIIALGNEDALGEYSCTPYNSLGTAGPSPVTRVLLKAPPAFIERPKEEYFQEVGRELLIPCSAQGDPPPVVSWTKVGRGLQGQAQVDSNSSLILRPLTKEAHGHWECSASNAVARVATSTNVYVLGTSPHVVTNVSVVALPKGANVSWEPGFDGGYLQRFSVWYTPLAKRPDRMHHDWVSLAVPVGAAHLLVPGLQPHTQYQFSVLAQNKLGSGPFSEIVLSAPEGLPTTPAAPGLPPTEIPPPLSPPRGLVAVRTPRGVLLHWDPPELVPKRLDGYVLEGRQGSQGWEVLDPAVAGTETELLVPGLIKDVLYEFRLVAFAGSFVSDPSNTANVSTSGLEVYPSRTQLPGLLPQP

SEQ ID NO: 625 - protein, 160 aa, Homo Sapiens
SPGQGTQSENSCTHFPGNLPNMLRDLRDAFSRVKTFFQMKDQLDNLLLKESLLEDFKGYLGCQALSEMIQFYLEEVMPQAENQDPDIKAHVNSLGENLKTLRLRLRRCHRFLPCENKSKAVEQVKNAFNKLQEKGIYKAMSEFDIFINYIEAYMTMKIRN

SEQ ID NO: 626 - protein, 214 aa, Homo Sapiens
HGTELPSPPSVWFEAEFFHHILHWTPIPNQSESTCYEVALLRYGIESWNSISNCSQTLSYDLTAVTLDLYHSNGYRARVRAVDGSRHSNWTVTNTRFSVDEVTLTVGSVNLEIHNGFILGKIQLPRPKMAPANDTYESIFSHFREYEIAIRKVPGNFTFTHKKVKHENFSLLTSGEVGEFCVQVKPSVASRSNKGMWSKEECISLTRQYFTVTN

SEQ ID NO: 627 - protein, 201 aa, Homo Sapiens
MVPPPENVRMNSVNFKNILQWESPAFAKGNLTFTAQYLSYRIFQDKCMNTTLTECDFSSLSKYGDHTLRVRAEFADEHSDWVNITFCPVDDTIIGPPGMQVEVLADSLHMRFLAPKIENEYETWTMKNVYNSWTYNVQYWKNGTDEKFQITPQYDFEVLRNLEPWTTYCVQVRGFLPDRNKAGEWSEPVCEQTTHDETVPS

SEQ ID NO: 628 - protein, 178 aa, Homo Sapiens
PGPPPGPPRVSPDPRAELDSTVLLTRSLLADTRQLAAQLRDKFPADGDHNLDSLPTLAMSAGALGALQLPGVLTRLRADLLSYLRHVQWLRRAGGSSLKTLEPELGTLQARLDRLLRRLQLLMSRLALPQPPPDPPAPPLAPPSSAWGGIRAAHAILGGLHLTLDWAVRGLLLLKTRL

SEQ ID NO: 629 - protein, 347 aa, Homo Sapiens
SPCPQAWGPPGVQYGQPGRSVKLCCPGVTAGDPVSWFRDGEPKLLQGPDSGLGHELVLAQADSTDEGTYICQTLDGALGGTVTLQLGYPPARPVVSCQAADYENFSCTWSPSQISGLPTRYLTSYRKKTVLGADSQRRSPSTGPWPCPQDPLGAARCVVHGAEFWSQYRINVTEVNPLGASTRLLDVSLQSILRPDPPQGLRVESVPGYPRRLRASWTYPASWPCQPHFLLKFRLQYRPAQHPAWSTVEPAGLEEVITDAVAGLPHAVRVSARDFLDAGTWSTWSPEAWGTPSTGTIPKEIPAWGQLHTQPEVEPQVDSPAPPRPSLQPHPRLLDHRDSVEQVAVLA

SEQ ID NO: 630 - protein, 197 aa, Homo Sapiens
RNLPVATPDPGMFPCLHHSQNLLRAVSNMLQKARQTLEFYPCTSEEIDHEDITKDKTSTVEACLPLELTKNESCLNSRETSFITNGSCLASRKTSFMMALCLSSIYEDLKMYQVEFKTMNAKLLMDPKRQIFLDQNMLAVIDELMQALNFNSETVPQKSSLEEPDFYKTKIKLCILLHAFRIRAVTIDRVMSYLNAS

SEQ ID NO: 631 - protein, 306 aa, Homo Sapiens
IWELKKDVYVVELDWYPDAPGEMVVLTCDTPEEDGITWTLDQSSEVLGSGKTLTIQVKEFGDAGQYTCHKGGEVLSHSLLLLHKKEDGIWSTDILKDQKEPKNKTFLRCEAKNYSGRFTCWWLTTISTDLTFSVKSSRGSSDPQGVTCGAATLSVERVRGDNKEYEYSVECQEDSACPAAEESLPIEVMVDAVHKLKYENYTSSFFIRDIIKPDPPKNLQLKPLKNSRQVEVSWEYPDTWSTPHSYFSLTFCVQVQGKSKREKKDRVFTDKTSATVICRKNASISVRAQDRYYSSSWSEWASVPCS

SEQ ID NO: 632 - protein, 522 aa, Homo Sapiens
CRTSECCFQDPPYPDADSGSASGPRDLRCYRISSDRYECSWQYEGPTAGVSHFLRCCLSSGRCCYFAAGSATRLQFSDQAGVSVLYTVTLWVESWARNQTEKSPEVTLQLYNSVKYEPPLGDIKVSKLAGQLRMEWETPDNQVGAEVQFRHRTPSSPWKLGDCGPQDDDTESCLCPLEMNVAQEFQLRRRQLGSQGSSWSKWSSPVCVPPENPPQPQVRFSVEQLGQDGRRRLTLKEQPTQLELPEGCQGLAPGTEVTYRLQLHMLSCPCKAKATGTLHLGKMPYLSGAAYNVAVISSNQFGPGLNQTWHIPADTHTEPVALNISVGTNGTTMYWPARAQSMTYCIEWQPVGQDGGLATCSLTAPQDPDPAGMATYSWSRGSGAMGQEKCYYITIFASAHPEKLTLWSTVLSTYHFGGNASAAGTPHHVSVKNHSLDSVSVDWAPSLLSTCPGVLKEYVVRCRDEDSKQVSEHPVQPTETQVTLSGLRAGVAYTVQVRADTAWLRGVWSQPQRFSIEVQVSD

SEQ ID NO: 633 - protein, 599 aa, Homo Sapiens
KIDACKRGDVTVKPSHVILLGSTVNITCSLKPRQGCFHYSRRNKLILYKFDRRINFHHGHSLNSQVTGLPLGTTLFVCKLACINSDEIQICGAEIFVGVAPEQPQNLSCIQKGEQGTVACTWERGRDTHLYTEYTLQLSGPKNLTWQKQCKDIYCDYLDFGINLTPESPESNFTAKVTAVNSLGSSSSLPSTFTFLDIVRPLPPWDIRIKFQKASVSRCTLYWRDEGLVLLNRLRYRPSNSRLWNMVNVTKAKGRHDLLDLKPFTEYEFQISSKLHLYKGSWSDWSESLRAQTPEEEPTGMLDVWYMKRHIDYSRQQISLFWKNLSVSEARGKILHYQVTLQELTGGKAMTQNITGHTSWTTVIPRTGNWAVAVSAANSKGSSLPTRINIMNLCEAGLLAPRHVSANSEGMDNILVTWQPPRKDPSAVQEYVVEWRELHPGGDTQVPLNWLRSRPYNVSALISENIKSYICYEIRVYALSGDQGGCSSILGNSKHKAPLSGPHINAITEEKGSILISWNSIPVQEQMGCLLHYRIYWKERDSNSQPQLCEIPYRVSQNSHPINSLQPRVTYVLWMTALTAAGESSHGNEREFCLQGKAN

SEQ ID NO: 634 - protein, 122 aa, Homo Sapiens
LTCLGGFASPGPVPPSTALRELIEELVNITQNQKAPLCNGSMVWSINLTAGMYCAALESLINVSGCSAIEKTQRMLSGFCPHKVSAGQFSSLHVRDTKIEVAQFVKDLLLHLKKLFREGQFN

SEQ ID NO: 635 - protein, 322 aa, Homo Sapiens
GGGGAAPTETQPPVTNLSVSVENLCTVIWTWNPPEGASSNCSLWYFSHFGDKQDKKIAPETRRSIEVPLNERICLQVGSQCSTNESEKPSILVEKCISPPEGDPESAVTELQCIWHNLSYMKCSWLPGRNTSPDTNYTLYYWHRSLEKIHQCENIFREGQYFGCSFDLTKVKDSSFEQHSVQIMVKDNAGKIKPSFNIVPLTSRVKPDPPHIKNLSFHNDDLYVQWENPQNFISRCLFYEVEVNNSQTETHNVFYVQEAKCENPEFERNVENTSCFMVPGVLPDTLNTVRIRVKTNKLCYEDDKLWSNWSQEMSIGKKRNST

SEQ ID NO: 636 - protein, 317 aa, Homo Sapiens
DTEIKVNPPQDFEIVDPGYLGYLYLQWQPPLSLDHFKECTVEYELKYRNIGSETWKTIITKNLHYKDGFDLNKGIEAKIHTLLPWQCTNGSEVQSSWAETTYWISPQGIPETKVQDMDCVYYNWQYLLCSWKPGIGVLLDTNYNLFYWYEGLDHALQCVDYIKADGQNIGCRFPYLEASDYKDFYICVNGSSENKPIRSSYFTFQLQNIVKPLPPVYLTFTRESSCEIKLKWSIPLGPIPARCFDYEIEIREDDTTLVTATVENETYTLKTTNETRQLCFVVRSKVNIYCSDDGIWSEWSDKQCWEGEDLSKKTLLR

SEQ ID NO: 637 - protein, 114 aa, Homo Sapiens
NWVNVISDLKKIEDLIQSMHIDATLYTESDVHPSCKVTAMKCFLLELQVISLESGDASIHDTVENLIILANNSLSSNGNVTESGCKECEELEEKNIKEFLQSFVHIVQMFINTS

SEQ ID NO: 638 - protein, 175 aa, Homo Sapiens
ITCPPPMSVEHADIWVKSYSLYSRERYICNSGFKRKAGTSSLTECVLNKATNVAHWTTPSLKCIRDPALVHQRPAPPSTVTTAGVTPQPESLSPSGKEPAASSPSSNNTAATTAAIVPGSQLMPSKSPSTGTTEISSHESSHGTPSQTTAKTWELTASASHQPPGVYPQGHSDTT

SEQ ID NO: 639 - protein, 120 aa, Homo Sapiens
SAASASAASDVSVESTEATVCTVTLEKMSAGLGFSLEGGKGSLHGDKPLTINRIFKGAASEQSETVQPGDEILQLGGTAMQGLTRFEAWNIIKALPDGPVTIVIRRKSLQSKETTAAGDS

SEQ ID NO: 640 - protein, 132 aa, Homo Sapiens
GITIPRNPGCPNSEDKNFPRTVMVNLNIHNRNTNTNPKRSSDYYNRSTSPWNLHRNEDPERYPSVIWEAKCRHLGCINADGNVDYHMNSVPIQQEILVLRREPPHCPNSFRLEKILVSVGCTCVTPIVHHVA

SEQ ID NO: 641 - protein, 160 aa, Homo Sapiens
QPRSPKSKRKGQGRPGPLAPGPHQVPLDLVSRMKPYARMEEYERNIEEMVAQLRNSSELAQRKCEVNLQLWMSNKRSLSPWGYSINHDPSRIPVDLPEARCLCLGCVNPFTMQEDRSMVSVPVFSQVPVRRRLCPPPPRTGPCRQRAVMETIAVGCTCIF

SEQ ID NO: 642 - protein, 275 aa, Homo Sapiens
REPTVQCGSETGPSPEWMLQHDLIPGDLRDLRVEPVTTSVATGDYSILMNVSWVLRADASIRLLKATKICVTGKSNFQSYSCVRCNYTEAFQTQTRPSGGKWTFSYIGFPVELNTVYFIGAHNIPNANMNEDGPSMSVNFTSPGCLDHIMKYKKKCVKAGSLWDPNITACKKNEETVEVNFTTTPLGNRYMALIQHSTIIGFSQVFEPHQKKQTRASVVIPVTGDSEGATVQLTPYFPTCGSDCIRHKGTVVLCPQTGVPFPLDNNKSKPGGWLP

SEQ ID NO: 643 - protein, 179 aa, Homo Sapiens
HHDPSLRGHPHSHGTPHCYSAEELPLGQAPPHLLARGAKWGQALPVALVSSLEAASHRGRHERPSATTQCPVLRPEEVLEADTHQRSISPWRYRVDTDEDRYPQKLAFAECLCRGCIDARTGRETAALNSVRLLQSLLVLRRRPCSRDGSGLPTPGAFAFHTEFIHVPVGCTCVLPRSV

SEQ ID NO: 644 - protein, 187 aa, Homo Sapiens
AGAPRAGRRPARPRGCADRPEELLEQLYGRLAAGVLSAFHHTLQLGPREQARNASCPAGGRPADRRFRPPTNLRSVSPWAYRISYDPARYPRYLPEAYCLCRGCLTGLFGEEDVRFRSAPVYMPTVVLRRTPACAGGRSVYTEAYVTIPVGCTCVPEPEKDADSINSSIDKQGAKLLLGPNDAPAGP

SEQ ID NO: 645 - protein, 133 aa, Homo Sapiens
RKIPKVGHTFFQKPESCPPVPGGSMKLDIGIINENQRVSMSRNIESRSTSPWNYTVTWDPNRYPSEVVQAQCRNLGCINAQGKEDISMNSVPIQQETLVVRRKHQGCSVSFQLEKVLVTVGCTCVTPVIHRVQ

SEQ ID NO: 646 - protein, 288 aa, Homo Sapiens
LRLLDHRALVCSQPGLNCTVKNSTCLDDSWIHPRNLTPSSPKDLQIQLHFAHTQQGDLFPVAHIEWTLQTDASILYLEGAELSVLQLNTNERLCVRFEFLSKLRHHHRRWRFTFSHFVVDPDQEYEVTVHHLPKPIPDGDPNHQSKNFLVPDCEHARMKVTTPCMSSGSLWDPNITVETLEAHQLRVSFTLWNESTHYQILLTSFPHMENHSCFEHMHHIPAPRPEEFHQRSNVTLTLRNLKGCCRHQVQIQPFFSSCLNDCLRHSATVSCPEMPDTPEPIPDYMPLW

SEQ ID NO: 647 - protein, 432 aa, Homo Sapiens
LERLVGPQDATHCSPGLSCRLWDSDILCLPGDIVPAPGPVLAPTHLQTELVLRCQKETDCDLCLRVAVHLAVHGHWEEPEDEEKFGGAADSGVEEPRNASLQAQVVLSFQAYPTARCVLLEVQVPAALVQFGQSVGSVVYDCFEAALGSEVRIWSYTQPRYEKELNHTQQLPALPWLNVSADGDNVHLVLNVSEEQHFGLSLYWNQVQGPPKPRWHKNLTGPQIITLNHTDLVPCLCIQVWPLEPDSVRTNICPFREDPRAHQNLWQAARLRLLTLQSWLLDAPCSLPAEAALCWRAPGGDPCQPLVPPLSWENVTVDKVLEFPLLKGHPNLCVQVNSSEKLQLQECLWADSLGPLKDDVLLLETRGPQDNRSLCALEPSGCTSLPSKASTRAARLGEYLLQDLQSGQCLQLWDDDLGALWACPMDKYIHKR

SEQ ID NO: 648 - protein, 155 aa, Homo Sapiens
MESQPFLNMKFETDYFVKVVPFPSIKNESNYHPFFFRTRACDLLLQPDNLACKPFWKPRNLNISQHGSDMQVSFDHAPHNFGFRFFYLHYKLKHEGPFKRKTCKQEQTTETTSCLLQNVSPGDYIIELVDDTNTTRKVMHYALKPVHSPWAGPIR

SEQ ID NO: 649 - protein, 431 aa, Homo Sapiens
AGIGFRHLPHWNTRCPLASHTDDSFTGSSAYIPCRTWWALFSTKPWCVRVWHCSRCLCQHLLSGGSGLQRGLFHLLVQKSKKSSTFKFYRRHKMPAPAQRKLLPRRHLSEKSHHISIPSPDISHKGLRSKRTQPSDPETWESLPRLDSQRHGGPEFSFDLLPEARAIRVTISSGPEVSVRLCHQWALECEELSSPYDVQKIVSGGHTVELPYEFLLPCLCIEASYLQEDTVRRKKCPFQSWPEAYGSDFWKSVHFTDYSQHTQMVMALTLRCPLKLEAALCQRHDWHTLCKDLPNATARESDGWYVLEKVDLHPQLCFKFSFGNSSHVECPHQTGSLTSWNVSMDTQAQQLILHFSSRMHATFSAAWSLPGLGQDTLVPPVYTVSQARGSSPVSLDLIIPFLRPGCCVLVWRSDVQFAWKHLLCPDVSYRH

SEQ ID NO: 650 - protein, 157 aa, Homo Sapiens
YFGKLESKLSVIRNLNDQVLFIDQGNRPLFEDMTDSDCRDNAPRTIFIISMYKDSQPRGMAVTISVKCEKISTLSCENKIISFKEMNPPDNIKDTKSDIIFFQRSVPGHDNKMQFESSSYEGYFLACEKERDLFKLILKKEDELGDRSIMFTVQNED

SEQ ID NO: 651 - protein, 164 aa, Homo Sapiens
TPVSQTTTAATASVRSTKDPCPSQPPVFPAAKQCPALEVTWPEVEVPLNGTLSLSCVACSRFPNFSILYWLGNGSFIEHLPGRLWEGSTSRERGSTGTQLCKALVLEQLTPALHSTNFSCVLVDPEQVVQRHVVLAQLWAGLRATLPPTQEALPSSHSSPQQQG

SEQ ID NO: 652 - protein, 308 aa, Homo Sapiens
CTSRPHITVVEGEPFYLKHCSCSLAHEIETTTKSWYKSSGSQEHVELNPRSSSRIALHDCVLEFWPVELNDTGSYFFQMKNYTQKWKLNVIRRNKHSCFTERQVTSKIVEVKKFFQITCENSYYQTLVNSTSLYKNCKKLLLENNKNPTIKKNAEFEDQGYYSCVHFLHHNGKLFNITKTFNITIVEDRSNIVPVLLGPKLNHVAVELGKNVRLNCSALLNEEDVIYWMFGEENGSDPNIHEEKEMRIMTPEGKWHASKVLRIENIGESNLNVLYNCTVASTGGTDTKSFILVRKADMADIPGHVFTR

SEQ ID NO: 653 - protein, 337 aa, Homo Sapiens
FNISGCSTKKLLWTYSTRSEEEFVLFCDLPEPQKSHFCHRNRLSPKQVPEHLPFMGSNDLSDVQWYQQPSNGDPLEDIRKSYPHIIQDKCTLHFLTPGVNNSGSYICRPKMIKSPYDVACCVKMILEVKPQTNASCEYSASHKQDLLLGSTGSISCPSLSCQSDAQSPAVTWYKNGKLLSVERSNRIVVDEVYDYHQGTYVCDYTQSDTVSSWTVRAVVQVRTIVGDTKLKPDILDPVEDTLEVELGKPLTISCKARFGFERVFNPVIKWYIKDSDLEWEVSVPEAKSIKSTLKDEIIERNIILEKVTQRDLRRKFVCFVQNSIGNTTQSVQLKEKR

SEQ ID NO: 654 - protein, 153 aa, Homo Sapiens
LRRCLISTDMHHIEESFQEIKRAIQAKDTFPNVTILSTLETLQIIKPLDVCCVTKNLLAFYVDRVFKDHQEPNPKILRKISSIANSFLYMQKTLRQCQEQRQCHCRQEATNATRVIHDNYDQLEVHAAAIKSLGELDVFLAWINKNHEVMFSA

SEQ ID NO: 655 - protein, 159 aa, Homo Sapiens
SAPFSFLSNVKYNFMRIIKYEFILNDALNQSIIRANDQYLTAAALHNLDEAVKFDMGAYKSSKDDAKITVILRISKTQLYVTAQDEDQPVLLKEMPEIPKTITGSETNLLFFWETHGTKNYFTSVAHPNLFIATKQDYWVCLAGGPPSITDFQILENQA

SEQ ID NO: 656 - protein, 153 aa, Homo Sapiens
APVRSLNCTLRDSQQKSLVMSGPYELKALHLQGQDMEQQVVFSMSFVQGEESNDKIPVALGLKEKNLYLSCVLKDDKPTLQLESVDPKNYPKKKMEKRFVFNKIEINNKLEFESAQFPNWYISTSQAENMPVFLGGTKGGQDITDFTMQFVSS

SEQ ID NO: 657 - protein, 152 aa, Homo Sapiens [sequence omitted]

SEQ ID NO: 658 - protein, 154 aa, Homo Sapiens
VLSGALCFRMKDSALKVLYLHNNQLLAGGLHAGKVIKGEEISVVPNRWLDASLSPVILGVQGGSQCLSCGVGQEPTLTLEPVNIMELYLGAKESKSFTFYRRDMGLTSSFESAAYPGWFLCTVPEADQPVRLTQLPENGGWNAPITDFYFQQCD

SEQ ID NO: 659 - protein, 153 aa, Homo Sapiens
KIDTPQQGSIQDINHRVWVLQDQTLIAVPRKDRMSPVTIALISCRHVETLEKDRGNPIYLGLNGLNLCLMCAKVGDQPTLQLKEKDIMDLYNQPEPVKSFLFYHSQSGRNSTFESVAFPGWFIAVSSEGGCPLILTQELGKANTTDFGLTMLF

SEQ ID NO: 660 - protein, 173 aa, Homo Sapiens
VHTSPKVKNLNPKKFSIHDQDHKVLVLDSGNLIAVPDKNYIRPEIFFALASSLSSASAEKGSPILLGVSKGEFCLYCDKDKGQSHPSLQLKKEKLMKLAAQKESARRPFIFYRAQVGSWNMLESAAHPGWFICTSCNCNEPVGVTDKFENRKHIEFSFQPVCKAEMSPSEVSD

SEQ ID NO: 661 - protein, 152 aa, Homo Sapiens
SMCKPITGTINDLNQQVWTLQGQNLVAVPRSDSVTPVTVAVITCKYPEALEQGRGDPIYLGIQNPEMCLYCEKVGEQPTLQLKEQKIMDLYGQPEPVKPFLFYRAKTGRTSTLESVAFPDWFIASSKRDQPIILTSELGKSYNTAFELNIND

SEQ ID NO: 662 - protein, 319 aa, Homo Sapiens
LEADKCKEREEKIILVSSANEIDVRPCPLNPNEHKGTITWYKDDSKTPVSTEQASRIHQHKEKLWFVPAKVEDSGHYYCVVRNSSYCLRIKISAKFVENEPNLCYNAQAIFKQKLPVAGDGGLVCPYMEFFKNENNELPKLQWYKDCKPLLLDNIHFSGVKDRLIVMNVAEKHRGNYTCHASYTYLGKQYPITRVIEFITLEENKPTRPVIVSPANETMEVDLGSQIQLICNVTGQLSDIAYWKWNGSVIDEDDPVLGEDYYSVENPANKRRSTLITVLNISEIESRFYKHPFTCFAKNTHGIDAAYIQLIYPVTNFQK

SEQ ID NO: 663 - protein, 330 aa, Homo Sapiens
FTLQPAAHTGAARSCRFRGRHYKREFRLEGEPVALRCPQVPYWLWASVSPRINLTWHKNDSARTVPGEEETRMWAQDGALWLLPALQEDSGTYVCTTRNASYCDKMSIELRVFENTDAFLPFISYPQILTLSTSGVLVCPDLSEFTRDKTDVKIQWYKDSLLLDKDNEKFLSVRGTTHLLVHDVALEDAGYYRCVLTFAHEGQQYNITRSIELRIKKKKEETIPVIISPLKTISASLGSRLTIPCKVFLGTGTPLTTMLWWTANDTHIESAYPGGRVTEGPRQEYSENNENYIEVPLIFDPVTREDLHMDFKCVVHNTLSFQTLRTTVKE

SEQ ID NO: 664 - protein, 336 aa, Homo Sapiens
SERCDDWGLDTMRQIQVFEDEPARIKCPLFEHFLKFNYSTAHSAGLTLIWYWTRQDRDLEEPINFRLPENRISKEKDVLWFRPTLLNDTGNYTCMLRNTTYCSKVAFPLEVVQKDSCFNSPMKLPVHKLYIEYGIQRITCPNVDGYFPSSVKPTITWYMGCYKIQNFNNVIPEGMNLSFLIALISNNGNYTCVVTYPENGRTFHLTRTLTVKVVGSPKNAVPPVIHSPNDHVVYEKEPGEELLIPCTVYFSFLMDSRNEVWWTIDGKKPDDITIDVTINESISHSRTEDETRTQILSIKKVTSEDLKRSYVCHARSAKGEVAKAAKVKQKGNRCGQ

SEQ ID NO: 665 - protein, 339 aa, Homo Sapiens
LKVVTKRGSADGCTDWSIDIKKYQVLVGEPVRIKCALFYGYIRTNYSLAQSAGLSLMWYKSSGPGDFEEPIAFDGSRMSKEEDSIWFRPTLLQDSGLYACVIRNSTYCMKVSISLTVGENDTGLCYNSKMKYFEKAELSKSKEISCRDIEDFLLPTREPEILWYKECRTKTWRPSIVFKRDTLLIREVREDDIGNYTCELKYGGFVVRRTTELTVTAPLTDKPPKLLYPMESKLTIQETQLGDSANLTCRAFFGYSGDVSPLIYWMKGEKFIEDLDENRVWESDIRILKEHLGEQEVSISLIVDSVEEGDLGNYSCYVENGNGRRHASVLLHKRELMYT

SEQ ID NO: 666 - protein, 338 aa, Homo Sapiens
TNLKMVSKRNSVDGCIDWSVDLKTYMALAGEPVRVKCALFYSYIRTNYSTAQSTGLRLMWYKNKGDLEEPIIFSEVRMSKEEDSIWFHSAEAQDSGFYTCVLRNSTYCMKVSMSLTVAENESGLCYNSRIRYLEKSEVTKRKEISCPDMDDFKKSDQEPDVVWYKECKPKMWRSIIIQKGNALLIQEVQEEDGGNYTCELKYEGKLVRRTTELKVTALLTDKPPKPLFPMENQPSVIDVQLGKPLNIPCKAFFGFSGESGPMIYWMKGEKFIEELAGHIREGEIRLLKEHLGEKEVELALIFDSVVEADLANYTCHVENRNGRKHASVLLRKKDLIYK

SEQ ID NO: 667 - protein, 310 aa, Homo Sapiens
KFSKQSWGLENEALIVRCPRQGKPSYTVDWYYSQTNKSIPTQERNRVFASGQLLKFLPAAVADSGIYTCIVRSPTFNRTGYANVTIYKKQSDCNVPDYLMYSTVSGSEKNSKIYCPTIDLYNWTAPLEWFKNCQALQGSRYRAHKSFLVIDNVMTEDAGDYTCKFIHNENGANYSVTATRSFTVKDEQGFSLFPVIGAPAQNEIKEVEIGKNANLTCSACFGKGTQFLAAVLWQLNGTKITDFGEPRIQQEEGQNQSFSNGLACLDMVLRIADVKEEDLLLQYDCLALNLHGLRRHTVRLSRKNPSKECF

SEQ ID NO: 668 - protein, 217 aa, Homo Sapiens
MTGLVSLSYFPLSTRSCALQSCSPVWGCGPCCSAGCPSPFHCLSQQDCNEIKGERFTVLETRLLVSNVSAEDRGNYACQAILTHSGKQYEVLNGITVSIKRAGYGGSVPKIIYPKNHSIEVQLGTTLIVDCNVTDTKDNTNLRCWRVNNTLVDDYYDESKRIREGVETHVSFREHNLYTVNITFLEVKMEDYGLPFMCHAGVSTAYIILQLPAPDFR

SEQ ID NO: 669 - protein, 152 aa, Homo Sapiens
RPSGRKSSKMQAFRIWDVNQKTFYLRNNQLVAGYLQGPNVNLEEKIDVVPIEPHALFLGIHGGKMCLSCVKSGDETRLQLEAVNITDLSENRKQDKRFAFIRSDSGPTTSFESAACPGWFLCTAMEADQPVSLTNMPDEGVMVTKFYFQEDE

SEQ ID NO: 670 - protein, 133 aa, Homo Sapiens [sequence omitted]

SEQ ID NO: 671 - protein, 152 aa, Homo Sapiens
LKTLNLGSCVIATNLQEIRNGFSEIRGSVQAKDGNIDIRILRRTESLQDTKPANRCCLLRHLLRLYLDRVFKNYQTPDHYTLRKISSLANSFLTIKKDLRLCHAHMTCHCGEEAMKKYSQILSHFEKLEPQAAVVKALGELDILLQWMEETE

SEQ ID NO: 672 - protein, 221 aa, Homo Sapiens
VPCVSGGLPKPANITFLSINMKNVLQWTPPEGLQGVKVTYTVQYFIYGQKKWLNKSECRNINRTYCDLSAETSDYEHQYYAKVKAIWGTKCSKWAESGRFYPFLETQIGPPEVALTTDEKSISVVLTAPEKWKRNPEDLPVSMQQIYSNLKYNVSVLNTKSNRTWSQCVTNHTLVLTWLEPNTLYCVHVESFVPGPPRRAQPSEKQCARTLKDQSSEFKAK

SEQ ID NO: 673 - protein, 204 aa, Homo Sapiens
DEVAILPAPQNLSVLSTNMKHLLMWSPVIAPGETVYYSVEYQGEYESLYTSHIWIPSSWCSLTEGPECDVTDDITATVPYNLRVRATLGSQTSAWSILKHPFNRNSTILTRPGMEITKDGFHLVIELEDLGPQFEFLVAYWRREPGAEEHVKMVRSGGIPVHLETMEPGAAYCVKAQTFVKAIGRYSAFSQTECVEVQGEAIPL

SEQ ID NO: 674 - protein, 133 aa, Homo Sapiens [sequence omitted]

SEQ ID NO: 675 - protein, 213 aa, Homo Sapiens
CPDLVCYTDYLQTVICILEMWNLHPSTLTLTWQDQYEELKDEATSCSLHRSAHNATHATYTCHMDVFHFMADDIFSVNITDQSGNYSQECGSFLLAESIKPAPPFNVTVTFSGQYNISWRSDYEDPAFYMLKGKLQYELQYRNRGDPWAVSPRRKLISVDSRSVSLLPLEFRKDSSYELQVRAGPMPGSSYQGTWSEWSDPVIFQTQSEELKE

SEQ ID NO: 676 - protein, 146 aa, Homo Sapiens
APISSHCRLDKSNFQQPYITNRTFMLAKEASLADNNTDVRLIGEKLFHGVSMSERCYLMKQVLNFTLEEVLFPQSDRFQPYMQEVVPFLARLSNRLSTCHIEGDDLHIQRNVQKLKDTVKKLGESGEIKAIGELDLLFMSLRNACI

SEQ ID NO: 677 - protein, 213 aa, Homo Sapiens
HAPEDPSDLLQHVKFQSSNFENILTWDSGPEGTPDTVYSIEYKTYGERDWVAKKGCQRITRKSCNLTVETGNLTELYYARVTAVSAGGRSATKMTDRFSSLQHTTLKPPDVTCISKVRSIQMIVHPTPTPIRAGDGHRLTLEDIFHDLFYHLELQVNRTYQMHLGGKQREYEFFGLTPDTEFLGTIMICVPTWAKESAPYMCRVKTLPDRTWT

SEQ ID NO: 678 - protein, 210 aa, Homo Sapiens
TQSTHESLKPQRVQFQSRNFHNILQWQPGRALTGNSSVYFVQYKIYGQRQWKNKEDCWGTQELSCDLTSETSDIQEPYYGRVRAASAGSYSEWSMTPRFTPWWETKIDPPVMNITQVNGSLLVILHAPNLPYRYQKEKNVSIEDYYELLYRVFIINNSLEKEQKVYEGAHRAVEIEALTPHSSYCVVAEIYQPMLDRRSQRSEERCVEIP

SEQ ID NO: 679 - protein, 170 aa, Homo Sapiens
RAVPGGSSPAWTQCQQLSQKLCTLAWSAHPLVGHMDLREEGDEETTNDVPHIQCGDGCDPQGLRDNSQFCLQRIHQGLIFYEKLLGSDIFTGEPSLLPDSPVGQLHASLLGLSQLLQPEGHHWETQQIPSLSPSQPWQRLLLRFKILRSLQAFVAVAARVFAHGAATLSP

SEQ ID NO: 680 - protein, 332 aa, Homo Sapiens
GITNINCSGHIWVEPATIFKMGMNISIYCQAAIKNCQPRKLHFYKNGIKERFQITRINKTTARLWYKNFLEPHASMYCTAECPKHFQETLICGKDISSGYPPDIPDEVTCVIYEYSGNMTCTWNAGKLTYIDTKYVVHVKSLETEEEQQYLTSSYINISTDSLQGGKKYLVWVQAANALGMEESKQLQIHLDDIVIPSAAVISRAETINATVPKTIIYWDSQTTIEKVSCEMRYKATTNQTWNVKEFDTNFTYVQQSEFYLEPNIKYVFQVRCQETGKRYWQPWSSLFFHKTPETVPQVTSKAFQHDTWNSGLTVASISTGHLTSDNRGDIG

SEQ ID NO: 681 - protein, 155 aa, Homo Sapiens
QEFHFGPCQVKGVVPQKLWEAFWAVKDTMQAQDNITSARLLQQEVLQNVSDAESCYLVHTLLEFYLKTVFKNYHNRTVEVRTLKSFSTLANNFVLIVSQLQPSQENEMFSIRDSAHRRFLLFRRAFKQLDVEAALTKALGEVDILLTWMQKFYKL

SEQ ID NO: 682 - protein, 145 aa, Homo Sapiens
YSHWPSCCPSKGQDTSEELLRWSTVPVPPLEPARPNRHPESCRASEDGPLNSRAISPWRYELDRDLNRLPQDLYHARCLCPHCVSLQTGSHMDPRGNSELLYHNQTVFYRRPCHGEKGTHKGYCLERRLYRVSLACVCVRPRVMG

SEQ ID NO: 683 - protein, 150 aa, Homo Sapiens
KHKQSSFTKSCYPRGTLSQAVDALYIKAAWLKATIPEDRIKNIRLLKKKTKKQFMKNCQFQEQLLSFFMEDVFGQLQLQGCKKIRFVEDFHSLRQKLSHCISCASSAREMKSITRMKRIFYRIGNKGIYKAISELDILLSWIKKLLESSQ

SEQ ID NO: 684 - protein, 215 aa, Homo Sapiens
FPRPPGRPQLSLQELRREFTVSLHLARKLLAEVRGQAHRFAESHLPGVNLYLLPLGEQLPDVSLTFQAWRRLSDPERLCFISTTLQPFHALLGGLGTQGRWTNMERMQLWAMRLDLRDLQRHLRFQVLAAGFNLPEEEEEEEEEEEEERKGLLPGALGSALQGPAQVSWPQLLSTYRLLHSLELVLSRAVRELLLLSKAGHSVWPLGFPTLSPQP

SEQ ID NO: 685 - protein, 484 aa, Homo Sapiens
QGSAGPLQCYGVGPLGDLNCSWEPLGDLGAPSELHLQSQKYRSNKTQTVAVAAGRSWVAIPREQLTMSDKLLVWGTKAGQPLWPPVFVNLETQMKPNAPRLGPDVDFSEDDPLEATVHWAPPTWPSHKVLICQFHYRRCQEAAWTLLEPELKTIPLTPVEIQDLELATGYKVYGRCRMEKEEDLWGEWSPILSFQTPPSAPKDVWVSGNLCGTPGGEEPLLLWKAPGPCVQVSYKVWFWVGGRELSPEGITCCCSLIPSGAEWARVSAVNATSWEPLTNLSLVCLDSASAPRSVAVSSIAGSTELLVTWQPGPGEPLEHVVDWARDGDPLEKLNWVRLPPGNLSALLPGNFTVGVPYRITVTAVSASGLASASSVWGFREELAPLVGPTLWRLQDAPPGTPAIAWGEVPRHQLRGHLTHYTLCAQSGTSPSVCMNVSGNTQSVTLPDLPWGPCELWVTASTIAGQGPPGPILRLHLPDNTLRWK

SEQ ID NO: 686 - protein, 175 aa, Homo Sapiens
VPVARLRGALPDARGCHIAQFKSLSPQELQAFKRAKDALEESLLLKDCKCRSRLFPRTWDLRQLQVRERPVALEAELALTLKVLEATADTDPALGDVLDQPLHTLHHILSQLRACIQPQPTAGPRTRGRLHHWLHRLQEAPKKESPGCLEASVTFNLFRLLTRDLNCVASGDLCV

SEQ ID NO: 687 - protein, 208 aa, Homo Sapiens
RPRLAPPQNVTLLSQNFSVYLTWLPGLGNPQDVTYFVAYQSSPTRRRWREVEECAGTKELLCSMMCLKKQDLYNKFKGRVRTVSPSSKSPWVESEYLDYLFEVEPAPPVLVLTQTEEILSANATYQLPPCMPPLDLKYEVAFWKEGAGNKTLFPVTPHGQPVQITLQPAASEHHCLSARTIYTFSVPKYSKFSKPTCFLLEVPEANWA

SEQ ID NO: 688 - protein, 181 aa, Homo Sapiens
GPVPTSKPTTTGKGCHIGRFKSLSPQELASFKKARDALEESLKLKNWSCSSPVFPGNWDLRLLQVRERPVALEAELALTLKVLEAAAGPALEDVLDQPLHTLHHILSQLQACIQPQPTAGPRPRGRLHHWLHRLQEAPKKESAGCLEASVTFNLFRLLTRDLKYVADGNLCLRTSTHPEST

SEQ ID NO: 689 - protein, 219 aa, Homo Sapiens
ELCDDDPPEIPHATFKAMAYKEGTMLNCECKRGFRRIKSGSLYMLCTGNSSHSSWDNQCQCTSSATRNTTKQVTPQPEEQKERKTTEMQSPMQPVDQASLPGHCREPPPWENEATERIYHFVVGQMVYYQCVQGYRALHRGPAESVCKMTHGKTRWTQPQLICTGEMETSQFPGEEKPQASPEGRPESETSCLVTTTDFQIQTEMAATMETSIFTTEYQ

SEQ ID NO: 690 - protein, 214 aa, Homo Sapiens
AVNGTSQFTCFYNSRANISCVWSQDGALQDTSCQVHAWPDRRRWNQTCELLPVSQASWACNLILGAPDSQKLTTVDIVTLRVLCREGVRWRVMAIQDFKPFENLRLMAPISLQVVHVETHRCNISWEISQASHYFERHLEFEARTLSPGHTWEEAPLLTLKQKQEWICLETLTPDTQYEFQVRVKPLQGEFTTWSPWSQPLAFRTKPAALGKDT

SEQ ID NO: 691 - protein, 240 aa, Homo Sapiens
LNTTILTPNGNEDTTADFFLTTMPTDSLSVSTLPLPEVQCFVFNVEYMNCTWNSSSEPQPTNLTLHYWYKNSDNDKVQKCSHYLFSEEITSGCQLQKKEIHLYQTFVVQLQDPREPRRQATQMLKLQNLVIPWAPENLTLHKLSESQLELNWNNRFLNHCLEHLVQYRTDWDHSWTEQSVDYRHKFSLPSVDGQKRYTFRVRSRFNPLCGSAQHWSEWSHPIHWGSNTSKENPFLFALEA

SEQ ID NO: 692 - protein, 133 aa, Homo Sapiens
APMTQTTPLKTSWVNCSNMIDEIITHLKQPPLPLLDFNNLNGEDQDILMENNLRRPNLEAFNRAVKSLQNASAIESILKNLLPCLPLATAAPTRHPIHIKDGDWNEFRRKLTFYLKTLENAQAQQTTLSLAIF

SEQ ID NO: 693 - protein, 141 aa, Homo Sapiens [sequence omitted]

SEQ ID NO: 694 - protein, 500 aa, Homo Sapiens
SLPAKPENISCVYYYRKNLTCTWSPGKETSYTQYTVKRTYAFGEKHDNCTTNSSTSENRASCSFFLPRITIPDNYTIEVEAENGDGVIKSHMTYWRLENIAKTEPPKIFRVKPVLGIKRMIQIEWIKPELAPVSSDLKYTLRFRTVNSTSWMEVNFAKNRKDKNQTYNLTGLQPFTEYVIALRCAVKESKFWSDWSQEKMGMTEEEAPCGLELWRVLKPAEADGRRPVRLLWKKARGAPVLEKTLGYNIWYYPESNTNLTETMNTTNQQLELHLGGESFWVSMISYNSLGKSPVATLRIPAIQEKSFQCIEVMQACVAEDQLVVKWQSSALDVNTWMIEWFPDVDSEPTTLSWESVSQATNWTIQQDKLKPFWCYNISVYPMLHDKVGEPYSIQAYAKEGVPSEGPETKVENIGVKTVTITWKEIPKSERKGIICNYTIFYQAEGGKGFSKTVNSSILQYGLESLKRKTSYIVQVMASTSAGGTNGTSINFKTLSFSVFE

SEQ ID NO: 695 - protein, 204 aa, Homo Sapiens
AWVSACDTEDTVGHLGPWRDKDPALWCQLCLSSQHQAIERFYDKMQNAESGRGQVMSSLAELEDDFKEGYLETVAAYYEEQHPELTPLLEKERDGLRCRGNRSPVPDVEDPATEEPGESFCDKVMRWFQAMLQRLQTWWHGVLAWVKEKVVALVHAVQALWKQFQSFCCSLSELFMSSFQSYGAPRGDKEELTPQKCSEPQSSK

SEQ ID NO: 696 - protein, 270 aa, Homo Sapiens
MKPKMKYSTNKISTAKWKNTASKALCFKLGKSQQKAKEVCPMYFMKLRSGLMIKKEACYFRRETTKRPSLKTGRKHKRHLVLAACQQQSTVECFAFGISGVQKYTRALHDSSITGISPITEYLASLSTYNDQSITFALEDESYEIYVEDLKKDEKKDKVLLSYYESQHPSNESGDGVDGKMLMVTLSPTKDFWLHANNKEHSVELHKCEKPLPDQAFFVLHNMHSNCVSFECKTDPGVFIGVKDNHLALIKVDSSENLCTENILFKLSET

SEQ ID NO: 697 - protein, 222 aa, Homo Sapiens
NEPLEMWPLTQNEECTVTGFLRDKLQYRSRLQYMKHYFPINYKISVPYEGVFRIANVTRLQRAQVSERELRYLWVLVSLSATESVQDVLLEGHPSWKYLQEVQTLLLNVQQGLTDVEVSPKVESVLSLLNAPGPNLKLVRPKALLDNCFRVMELLYCSCCKQSSVLNWQDCEVPSPQSCSPEPSLQYAATQLYPPPPWSPSSPPHSTGSVRPVRAQGEGLLP

SEQ ID NO: 698 - protein, 153 aa, Homo Sapiens
REAAPKSYAIRDSRQMVWVLSGNSLIAAPLSRSIKPVTLHLIACRDTEFSDKEKGNMVYLGIKGKDLCLFCAEIQGKPTLQLKEKNIMDLYVEKKAQKPFLFFHNKEGSTSVFQSVSYPGWFIATSTTSGQPIFLTKERGITNNTNFYLDSVE

SEQ ID NO: 699 - protein, 287 aa, Homo Sapiens
TKEDPNPPITNLRMKAKAQQLTWDLNRNVTDIECVKDADYSMPAVNNSYCQFGAISLCEVTNYTVRVANPPFSTWILFPENSGKPWAGAENLTCWIHDVDFLSCSWAVGPGAPADVQYDLYLNVANRRQQYECLHYKTDAQGTRIGCRFDDISRLSSGSQSSHILVRGRSAAFGIPCTDKFVVFSQIEILTPPNMTAKCNKTHSFMHWKMRSHFNRKFRYELQIQKRMQPVITEQVRDRTSFQLLNPGTYTVQIRARERVYEFLSAWSTPQRFECDQEEGANTRAWR

SEQ ID NO: 700 - protein, 129 aa, Homo Sapiens [sequence omitted]

SEQ ID NO: 701 - protein, 207 aa, Homo Sapiens
MKVLQEPTCVSDYMSISTCEWKMNGPTNCSTELRLLYQLVFLLSEAHTCVPENNGGAGCVCHLLMDDVVSADNYTLDLWAGQQLLWKGSFKPSEHVKPRAPGNLTVHTNVSDTLLLTWSNPYPPDNYLYNHLTYAVNIWSENDPADFRIYNVTYLEPSLRIAASTLKSGISYRARVRAWAQCYNTTWSEWSPSTKWHNSYREPFEQH

SEQ ID NO: 702 - protein, 115 aa, Homo Sapiens
IPTEIPTSALVKETLALLSTHRTLLIANETLRIPVPVHKNHQLCTEEIFQGIGTLESQTVQGGTVERLFKNLSLIKKYIDGQKKKCGEERRRVNQFLDYLQEFLGVMNTEWIIES

SEQ ID NO: 703 - protein, 315 aa, Homo Sapiens
DLLPDEKISLLPPVNFTIKVTGLAQVLLQWKPNPDQEQRNVNLEYQVKINAPKEDDYETRITESKCVTILHKGFSASVRTILQNDHSLLASSWASAELHAPPGSPGTSIVNLTCTTNTTEDNYSRLRSYQVSLHCTWLVGTDAPEDTQYFLYYRYGSWTEECQEYSKDTLGRNIACWFPRTFILSKGRDWLAVLVDGSSKHSAIRPFDQLFALHAIDQINPPLNVTAEIEGTRLSIQWEKPVSAFPIHCFDYEVKIHNTRNGYLQIEKLMTNAFISIIDDLSKYDVQVRAAVSSMCREAGLWSEWSQPIYVGFSR

SEQ ID NO: 704 - protein, 183 aa, Homo Sapiens
VPPGEDSKDVAAPHRQPLTSSERIDKQIRYILDGISALRKETCNKSNMCESSKEALAENNLNLPKMAEKDGCFQSGFNEETCLVKIITGLLEFEVYLEYLQNRFESSEEQARAVQMSTKVLIQFLQKKAKNLDAITTPDPTTNASLLTKLQAQNQWLQDMTTHLILRSFKEFLQSSLRALRQM

SEQ ID NO: 705 - protein, 346 aa, Homo Sapiens
LAPRRCPAQEVARGVLTSLPGDSVTLTCPGVEPEDNATVHWVLRKPAAGSHPSRWAGMGRRLLLRSVQLHDSGNYSCYRAGRPAGTVHLLVDVPPEEPQLSCFRKSPLSNVVCEWGPRSTPSLTTKAVLLVRKFQNSPAEDFQEPCQYSQESQKFSCQLAVPEGDSSFYIVSMCVASSVGSKFSKTQTFQGCGILQPDPPANITVTAVARNPRWLSVTWQDPHSWNSSFYRLRFELRYRAERSKTFTTWMVKDLQHHCVIHDAWSGLRHVVQLRAQEEFGQGEWSEWSPEAMGTPWTESRSPPAENEVSTPMQALTTNKDDDNILFRDSANATSLPVQDSSSVPLP

SEQ ID NO: 706 - protein, 597 aa, Homo Sapiens
ELLDPCGYISPESPVVQLHSNFTAVCVLKEKCMDYFHVNANYIVWKTNHFTIPKEQYTIINRTASSVTFTDIASLNIQLTCNILTFGQLEQNVYGITIISGLPPEKPKNLSCIVNEGKKMRCEWDRGRETHLETNFTLKSEWATHKFADCKAKRDTPTSCTVDYSTVYFVNIEVWVEAENALGKVTSDHINFDPVYKVKPNPPHNLSVINSEELSSILKLTWTNPSIKSVIILKYNIQYRTKDASTWSQIPPEDTASTRSSFTVQDLKPFTEYVFRIRCMKEDGKGYWSDWSEEASGITYEDRPSKAPSFWYKIDPSHTQGYRTVQLVWKTLPPFEANGKILDYEVTLTRWKSHLQNYTVNATKLTVNLTNDRYVATLTVRNLVGKSDAAVLTIPACDFQATHPVMDLKAFPKDNMLWVEWTTPRESVKKYILEWCVLSDKAPCITDWQQEDGTVHRTYLRGNLAESKCYLITVTPVYADGPGSPESIKAYLKQAPPSKGPTVRTKKVGKNEAVLEWDQLPVDVQNGFIRNYTIFYRTIIGNETAVNVDSSHTEYTLSSLTSDTLYMVRMAAYTDEGGKDGPEFTFTTPKFAQGEIE

SEQ ID NO: 707 - protein, 152 aa, Homo Sapiens
DCDIEGKDGKQYESVLMVSIDQLLDSMKEIGSNCLNNEFNFFKRHICDANKEGMFLFRAARKLRQFLKMNSTGDFDLHLLKVSEGTTILLNCTGQVKGRKPAALGEAQPTKSLEENKSLKEQKKLNDLCFLKRLLQEIKTCWNKILMGTKEH

SEQ ID NO: 708 - protein, 219 aa, Homo Sapiens
ESGYAQNGDLEDAELDDYSFSCYSQLEVNGSQHSLTCAFEDPDVNITNLEFEICGALVEVKCLNFRKLQEIYFIETKKFLLIGKSNICVKVGEKSLTCKKIDLTTIVKPEAPFDLSVVYREGANDFVVTFNTSHLQKKYVKVLMHDVAYRQEKDENKWTHVNLSSTKLTLLQRKLQPAAMYEIKVRSIPDHYFKGFWSEWSPSYYFRTPEINNSSGEMD

SEQ ID NO: 709 - protein, 77 aa, Homo Sapiens
AVLPRSAKELRCQCIKTYSKPFHPKFIKELRVIESGPHCANTEIIVKLSDGRELCLDPKENWVQRVVEKFLKRAENS

SEQ ID NO: 710 - protein, 48 aa, Homo Sapiens
MEDFNMESDSFEDFWKGEDLSNYSYSSTLPPFLLDAAPCEPESLEINK

SEQ ID NO: 711 - protein, 126 aa, Homo Sapiens
QGCPTLAGILDINFLINKMQEDPASKCHCSANVTSCLCLGIPSDNCTRPCFSERLSQMTNTTMQTRYPLIFSRVKKSVEVLKNNKCPYFSCEQPCNQTTAGNALTFLKSLLEIFQKEKMRGMRGKI

SEQ ID NO: 712 - protein, 218 aa, Homo Sapiens
SVTGEGQGPRSRTFTCLTNNILRIDCHWSAPELGQGSSPWLLFTRLLAAHISASCGAVSAPSCCHLRQCSCHLTISPSLSTTACLGGSRSAWWTRSTCPGDTSNISSGHCILTWSISPALEPMTTLLSYELAFKKQEEAWEQAQHRDHIVGVTWLILEAFELDPGFIHEARLRVQMATLEDDVVEEERYTGQWSEWSQPVCFQAPQRQGPLIPPWGWP

SEQ ID NO: 713 - protein, 144 aa, Homo Sapiens
LLVTVQHTERYVTLFASIILKCDYTTSAQLQDVVVTWRFKSFCKDPIFDYYSASYQAALSLGQDPSNDCNDNQREVRIVAQRRGQNEPVLGVDYRQRKITIQNRADLVINEVMWWDHGVYYCTIEAPGDTSGDPDKEVKLIVLH

SEQ ID NO: 714 - protein, 861 aa, Homo Sapiens
GEQIAEFSIHLLGKQYREELQDSSSFHHQHLEEEFISEVENAFTGLPGYKEIRVLEFRSPKENDSGVDVYYAVTFNGEAISNTTWDLISLHSNKVENHGLVELDDKPTVVYTISNFRDYIAETLQQNFLLGNSSLNPDPDSLQLINVRGVLRHQTEDLVWNTQSSSLQATPSSILDNTFQAAWPSADESITSSIPPLDFSSGPPSATGRELWSESPLGDLVSTHKLAFPSKMGLSSSPEVLEVSSLTLHSVTPAVLQTGLPVASEERTSGSHLVEDGLANVEESEDFLSIDSLPSSSFTQPVPKETIPSMEDSDVSLTSSPYLTSSIPFGLDSLTSKVKDQLKVSPFLPDASMEKELIFDGGLGSGSGQKVDLITWPRSETSSEKSAEPLSKPWLEDDDSLLPAEIEDKKLVLVDKMDSTDQISKHSKYEHDDRSIHFPEEEPLSGPAVPIFADTAAESASLTLPKHISEVPGVDDYSVTKAPLILTSVAISASTDKSDQADAILREDMEQITESSNYEWFDSEVSMVKPDMQTLWTILPESERVWTRTSSLEKLSRDILASTPQSADRLWLSVTQSTKLPPTTISTLLEDEVIMGVQDISLELDRIGTDYYQPEQVQEQNGKVGSYVEMSTSVHSTEMVSVAWPTEGGDDLSYTQTSGALVVFFSLRVTNMMFSEDLFNKNSLEYKALEQRFLELLVPYLQSNLTGFQNLEILNFRNGSIVVNSRMKFANSVPPNVNNAVYMILEDFCTTAYNTMNLAIDKYSLDVESGDEANPCKFQACNEFSECLVNPWSGEAKCRCFPGYLSVEERPCQSLCDLQPDFCLNDGKCDIMPGHGAICRCRVGENWWYRGKHCEEFVSEP

SEQ ID NO: 715 - protein, 158 aa, Homo Sapiens
AAPRRCLLSHYRSLEPRTLAAAKALRDRYEEEALSWGQRNCSFRPRRDPPRPSSCARLRHVARGIADAQAVLSGLHRSELLPGAGPILELLAAAGRDVAACLELARPGSSRKVPGAQKRRHKPRRADSPRCRKASVVFNLLRLLTWELRLAAHSGPCL

SEQ ID NO: 716 - protein, 86 aa, Homo Sapiens
FVNQHLCGSHLVEALYLVCGERGFFYTPKTRREAEDLQVGQVELGGGPGAGSLQPLALEGSLQKRGIVEQCCTSICSLYQLENYCN

SEQ ID NO: 717 - protein, 111 aa, Homo Sapiens
LGPAPTPEMREKLCGHHFVRALVRVCGGPRWSTEARRPAAGGDRELLQWLERRHLLHGLVADSNLTLGPGLQPLPQTSHHHRHHRAAATNPARYCCLSGCTQQDLLTLCPY

SEQ ID NO: 718 - protein, 113 aa, Homo Sapiens
KESVRLCGLEYIRTVIYICASSRWRRHLEGIPQAQQAETGNSFQLPHKREFSEENPAQNLPKVDASGEDRLWGGQMPTEELWKSKKHSVMSRQDLQTLCCTDGCSMTDLSALC

SEQ ID NO: 719 - protein, 178 aa, Homo Sapiens
RELSDISSARKLCGRYLVKEIEKLCGHANWSQFRFEEETPFSRLIAQASEKVEAYSPYQFESPQTASPARGRGTNPVSTSWEEAVNSWEMQSLPEYKDKKGYSPLGKTREFSSSHNINVYIHENAKFQKKRRNKIKTLSNLFWGHHPQRKRRGYSEKCCLTGCTKEELSIACLPYIDF

SEQ ID NO: 720 - protein, 719 aa, Homo Sapiens
HLYPGEVCPGMDIRNNLTRLHELENCSVIEGHLQILLMFKTRPEDFRDLSFPKLIMITDYLLLFRVYGLESLKDLFPNLTVIRGSRLFFNYALVIFEMVHLKELGLYNLMNITRGSVRIEKNNELCYLATIDWSRILDSVEDNYIVLNKDDNEECGDICPGTAKGKTNCPATVINGQFVERCWTHSHCQKVCPTICKSHGCTAEGLCCHSECLGNCSQPDDPTKCVACRNFYLDGRCVETCPPPYYHFQDWRCVNFSFCQDLHHKCKNSRRQGCHQYVIHNNKCIPECPSGYTMNSSNLLCTPCLGPCPKVCHLLEGEKTIDSVTSAQELRGCTVINGSLIINIRGGNNLAAELEANLGLIEEISGYLKIRRSYALVSLSFFRKLRLIRGETLEIGNYSFYALDNQNLRQLWDWSKHNLTITQGKLFFHYNPKLCLSEIHKMEEVSGTKGRQERNDIALKTNGDQASCENELLKFSYIRTSFDKILLRWEPYWPPDFRDLLGFMLFYKEAPYQNVTEFDGQDACGSNSWTVVDIDPPLRSNDPKSQNHPGWLMRGLKPWTQYAIFVKTLVTFSDERRTYGAKSDIIYVQTDATNPSVPLDPISVSNSSSQIILKWKPPSDPNGNITHYLVFWERQAEDSELFELDYCLKGLKLPSRTWSPPFESEDSQKHNQSEYEDSAGECCSCPKTDSQILKELEESSFRKTFEDYLHNVVFVPRPS

SEQ ID NO: 721 - protein, 410 aa, Homo Sapiens
CPEPCDCGEKYGFQIADCAYRDLESVPPGFPANVTTLSLSANRLPGLPEGAFREVPLLQSLWLAHNEIRTVAAGALASLSHLKSLDLSHNLISDFAWSDLHNLSALQLLKMDSNELTFIPRDAFRSLRALRSLQLNHNRLHTLAEGTFTPLTALSHLQINENPFDCTCGIVWLKTWALTTAVSIPEQDNIACTSPHVLKGTPLSRLPPLPCSAPSVQLSYQPSQDGAELRPGFVLALHCDVDGQPAPQLHWHIQIPSGIVEITSPNVGTDGRALPGTPVASSQPRFQAFANGSLLIPDFGKLEEGTYSCLATNELGSAESSVDVALATPGEGGEDTLGRRFHGKAVEGKGCYTVDNEVQPSGPEDNVVIIYLSRAGNPEAAVAEGVPGQLPPGLLLLGQSLLLFFFLTSF

SEQ ID NO: 722 - protein, 571 aa, Homo Sapiens
SCPEPCACVDKYAHQFADCAYKELREVPEGLPANVTTLSLSANKITVLRRGAFADVTQVTSLWLAHNEVRTVEPGALAVLSQLKNLDLSHNFISSFPWSDLRNLSALQLLKMNHNRLGSLPRDALGALPDLRSLRINNNRLRTLAPGTFDALSALSHLQLYHNPFHCGCGLVWLQAWAASTRVSLPEPDSIACASPPALQGVPVYRLPALPCAPPSVHLSAEPPLEAPGTPLRAGLAFVLHCIADGHPTPRLQWQLQIPGGTVVLEPPVLSGEDDGVGAEEGEGEGDGDLLTQTQAQTPTPAPAWPAPPATPRFLALANGSLLVPLLSAKEAGVYTCRAHNELGANSTSIRVAVAATGPPKHAPGAGGEPDGQAPTSERKSTAKGRGNSVLPSKPEGKIKGQGLAKVSILGETETEPEEDTSEGEEAEDQILADPAEEQRCGNGDPSRYVSNHAFNQSAELKPHVFELGVIALDVAEREARVQLTPLAARWGPGPGGAGGAPRPGRRPLRLLYLCPAGGGAAVQWSRVEEGVNAYWFRGLRPGTNYSVCLALAGEACHVQVVFSTKKELPS

SEQ ID NO: 723 - protein, 1113 aa, Homo Sapiens
FNVDVKNSMTFSGPVEDMFGYTVQQYENEEGKWVLIGSPLVGQPKNRTGDVYKCPVGRGESLPCVKLDLPVNTSIPNVTEVKENMTFGSTLVTNPNGGFLACGPLYAYRCGHLHYTTGICSDVSPTFQVVNSIAPVQECSTQLDIVIVLDGSNSIYPWDSVTAFLNDLLERMDIGPKQTQVGIVQYGENVTHEFNLNKYSSTEEVLVAAKKIVQRGGRQTMTALGIDTARKEAFTEARGARRGVKKVMVIVTDGESHDNHRLKKVIQDCEDENIQRFSIAILGSYNRGNLSTEKFVEEIKSIASEPTEKHFFNVSDELALVTIVKTLGERIFALEATADQSAASFEMEMSQTGFSAHYSQDWVMLGAVGAYDWNGTVVMQKASQIIIPRNTTFNVESTKKNEPLASYLGYTVNSATASSGDVLYIAGQPRYNHTGQVIIYRMEDGNIKILQTLSGEQIGSYFGSILTTTDIDKDSNTDILLVGAPMYMGTEKEEQGKVYVYALNQTRFEYQMSLEPIKQTCCSSRQHNSCTTENKNEPCGARFGTAIAAVKDLNLDGFNDIVIGAPLEDDHGGAVYIYHGSGKTIRKEYAQRIPSGGDGKTLKFFGQSIHGEMDLNGDGLTDVTIGGLGGAALFWSRDVAVVKVTMNFEPNKVNIQKKNCHMEGKETVCINATVCFDVKLKSKEDTIYEADLQYRVTLDSLRQISRSFFSGTQERKVQRNITVRKSECTKHSFYMLDKHDFQDSVRITLDFNLTDPENGPVLDDSLPNSVHEYIPFAKDCGNKEKCISDLSLHVATTEKDLLIVRSQNDKFNVSLTVKNTKDSAYNTRTIVHYSPNLVFSGIEAIQKDSCESNHNITCKVGYPFLRRGEMVTFKILFQFNTSYLMENVTIYLSATSDSEEPPETLSDNVVNISIPVKYEVGLQFYSSASEYHISIAANETVPEVINSTEDIGNEINIFYLIRKSGSFPMPELKLSISFPNMTSNGYPVLYPTGLSSSENANCRPHIFEDPFSINSGKKMTTSTDHLKRGTILDCNTCKFATITCNLTSSDISQVNVSLILWKPTFIKSYFSSLNLTIRGELRSENASLVLSSSNQKRELAIQISKDGLPGRVP

SEQ ID NO: 724 - protein, 1103 aa, Homo Sapiens
YNVGLPEAKIFSGPSSEQFGYAVQQFINPKGNWLLVGSPWSGFPENRMGDVYKCPVDLSTATCEKLNLQTSTSIPNVTEMKTNMSLGLILTRNMGTGGFLTCGPLWAQQCGNQYYTTGVCSDISPDFQLSASFSPATQPCPSLIDVVVVCDESNSIYPWDAVKNFLEKFVQGLDIGPTKTQVGLIQYANNPRVVFNLNTYKTKEEMIVATSQTSQYGGDLTNTFGAIQYARKYAYSAASGGRRSATKVMVVVTDGESHDGSMLKAVIDQCNHDNILRFGIAVLGYLNRNALDTKNLIKEIKAIASIPTERYFFNVSDEAALLEKAGTLGEQIFSIEGTVQGGDNFQMEMSQVGFSADYSSQNDILMLGAVGAFGWSGTIVQKTSHGHLIFPKQAFDQILQDRNHSSYLGYSVAAISTGESTHFVAGAPRANYTGQIVLYSVNENGNITVIQAHRGDQIGSYFGSVLCSVDVDKDTITDVLLVGAPMYMSDLKKEEGRVYLFTIKEGILGQHQFLEGPEGIENTRFGSAIAALSDINMDGFNDVIVGSPLENQNSGAVYIYNGHQGTIRTKYSQKILGSDGAFRSHLQYFGRSLDGYGDLNGDSITDVSIGAFGQVVQLWSQSIADVAIEASFTPEKITLVNKNAQIILKLCFSAKFRPTKQNNQVAIVYNITLDADGFSSRVTSRGLFKENNERCLQKNMVVNQAQSCPEHIIYIQEPSDVVNSLDLRVDISLENPGTSPALEAYSETAKVFSIPFHKDCGEDGLCISDLVLDVRQIPAAQEQPFIVSNQNKRLTFSVTLKNKRESAYNTGIVVDFSENLFFASFSLPVDGTEVTCQVAASQKSVACDVGYPALKREQQVTFTINFDFNLQNLQNQASLSFQALSESQEENKADNLVNLKIPLLYDAEIHLTRSTNINFYEISSDGNVPSIVHSFEDVGPKFIFSLKVTTGSVPVSMATVIIHIPQYTKEKNPLMYLTGVQTDKAGDISCNADINPLKIGQTSSSVSFKSENFRHTKELNCRTASCSNVTCWLKDVHMKGEYFVNVTTRIWNGTFASSTFQTVQLTAAAEINTYNPEIYVIEDNTVTIPLMIMKPDEKAEVPT

SEQ ID NO: 725 - protein, 962 aa, Homo Sapiens
LNLDPVQLTFYAGPNGSQFGFSLDFHKDSHGRVAIVVGAPRTLGPSQEETGGVFLCPWRAEGGQCPSLLFDLRDETRNVGSQTLQTFKARQGLGASVVSWSDVIVACAPWQHWNVLEKTEEAEKTPVGSCFLAQPESGRRAEYSPCRGNTLSRIYVENDFSWDKRYCEAGFSSVVTQAGELVLGAPGGYYFLGLLAQAPVADIFSSYRPGILLWHVSSQSLSFDSSNPEYFDGYWGYSVAVGEFDGDLNTTEYVVGAPTWSWTLGAVEILDSYYQRLHRLRGEQMASYFGHSVAVTDVNGDGRHDLLVGAPLYMESRADRKLAEVGRVYLFLQPRGPHALGAPSLLLTGTQLYGRFGSAIAPLGDLDRDGYNDIAVAAPYGGPSGRGQVLVFLGQSEGLRSRPSQVLDSPFPTGSAFGFSLRGAVDIDDNGYPDLIVGAYGANQVAVYRAQPVVKASVQLLVQDSLNPAVKSCVLPQTKTPVSCFNIQMCVGATGHNIPQKLSLNAELQLDRQKPRQGRRVLLLGSQQAGTTLNLDLGGKHSPICHTTMAFLRDEADFRDKLSPIVLSLNVSLPPTEAGMAPAVVLHGDTHVQEQTRIVLDCGEDDVCVPQLQLTASVTGSPLLVGADNVLELQMDAANEGEGAYEAELAVHLPQGAHYMRALSNVEGFERLICNQKKENETRVVLCELGNPMKKNAQIGIAMLVSVGNLEEAGESVSFQLQIRSKNSQNPNSKIVLLDVPVRAEAQVELRGNSFPASLVVAAEEGEREQNSLDSWGPKVEHTYELHNNGPGTVNGLHLSIHLPGQSQPSDLLYILDIQPQGGLQCFPQPPVNPLKVDWGLPIPSPSPIHPAHHKRDRRQIFLPEPEQPSRLQDPVLVSCDSAPCTVVQCDLQEMARGQRAMVTVLAFLWLPSLYQRPLDQFVLQSHAWFNVSSLPYAVPPLSLPRGEAQVWTQLLRALEER

SEQ ID NO: 726 - protein, 959 aa, Homo Sapiens
FNLDTRFLVVKEAGNPGSLFGYSVALHRQTERQQRYLLLAGAPRELAVPDGYTNRTGAVYLCPLTAHKDDCERMNITVKNDPGHHIIEDMWLGVTVASQGPAGRVLVCAHRYTQVLWSGSEDQRRMVGKCYVRGNDLELDSSDDWQTYHNEMCNSNTDYLETGMCQLGTSGGFTQNTVYFGAPGAYNWKGNSYMIQRKEWDLSEYSYKDPEDQGNLYIGYTMQVGSFILHPKNITIVTGAPRHRHMGAVFLLSQEAGGDLRRRQVLEGSQVGAYFGSAIALADLNNDGWQDLLVGAPYYFERKEEVGGAIYVFMNQAGTSFPAHPSLLLHGPSGSAFGLSVASIGDINQDGFQDIAVGAPFEGLGKVYIYHSSSKGLLRQPQQVIHGEKLGLPGLATFGYSLSGQMDVDENFYPDLLVGSLSDHIVLLRARPVINIVHKTLVPRPAVLDPALCTATSCVQVELCFAYNQSAGNPNYRRNITLAYTLEADRDRRPPRFRFAGSESAVFHGFFSMPEMRCQKLELLLMDNLRDKLRPIIISMNYSLPLRMPDRPRLGLRSLDAYPILNQAQALENHTEVQFQKECGPDNKCESNLQMRAAFVSEQQQKLSRLQYSRDVRKLLLSINVTNTRTSERSGEDAHEALLTLVVPPALLLSSVRPPGACQANETIFCELGNPFKRNQRMELLIAFEVIGVTLHTRDLQVQLQLSTSSHQDNLWPMILTLLVDYTLQTSLSMVNHRLQSFFGGTVMGESGMKTVEDVGSPLKYEFQVGPMGEGLVGLGTLVLGLEWPYEVSNGKWLLYPTEITVHGNGSWPCRPPGDLINPLNLTLSDPGDRPSSPQRRRRQLDPGGGQGPPPVTLAAAKKAKSETVLTCATGRAHCVWLECPIPDAPVVTNVTVKARVWNSTFIEDYRDFDRVRVNGWATLFLRTSIPTINMENKTTWFSVDIDSELVEELPAEIE

SEQ ID NO: 727 - protein, 943 aa, Homo Sapiens
NVDTESALLYQGPHNTLFGYSVVLHSHGANRWLLVGAPTANWLANASVINPGAIYRCRIGKNPGQTCEQLQLGSPNGEPCGKTCLEERDNQWLGVTLSRQPGENGSIVTCGHRWKNIFYIKNENKLPTGGCYGVPPDLRTELSKRIAPCYQDYVKKFGENFASCQAGISSFYTKDLIVMGAPGSSYWTGSLFVYNITTNKYKAFLDKQNQVKFGSYLGYSVGAGHFRSQHTTEVVGGAPQHEQIGKAYIFSIDEKELNILHEMKGKKLGSYFGASVCAVDLNADGFSDLLVGAPMQSTIREEGRVFVYINSGSGAVMNAMETNLVGSDKYAARFGESIVNLGDIDNDGFEDVAIGAPQEDDLQGAIYIYNGRADGISSTFSQRIEGLQISKSLSMFGQSISGQIDADNNGYVDVAVGAFRSDSAVLLRTRPVVIVDASLSHPESVNRTKFDCVENGWPSVCIDLTLCFSYKGKEVPGYIVLFYNMSLDVNRKAESPPRFYFSSNGTSDVITGSIQVSSREANCRTHQAFMRKDVRDILTPIQIEAAYHLGPHVISKRSTEEFPPLQPILQQKKEKDIMKKTINFARFCAHENCSADLQVSAKIGFLKPHENKTYLAVGSMKTLMLNVSLFNAGDDAYETTLHVKLPVGLYFIKILELEEKQINCEVTDNSGVVQLDCSIGYIYVDHLSRIDISFLLDVSSLSRAEEDLSITVHATCENEEEMDNLKHSRVTVAIPLKYEVKLTVHGFVNPTSFVYGSNDENEPETCMVEKMNLTFHVINTGNSMAPNVSVEIMVPNSFSPQTDKLFNILDVQTTTGECHFENYQRVCALEQQKSAMQTLKGIVRFLSKTDKRLLYCIKADPHCLNFLCNFGKMESGKEASVHIQLEGRPSILEMDETSALKFEIRATGFPEPNPRVIELNKDENVAHVLLEGLHHQRPKRYFT

SEQ ID NO: 728 - protein, 954 aa, Homo Sapiens
FNLDAEAPAVLSGPPGSFFGFSVEFYRPGTDGVSVLVGAPKANTSQPGVLQGGAVYLCPWGASPTQCTPIEFDSKGSRLLESSLSSSEGEEPVEYKSLQWFGATVRAHGSSILACAPLYSWRTEKEPLSDPVGTCYLSTDNFTRILEYAPCRSDFSWAAGQGYCQGGFSAEFTKTGRVVLGGPGSYFWQGQILSATQEQIAESYYPEYLINLVQGQLQTRQASSIYDDSYLGYSVAVGEFSGDDTEDFVAGVPKGNLTYGYVTILNGSDIRSLYNFSGEQMASYFGYAVAATDVNGDGLDDLLVGAPLLMDRTPDGRPQEVGRVYVYLQHPAGIEPTPTLTLTGHDEFGRFGSSLTPLGDLDQDGYNDVAIGAPFGGETQQGVVFVFPGGPGGLGSKPSQVLQPLWAASHTPDFFGSALRGGRDLDGNGYPDLIVGSFGVDKAVVYRGRPIVSASASLTIFPAMFNPEERSCSLEGNPVACINLSFCLNASGKHVADSIGFTVELQLDWQKQKGGVRRALFLASRQATLTQTLLIQNGAREDCREMKIYLRNESEFRDKLSPIHIALNFSLDPQAPVDSHGLRPALHYQSKSRIEDKAQILLDCGEDNICVPDLQLEVFGEQNHVYLGDKNALNLTFHAQNVGEGGAYEAELRVTAPPEAEYSGLVRHPGNFSSLSCDYFAVNQSRLLVCDLGNPMKAGASLWGGLRFTVPHLRDTKKTIQFDFQILSKNLNNSQSDVVSFRLSVEAQAQVTLNGVSKPEAVLFPVSDWHPRDQPQKEEDLGPAVHHVYELINQGPSSISQGVLELSCPQALEGQQLLYVTRVTGLNCTTNHPINPKGLELDPEGSLHHQQKREAPSRSSASSGPQILKCPEAECFRLRCELGPLHQQESQSLQLHFRVWAKTFLQREHQPFSLQCEAVYKALKMPYRILPRQLPQKERQVATAVQWTKAEGSY

SEQ ID NO: 729 - protein, 988 aa, Homo Sapiens
FNLDTREDNVIRKYGDPGSLFGFSLAMHWQLQPEDKRLLLVGAPRAEALPLQRANRTGGLYSCDITARGPCTRIEFDNDADPTSESKEDQWMGVTVQSQGPGGKVVTCAHRYEKRQHVNTKQESRDIFGRCYVLSQNLRIEDDMDGGDWSFCDGRLRGHEKFGSCQQGVAATFTKDFHYIVFGAPGTYNWKGIVRVEQKNNTFFDMNIFEDGPYEVGGETEHDESLVPVPANSYLGFSLDSGKGIVSKDEITFVSGAPRANHSGAVVLLKRDMKSAHLLPEHIFDGEGLASSFGYDVAVVDLNKDGWQDIVIGAPQYFDRDGEVGGAVYVYMNQQGRWNNVKPIRLNGTKDSMFGITVKNIGDINQDGYPDIAVGAPYDDLGKVFIYHGSANGINTKPTQVLKGISPYFGYSIAGNMDLDRNSYPDVAVGSLSDSVTIFRSRPVINIQKTITVTPNRIDLRQKTACGAPSGICLQVKSCFEYTANPAGYNPSISIVGTLEAEKERRKSGLSSRVQFRNQGSEPKYTQELTLKRQKQKVCMEETLWLQDNIRDKLRPIPITASVEIQEPSSRRRVNSLPEVLPILNSDEPKTAHIDVHFLKEGCGDDNVCNSNLKLEYKFCTREGNQDKFSYLPIQKGVPELVLKDQKDIALEITVTNSPSNPRNPTKDGDDAHEAKLIATFPDTLTYSAYRELRAFPEKQLSCVANQNGSQADCELGNPFKRNSNVTFYLVLSTTEVTFDTPDLDINLKLETTSNQDNLAPITAKAKVVIELLLSVSGVAKPSQVYFGGTVVGEQAMKSEDEVGSLIEYEFRVINLGKPLTNLGTATLNIQWPKEISNGKWLLYLVKVESKGLEKVTCEPQKEINSLNLTESHNSRKKREITEKQIDDNRKFSLFAERKYQTLNCSVNVNCVNIRCPLRGLDSKASLILRSRLWNSTFLEEYSKLNYLDILMRAFIDVTAAAENIRLPNAGTQVRVTVFPSKTVAQYS

SEQ ID NO: 730 - protein, 1005 aa, Homo Sapiens
FNLDVMGALRKEGEPGSLFGFSVALHRQLQPRPQSWLLVGAPQALALPGQQANRTGGLFACPLSLEETDCYRVDIDQGADMQKESKENQWLGVSVRSQGPGGKIVTCAHRYEARQRVDQILETRDMIGRCFVLSQDLAIRDELDGGEWKFCEGRPQGHEQFGFCQQGTAAAFSPDSHYLLFGAPGTYNWKGLLFVTNIDSSDPDQLVYKTLDPADRLPGPAGDLALNSYLGFSIDSGKGLVRAEELSFVAGAPRANHKGAVVILRKDSASRLVPEVMLSGERLTSGFGYSLAVADLNSDGWPDLIVGAPYFFERQEELGGAVYVYLNQGGHWAGISPLRLCGSPDSMFGISLAVLGDLNQDGFPDIAVGAPFDGDGKVFVYHGSSLGVVAKPSQVLEGEAVGIKSFGYSLSGSLDMDGNQYPDLLVGSMADTAVLFRARPILHVSHEVSIAPRSIDLEQPNCAGGHSVCVDLRVCFSYIAVPSSYSPTVALDYVLDADTDRRLRGQVPHVTFLSRNLEEPKHQASGTVWLKHQHDRVCGDAMFQLQENVKDKLRAIVVTLSYSLQTPRLRRQAPGQGLPPVAPILNAHQPSTQRAEIHFLKQGCGEDKICQSNLQLVHVRFCTRVSDTEFQPLPMDVDGTTALFALSGQPVIGLELMVTNLPSDPAQPQADGDDAHEAQLLVMLPDSLHYSGVRALDPAEKPLCLSNENASHVECELGNPMKRGAQVTFYLILSTSGISIETTELEVELLLATISEQELHPVSARARVFIELPLSIAGMAIPQQLFFSGVVRGERAMQSERDVGSKVKYEVTVSNQGQSLRTLGSAFLNIMWPHEIANGKWLLYPMQVELEGGQGPGQKGLCSPRPNILHLDVDSRDRRRRELEPPEQQEPGERQEPSMSWWPVSSAEKKKNITLDCARGTANCVVFSCPLYSFDHAAVLHVWGRLWNSTFLEEYSAVKSLEVIVRANITVKSSIKNLMLRDASTVIPVMVYLDPMAVVAEGVPW

SEQ ID NO: 731 - protein, 974 aa, Homo Sapiens
FNLDVEKLTVYSGPKGSYFGYAVDFHIPDARTASVLVGAPKANTSQPDIVEGGAVYYCPWPAEGSAQCRQIPFDTTNNRKIRVNGTKEPIEFKSNQWFGATVKAHKGKVVACAPLYHWRTLKPTPEKDPVGTCYVAIQNFSAYAEFSPCRNSNADPEGQGYCQAGFSLDFYKNGDLIVGGPGSFYWQGQVITASVADIIANYSFKDILRKLAGEKQTEVAPASYDDSYLGYSVAAGEFTGDSQQELVAGIPRGAQNFGYVSIINSTDMTFIQNFTGEQMASYFGYTVVVSDVNSDGLDDVLVGAPLFMEREFESNPREVGQIYLYLQVSSLLFRDPQILTGTETFGRFGSAMAHLGDLNQDGYNDIAIGVPFAGKDQRGKVLIYNGNKDGLNTKPSQVLQGVWASHAVPSGFGFTLRGDSDIDKNDYPDLIVGAFGTGKVAVYRARPVVTVDAQLLLHPMIINLENKTCQVPDSMTSAACFSLRVCASVTGQSIANTIVLMAEVQLDSLKQKGAIKRTLFLDNHQAHRVFPLVIKRQKSHQCQDFIVYLRDETEFRDKLSPINISLNYSLDESTFKEGLEVKPILNYYRENIVSEQAHILVDCGEDNLCVPDLKLSARPDKHQVIIGDENHLMLIINARNEGEGAYEAELFVMIPEEADYVGIERNNKGFRPLSCEYKMENVTRMVVCDLGNPMVSGTNYSLGLRFAVPRLEKTNMSINFDLQIRSSNKDNPDSNFVSLQINITAVAQVEIRGVSHPPQIVLPIHNWEPEEEPHKEEEVGPLVEHIYELHNIGPSTISDTILEVGWPFSARDEFLLYIFHIQTLGPLQCQPNPNINPQDIKPAASPEDTPELSAFLRNSTIPHLVRKRDVHVVEFHRQSPAKILNCTNIECLQISCAVGRLEGGESAVLKVRSRLWAHTFLQRKNDPYALASLVSFEVKKMPYTDQPAKLPEGSIAIKTSVIWATPNVSFSIPL

SEQ ID NO: 732 - protein, 536 aa, Homo Sapiens
YNLDPQRPVHFQGPADSFFGYAVLEHFHDNTRWVLVGAPKADSKYSPSVKSPGAVFKCRVHTNPDRRCTELDMARGKNRGTSCGKTCREDRDDEWMGVSLARQPKADGRVLACAHRWKNIYYEADHILPHGFCYIIPSNLQAKGRTLIPCYEEYKKKYGEEHGSCQAGIAGFFTEELVVMGAPGSFYWAGTIKVLNLTDNTYLKLNDEVIMNRRYTYLGYAVTAGHFSHPSTIDVVGGAPQDKGIGKVYIFRADRRSGTLIKIFQASGKKMGSYFGSSLCAVDLNGDGLSDLLVGAPMFSEIRDEGQVTVYINRGNGALEEQLALTGDGAYNAHFGESIASLDDLDNDGFPDVAIGAPKEDDFAGAVYIYHGDAGGIVPQYSMKLSGQKINPVLRMFGQSISGGIDMDGNGYPDVTVGAFMSDSVVLLRARPVITVDVSIFLPGSINITAPQCHDGQQPVNCLNVTTCFSFHGKHVPEEIGLNYVLMADVAKKEKGQMPRVYFVLLGETMGQVTEKLQLTYMEETCRHYVAHVKRR

SEQ ID NO: 733 - protein, 1106 aa, Homo Sapiens
FNVDVARPWLTPKGGAPFVLSSLLHQDPSTNQTWLLVTSPRTKRTPGPLHRCSLVQDEILCHPVEHVPIPKGRHRGVTVVRSHHGVLICIQVLVRRPHSLSSELTGTCSLLGPDLRPQAQANFFDLENLLDPDARVDTGDCYSNKEGGGEDDVNTARQRRALEKEEEEDKEEEEDEEEEEAGTEIAIILDGSGSIDPPDFQRAKDFISNMMRNFYEKCFECNFALVQYGGVIQTEFDLRDSQDVMASLARVQNITQVGSVTKTASAMQHVLDSIFTSSHGSRRKASKVMVVLTDGGIFEDPLNLTTVINSPKMQGVERFAIGVGEEFKSARTARELNLIASDPDETHAFKVTNYMALDGLLSKLRYNIISMEGTVGDALHYQLAQIGFSAQILDERQVLLGAVGAFDWSGGALLYDTRSRRGRFLNQTAAAAADAEAAQYSYLGYAVAVLHKTCSLSYVAGAPQYKHHGAVFELQKEGREASFLPVLEGEQMGSYFGSELCPVDIDMDGSTDFLLVAAPFYHVHGEEGRVYVYRLSEQDGSFSLARILSGHPGFTNARFGFAMAAMGDLSQDKLTDVAIGAPLEGFGADDGASFGSVYIYNGHWDGLSASPSQRIRASTVAPGLQYFGMSMAGGFDISGDGLADITVGTLGQAVVFRSRPVVRLKVSMAFTPSALPIGFNGVVNVRLCFEISSVTTASESGLREALLNFTLDVDVGKQRRRLQCSDVRSCLGCLREWSSGSQLCEDLLLMPTEGELCEEDCFSNASVKVSYQLQTPEGQTDHPQPILDRYTEPFAIFQLPYEKACKNKLFCVAELQLATTVSQQELVVGLTKELTLNINLTNSGEDSYMTSMALNYPRNLQLKRMQKPPSPNIQCDDPQPVASVLIMNCRIGHPVLKRSSAHVSVVWQLEENAFPNRTADITVTVTNSNERRSLANETHTLQFRHGFVAVLSKPSIMYVNTGQGLSHHKEFLFHVHGENLFGAEYQLQICVPTKLRGLQVAAVKKLTRTQASTVCTWSQERACAYSSVQHVEEWHSVSCVIASDKENVTVAAEISWDHSEELLKDVTELQILGEISFNKSLYEGLNAENHRTKITVVFLKDEKYHS

SEQ ID NO: 734 - protein, 981 aa, Homo Sapiens
YNLDVRGARSFSPPRAGRHFGYRVLQVGNGVIVGAPGEGNSTGSLYQCQSGTGHCLPVTLRGSNYTSKYLGMTLATDPTDGSILFAAVQFSTSYKTEFDFSDYVKRKDPDALLKHVKHMLLLTNTFGAINYVATEVFREELGARPDATKVLIIITDGEATDSGNIDAAKDIIRYIIGIGKHFQTKESQETLHKFASKPASEFVKILDTFEKLKDLFTELQKKIYVIEGTSKQDLTSFNMELSSSGISADLSRGHAVVGAVGAKDWAGGFLDLKADLQDDTFIGNEPLTPEVRAGYLGYTVTWLPSRQKTSLLASGAPRYQHMGRVLLFQEPQGGGHWSQVQTIHGTQIGSYFGGELCGVDVDQDGETELLLIGAPLFYGEQRGGRVFIYQRRQLGFEEVSELQGDPGYPLGRFGEAITALTDINGDGLVDVAVGAPLEEQGAVYIFNGRHGGLSPQPSQRIEGTQVLSGIQWFGRSIHGVKDLEGDGLADVAVGAESQMIVLSSRPVVDMVTLMSFSPAEIPVHEVECSYSTSNKMKEGVNITICFQIKSLIPQFQGRLVANLTYTLQLDGHRTRRRGLFPGGRHELRRNIAVTTSMSCTDFSFHFPVCVQDLISPINVSLNFSLWEEEGTPRDQRAGKDIPPILRPSLHSETWEIPFEKNCGEDKKCEANLRVSFSPARSRALRLTAFASLSVELSLSNLEEDAYWVQLDLHFPPGLSFRKVEMLKPHSQIPVSCEELPEESRLLSRALSCNVSSPIFKAGHSVALQMMFNTLVNSSWGDSVELHANVTCNNEDSDLLEDNSATTIIPILYPINILIQDQEDSTLYVSFTPKGPKIHQVKHMYQVRIQPSIHDHNIPTLEAVVGVPQPPSEGPITHQWSVQMEPPVPCHYEDLERLPDAAEPCLPGALFRCPVVFRQEILVQVIGTLELVGEIEASSMFSLCSSLSISFNSSKHFHLYGSNASLAQVVMKVDVVYEKQML

SEQ ID NO: 735 - protein, 1088 aa, Homo Sapiens
FNLDTENAMTFQENARGFGQSVVQLQGSRVVVGAPQEIVAANQRGSLYQCDYSTGSCEPIHLQVPVEAVNMSLGLSLAATTSPPQLLACGPTVHQTCSENTYVKGLCFLFGSNLRQQPQKFPEALRGCPQEDSDIAFLIDGSGSIIPHDFRRMKEFVSTVMEQLKKSKTLFSLMQYSEEFRIHFTFKEFQNNPNPRSLVKPITQLLGRTHTATGIRKVVRELFNITNGARKNAFKILVVITDGEKFGDPLGYEDVIPEADREGVIRYVIGVGDAFRSEKSRQELNTIASKPPRDHVFQVNNFEALKTIQNQLREKIFAIEGTQTGSSSSFEHEMSQEGFSAAITSNGPLLSTVGSYDWAGGVFLYTSKEKSTFINMTRVDSDMNDAYLGYAAAIILRNRVQSLVLGAPRYQHIGLVAMFRQNTGMWESNANVKGTQIGAYFGASLCSVDVDSNGSTDLVLIGAPHYYEQTRGGQVSVCPLPRGRARWQCDAVLYGEQGQPWGRFGAALTVLGDVNGDKLTDVAIGAPGEEDNRGAVYLFHGTSGSGISPSHSQRIAGSKLSPRLQYFGQSLSGGQDLTMDGLVDLTVGAQGHVLLLRSQPVLRVKAIMEFNPREVARNVFECNDQVVKGKEAGEVRVCLHVQKSTRDRLREGQIQSVVTYDLALDSGRPHSRAVFNETKNSTRRQTQVLGLTQTCETLKLQLPNCIEDPVSPIVLRLNFSLVGTPLSAFGNLRPVLAEDAQRLFTALFPFEKNCGNDNICQDDLSITFSFMSLDCLVVGGPREFNVTVTVRNDGEDSYRTQVTFFFPLDLSYRKVSTLQNQRSQRSWRLACESASSTEVSGVLKSTSCSINHPIFPENSEVTFNITFDVDSKASLGNKLLLKANVTSENNMPRTNKTEFQLELPVKYAVYMVVTSHGVSTKYLNFTASENTSRVMQHQYQVSNLGQRSLPISLVFLVPVRLNQTVIWDRPQVTFSENLSSTCHTKERLPSHSDFLAELRKAPVVNCSIAVCQRIQCDIPFFGIQEEFNATLKGNLSFDWYIKTSHNHLLIVSTAEILFNDSVFTLLPGQGAFVRSQTETKVEPFEVPN

SEQ ID NO: 736 - protein, 962 aa, Homo Sapiens
FNLDVDSPAEYSGPEGSYFGFAVDFFVPSASSRMFLLVGAPKANTTQPGIVEGGQVLKCDWSSTRRCQPIEFDATGNRDYAKDDPLEFKSHQWFGASVRSKQDKILACAPLYHWRTEMKQEREPVGTCFLQDGTKTVEYAPCRSQDIDADGQGFCQGGFSIDFTKADRVLLGGPGSFYWQGQLISDQVAEIVSKYDPNVYSIKYNNQLATRTAQAIFDDSYLGYSVAVGDFNGDGIDDFVSGVPRAARTLGMVYIYDGKNMSSLYNFTGEQMAAYFGFSVAATDINGDDYADVFIGAPLFMDRGSDGKLQEVGQVSVSLQRASGDFQTTKLNGFEVFARFGSAIAPLGDLDQDGFNDIAIAAPYGGEDKKGIVYIFNGRSTGLNAVPSQILEGQWAARSMPPSFGYSMKGATDIDKNGYPDLIVGAFGVDRAILYRARPVITVNAGLEVYPSILNQDNKTCSLPGTALKVSCFNVRFCLKADGKGVLPRKLNFQVELLLDKLKQKGAIRRALFLYSRSPSHSKNMTISRGGLMQCEELIAYLRDESEFRDKLTPITIFMEYRLDYRTAADTTGLQPILNQFTPANISRQAHILLDCGEDNVCKPKLEVSVDSDQKKIYIGDDNPLTLIVKAQNQGEGAYEAELIVSIPLQADFIGVVRNNEALARLSCAFKTENQTRQVVCDLGNPMKAGTQLLAGLRFSVHQQSEMDTSVKFDLQIQSSNLFDKVSPVVSHKVDLAVLAAVEIRGVSSPDHIFLPIPNWEHKENPETEEDVGPVVQHIYELRNNGPSSFSKAMLHLQWPYKYNNNTLLYILHYDIDGPMNCTSDMEINPLRIKISSLQTTEKNDTVAGQGERDHLITKRDLALSEGDIHTLGCGVAQCLKIVCQVGRLDRGKSAILYVKSLLWTETFMNKENQNHSYSLKSSASFNVIEFPYKNLPIEDITNSTLVTTNVTWGIQPAPMPV

SEQ ID NO: 737 - protein, 1088 aa, Homo Sapiens
FNLDTEELTAFRVDSAGFGDSVVQYANSWVVVGAPQKITAANQTGGLYQCGYSTGACEPIGLQVPPEAVNMSLGLSLASTTSPSQLLACGPTVHHECGRNMYLTGLCFLLGPTQLTQRLPVSRQECPRQEQDIVFLIDGSGSISSRNFATMMNFVRAVISQFQRPSTQFSLMQFSNKFQTHFTFEEFRRSSNPLSLLASVHQLQGFTYTATAIQNVVHRLFHASYGARRDAAKILIVITDGKKEGDSLDYKDVIPMADAAGIIRYAIGVGLAFQNRNSWKELNDIASKPSQEHIFKVEDFDALKDIQNQLKEKIFAIEGTETTSSSSFELEMAQEGFSAVFTPDGPVLGAVGSFTWSGGAFLYPPNMSPTFINMSQENVDMRDSYLGYSTELALWKGVQSLVLGAPRYQHTGKAVIFTQVSRQWRMKAEVTGTQIGSYFGASLCSVDVDSDGSTDLVLIGAPHYYEQTRGGQVSVCPLPRGWRRWWCDAVLYGEQGHPWGRFGAALTVLGDVNGDKLTDVVIGAPGEKENRGAVYLFHGVLGPSISPSHSQRIAGSQLSSRLQYFGQALSGGQDLTQDGLVDLAVGARGQVLLLRTRPVLWVGVSMQFIPAEIPRSAFECREQVVSEQTLVQSNICLYIDKRSKNLLGSRDLQSSVTLDLALDPGRLSPRATFQETKNRSLSRVRVLGLKAHCENFNLLLPSCVEDSVTPITLRLNFTLVGKPLLAFRNLRPMLAADAQRYFTASLPFEKNCGADHICQDNLGISFSFPGLKSLLVGSNLELNAEVMVWNDGEDSYGTTVTFSHPAGLSYRYVAEGQKQGQLRSLHLTCDSAPVGSQGTWSTSCRINHLIFRGGAQITFLATFDVSPKAVLGDRLLLTANVSSENNTPRTSKTTFQLELPVKYAVYTVVSSHEQFTKYLNFSESEEKESHVAMHRYQVNNLGQRDLPVSINFWVPVELNQEAVWMDVEVSHPQNPSLRCSSEKIAPPASDFLAHIQKNPVLDCSIAGCLRFRCDVPSFSVQEELDFTLKGNLSFGWVRQILQKKVSVVSVAEITFDTSVYSQLPGQEAFMRAQTTTVLEKYKVHNPTP

SEQ ID NO: 738 - protein, 708 aa, Homo Sapiens
QTDENRCLKANAKSCGECIQAGPNCGWCTNSTFLQEGMPTSARCDDLEALKKKGCPPDDIENPRGSKDIKKNKNVTNRSKGTAEKLKPEDITQIQPQQLVLRLRSGEPQTFTLKFKRAEDYPIDLYYLMDLSYSMKDDLENVKSLGTDLMNEMRRITSDFRIGFGSFVEKTVMPYISTTPAKLRNPCTSEQNCTSPFSYKNVLSLTNKGEVFNELVGKQRISGNLDSPEGGFDAIMQVAVCGSLIGWRNVTRLLVFSTDAGFHFAGDGKLGGIVLPNDGQCHLENNMYTMSHYYDYPSIAHLVQKLSENNIQTIFAVTEEFQPVYKELKNLIPKSAVGTLSANSSNVIQLIIDAYNSLSSEVILENGKLSEGVTISYKSYCKNGVNGTGENGRKCSNISIGDEVQFEISITSNKCPKKDSDSFKIRPLGFTEEVEVILQYICECECQSEGIPESPKCHEGNGTFECGACRCNEGRVGRHCECSTDEVNSEDMDAYCRKENSSEICSNNGECVCGQCVCRKRDNTNEIYSGKFCECDNFNCDRSNGLICGGNGVCKCRVCECNPNYTGSACDCSLDTSTCEASNGQICNGRGICECGVCKCTDPKFQGQTCEMCQTCLGVCAEHKECVQCRAFNKGEKKDTCTQECSYFNITKVESRDKLPQPVQPDPVSHCKEKDVDDCWFYFTYSVNGNNEVMVHVVENPECPTGPD

SEQ ID NO: 739 - protein, 678 aa, Homo Sapiens
QECTKFKVSSCRECIESGPGCTWCQKLNFTGPGDPDSIRCDTRPQLLMRGCAADDIMDPTSLAETQEDHNGGQKQLSPQKVTLYLRPGQAAAFNVTFRRAKGYPIDLYYLMDLSYSMLDDLRNVKKLGGDLLRALNEITESGRIGFGSFVDKTVLPFVNTHPDKLRNPCPNKEKECQPPFAFRHVLKLTNNSNQFQTEVGKQLISGNLDAPEGGLDAMMQVAACPEEIGWRNVTRLLVFATDDGFHFAGDGKLGAILTPNDGRCHLEDNLYKRSNEFDYPSVGQLAHKLAENNIQPIFAVTSRMVKTYEKLTEIIPKSAVGELSEDSSNVVHLIKNAYNKLSSRVFLDHNALPDTLKVTYDSFCSNGVTHRNQPRGDCDGVQINVPITFQVKVTATECIQEQSFVIRALGFTDIVTVQVLPQCECRCRDQSRDRSLCHGKGFLECGICRCDTGYIGKNCECQTQGRSSQELEGSCRKDNNSIICSGLGDCVCGQCLCHTSDVPGKLIYGQYCECDTINCERYNGQVCGGPGRGLCFCGKCRCHPGFEGSACQCERTTEGCLNPRRVECSGRGRCRCNVCECHSGYQLPLCQECPGCPSPCGKYISCAECLKFEKGPFGKNCSAACPGLQLSNNPVKGRTCKERDSEGCWVAYTLEQQDGMDRYLIYVDESRECVAGPN

SEQ ID NO: 740 - protein, 692 aa, Homo Sapiens
GPNICTTRGVSSCQQCLAVSPMCAWCSDEALPLGSPRCDLKENLLKDNCAPESIEFPVSEARVLEDRPLSDKGSGDSSQVTQVSPQRIALRLRPDDSKNFSIQVRQVEDYPVDIYYLMDLSYSMKDDLWSIQNLGTKLATQMRKLTSNLRIGFGAFVDKPVSPYMYISPPEALENPCYDMKTTCLPMFGYKHVLTLTDQVTRFNEEVKKQSVSRNRDAPEGGFDAIMQATVCDEKIGWRNDASHLLVFTTDAKTHIALDGRLAGIVQPNDGQCHVGSDNHYSASTTMDYPSLGLMTEKLSQKNINLIFAVTENVVNLYQNYSELIPGTTVGVLSMDSSNVLQLIVDAYGKIRSKVELEVRDLPEELSLSFNATCLNNEVIPGLKSCMGLKIGDTVSFSIEAKVRGCPQEKEKSFTIKPVGFKDSLIVQVTFDCDCACQAQAEPNSHRCNNGNGTFECGVCRCGPGWLGSQCECSEEDYRPSQQDECSPREGQPVCSQRGECLCGQCVCHSSDFGKITGKYCECDDFSCVRYKGEMCSGHGQCSCGDCLCDSDWTGYYCNCTTRTDTCMSSNGLLCSGRGKCECGSCVCIQPGSYGDTCEKCPTCPDACTFKKECVECKKFDRGALHDENTCNRYCRDEIESVKELKDTGKDAVNCTYKNEDDCVVRFQYYEDSSGKSILYVVEEPECPKGPD

SEQ ID NO: 741 - protein, 696 aa, Homo Sapiens
GLNICTSGSATSCEECLLIHPKCAWCSKEDFGSPRSITSRCDLRANLVKNGCGGEIESPASSFHVLRSLPLSSKGSGSAGWDVIQMTPQEIAVNLRPGDKTTFQLQVRQVEDYPVDLYYLMDLSLSMKDDLDNIRSLGTKLAEEMRKLTSNFRLGFGSFVDKDISPFSYTAPRYQTNPCIGYKLFPNCVPSFGFRHLLPLTDRVDSFNEEVRKQRVSRNRDAPEGGFDAVLQAAVCKEKIGWRKDALHLLVFTTDDVPHIALDGKLGGLVQPHDGQCHLNEANEYTASNQMDYPSLALLGEKLAENNINLIFAVTKNHYMLYKNFTALIPGTTVEILDGDSKNIIQLIINAYNSIRSKVELSVWDQPEDLNLFFTATCQDGVSYPGQRKCEGLKIGDTASFEVSLEARSCPSRHTEHVFALRPVGFRDSLEVGVTYNCTCGCSVGLEPNSARCNGSGTYVCGLCECSPGYLGTRCECQDGENQSVYQNLCREAEGKPLCSGRGDCSCNQCSCFESEFGKIYGPFCECDNFSCARNKGVLCSGHGECHCGECKCHAGYIGDNCNCSTDISTCRGRDGQICSERGHCLCGQCQCTEPGAFGEMCEKCPTCPDACSTKRDCVECLLLHSGKPDNQTCHSLCRDEVITWVDTIVKDDQEAVLCFYKTAKDCVMMFTYVELPSGKSNLTVLREPECGNTPN

SEQ ID NO: 742 - protein, 688 aa, Homo Sapiens
GCALGGAETCEDCLLIGPQCAWCAQENFTHPSGVGERCDTPANLLAKGCQLNFIENPVSQVEILKNKPLSVGRQKNSSDIVQIAPQSLILKLRPGGAQTLQVHVRQTEDYPVDLYYLMDLSASMDDDLNTIKELGSRLSKEMSKLTSNFRLGFGSFVEKPVSPFVKTTPEEIANPCSSIPYFCLPTFGFKHILPLTNDAERFNEIVKNQKISANIDTPEGGFDAIMQAAVCKEKIGWRNDSLHLLVFVSDADSHFGMDSKLAGIVIPNDGLCHLDSKNEYSMSTVLEYPTIGQLIDKLVQNNVLLIFAVTQEQVHLYENYAKLIPGATVGLLQKDSGNILQLIISAYEELRSEVELEVLGDTEGLNLSFTAICNNGTLFQHQKKCSHMKVGDTASFSVTVNIPHCERRSRHIIIKPVGLGDALELLVSPECNCDCQKEVEVNSPKCHHGNGSFQCGACACHPGHMGPRCECGEDMLSTDSCKEAPDHPSCSGRGDCYCGQCICHLSPYGNIYGPYCQCDNFSCVRHKGLLCGGNGDCDCGECVCRSGWTGEYCNCTTSTDSCVSEDGVLCSGRGDCVCGKCVCTNPGASGPTCERCPTCGDPCNSKRSCIECHLSAAGQAREECVDKCKLAGATISEEEDFSKDGSVSCSLQGENECLITFLITTDNEGKTIIHSINEKDCPKPPNIP

SEQ ID NO: 743 - protein, 704 aa, Homo Sapiens
ELDAKIPSTGDATEWRNPHLSMLGSCQPAPSCQKCILSHPSCAWCKQLNFTASGEAEARRCARREELLARGCPLEELEEPRGQQEVLQDQPLSQGARGEGATQLAPQRVRVTLRPGEPQQLQVRFLRAEGYPVDLYYLMDLSYSMKDDLERVRQLGHALLVRLQEVTHSVRIGFGSFVDKTVLPFVSTVPSKLRHPCPTRLERCQSPFSFHHVLSLTGDAQAFEREVGRQSVSGNLDSPEGGFDAILQAALCQEQIGWRNVSRLLVFTSDDTFHTAGDGKLGGIFMPSDGHCHLDSNGLYSRSTEFDYPSVGQVAQALSAANIQPIFAVTSAALPVYQELSKLIPKSAVGELSEDSSNVVQLIMDAYNSLSSTVTLEHSSLPPGVHISYESQCEGPEKREGKAEDRGQCNHVRINQTVTFWVSLQATHCLPEPHLLRLRALGFSEELIVELHTLCDCNCSDTQPQAPHCSDGQGHLQCGVCSCAPGRLGRLCECSVAELSSPDLESGCRAPNGTGPLCSGKGHCQCGRCSCSGQSSGHLCECDDASCERHEGILCGGFGRCQCGVCHCHANRTGRACECSGDMDSCISPEGGLCSGHGRCKCNRCQCLDGYYGALCDQCPGCKTPCERHRDCAECGAFRTGPLATNCSTACAHTNVTLALAPILDDGWCKERTLDNQLFFFLVEDDARGTVVLRVRPQEKGADH

SEQ ID NO: 744 - protein, 397 aa, Homo Sapiens
EDNRCASSNAASCARCLALGPECGWCVQEDFISGGSRSERCDIVSNLISKGCSVDSIEYPSVHVIIPTENEINTQVTPGEVSIQLRPGAEANFMLKVHPLKKYPVDLYYLVDVSASMHNNIEKLNSVGNDLSRKMAFFSRDFRLGFGSYVDKTVSPYISIHPERIHNQCSDYNLDCMPPHGYIHVLSLTENITEFEKAVHRQKISGNIDTPEGGFDAMLQAAVCESHIGWRKEAKRLLLVMTDQTSHLALDSKLAGIVVPNDGNCHLKNNVYVKSTTMEHPSLGQLSEKLIDNNINVIFAVQGKQFHWYKDLLPLLPGTIAGEIESKAANLNNLVVEAYQKLISEVKVQVENQVQGIYFNITAICPDGSRKPGMEGCRNVTSNDEVCGCAFFPFKIN

SEQ ID NO: 745 - protein, 471 aa, Homo Sapiens
VPQSFSPSLRSWPGAACRLSRAESERRCRAPGQPPGAALCHGRGRCDCGVCICHVTEPGMFFGPLCECHEWVCETYDGSTCAGHGKCDCGKCKCDQGWYGDACQYPTNCDLTKKKSNQMCKNSQDIICSNAGTCHCGRCKCDNSDGSGLVYGKFCECDDRECIDDETEEICGGHGKCYCGNCYCKAGWHGDKCEFQCDITPWESKRRCTSPDGKICSNRGTCVCGECTCHDVDPTGDWGDIHGDTCECDERDCRAVYDRYSDDFCSGHGQCNCGRCDCKAGWYGKKCEHPQSCTLSAEESIRKCQGSSDLPCSGRGKCECGKCTCYPPGDRRVYGKTCECDDRRCEDLDGVVCGGHGTCSCGRCVCERGWFGKLCQHPRKCNMTEEQSKNLCESADGILCSGKGSCHCGKCICSAEEWYISGEFCDCDDRDCDKHDGLICTGNGICSCGNCECWDGWNGNACEIWLGSEYP

SEQ ID NO: 746 - protein, 271 aa, Homo Sapiens
CVICDPSVVLALKSLEKDYLPGHLDAKHHKAMMERVENAVKDFQELSLNEDAYMGVVDEATLQKGSWSLLKDLKRITDSDVKGDLFVKELFWMLHLQKETFATYVARFQKEAYCPNKCGVMLQTLIWCKNCKKEVHACRKSYDCGERNVEVPQMEDMILDCELNWHQASEGLTDYSFYRVWGNNTETLVSKGKEATLTKPMVGPEDAGSYRCELGSVNSSPATIINFHVTVLPKMIKEEKPSPNIVTPGEATTESSISLQPLQPEKMLASR

SEQ ID NO: 747 - protein, 1034 aa, Homo Sapiens
QFELEILSMQNVNGELQNGNCCGGARNPGDRKCTRDECDTYFKVCLKEYQSRVTAGGPCSFGSGSTPVIGGNTFNLKASRGNDRNRIVLPFSFAWPRSYTLLVEAWDSSNDTVQPDSIIEKASHSGMINPSRQWQTLKQNTGVAHFEYQIRVTCDDYYYGFGCNKFCRPRDDFFGHYACDQNGNKTCMEGWMGPECNRAICRQGCSPKHGSCKLPGDCRCQYGWQGLYCDKCIPHPGCVHGICNEPWQCLCETNWGGQLCDKDLNYCGTHQPCLNGGTCSNTGPDKYQCSCPEGYSGPNCEIAEHACLSDPCHNRGSCKETSLGFECECSPGWTGPTCSTNIDDCSPNNCSHGGTCQDLVNGFKCVCPPQWTGKTCQLDANECEAKPCVNAKSCKNLIASYYCDCLPGWMGQNCDININDCLGQCQNDASCRDLVNGYRCICPPGYAGDHCERDIDECASNPCLNGGHCQNEINRFQCLCPTGFSGNLCQLDIDYCEPNPCQNGAQCYNRASDYFCKCPEDYEGKNCSHLKDHCRTTPCEVIDSCTVAMASNDTPEGVRYISSNVCGPHGKCKSQSGGKFTCDCNKGFTGTYCHENINDCESNPCRNGGTCIDGVNSYKCICSDGWEGAYCETNINDCSQNPCHNGGTCRDLVNDFYCDCKNGWKGKTCHSRDSQCDEATCNNGGTCYDEGDAFKCMCPGGWEGTTCNIARNSSCLPNPCHNGGTCVVNGESFTCVCKEGWEGPICAQNTNDCSPHPCYNSGTCVDGDNWYRCECAPGFAGPDCRININECQSSPCAFGATCVDEINGYRCVCPPGHSGAKCQEVSGRPCITMGSVIPDGAKWDDDCNTCQCLNGRIACSKVWCGPRPCLLHKGHSECPSGQSCIPILDDQCFVHPCTGVGECRSSSLQPVKTKCTSDSYYQDNCANITFTFNKEMMSPGLTTEHICSELRNLNILKNVSAEYSIYIACEPSPSANNEIHVAISAEDIRDDGNPIKEITDKIIDLVSKRDGNSSLIAAVAEVRVQRRPLKNRTD

SEQ ID NO: 748 - protein, 319 aa, Homo Sapiens
MGYFELQLSALRNVNGELLSGACCDGDGRTTRAGGCGHDECDTYVRVCLKEYQAKVTPTGPCSYGHGATPVLGGNSFYLPPAGAAGDRARARARAGGDQDPGLVVIPFQFAWPRSFTLIVEAWDWDNDTTPNEELLIERVSHAGMINPEDRWKSLHFSGHVAHLELQIRVRCDENYYSATCNKFCRPRNDFFGHYTCDQYGNKACMDGWMGKECKEAVCKQGCNLLHGGCTVPGECRCSYGWQGRFCDECVPYPGCVHGSCVEPWQCNCETNWGGLLCDKDLNYCGSHHPCTNGGTCINAEPDQYRCTCPDGYSGRNCE

SEQ ID NO: 749 - protein, 210 aa, Homo Sapiens
FSAPKDQQVVTAVEYQEAILACKTPKKTVSSRLEWKKLGRSVSFVYYQQTLQGDFKNRAEMIDFNIRIKNVTRSDAGKYRCEVSAPSEQGQNLEEDTVTLEVLVAPAVPSCEVPSSALSGTVVELRCQDKEGNPAPEYTWFKDGIRLLENPRLGSQSTNSSYTMNTKTGTLQFNTVSKLDTGEYSCEARNSVGYRRCPGKRMQVDDLNIS

SEQ ID NO: 750 - protein, 210 aa, Homo Sapiens
VNLKSSNRTPVVQEFESVELSCIITDSQTSDPRIEWKKIQDEQTTYVFFDNKIQGDLAGRAEILGKTSLKIWNVTRRDSALYRCEVVARNDRKEIDEIVIELTVQVKPVTPVCRVPKAVPVGKMATLHCQESEGHPRPHYSWYRNDVPLPTDSRANPRFRNSSFHLNSETGTLVFTAVHKDDSGQYYCIASNDAGSARCEEQEMEVYDLN

SEQ ID NO: 751 - protein, 137 aa, Homo Sapiens
QEDERIVLVDNKCKCARITSRIIRSSEDPNEDIVERNIRIIVPLNNRENISDPTSPLRTRFVYHLSDLCKKCDPTEVELDNQIVTATQSNICDEDSATETCYTYDRNKCYTAVVPLVYGGETKMVETALTPDACYPD

SEQ ID NO: 752 - protein, 656 aa, Homo Sapiens
AGPGAAAARRLDESLSAGSVQRARCASRCLSLQITRISAFFQHFQNNGSLVWCQNHKQCSKCLEPCKESGDLRKHQCQSFCEPLFPKKSYECLTSCEFLKYILLVKQGDCPAPEKASGFAAACVESCEVDNECSGVKKCCSNGCGHTCQVPKTLYKGVPLKPRKELRFTELQSGQLEVKWSSKFNISIEPVIYVVQRRWNYGIHPSEDDATHWQTVAQTTDERVQLTDIRPSRWYQFRVAAVNVHGTRGFTAPSKHFRSSKDPSAPPAPANLRLANSTVNSDGSVTVTIVWDLPEEPDIPVHHYKVFWSWMVSSKSLVPTKKKRRKTTDGFQNSVILEKLQPDCDYVVELQAITYWGQTRLKSAKVSLHFTSTHATNNKEQLVKTRKGGIQTQLPFQRRRPTRPLEVGAPFYQDGQLQVKVYWKKTEDPTVNRYHVRWFPEACAHNRTTGSEASSGMTHENYIILQDLSFSCKYKVTVQPIRPKSHSKAEAVFFTTPPCSALKGKSHKPIGCLGEAGHVLSKVLAKPENLSASFIVQDVNITGHFSWKMAKANLYQPMTGFQVTWAEVTTESRQNSLPNSIISQSQILPSDHYVLTVPNLRPSTLYRLEVQVLTPGGEGPATIKTFRTPELPPSSAHRSHLKHRHPHHYKPSPERY

SEQ ID NO: 753 - protein, 274 aa, Homo Sapiens
RPSPGPDYLRRGWMRLLAEGEGCAPCRPEECAAPRGCLAGRVRDACGCCWECANLEGQLCDLDPSAHFYGHCGEQLECRLDTGGDLSRGEVPEPLCACRSQSPLCGSDGHTYSQICRLQEAARARPDANLTVAHPGPCESGPQIVSHPYDTWNVTGQDVIFGCEVFAYPMASIEWRKDGLDIQLPGDDPHISVQFRGGPQRFEVTGWLQIQAVRPSDEGTYRCLGRNALGQVEAPASLTVLTPDQLNSTGIPQLRSLNLVPEEEAESEENDDYY

SEQ ID NO: 754 - protein, 483 aa, Homo Sapiens
ETGGERQLSPEKSEIWGPGLKADVVLPARYFYIQAVDTSGNKFTSSPGEKVFQVKVSAPEEQFTRVGVQVLDRKDGSFIVRYRMYASYKNLKVEVKFQGQHVAKSPYILKGPVYHENCDCPLQDSAAWLREMNCPETIAQIQRDLAHFPAVDPEKIAVEIPKRFGQRQSLCHYTLKDNKVYIKTHGEHVGFRIFMDAILLSLTRKVKMPDVELFVNLGDWPLEKKKSNSNIHPIFSWCGSTDSKDIVMPTYDLTDSVLETMGRVSLDMMSVQANTGPPWESKNSTAVWRGRDSRKERLELVKLSRKHPELIDAAFTNFFFFKHDENLYGPIVKHISFFDFFKHKYQINIDGTVAAYRLPYLLVGDSVVLKQDSIYYEHFYNELQPWKHYIPVKSNLSDLLEKLKWAKDHDEEAKKIAKAGQEFARNNLMGDDIFCYYFKLFQEYANLQVSEPQIREGMKRVEPQTEDDLFPCTCHRKKTKDEL

SEQ ID NO: 755 - protein, 487 aa, Homo Sapiens
GAPEVLVSAPRSLVWGPGLQAAVVLPVRYFYLQAVNSEGQNLTRSPAGETPFKVVVKSLSPKELVRIHVPKPLDRNDGTFLMRYRMYETVDEGLKIEVLYGDEHVAQSPYILKGPVYHEYCECPEDPQAWQKTLSCPTKEPQIAKDFASFPSINLQQMLKEVPKRFGDERGAIVHYTILNNHVYRRSLGKYTDFKMFSDEILLSLTRKVLLPDLEFYVNLGDWPLEHRKVNGTPSPIPIISWCGSLDSRDVVLPTYDITHSMLEAMRGVTNDLLSIQGNTGPSWINKTERAFFRGRDSLEERLQLVQLSKENPQLLDAGITGYFFFQEKEKELGKAKLMGFFDFFKYKYQVNVDGTVAAYRYPYLMLGDSLVLKQDSPYYEHFYMALEPWKHYVPIKRNLSDLLEKVKWAKENDEEAKKIAKEGQLMARDLLQPHRLYCYYYQVLQKYAERQSSKPEVRDGMELVPQPEDSTAICQCHRKKPSREEL

SEQ ID NO: 756 - protein, 745 aa, Homo Sapiens
ASVGLPSVSLDLPRLSIQKDILTIKANTTLQITCRGQRDLDWLWPNNQSGSEQRVEVTECSDGLFCKTLTIPKVIGNDTGAYKCFYRETDLASVIYVYVQDYRSPFIASVSDQHGVVYITENKNKTVVIPCLGSISNLNVSLCARYPEKRFVPDGNRISWDSKKGFTIPSYMISYAGMVFCEAKINDESYQSIMYIVVVVGYRIYDVVLSPSHGIELSVGEKLVLNCTARTELNVGIDFNWEYPSSKHQHKKLVNRDLKTQSGSEMKKFLSTLTIDGITRSDQGLYTCAASSGLMTKKNSTFVRVHEKPFVAFGSGMESLVEATVGERVRIPAKYLGYPPPEIKWYKNGIPLESNHTIKAGHVLTIMEVSERDTGNYTVILTNPISKEKQSHVVSLVVYVPPQIGEKSLISPVDSYQYGTTQTLTCTVYAIPPPHHIHWYWQLEEECANEPSHAVSVTNPYPCEEWRSVEDFQGGNKIEVNKNQFALIEGKNKTVSTLVIQAANVSALYKCEAVNKVGRGERVISFHVTRGPEITLQPDMQPTEQESVSLWCTADRSTFENLTWYKLGPQPLPIHVGELPTPVCKNLDTLWKLNATMFSNSTNDILIMELKNASLQDQGDYVCLAQDRKTKKRHCVVRQLTVLERVAPTITGNLENQTTSIGESIEVSCTASGNPPPQIMWFKDNETLVEDSGIVLKDGNRNLTIRRVRKEDEGLYTCQACSVLGCAKVEAFFIIEGAQEKTNLE

SEQ ID NO: 757 - protein, 332 aa, Homo Sapiens
RSVRQVYEVHDSDDWTIHDFECPMECFCPPSFPTALYCENRGLKEIPAIPSRIWYLYLQNNLIETIPEKPFENATQLRWINLNKNKITNYGIEKGALSQLKKLLFLFLEDNELEEVPSPLPRSLEQLQLARNKVSRIPQGTFSNLENLTLLDLQNNKLVDNAFQRDTFKGLKNLMQLNMAKNALRNMPPRLPANTMQLFLDNNSIEGIPENYFNVIPKVAFLRLNHNKLSDEGLPSRGFDVSSILDLQLSHNQLTKVPRISAHLQHLHLDHNKIKSVNVSVICPSPSMLPAERDSFSYGPHLRYLRLDGNEIKPPIPMALMTCFRLLQAVII

SEQ ID NO: 758 - protein, 935 aa, Homo Sapiens
ARKQCSEGRTYSNAVISPNLETTRIMRVSHTFPVVDCTAACCDLSSCDLAWWFEGRCYLVSCPHKENCEPKKMGPIRSYLTFVLRPVQRPAQLLDYGDMMLNRGSPSGIWGDSPEDIRKDLPFLGKDWGLEEMSEYSDDYRELEKDLLQPSGKQEPRGSAEYTDWGLLPGSEGAFNSSVGDSPAVPAETQQDPELHYLNESASTPAPKLPERSVLLPLPTTPSSGEVLEKEKASQLQEQSSNSSGKEVLMPSHSLPPASLELSSVTVEKSPVLTVTPGSTEHSIPTPPTSAAPSESTPSELPISPTTAPRTVKELTVSAGDNLIITLPDNEVELKAFVAPAPPVETTYNYEWNLISHPTDYQGEIKQGHKQTLNLSQLSVGLYVFKVTVSSENAFGEGFVNVTVKPARRVNLPPVAVVSPQLQELTLPLTSALIDGSQSTDDTEIVSYHWEEINGPFIEEKTSVDSPVLRLSNLDPGNYSFRLTVTDSDGATNSTTAALIVNNAVDYPPVANAGPNHTITLPQNSITLNGNQSSDDHQIVLYEWSLGPGSEGKHVVMQGVQTPYLHLSAMQEGDYTFQLKVTDSSRQQSTAVVTVIVQPENNRPPVAVAGPDKELIFPVESATLDGSSSSDDHGIVFYHWEHVRGPSAVEMENIDKAIATVTGLQVGTYHFRLTVKDQQGLSSTSTLTVAVKKENNSPPRARAGGRHVLVLPNNSITLDGSRSTDDQRIVSYLWIRDGQSPAAGDVIDGSDHSVALQLTNLVEGVYTFHLRVTDSQGASDTDTATVEVQPDPRKSGLVELTLQVGVGQLTEQRKDTLVRQLAVLLNVLDSDIKVQKIRAHSDLSTVIVFYVQSRPPFKVLKAAEVARNLHMRLSKEKADFLLFKVLRVDTAGCLLKCSGHGHCDPLTKRCICSHLWMENLIQRYIWDGESNCEWS

SEQ ID NO: 759 - protein, 882 aa, Homo Sapiens
ESRCQQGKTQFGVGLRSGGENHLWLLEGTPSLQSCLAACCQDSACHVFWWLEGMCIQADCSRPQSCRAFRTHSSNSMLVFLKKFQTADDLGFLPEDDVPHLLGLGWNWASWRQSPPRAALRPAVSSSDQQSLIRKLQKRGSPSDVVTPIVTQHSKVNDSNELGGLTTSGSAEVHKAITISSPLTTDLTAELSGGPKNVSVQPEISEGLATTPSTQQVKSSEKTQIAVPQPVAPSYSYATPTPQASFQSTSAPYPVIKELVVSAGESVQITLPKNEVQLNAYVLQEPPKGETYTYDWQLITHPRDYSGEMEGKHSQILKLSKLTPGLYEFKVIVEGQNAHGEGYVNVTVKPEPRKNRPPIAIVSPQFQEISLPTTSTVIDGSQSTDDDKIVQYHWEELKGPLREEKISEDTAILKLSKLVPGNYTFSLTVVDSDGATNSTTANLTVNKAVDYPPVANAGPNQVITLPQNSITLFGNQSTDDHGITSYEWSLSPSSKGKVVEMQGVRTPTLQLSAMQEGDYTYQLTVTDTIGQQATAQVTVIVQPENNKPPQADAGPDKELTLPVDSTTLDGSKSSDDQKIISYLWEKTQGPDGVQLENANSSVATVTGLQVGTYVFTLTVKDERNLQSQSSVNVIVKEEINKPPIAKITGNVVITLPTSTAELDGSKSSDDKGIVSYLWTRDEGSPAAGEVLNHSDHHPILFLSNLVEGTYTFHLKVTDAKGESDTDRTTVEVKPDPRKNNLVEIILDINVSQLTERLKGMFIRQIGVLLGVLDSDIIVQKIQPYTEQSTKMVFFVQNEPPHQIFKGHEVAAMLKSELRKQKADFLIFRALEVNTVTCQLNCSDHGHCDSFTKRCICDPFWMENFIKVQLRDGDSNCEWSVLY

SEQ ID NO: 760 - protein, 224 aa, Homo Sapiens
HEGVHRKPSLLAHPGRLVKSEETVILQCWSDVRFEHFLLHREGKFKDTLHLIGEHHDGVSKANFSIGPMMQDLAGTYRCYGSVTHSPYQLSAPSDPLDIVITGLYEKPSLSAQPGPTVLAGESVTLSCSSRSSYDMYHLSREGEAHECRFSAGPKVNGTFQADFPLGPATHGGTYRCFGSFRDSPYEWSNSSDPLLVSVTGNPSNSWPSPTEPSSKTGNPRHLH

SEQ ID NO: 761 - protein, 224 aa, Homo Sapiens
HEGVHRKPSLLAHPGPLVKSEETVILQCWSDVRFQHFLLHREGKFKDTLHLIGEHHDGVSKANFSIGPMMQDLAGTYRCYGSVTHSPYQLSAPSDPLDIVITGLYEKPSLSAQPGPTVLAGESVTLSCSSRSSYDMYHLSREGEAHERRFSAGPKVNGTFQADFPLGPATHGGTYRCFGSFRDSPYEWSNSSDPLLVSVTGNPSNSWLSPTEPSSETGNPRHLH

SEQ ID NO: 762 - protein, 224 aa, Homo Sapiens; identical to SEQ ID NO: 761

SEQ ID NO: 763 - protein, 221 aa, Homo Sapiens
WAHVGGQDKPFCSAWPSAVVPQGGHVTLRCHYRRGFNIFTLYKKDGVPVPELYNRIFWNSFLISPVTPAHAGTYRCRGFHPHSPTEWSAPSNPLVIMVTGLYEKPSLTARPGPTVRTGENVTLSCSSQSSFDIYHLSREGEAHELRLPAVPSINGTFQADFPLGPATHGETYRCFGSFHGSPYEWSDASDPLPVSVTGNPSSSWPSPTEPSFKTGIARHLH

SEQ ID NO: 764 - protein, 217 aa, Homo Sapiens
HEGGQDKPLLSAWPSAVVPRGGHVTLLCRSRLGFTIFSLYKEDGVPVPELYNKIFWKSILMGPVTPAHAGTYRCRGSHPRSPIEWSAPSNPLVIVVTGLFGKPSLSAQPGPTVRTGENVALSCSSRSSFDMYHLSREGRAHEPRLPAVPSVDGTFQADFPLGPATHGGTYTCFSSLHDSPYEWSDPSDPLLVSVTGNSSSSSSSPTEPSSKTGIRRH

SEQ ID NO: 765 - protein, 217 aa, Homo Sapiens; identical to SEQ ID NO: 764

SEQ ID NO: 766 - protein, 224 aa, Homo Sapiens
HEGVHRKPSLLAHPGPLVKSEETVILQCWSDVRFEHFLLHREGKYKDTLHLIGEHHDGVSKANFSIGPMMQDLAGTYRCYGSVTHSPYQLSAPSDPLDIVITGLYEKPSLSAQPGPTVLAGESVTLSCSSRSSYDMYHLSREGEAHERRFSAGPKVNGTFQADFPLGPATHGGTYRCFGSFRDSPYEWSNSSDPLLVSVTGNPSNSWPSPTEPSSKTGNPRHLH

SEQ ID NO: 767 - protein, 224 aa, Homo Sapiens
HEGFRRKPSLLAHPGRLVKSEETVILQCWSDVMFEHFLLHREGTFNDTLRLIGEHIDGVSKANFSIGRMRQDLAGTYRCYGSVPHSPYQFSAPSDPLDIVITGLYEKPSLSAQPGPTVLAGESVTLSCSSWSSYDMYHLSTEGEAHERRFSAGPKVNGTFQADFPLGPATQGGTYRCFGSFHDSPYEWSKSSDPLLVSVTGNPSNSWPSPTEPSSKTGNPRHLH

SEQ ID NO: 768 - protein, 224 aa, Homo Sapiens
QEGVHRKPSFLALPGHLVKSEETVILQCWSDVMFEHFLLHREGKFNNTLHLIGEHHDGVSKANFSIGPMMPVLAGTYRCYGSVPHSPYQLSAPSDPLDMVIIGLYEKPSLSAQPGPTVQAGENVTLSCSSRSSYDMYHLSREGEAHERRLPAVRSINGTFQADFPLGPATHGGTYRCFGSFRDAPYEWSNSSDPLLVSVTGNPSNSWPSPTEPSSKTGNPRHLH

SEQ ID NO: 769 - protein, 224 aa, Homo Sapiens; identical to SEQ ID NO: 768

SEQ ID NO: 770 - protein, 224 aa, Homo Sapiens
HEGFRRKPSLLAHPGPLVKSEETVILQCWSDVMFEHFLLHREGTFNHTLRLIGEHIDGVSKGNFSIGRMTQDLAGTYRCYGSVTHSPYQLSAPSDPLDIVITGLYEKPSLPAQPGPTVLAGESVTLSCSSRSSYDMYHLSREGEAHERRLPAGPKVNRTFQADSPLDPATHGGAYRCFGSFRDSPYEWSKSSDPLLVSVTGNSSNSWPSPTEPSSETGNPRHLH

SEQ ID NO: 771 - protein, 319 aa, Homo Sapiens
HMGGQDKPFLSAWPSAVVPRGGHVTLRCHYRHRFNNFMLYKEDRIHVPIFHGRIFQEGFNMSPVTTAHAGNYTCRGSHPHSPTGWSAPSNPMVIMVTGNHRKPSLLAHPGPLVKSGERVILQCWSDIMFEHFFLHKEGISKDPSRLVGQIHDGVSKANFSIGPMMLALAGTYRCYGSVTHTPYQLSAPSDPLDIVVTGPYEKPSLSAQPGPKVQAGESVTLSCSSRSSYDMYHLSREGGAHERRLPAVRKVNRTFQADFPLGPATHGGTYRCFGSFRHSPYEWSDPSDPLLVSVTGNPSSSWPSPTEPSSKSGNPRHLH

SEQ ID NO: 772 - protein, 319 aa, Homo Sapiens
LMGGQDKPFLSARPSTVVPRGGHVALQCHYRRGFNNFMLYKEDRSHVPIFHGRIFQESFIMGPVTPAHAGTYRCRGSRPHSLTGWSAPSNPLVIMVTGNHRKPSLLAHPGPLLKSGETVILQCWSDVMFEHFFLHREGISEDPSRLVGQIHDGVSKANFSIGPLMPVLAGTYRCYGSVPHSPYQLSAPSDPLDIVITGLYEKPSLSAQPGPTVQAGENVTLSCSSWSSYDIYHLSREGEAHERRLRAVPKVNRTFQADFPLGPATHGGTYRCFGSFRALPCVWSNSSDPLLVSVTGNPSSSWPSPTEPSSKSGICRHLH

SEQ ID NO: 773 - protein, 297 aa, Homo Sapiens
QDKPFLSAWPGTVVSEGQHVTLQCRSHLGFNEFSLSKEDGMPVPELYNRIFRNSFLMGPVTPAHAGTYRCCSSHPHSPTGWSAPSNPVVIMVTGVHRKPSLLAHPGPLVKSGETVILQCWSDVRFERFLLHREGITEDPLRLVGQLHDAGSQVNYSMGPMTPALAGTYRCFGSVTHLPYELSAPSDPLDIVVVGLYGKPSLSAQPGPTVQAGENVTLSCSSRSLFDIYHLSREAEAGELRLTAVLRVNGTFQANFPLGPVTHGGNYRCFGSFRALPHAWSDPSDPLPVSVTGNSRYL

SEQ ID NO: 774 - protein, 307 aa, Homo Sapiens
HEGGQDKPFLSAWPSPVVSEGEHVALQCRSRLGFNEFSLSKEDGMPVPELYNRVFRNTVFIGPVTPAHAGTYRCRGSHPHFLTGWSAPSNPLVIMVTGVHRKPSLLAHPGPLVKSEETVILQCWSDVMFEHFLLHREGKFNDTLRLTGELHDGVSKANFSIGRMTQDLAGTYRCYGSVPHSPYQLSAPSDPLDIVITGLCGKPSLSAQPRPMVKAGESVTLSCSSRSSYDIYHLSREGEAHELRFPAVPKVNGTFQANFPLGPATHGGTYRCFGSFRDSPYEWSDLSDPLLVSVTDSMKEKGKDVIL

SEQ ID NO: 775 - protein, 319 aa, Homo Sapiens
HMGGQDKPFLSAWPSAVVPRGGHVTLRCHYRHRFNNFMLYKEDRIHVPIFHGRIFQEGFNMSPVTTAHAGNYTCRGSHPHSPTGWSAPSNPMVIMVTGNHRKPSLLAHPGPLVKSGERVILQCWSDIMFEHFFLHKEWISKDPSRLVGQIHDGVSKANFSIGSMMRALAGTYRCYGSVTHTPYQLSAPSDPLDIVVTGLYEKPSLSAQPGPKVQAGESVTLSCSSRSSYDMYHLSREGGAHERRLPAVRKVNRTFQADFPLGPATHGGTYRCFGSFRHSPYEWSDPSDPLLVSVTGNPSSSWPSPTEPSSKSGNLRHLH

SEQ ID NO: 776 - protein, 336 aa, Homo Sapiens
QKICPHAGAQDKFSLSAWPSPVVPLGGRVTLSCHSHLRFVIWTIFQTTGTRSHELHTGLSNNITISPVTPEHAGTYRCVGIYKHASKWSAESNSLKIIVTGLFTKPSISAHPSSLVHAGARVSLRCHSELAFDEFILYKEGHIQHSQQLDQGMEAGIHYVEAVFSMGPVTPAHAGAYRCCGCFSHSRYEWSAPSDPLDIVITGKYKKPSLSTQVDPMMRLGEKLTLFCSSEISFDQYHLFRHGVAHGQWLSGGQRHREAFQANFSVGRATPVPGGTYRCYGSFNDSPYKPPVTRCNFTPQETLRVLLCHSQNPPLNLTHLALKDSPATCICSLDSQ

SEQ ID NO: 777 - protein, 483 aa, Homo Sapiens
QGTQTRFSQEPADQTVVAGQRAVLPCVLLNYSGIVQWTKDGLALGMGQGLKAWPRYRVVGSADAGQYNLEITDAELSDDASYECQATEAALRSRRAKLTVLIPPEDTRIDGGPVILLQAGTPHNLTCRAFNAKPAATIIWFRDGTQQEGAVASTELLKDGKRETTVSQLLINPTDLDIGRVFTCRSMNEAIPSGKETSIELDVHHPPTVTLSIEPQTVQEGERVVFTCQATANPEILGYRWAKGGFLIEDAHESRYETNVDYSFFTEPVSCEVHNKVGSTNVSTLVNVHFAPRIVVDPKPTTTDIGSDVTLTCVWVGNPPLTLTWTKKDSNMVLSNSNQLLLKSVTQADAGTYTCRAIVPRIGVAEREVPLYVNGPPIISSEAVQYAVRGDGGKVECFIGSTPPPDRIAWAWKENFLEVGTLERYTVERTNSGSGVLSTLTINNVMEADFQTHYNCTAWNSFGPGTAIIQLEEREVLPVGIIA

SEQ ID NO: 778 - protein, 470 aa, Homo Sapiens
GPSPHFLQQPEDLVVLLGEEARLPCALGAYWGLVQWTKSGLALGGQRDLPGWSRYWISGNAANGQHDLHIRPVELEDEASYECQATQAGLRSRPAQLHVLVPPEAPQVLGGPSVSLVAGVPANLTCRSRGDARPTPELLWFRDGVLLDGATFHQTLLKEGTPGSVESTLTLPTGRDTAITLSLQYPPEVTLSASPHTVQEGEKVIFLCQATAQPPVTGYRWAKGGSPVLGARGPRLEVVADASFLTEPVSCEVSNAVGSANRSTALDVLFGPILQAKPEPVSVDVGEDASFSCAWRGNPLPRVTWTRRGGAQVLGSGATLRLPSVGPEDAGDYVCRAEAGLSGLRGGAAEARLTVNAPPVVTALHSAPAFLRGPARLQCLVFASPAPDAVVWSWDEGFLEAGSQGRFLVETFPAPESRGGLGPGLISVLHISGTQESDFSRSFNCSARNRLGEGGAQASLGRRDLLPTVR

SEQ ID NO: 779 - protein, 514 aa, Homo Sapiens
LQKRGCCLVLGYMAKDKFRRMNEGQVYSFSQQPQDQVVVSGQPVTLLCAIPEYDGFVLWIKDGLALGVGRDLSSYPQYLVVGNHLSGEHHLKILRAELQDDAVYECQAIQAAIRSRPARLTVLVPPDDPVILGGPVISLRAGDPLNLTCHADNAKPAASIIWLRKGEVINGATYSKTLLRDGKRESIVSTLFISPGDVENGQSIVCRATNKAIPGGKETSVTIDIQHPPLVNLSVEPQPVLEDNVVTFHCSAKANPAVTQYRWAKRGQIIKEASGEVYRTTVDYTYFSEPVSCEVTNALGSTNLSRTVDVYFGPRMTTEPQSLLVDLGSDAIFSCAWTGNPSLTIVWMKRGSGVVLSNEKTLTLKSVRQEDAGKYVCRAVVPRVGAGEREVTLTVNGPPIISSTQTQHALHGEKGQIKCFIRSTPPPDRIAWSWKENVLESGTSGRYTVETISTEEGVISTLTISNIVRADFQTIYNCTAWNSFGSDTEIIRLKEQGSEMKSGAGLEAESVPMA

SEQ ID NO: 780 - protein, 499 aa, Homo Sapiens
QPSVSPGEPSPPSIHPGKSDLIVRVGDEIRLLCTDPGFVKWTFEILDETNENKQNEWITEKAEATNTGKYTCTNKHGLSNSIYVFVRDPAKLFLVDRSLYGKEDNDTLVRCPLTDPEVTNYSLKGCQGKPLPKDLRFIPDPKAGIMIKSVKRAYHRLCLHCSVDQEGKSVLSEKFILKVRPAFKAVPVVSVSKASYLLREGEEFTVTCTIKDVSSSVYSTWKRENSQTKLQEKYNSWHHGDFNYERQATLTISSARVNDSGVFMCYANNTFGSANVTTTLEVVDKGFINIFPMINTTVFVNDGENVDLIVEYEAFPKPEHQQWIYMNRTFTDKWEDYPKSENESNIRYVSELHLTRLKGTEGGTYTFLVSNSDVNAAIAFNVYVNTKPEILTYDRLVNGMLQCVAAGFPEPTIDWYFCPGTEQRCSASVLPVDVQTLNSSGPPFGKLVVQSSIDSSAFKHNGTVECKAYNDVGKTSAYFNFAFKGNNKEQIHPHTLFTP

SEQ ID NO: 781 - protein, 165 aa, Homo Sapiens
EGICRNRVTNNVKDVTKLVANLPKDYMITLKYVPGMDVLPSHCWISEMVVQLSDSLTDLLDKFSNISEGLSNYSIIDKLVNIVDDLVECVKENSSKDLKKSFKSPEPRLFTPEEFFRIFNRSIDAFKDFVVASETSDCVVSSTLSPEKDSRVSVTKPFMLPPVAA

SEQ ID NO: 782 - protein, 159 aa, Homo Sapiens
QKSSIEKCSVDIQQSRNKTTERPGLLNCPIYWQQLREKCLLFSHTVNPWNNSLADCSTKESSLLLIRDKDELIHTQNLIRDKAILFWIGLNFSLSEKNWKWINGSFLNSNDLEIRGDAKENSCISISQTSVYSEYCSTEIRWICQKELTPVRNKVYPDS

SEQ ID NO: 783 - protein, 140 aa, Homo Sapiens
PSTLIQRHNNSSLNTRTQKARHCGHCPEEWITYSNSCYYIGKERRTWEESLLACTSKNSSLLSIDNEEEMKFLSIISPSSWIGVFRNSSHHPWVTMNGLAFKHEIKDSDNAELNCAVLQVNRLKSAQCGSSIIYHCKHKL

SEQ ID NO: 784 - protein, 138 aa, Homo Sapiens
IPFLEQNNSSPNTRTQKARHCGHCPEEWITYSNSCYYIGKERRTWEESLLACTSKNSSLLSIDNEEEMKFLASILPSSWIGVFRNSSHHPWVTINGLAFKHKIKDSDNAELNCAVLQVNRLKSAQCGSSMIYHCKHKL

SEQ ID NO: 785 - protein, 147 aa, Homo Sapiens
IPFLEQNNSSPNARTQKARHCGHCPEEWITYSNSCYYIGKERRTWEESLQACASKNSSSLLCIDNEEEMKFLASILPSSWIGVFRNSSHHPWVTINGLAFKHEIKDSDHAERNCAMLHVRGLISDQCGSSRIIRRGFIMLTRLVLNS

SEQ ID NO: 786 - protein, 148 aa, Homo Sapiens
KNSFTKLSIEPAFTPGPNIELQKDSDCCSCQEKWVGYRCNCYFISSEQKTWNESRHLCASQKSSLLQLQNTDELDFMSSSQQFYWIGLSYSEEHTAWLWENGSALSQYLFPSFETFNTKNCIAYNPNGNALDESCEDKNRYICKQQLI

SEQ ID NO: 787 - protein, 173 aa, Homo Sapiens
LLVSQGVLLKCQKGSCSNATQYEDTGDLKVNNGTRRNISNKDLCASRSADQTVLCQSEWLKYQGKCCYWFSNEMKSWSDSYVYCLERKSHLLIIHDQLEMAFIQKNLRQLNYVWIGLNFTSLKMTWTWVDGSPIDSKIFFIKGPAKENSCAAIKESKIFSETCSSVFKWICQY

SEQ ID NO: 788 - protein, 156 aa, Homo Sapiens
DLKFWHKKMDFSQNVNVSSLSGHNYLCPNDWLLNEGKCYWFSTSFKTWKESQRDCTQLQAHLLVIQNLDELEFIQNSLKPGHFGWIGLYVTFQGNLWMWIDEHFLVPELFSVIGPTDDRSCAVITGNWVYSEDCSSTFKGICQRDAILTHNGTSGV

SEQ ID NO: 789 - protein, 136 aa, Homo Sapiens [sequence omitted]

SEQ ID NO: 790 - protein, 144 aa, Homo Sapiens
IWSAVFLNSLFNQEVQIPLTESYCGPCPKNWICYKNNCYQFFDESKNWYESQASCMSQNASLLKVYSKEDQDLLKLVKSYHWMGLVHIPTNGSWQWEDGSILSPNLLTIIEMQKGDCALYASSFKGYIENCSTPNTYICMQRTV

SEQ ID NO: 791 - protein, 204 aa, Homo Sapiens
QAPRQKQGSTGEEFHFQTGGRDSCTMRPSSLGQGAGEVWLRVDCRNTDQTYWCEYRGQPSMCQAFAADPKPYWNQALQELRRLHHACQGAPVLRPSVCREAGPQAHMQQVTSSLKGSPEPNQQPEAGTPSLRPKATVKLTEATQLGKDSMEELGKAKPTTRPTAKPTQPGPRPGGNEEAKKKAWEHCWKPFQALCAFLISFFRG

SEQ ID NO: 792 - protein, 1101 aa, Homo Sapiens
IQIPEEYEGHHVMEPPVITEQSPRRLVVFPTDDISLKCEASGKPEVQFRWTRDGVHFKPKEELGVTVYQSPHSGSFTITGNNSNFAQRFQGIYRCFASNKLGTAMSHEIRLMAEGAPKWPKETVKPVEVEEGESVVLPCNPPPSAEPLRIYWMNSKILHIKQDERVTMGQNGNLYFANVLTSDNHSDYICHAHFPGTRTIIQKEPIDLRVKATNSMIDRKPRLLFPTNSSSHLVALQGQPLVLECIAEGFPTPTIKWLRPSGPMPADRVTYQNHNKTLQLLKVGEEDDGEYRCLAENSLGSARHAYYVTVEAAPYWLHKPQSHLYGPGETARLDCQVQGRPQPEVTWRINGIPVEELAKDQKYRIQRGALILSNVQPSDTMVTQCEARNRHGLLLANAYIYVVQLPAKILTADNQTYMAVQGSTAYLLCKAFGAPVPSVQWLDEDGTTVLQDERFFPYANGTLGIRDLQANDTGRYFCLAANDQNNVTIMANLKVKDATQITQGPRSTIEKKGSRVTFTCQASFDPSLQPSITWRGDGRDLQELGDSDKYFIEDGRLVIHSLDYSDQGNYSCVASTELDVVESRAQLLVVGSPGPVPRLVLSDLHLLTQSQVRVSWSPAEDHNAPIEKYDIEFEDKEMAPEKWYSLGKVPGNQTSTTLKLSPYVHYTFRVTAINKYGPGEPSPVSETVVTPEAAPEKNPVDVKGEGNETTNMVITWKPLRWMDWNAPQVQYRVQWRPQGTRGPWQEQIVSDPFLVVSNTSTFVPYEIKVQAVNSQGKGPEPQVTIGYSGEDYPQAIPELEGIEILNSSAVLVKWRPVDLAQVKGHLRGYNVTYWREGSQRKHSKRHIHKDHVVVPANTTSVILSGLRPYSSYHLEVQAFNGRGSGPASEFTFSTPEGVPGHPEALHLECQSNTSLLLRWQPPLSHNGVLTGYVLSYHPLDEGGKGQLSFNLRDPELRTHNLTDLSPHLRYRFQLQATTKEGPGEAIVREGGTMALSGISDFGNISATAGENYSVVSWVPKEGQCNFRFHILFKALGEEKGGASLSPQYVSYNQSSYTQWDLQPDTDYEIHLFKERMFRHQMAVKTNGTGRVRLPPAGFATE

SEQ ID NO: 793 - protein, 332 aa, Homo Sapiens
VPVVWAQEGAPAQLPCSPTIPLQDLSLLRRAGVTWQHQPDSGPPAAAPGHPLAPGPHPAAPSSWGPRPRRYTVLSVGPGGLRSGRLPLQPRVQLDERGRQRGDFSLWLRPARRADAGEYRAAVHLRDRALSCRLRLRLGQASMTASPPGSLRASDWVILNCSFSRPDRPASVHWFRNRGQGRVPVRESPHHHLAESFLFLPQVSPMDSGPWGCILTYRDGFNVSIMYNLTVLGLEPPTPLTVYAGAGSRVGLPCRLPAGVGTRSFLTAKWTPPGGGPDLLVTGDNGDFTLRLEDVSQAQAGTYTCHIHLQEQQLNATVTLAIITGQPQVGKE

SEQ ID NO: 794 - protein, 144 aa, Homo Sapiens
QEEDLPRPSISAEPGTVIPLGSHVTFVCRGPVGVQTFRLERESRSTYNDTEDVSQASPSESEARFRIDSVSEGNAGPYRCIYYKPPKWSEQSDYLELLVKETSGGPDSPDTEPGSSAGPTQRPSDNSHNEHAPASQGLKAEHLY

SEQ ID NO: 795 - protein, 131 aa, Homo Sapiens
QEGALPRPSISAEPGTVISPGSHVTFMCRGPVGVQTFRLEREDRAKYKDSYNVFRLGPSESEARFHIDSVSEGNAGLYRCLYYKPPGWSEHSDFLELLVKESSGGPDSPDTEPGSSAGTVPGTEASGFDAP

SEQ ID NO: 796 - protein, 2573 aa, Homo Sapiens
CFCFGVSDVCSSLSWPVGQVNSMSGWLVTDLISPRKIPSQQDALGGRHQVSINNTAVMQRLAPKYYWAAPEAYLGNKLTAFGGFLKYTVSYDIPVETVDSNLMSHADVIIKGNGLTLSTQAEGLSLQPYEEYLNVVRLVPENFQDFHSKRQIDRDQLMTVIANVTHLLIRANYNSAKMALYRLESVSLDIASSNAIDLVVAADVEHCECPQGYTGTSCESCLSGYYRVDGILFGGICQPCECHGHAAECNVHGVCIACAHNTTGVHCEQCLPGFYGEPSRGTPGDCQPCACPLTIASNNFSPTCHLNDGDEVVCDWCAPGYSGAWCERCADGYYGNPTVPGESCVPCDCSGNVDPSEAGHCDSVTGECLKCLGNTDGAHCERCADGFYGDAVTAKNCRACECHVKGSHSAVCHLETGLCDCKPNVTGQQCDQCLHGYYGLDSGHGCRPCNCSVAGSVSDGCTDEGQCHCVPGVAGKRCDRCAHGFYAYQDGSCTPCDCPHTQNTCDPETGECVCPPHTQGVKCEECEDGHWGYDAEVGCQACNCSLVGSTHHRCDVVTGHCQCKSKFGGRACDQCSLGYRDFPDCVPCDCDLRGTSGDACNLEQGLCGCVEETGACPCKENVFGPQCNECREGTFALRADNPLGCSPCFCSGLSHLCSELEDYVRTPVTLGSDQPLLRVVSQSNLRGTTEGVYYQAPDFLLDAATVRQHIRAEPFYWRLPQQFQGDQLMAYGGKLKYSVAFYSLDGVGTSNFEPQVLIKGGRIRKQVIYMDAPAPENGVRQEQEVAMRENFWKYFNSVSEKPVTREDFMSVLSDIEYILIKASYGQGLQQSRISDISMEVGRKAEKLHPEEEVASLLENCVCPPGTVGFSCQDCAPGYHRGKLPAGSDRGPRPLVAPCVPCSCNNHSDTCDPNTGKCLNCGDNTAGDHCDVCTSGYYGKVTGSASDCALCACPHSPPASFSPTCVLEGDHDFRCDACLLGYEGKHCERCSSSYYGNPQTPGGSCQKCDCNPHGSVHGDCDRTSGQCVCRLGASGLRCDECEPRHILMETDCVSCDDECVGVLLNDLDEIGDAVLSLNLAGIIPVPYGILSNLENTTKYLQESLLKENMQKDLGKIKLEGVAEETDNLQKKLTRMLASTQKVNRATERIFKESQDLAIAIERLQMSITEIMEKTTLNQTLDEDFLLPNSTLQNMQQNGTSLLEIMQIRDFTQLHQNATLELKAAEDLLSQIQENYQKPLEELEVLKEAASHVLSKHNNELKAAEALVREAEAKMQESNHLLLMVNANLREFSDKKLHVQEEQNLTSELIVQGRGLIDAAAAQTDAVQDALEHLEDHQDKLLLWSAKIRHHIDDLVMHMSQRNAVDLVYRAEDHAAEFQRLADVLYSGLENIRNVSLNATSAAYVHYNIQSLIEESEELARDAHRTVTETSLLSESLVSNGKAAVQRSSRFLKEGNNLSRKLPGIALELSELRNKTNRFQENAVEITRQTNESLLILRAIPKGIRDKGAKTKELATSASQSAVSTLRDVAGLSQELLNTSASLSRVNTTLRETHQLLQDSTMATLLAGRKVKDVETQANLLFDRLKPLKMLEENLSRNLSEIKLLISQARKQAASIKVAVSADRDCIRAYQPQISSTNYNTLTLNVKTQEPDNLLFYLGSSTASDFLAVEMRRGRVAFLWDLGSGSTRLEFPDFPIDDNRWHSIHVARFGNIGSLSVKEMSSNQKSPTKTSKSPGTANVLDVNNSTLMFVGGLGGQIKKSPAVKVTHFKGCLGEAFLNGKSIGLWNYIEREGKCRGCFGSSQNEDPSFHFDGSGYSVVEKSLPATVTQIIMLFNTFSPNGLLLYLGSYGTKDFLSIELFRGRVKVMTDLGSGPITLLTDRRYNNGTWYKIAFQRNRKQGVLAVIDAYNTSNKETKQGETPGASSDLNRLDKDPIYVGGLPRSRVVRRGVTTKSFVGCIKNLEISRSTFDLLRNSYGVRKGCLLEPIRSVSFLKGGYIELPPKSLSPESEWLVTFATTNSSGIILAALGGDVEKRGDREEAHVPFFSVMLIGGNIEVHVNPGDGTGLRKALLHAPTGTCSDGQAHSISLVRNRRIITVQLDENNPVEMKLGTLVESRTINVSNLYVGGIPEGEGTSLLTMRRSFHGCIKNLIFNLELLDFNSAVGHEQVDLDTCWLSERPKLAPDAEDSKLLPEPRAFPEQCVVDAALEYVPGAHQFGLTQNSHFILPFNQSAVRKKLSVELSIRTFASSGLIYYMAHQNQADYAVLQLHGGRLHFMFDLGKGRTKVSHPALLSDGKWHTVKTDYVKRKGFITVDGRESPMVTVVGDGTMLDVEGLFYLGGLPSQYQARKIGNITHSIPACIGDVTVNSKQLDKDSPVSAFTVNRCYAVAQEGTYFDGSGYAALVKEGYKVQSDVNITLEFRTSSQNGVLLGISTAKVDAIGLELVDGKVLFHVNNGAGRITAAYEPKTATVLCDGKWHTLQANKSKHRITLIVDGNAVGAESPHTQSTSVDTNNPIYVGGYPAGVKQKCLRSQTSFRGCLRKLALIKSPQVQSFDFSRAFELHGVFLHSCPGTES

SEQ ID NO: 797 - protein, 171 aa, Homo Sapiens
CVCNGHAEVCNINNPEKLFRCECQHHTCGETCDRCCTGYNQRRWRPAAWEQSHECEACNCHGHASNCYYDPDVERQQASLNTQGIYAGGGVCINCQHNTAGVNCEQCAKGYYRPYGVPVDAPDGCIPCSCDPEHADGCEQGSGRCHCKPNFHGDNCEKCAIGYYNFPFCLR

SEQ ID NO: 798 - protein, 1765 aa, Homo Sapiens
QEPEFSYGCAEGSCYPATGDLLIGRAQKLSVTSTCGLHKPEPYCIVSHLQEDKKCFICNSQDPYHETLNPDSHLIENVVTTFAPNRLKIWWQSENGVENVTIQLDLEAEFHFTHLIMTFKTFRPAAMLIERSSDFGKTWGVYRYFAYDCEASFPGISTGPMKKVDDIICDSRYSDIEPSTEGEVIFRALDPAFKIEDPYSPRIQNLLKITNLRIKFVKLHTLGDNLLDSRMEIREKYYYAVYDMVVRGNCFCYGHASECAPVDGFNEEVEGMVHGHCMCRHNTKGLNCELCMDFYHDLPWRPAEGRNSNACKKCNCNEHSISCHFDMAVYLATGNVSGGVCDDCQHNTMGRNCEQCKPFYYQHPERDIRDPNFCERCTCDPAGSQNEGICDSYTDFSTGLIAGQCRCKLNVEGEHCDVCKEGFYDLSSEDPFGCKSCACNPLGTIPGGNPCDSETGHCYCKRLVTGQHCDQCLPEHWGLSNDLDGCRPCDCDLGGALNNSCFAESGQCSCRPHMIGRQCNEVEPGYYFATLDHYLYEAEEANLGPGVSIVERQYIQDRIPSWTGAGFVRVPEGAYLEFFIDNIPYSMEYDILIRYEPQLPDHWEKAVITVQRPGRIPTSSRCGNTIPDDDNQVVSLSPGSRYVVLPRPVCFEKGTNYTVRLELPQYTSSDSDVESPYTLIDSLVLMPYCKSLDIFTVGGSGDGVVTNSAWETFQRYRCLENSRSVVKTPMTDVCRNIIFSISALLHQTGLACECDPQGSLSSVCDPNGGQCQCRPNVVGRTCNRCAPGTFGFGPSGCKPCECHLQGSVNAFCNPVTGQCHCFQGVYARQCDRCLPGHWGFPSCQPCQCNGHADDCDPVTGECLNCQDYTMGHNCERCLAGYYGDPIIGSGDHCRPCPCPDGPDSGRQFARSCYQDPVTLQLACVCDPGYIGSRCDDCASGYFGNPSEVGGSCQPCQCHNNIDTTDPEACDKETGRCLKCLYHTEGEHCQFCRFGYYGDALQQDCRKCVCNYLGTVQEHCNGSDCQCDKATGQCLCLPNVIGQNCDRCAPNTWQLASGTGCDPCNCNAAHSFGPSCNEFTGQCQCMPGFGGRTCSECQELFWGDPDVECRACDCDPRGIETPQCDQSTGQCVCVEGVEGPRCDKCTRGYSGVFPDCTPCHQCFALWDVIIAELTNRTHRFLEKAKALKISGVIGPYRETVDSVERKVSEIKDILAQSPAAEPLKNIGNLFEEAEKLIKDVTEMMAQVEVKLSDTTSQSNSTAKELDSLQTEAESLDNTVKELAEQLEFIKNSDIRGALDSITKYFQMSLEAEERVNASTTEPNSTVEQSALMRDRVEDVMMERESQFKEKQEEQARLLDELAGKLQSLDLSAAAEMTCGTPPGASCSETECGGPNCRTDEGERKCGGPGCGGLVTVAHNAWQKAMDLDQDVLSALAEVEQLSKMVSEAKLRADEAKQSAEDILLKTNATKEKMDKSNEELRNLIKQIRNFLTQDSADLDSIEAVANEVLKMEMPSTPQQLQNLTEDIRERVESLSQVEVILQHSAADIARAEMLLEEAKRASKSATDVKVTADMVKEALEEAEKAQVAAEKAIKQADEDIQGTQNLLTSIESETAASEETLFNASQRISELERNVEELKRKAAQNSGEAEYIEKVVYTVKQSAEDVKKTLDGELDEKYKKVENLIAKKTEESADARRKAEMLQNEAKTLLAQANSKLQLLKDLERKYEDNQRYLEDKAQELARLEGEVRSLLKDISQKVAVYSTCL

SEQ ID NO: 799 - protein, 1155 aa, Homo Sapiens
QQACSRGACYPPVGDLLVGRTRFLRASSTCGLTKPETYCTQYGEWQMKCCKCDSRQPHNYYSHRVENVASSSGPMRWWQSQNDVNPVSLQLDLDRRFQLQEVMMEFQGPMPAGMLIERSSDFGKTWRVYQYLAADCTSTFPRVRQGRPQSWQDVRCQSLPQRPNARLNGGKVQLNLMDLVSGIPATQSQKIQEVGEITNLRVNFTRLAPVPQRGYHPPSAYYAVSQLRLQGSCFCHGHADRCAPKPGASAGPSTAVQVHDVCVCQHNTAGPNCERCAPFYNNRPWRPAEGQDAHECQRCDCNGHSETCHFDPAVFAASQGAYGGVCDNCRDHTEGKNCERCQLHYFRNRRPGASIQETCISCECDPDGAVPGAPCDPVTGQCVCKEHVQGERCDLCKPGFTGLTYANPQGCHRCDCNILGSRRDMPCDEESGRCLCLPNVVGPKCDQCAPYHWKLASGQGCEPCACDPHNSLSPQCNQFTGQCPCREGFGGLMCSAAAIRQCPDRTYGDVATGCRACDCDFRGTEGPGCDKASGRCLCRPGLTGPRCDQCQRGYCNRYPVCVACHPCFQTYDADLREQALRFGRLRNATASLWSGPGLEDRGLASRILDAKSKIEQIRAVLSSPAVTEQEVAQVASAILSLRRTLQGLQLDLPLEEETLSLPRDLESLDRSFNGLLTMYQRKREQFEKISSADPSGAFRMLSTAYEQSAQAAQQVSDSSRLLDQLRDSRREAERLVRQAGGGGGTGSPKLVALRLEMSSLPDLTPTFNKLCGNSRQMACTPISCPGELCPQDNGTACGSRCRGVLPRAGGAFLMAGQVAEQLRGFNAQLQRTRQMIRAAEESASQIQSSAQRLETQVSASRSQMEEDVRRTRLLIQQVRDFLTDPDTDAATIQEVSEAVLALWLPTDSATVLQKMNEIQAIAARLPNVDLVLSQTKQDIARARRLQAEAEEARSRAHAVEGQVEDVVGNLRQGTVALQEAQDTMQGTSRSLRLIQDRVAEVQQVLRPAEKLVTSMTKQLGDFWTRMEELRHQARQQGAEAVQAQQLAEGASEQALSAQEGFERIKQKYAELKDRLGQSSMLGEQGARIQSVKTEAEELFGETMEMMDRMKDMELELLRGSQAIMLRSADLTGLEKRVEQIRDHINGRVLYYATCK

SEQ ID NO: 800 - protein, 1742 aa, Homo Sapiens
QDDCNRGACHPTTGDLLVGRNTQLMASSTCGLSRAQKYCILSYLEGEQKCFICDSRFPYDPYDQPNSHTIENVIVSFEPDREKKWWQSENGLDHVSIRLDLEALFRFSHLILTFKTFRPAAMLVERSTDYGHNWKVFKYFAKDCATSFPNITSGQAQGVGDIVCDSKYSDIEPSTGGEVVLKVLDPSFEIENPYSPYIQDLVTLTNLRINFTKLHTLGDALLGRRQNDSLDKYYYALYEMIVRGSCFCNGHASECRPMQKMRGDVFSPPGMVHGQCVCQHNTDGPNCERCKDFFQDAPWRPAADLQDNACRSCSCNSHSSRCHFDMTTYLASGGLSGGVCEDCQHNTEGQHCDRCRPLFYRDPLKTISDPYACIPCECDPDGTISGGICVSHSDPALGSVAGQCLCKENVEGAKCDQCKPNHYGLSATDPLGCQPCDCNPLGSLPFLTCDVDTGQCLCLSYVTGAHCEECTVGYWGLGNHLHGCSPCDCDIGGAYSNVCSPKNGQCECRPHVTGRSCSEPAPGYFFAPLNFYLYEAEEATTLQGLAPLGSETFGQSPAVHVVLGEPVPGNPVTWTGPGFARVLPGAGLRFAVNNIPFPVDFTIAIHYETQSAADWTVQIVVNPPGGSEHCIPKTLQSKPQSFALPAATRIMLLPTPICLEPDVQYSIDVYFSQPLQGESHAHSHVLVDSLGLIPQINSLENFCSKQDLDEYQLHNCVEIASAMGPQVLPGACERLIISMSAKLHDGAVACKCHPQGSVGSSCSRLGGQCQCKPLVVGRCCDRCSTGSYDLGHHGCHPCHCHPQGSKDTVCDQVTGQCPCHGEVSGRRCDRCLAGYFGFPSCHPCPCNRFAELCDPETGSCFNCGGFTTGRNCERCIDGYYGNPSSGQPCRPCLCPDDPSSNQYFAHSCYQNLWSSDVICNCLQGYTGTQCGECSTGFYGNPRISGAPCQPCACNNNIDVTDPESCSRVTGECLRCLHNTQGANCQLCKPGHYGSALNQTCRRCSCHASGVSPMECPPGGGACLCDPVTGACPCLPNVTGLACDRCADGYWNLVPGRGCQSCDCDPRTSQSSHCDQLTGQCPCKLGYGGKRCSECQENYYGDPPGRCIPCDCNRAGTQKPICDPDTGMCRCREGVSGQRCDRCARGHSQEFPTCLQCHLCFDQWDHTISSLSKAVQGLMRLAANMEDKRETLPVCEADFKDLRGNVSEIERILKHPVFPSGKFLKVKDYHDSVRRQIMQLNEQLKAVYEFQDLKDTIERAKNEADLLLEDLQEEIDLQSSVLNASIADSSENIKKYYHISSSAEKKINETSSTINTSANTRNDLLTILDTLTSKGNLSLERLKQIKIPDIQILNEKVCGDPGNVPCVPLPCGGALCTGRKGHRKCRGPGCHGSLTLSTNALQKAQEAKSIIRNLDKQVRGLKNQIESISEQAEVSKNNALQLREKLGNIRNQSDSEEENINLFIKKVKNFLLEENVPPEDIEKVANGVLDIHLPIPSQNLTDELVKIQKHMQLCEDYRTDENRLNEEADGAQKLLVKAKAAEKAANILLNLDKTLNQLQQAQITQGRANSTITQLTANITKIKKNVLQAENQTREMKSELELAKQRSGLEDGLSLLQTKLQRHQDHAVNAKVQAESAQHQAGSLEKEFVELKKQYAILQRKTSTTGLTKETLGKVKQLKDAAEKLAGDTEAKIRRITDLERKIQDLNLSRQAKADQLRILEDQVVAIKNEIVEQEKKYARCYS

SEQ ID NO: 801 - protein, 215 aa, Homo Sapiens
QAAMDECTDEGGRPQRCMPEFVNAAFNVTVVATNTCGTPPEEYCVQTGVTGVTKSCHLCDAGQPHLQHGAAFLTDYNNQADTTWWQSQTMLAGVQYPSSINLTLHLGKAFDITYVRLKFHTSRPESFAIYKRTREDGPWIPYQYYSGSCENTYSKANRGFIRTGGDEQQALCTDEFSDISPLTGGNVAFSTLEGRPSAYNFDNSPVLQVNSHRLA

SEQ ID NO: 802 - protein, 1090 aa, Homo Sapiens
TSRREVCDCNGKSRQCIFDRELHRQTGNGFRCLNCNDNTDGIHCEKCKNGFYRHRERDRCLPCNCNSKGSLSARCDNSGRCSCKPGVTGARCDRCLPGFHMLTDAGCTQDQRLLDSKCDCDPAGIAGPCDAGRCVCKPAVTGERCDRCRSGYYNLDGGNPEGCTQCFCYGHSASCRSSAEYSVHKITSTFHQDVDGWKAVQRNGSPAKLQWSQRHQDVFSSAQRLDPVYFVAPAKFLGNQQVSYGQSLSFDYRVDRGGRHPSAHDVILEGAGLRITAPLMPLGKTLPCGLTKTYTFRLNEHPSNNWSPQLSYFEYRRLLRNLTALRIRATYGEYSTGYIDNVTLISARPVSGAPAPWVEQCICPVGYKGQFCQDCASGYKRDSARLGPFGTCIPCNCQGGGACDPDTGDCYSGDENPDIECADCPIGFYNDPHDPRSCKPCPCHNGFSCSVMPETEEVVCNNCPPGVTGARCELCADGYFGDPFGEHGPVRPCQPCQCNNNVDPSASGNCDRLTGRCLKCIHNTAGIYCDQCKAGYFGDPLAPNPADKCRACNCNPMGSEPVGCRSDGTCVCKPGFGGPNCEHGAFSCPACYNQVKIQMDQFMQQLQRMEALISKAQGGDGVVPDTELEGRMQQAEQALQDILRDAQISEGASRSLGLQLAKVRSQENSYQSRLDDLKMTVERVRALGSQYQNRVRDTHRLITQMQLSLAESEASLGNTNIPASDHYVGPNGFKSLAQEATRLAESHVESASNMEQLTRETEDYSKQALSLVRKALHEGVGSGSGSPDGAVVQGLVEKLEKTKSLAQQLTREATQAEIEADRSYQHSLRLLDSVSRLQGVSDQSFQVEEAKRIKQKADSLSSLVTRHMDEFKRTQKNLGNWKEEAQQLLQNGKSGREKSDQLLSRANLAKSRAQEALSMGNATFYEVESILKNLREFDLQVDNRKAEAEEAMKRLSYISQKVSDASDKTQQAERALGSAAADAQRAKNGAGEALEISSEIEQEIGSLNLEANVTADGALAMEKGLASLKSEMREVEGELERKELEFDTNMDAVQMVITEAQKVDTRAKNAGVTIQDTLNTLDGLLHLMGM

SEQ ID NO: 803 - protein, 206 aa, Homo Sapiens
ATGRLLSGQPVCRGGTQRPCYKVIYFHDTSRRLNFEEAKEACRRDGGQLVSIESEDEQKLIEKFIENLLPSDGDFWIGLRRREEKQSNSTACQDLYAWTDGSISQFRNWYVDEPSCGSEVCVVMYHQPSAPAGIGGPYMFQWNDDRCNMKNNFICKYSDEKPAVPSREAEGEETELTTPVLPEETQEEDAKKTFKESREAALNLAY

SEQ ID NO: 804 - protein, 767 aa, Homo Sapiens
AVGDRCERNEFQCQDGKCISYKWVCDGSAECQDGSDESQETCLSVTCKSGDFSCGGRVNRCIPQFWRCDGQVDCDNGSDEQGCPPKTCSQDEFRCHDGKCISRQFVCDSDRDCLDGSDEASCPVLTCGPASFQCNSSTCIPQLWACDNDPDCEDGSDEWPQRCRGLYVFQGDSSPCSAFEFHCLSGECIHSSWRCDGGPDCKDKSDEENCAVATCRPDEFQCSDGNCIHGSRQCDREYDCKDMSDEVGCVNVTLCEGPNKFKCHSGECITLDKVCNMARDCRDWSDEPIKECGTNECLDNNGGCSHVCNDLKIGYECLCPDGFQLVAQRRCEDIDECQDPDTCSQLCVNLEGGYKCQCEEGFQLDPHTKACKAVGSIAYLFFTNRHEVRKMTLDRSEYTSLIPNLRNVVALDTEVASNRIYWSDLSQRMICSTQLDRAHGVSSYDTVISRDIQAPDGLAVDWIHSNIYWTDSVLGTVSVADTKGVKRKTLFRENGSKPRAIVVDPVHGFMYWTDWGTPAKIKKGGLNGVDIYSLVTENIQWPNGITLDLLSGRLYWVDSKLHSISSIDVNGGNRKTILEDEKRLAHPFSLAVFEDKVFWTDIINEAIFSANRLTGSDVNLLAENLLSPEDMVLFHNLTQPRGVNWCERTTLSNGGCQYLCLPAPQINPHSPKFTCACPDGMLLARDMRSCLTEAEAAVATQETSTVRLKVSSTAVRTQHTTTRPVPDTSRLPGATPGLTTVEIVTMSHQALGDVAGRGNEKKPSSVR

SEQ ID NO: 805 - protein, 613 aa, Homo Sapiens
FNLSYPITPWRFKLSCMPPNSTYDYFLLPAGLSKNTSNSNGHYETAVEPKFNSSGTHFSNLSKTTFHCCFRSEQDRNCSLCADNIEGKTFVSTVNSLVFQQIDANWNIQCWLKGDLKLFICYVESLFKNLFRNYNYKVHLLYVLPEVLEDSPLVPQKGSFQMVHCNCSVHECCECLVPVPTAKLNDTLLMCLKITSGGVIFQSPLMSVQPINMVKPDPPLGLHMEITDDGNLKISWSSPPLVPFPLQYQVKYSENSTTVIREADKIVSATSLLVDSILPGSSYEVQVRGKRLDGPGIWSDWSTPRVFTTQDVIYFPPKILTSVGSNVSFHCIYKKENKIVPSKEIVWWMNLAEKIPQSQYDVVSDNVSKVTFFNLNETKPRGKFTYDAVYCCNEHECHHRYAELYVIDVNINISCETDGYLTKMTCRWSTSTIQSLAESTLQLRYHRSSLYCSDIPSIHPISEPKDCYLQSDGFYECIFQPIFLLSGYTMWIRINHSLGSLDSPPTCVLPDSVVKPLPPSSVKAEITINIGLLKISWEKPVFPENNLQFQIRYGLSGKEVQWKMYEVYDAKSKSVSLPVPDLCAVYAVQVRCKRLDGLGYWSNWSNPAYTVVM

SEQ ID NO: 806 - protein, 523 aa, Homo Sapiens
KKPAKPKCPAVCTCTKDNALCENARSIPRTVPPDVISLSFVRSGFTEISEGSFLFTPSLQLLLFTSNSFDVISDDAFIGLPHLEYLFIENNNIKSISRHTFRGLKSLIHLSLANNNLQTLPKDIFKGLDSLTNVDLRGNSFNCDCKLKWLVEWLGHTNATVEDIYCEGPPEYKKRKINSLSSKDFDCIITEFAKSQDLPYQSLSIDTFSYLNDEYVVIAQPFTGKCIFLEWDHVEKTFRNYDNITGTSTVVCKPIVIETQLYVIVAQLFGGSHIYKRDSFANKFIKIQDIEILKIRKPNDIETFKIENNWYFVVADSSKAGFTTIYKWNGNGFYSHQSLHAWYRDTDVEYLEIVRTPQTLRTPHLILSSSSQRPVIYQWNKATQLFTNQTDIPNMEDVYAVKHFSVKGDVYICLTRFIGDSKVMKWGGSSFQDIQRMPSRGSMVFQPLQINNYQYAILGSDYSFTQVYNWDAEKAKFVKFQELNVQAPRSFTHVSINKRNFLFASSFKGNTQIYKHVIVDLSA

SEQ ID NO: 807 - protein, 517 aa, Homo Sapiens
QVRRLARCPATCSCTKESIICVGSSWVPRIVPGDISSLSLVNGTFSEIKDRMFSHLPSLQLLLLNSNSFTIIRDDAFAGLFHLEYLFIEGNKIETISRNAFRGLRDLTHLSLANNHIKALPRDVFSDLDSLIELDLRGNKFECDCKAKWLYLWLKMTNSTVSDVLCIGPPEYQEKKLNDVTSFDYECTTTDFVVHQTLPYQSVSVDTFNSKNDVYVAIAQPSMENCMVLEWDHIEMNFRSYDNITGQSIVGCKAILIDDQVFVVVAQLFGGSHIYKYDESWTKFVKFQDIEVSRISKPNDIELFQIDDETFFVIADSSKAGLSTVYKWNSKGFYSYQSLHEWFRDTDAEFVDIDGKSHLILSSRSQVPIILQWNKSSKKFVPHGDIPNMEDVLAVKSFRMQNTLYLSLTRFIGDSRVMRWNSKQFVEIQALPSRGAMTLQPFSFKDNHYLALGSDYTFSQIYQWDKEKQLFKKFKEIYVQAPRSFTAVSTDRRDFFFASSFKGKTKIFEHIIVDLSL

SEQ ID NO: 808 - protein, 518 aa, Homo Sapiens
KRPPKTPPCPPSCSCTRDTAFCVDSKAVPRNLPSEVISLTLVNAAFSEIQDGAFSHLPLLQFLLLNSNKFTLIGDNAFTGLSHLQYLFIENNDIWALSKFTFRGLKSLTHLSLANNNLQTLPRDIFRPLDILNDLDLRGNSLNCDCKVKWLVEWLAHTNTTVAPIYCASPPRFQEHKVQDLPLREFDCITTDFVLYQTLAFPAVSAEPFLYSSDLYLALAQPGVSACTILKWDYVERQLRDYDRIPAPSAVHCKPMVVDSQLYVVVAQLFGGSYIYHWDPNTTRFTRLQDIDPQRVRKPNDLEAFRIDGDWYFAVADSSKAGATSLYRWHQNGFYSHQALHPWHRDTDLEFVDGEGKPRLIVSSSSQAPVIYQWSRTQKQFVAQGEVTQVPDAQAVKHFRAGRDSYLCLSRYIGDSKILRWEGTRFSEVQALPSRGSLALQPFLVGGRRYLALGSDFSFTQIYQWDEGRQKFVRFQELAVQAPRAFCYMPAGDAQLLLAPSFKGQTLVYRHIVVDLSA

SEQ ID NO: 809 - protein, 518 aa, Homo Sapiens
WRPPKGKCPLRCSCSKDSALCEGSPDLPVSFSPTLLSLSLVRTGVTQLKAGSFLRIPSLHLLLFTSNSFSVIEDDAFAGLSHLQYLFIEDNEIGSISKNALRGLRSLTHLSLANNHLETLPRFLFRGLDTLTHVDLRGNPFQCDCRVLWLLQWMPTVNASVGTGACAGPASLSHMQLHHLDPKTFKCRAIELSWFQTVGESALSVEPFSYQGEPHIVLAQPFAGRCLILSWDYSLQRFRPEEELPAASVVSCKPLVLGPSLFVLAARLWGGSQLWARPSPGLRLAPTQTLAPRRLLRPNDAELLWLEGQPCFVVADASKAGSTTLLCRDGPGFYPHQSLHAWHRDTDAEALELDGRPHLLLASASQRPVLFHWTGGRFERRTDIPEAEDVYATRHFQAGGDVFLCLTRYIGDSMVMRWDGSMFRLLQQLPSRGAHVFQPLLIARDQLAILGSDFAFSQVLRLEPDKGLLEPLQELGPPALVAPRAFAHITMAGRRFLFAACFKGPTQIYQHHEIDLSA

SEQ ID NO: 810 - protein, 520 aa, Homo Sapiens
APPLCAAPCSCDGDRRVDCSGKGLTAVPEGLSAFTQALDISMNNITQLPEDAFKNFPFLEELQLAGNDLSFIHPKALSGLKELKVLTLQNNQLKTVPSEAIRGLSALQSLRLDANHITSVPEDSFEGLVQLRHLWLDDNSLTEVPVHPLSNLPTLQALTLALNKISSIPDFAFTNLSSLVVLHLHNNKIRGLSQHCFDGLDNLETLDLSYNNLGEFPQAIKARPSLKELGFHSNSISVIPDGAFDGNPLLRTIHLYDNPLSFVGNSASHNLSDLHSLVIRGASMVQQFPNLTGTVHLESLTLTGTKISSIPNNLCQEQKMLRTLDLSYNNIRDLPSFNGCHALEEISLQRNQIYQIKEGTFQGLISLRILDLSRNLIHEIHSRAFATLGPITNLDVSFNELTSFPTEGPNGLNQLKLVGNFKLKEALAAKDFVNLRSLSVPYAYQCCAFWGCDSYANLNTEDNSLQDHSVAQEKGTADAANVTSTLENEEHSQIIIHCTPSTGAFKPCEYLLGSWMIRLT

SEQ ID NO: 811 - protein, 540 aa, Homo Sapiens
GSSPRSGVLLRGCPTHCHCEPDGRMLLRVDCSDLGLSELPSNLSVFTSYLDLSMNNISQLLPNPLPSLRFLEELRLAGNALTYIPKGAFTGLYSLKVLMLQNNQLRHVPTEALQNLRSLQSLRLDANHISYVPPSCFSGLHSLRHLWLDDNALTEIPVQAFRSLSALQAMTLALNKIHHIPDYAFGNLSSLVVLHLHNNRIHSLGKKCFDGLHSLETLDLNYNNLDEFPTAIRTLSNLKELGFHSNNIRSIPEKAFVGNPSLITIHFYDNPIQFVGRSAFQHLPELRTLTLNGASQITEFPDLTGTANLESLTLTGAQISSLPQTVCNQLPNLQVLDLSYNLLEDLPSFSVCQKLQKIDLRHNEIYEIKVDTFQQLLSLRSLNLAWNKIAIIHPNAFSTLPSLIKLDLSSNLLSSFPITGLHGLTHLKLTGNHALQSLISSENFPELKVIEMPYAYQCCAFGVCENAYKISNQWNKGDNSSMDDLHKKDAGMFQAQDERDLEDFLLDFEEDLKALHSVQCSPSPGPFKPCEHLLDGWLIR

SEQ ID NO: 812 - protein, 543 aa, Homo Sapiens
APQPGPGPTACPAPCHCQEDGIMLSADCSELGLSAVPGDLDPLTAYLDLSMNNLTELQPGLFHHLRFLEELRLSGNHLSHIPGQAFSGLYSLKILMLQNNQLGGIPAEALWELPSLQSLRLDANLISLVPERSFEGLSSLRHLWLDDNALTEIPVRALNNLPALQAMTLALNRISHIPDYAFQNLTSLVVLHLHNNRIQHLGTHSFEGLHNLETLDLNYNKLQEFPVAIRTLGRLQELGFHNNNIKAIPEKAFMGNPLLQTIHFYDNPIQFVGRSAFQYLPKLHTLSLNGAMDIQEFPDLKGTTSLEILTLTRAGIRLLPSGMCQQLPRLRVLELSHNQIEELPSLHRCQKLEEIGLQHNRIWEIGADTFSQLSSLQALDLSWNAIRSIHPEAFSTLHSLVKLDLTDNQLTTLPLAGLGGLMHLKLKGNLALSQAFSKDSFPKLRILEVPYAYQCCPYGMCASFFKASGQWEAEDLHLDDEESSKRPLGLLARQAENHYDQDLDELQLEMEDSKPHPSVQCSPTPGPFKPCEYLFESWGIRLA

SEQ ID NO: 813 - protein, 416 aa, Homo Sapiens
MIVFLVFKHLFSLRLITMFFLLHFIVLINVKDFALTQGSMITPSCQKGYFPCGNLTKCLPRAFHCDGKDDCGNGADEENCGDTSGWATIFGTVHGNANSVALTQECFLKQYPQCCDCKETELECVNGDLKSVPMISNNVTLLSLKKNKIHSLPDKVFIKYTKLKKIFLQHNCIRHISRKAFFGLCNLQILYLNHNCITTLRPGIFKDLHQLTWLILDDNPITRISQRLFTGLNSLFFLSMVNNYLEALPKQMCAQMPQLNWVDLEGNRIKYLTNSTFLSCDSLTVLFLPRNQIGFVPEKTFSSLKNLGELDLSSNTITELSPHLFKDLKLLQKLNLSSNPLMYLHKNQFESLKQLQSLDLERIEIPNINTRMFQPMKNLSHIYFKNFRYCSYAPHVRICMPLTDGISSFEDLLANN

SEQ ID NO: 814 - protein, 337 aa, Homo Sapiens
EALCPEPCNCVPDGALRCPGPTAGLTRLSLAYLPVKVIPSQAFRGLNEVIKIEISQIDSLERIEANAFDNLLNLSEILIQNTKNLRYIEPGAFINLPRLKYLSICNTGIRKFPDVTKVFSSESNFILEICDNLHITTIPGNAFQGMNNESVTLKLYGNGFEEVQSHAFNGTTLTSLELKENVHLEKMHNGAFRGATGPKTLDISSTKLQALPSYGLESIQRLIATSSYSLKKLPSRETFVNLLEATLTYPSHCCAFRNLPTKEQNFSHSISENFSKQCESTVRKVNNKTLYSSMLAESELSGWDYEYGFCLPKTPRCAPEPDAFNPCEDIMGYDFLR

SEQ ID NO: 815 - protein, 180 aa, Homo Sapiens
SPLPITPVNATCAIRHPCHNNLMNQIRSQLAQLNGSANALFILYYTAQGEPFPNNLDKLCGPNVTDFPPFHANGTEKAKLVELYRIVVYLGTSLGNITRDQKILNPSALSLHSKLNATADILRGLLSNVLCRLCSKYHVGHVDVTYGPDTSGKDVFQKKKLGCQLLGKYKQIIAVLAQAF

SEQ ID NO: 816 - protein, 789 aa, Homo Sapiens
QKKGAPHDLKCVTNNLQVWNCSWKAPSGTGRGTDYEVCIENRSRSCYQLEKTSIKIPALSHGDYEITINSLHDFGSSTSKFTLNEQNVSLIPDTPEILNLSADFSTSTLYLKWNDRGSVFPHRSNVIWEIKVLRKESMELVKLVTHNTTLNGKDTLHHWSWASDMPLECAIHFVEIRCYIDNLHFSGLEEWSDWSPVKNISWIPDSQTKVFPQDKVILVGSDITFCCVSQEKVLSALIGHTNCPLIHLDGENVAIKIRNISVSASSGTNVVFTTEDNIFGTVIFAGYPPDTPQQLNCETHDLKEIICSWNPGRVTALVGPRATSYTLVESFSGKYVRLKRAEAPTNESYQLLFQMLPNQEIYNFTLNAHNPLGRSQSTILVNITEKVYPHTPTSFKVKDINSTAVKLSWHLPGNFAKINFLCEIEIKKSNSVQEQRNVTIKGVENSSYLVALDKLNPYTLYTFRIRCSTETFWKWSKWSNKKQHLTTEASPSKGPDTWREWSSDGKNLIIYWKPLPINEANGKILSYNVSCSSDEETQSLSEIPDPQHKAEIRLDKNDYIISVVAKNSVGSSPPSKIASMEIPNDDLKIEQVVGMGKGILLTWHYDPNMTCDYVIKWCNSSRSEPCLMDWRKVPSNSTETVIESDEFRPGIRYNFFLYGCRNQGYQLLRSMIGYIEELAPIVAPNFTVEDTSADSILVKWEDIPVEELRGFLRGYLFYFGKGERDTSKMRVLESGRSDIKVKNITDISQKTLRIADLQGKTSYHLVLRAYTDGGVGPEKSMYVVTKENS

SEQ ID NO: 817 - protein, 445 aa, Homo Sapiens
PRTHVQAGTLPKPTLWAEPGSVITQGSPVTLWCQGILETQEYRLYREKKTAPWITRIPQEIVKKGQFPIPSITWEHTGRYRCFYGSHTAGWSEPSDPLELVVTGAYIKPTLSALPSPVVTSGGNVTLHCVSQVAFGSFILCKEGEDEHPQCLNSQPRTHGWSRAIFSVGPVSPSRRWSYRCYAYDSNSPHVWSLPSDLLELLVLGVSKKPSLSVQPGPIVAPGESLTLQCVSDVSYDRFVLYKEGERDFLQLPGPQPQAGLSQANFTLGPVSRSYGGQYRCSGAYNLSSEWSAPSDPLDILIAGQFRGRPFISVHPGPTVASGENVTLLCQSWGPFHTFLLTKAGAADAPLRLRSIHEYPKYQAEFPMSPVTSAHSGTYRCYGSLSSNPYLLSHPSDSLELMVSGAAETLSPPQNKSDSKAGAANTLSPSQNKTASHPQDYTVEN

SEQ ID NO: 818 - protein, 409 aa, Homo Sapiens
GHLPKPTLWAEPGSVIIQGSPVTLRCQGSLQAEEYHLYRENKSASWVRRIQEPGKNGQFPIPSITWEHAGRYHCQYYSHNHSSEYSDPLELVVTGAYSKPTLSALPSPVVTLGGNVTLQCVSQVAFDGFILCKEGEDEHPQRLNSHSHARGWSWAIFSVGPVSPSRRWSYRCYAYDSNSPYVWSLPSDLLELLVPGVSKKPSLSVQPGPMVAPGESLTLQCVSDVGYDRFVLYKEGERDFLQRPGWQPQAGLSQANFTLGPVSPSHGGQYRCYSAHNLSSEWSAPSDPLDILITGQFYDRPSLSVQPVPTVAPGKNVTLLCQSRGQFHTFLLTKEGAGHPPLHLRSEHQAQQNQAEFRMGPVTSAHVGTYRCYSSLSSNPYLLSLPSDPLELVVSASLGQHPQDYTVEN

SEQ ID NO: 819 - protein, 416 aa, Homo Sapiens
GPLPKPTLWAEPGSVITQGSPVTLRCQGSLETQEYHLYREKKTALWITRIPQELVKKGQFPILSITWEHAGRYCCIYGSHTVGLSESSDPLELVVTGAYSKPTLSALPSPVVTSGGNVTIQCDSQVAFDGFILCKEGEDEHPQCLNSHSHARGSSRAIFSVGPVSPSRRWSYRCYGYDSRAPYVWSLPSDLLGLLVPGVSKKPSLSVQPGPVVAPGEKLTFQCGSDAGYDRFVLYKEWGRDFLQRPGRQPQAGLSQANFTLGPVSRSYGGQYTCSGAYNLSSEWSAPSDPLDILITGQIRARPFLSVRPGPTVASGENVTLLCQSQGGMHTFLLTKEGAADSPLRLKSKRQSHKYQAEFPMSPVTSAHAGTYRCYGSLSSNPYLLTHPSDPLELVVSGAAETLSPPQNKSDSKAGE

SEQ ID NO: 820 - protein, 423 aa, Homo Sapiens
ENLPKPILWAEPGPVITWHNPVTIWCQGTLEAQGYRLDKEGNSMSRHILKTLESENKVKLSIPSMMWEHAGRYHCYYQSPAGWSEPSDPLELVVTAYSRPTLSALPSPVVTSGVNVTLRCASRLGLGRFTLIEEGDHRLSWTLNSHQHNHGKFQALFPMGPLTFSNRGTFRCYGYENNTPYVWSEPSDPLQLLVSGVSRKPSLLTLQGPVVTPGENLTLQCGSDVGYIRYTLYKEGADGLPQRPGRQPQAGLSQANFTLSPVSRSYGGQYRCYGAHNVSSEWSAPSDPLDILIAGQISDRPSLSVQPGPTVTSGEKVTLLCQSWDPMFTFLLTKEGAAHPPLRLRSMYGAHKYQAEFPMSPVTSAHAGTYRCYGSRSSNPYLLSHPSEPLELVVSGATETLNPAQKKSDSKTAPHLQDYTVEN

SEQ ID NO: 821 - protein, 227 aa, Homo Sapiens
GNLSKATLWAEPGSVISRGNSVTIRCQGTLEAQEYRLVKEGSPEPWDTQNPLEPKNKARFSIPSMTEHHAGRYRCYYYSPAGWSEPSDPLELVVTGFYNKPTLSALPSPVVTSGENVTLQCGSRLRFDRFILTEEGDHKLSWTLDSQLTPSGQFQALFPVGPVTPSHRWMLRCYGSRRHILQVWSEPSDLLEIPVSGAADNLSPSQNKSDSGTASHLQDYAVENLIR

SEQ ID NO: 822 - protein, 438 aa, Homo Sapiens
GHLPKPTLWAEPGSVITQGSPVTLRCQGGQETQEYRLYREKKTAPWITRIPQELVKKGQFPIPSITWEHAGRYRCYYGSDTAGRSESSDPLELVVTGAYIKPTLSAQPSPVVNSGGNVTLQCDSQVAFDGFILCKEGEDEHPQCLNSQPHARGSSRAIFSVGPVSPSRRWWYRCYAYDSNSPYEWSLPSDLLELLVLGVSKKPSLSVQPGPIVAPEETLTLQCGSDAGYNRFVLYKDGERDFLQLAGAQPQAGLSQANFTLGPVSRSYGGQYRCYGAHNLSSEWSAPSDPLDILIAGQFYDRVSLSVQPGPTVASGENVTLLCQSQGWMQTFLLTKEGAADDPWRLRSTYQSQKYQAEFPMGPVTSAHAGTYRCYGSQSSKPYLLTHPSDPLELVVSGPSGGPSSPTTGPTSTSGPEDQPLTPTGSDPQSGLGRHLGV

SEQ ID NO: 823 - protein, 440 aa, Homo Sapiens
QTGTIPKPTLWAEPDSVITQGSPVTLSCQGSLEAQEYRLYREKKSASWITRIRPELVKNGQFHIPSITWEHTGRYGCQYYSRARWSELSDPLVLVMTGAYPKPTLSAQPSPVVTSGGRVTLQCESQVAFGGFILCKEGEDEHPQCLNSQPHARGSSRAIFSVGPVSPNRRWSHRCYGYDLNSPYVWSSPSDLLELLVPGVSKKPSLSVQPGPVVAPGESLTLQCVSDVGYDRFVLYKEGERDLRQLPGRQPQAGLSQANFTLGPVSRSYGGQYRCYGAYNLSSEWSAPSDPLDILITGQIHGTPFISVQPGPTVASGENVTLLCQSWRQFHTFLLTKAGAADAPLRLRSIHEYPKYQAEFPMSPVTSAHAGTYRCYGSLNSDPYLLSHPSEPLELVVSGPSMGSSPPPTGPISTPAGPEDQPLTPTGSDPQSGLGRHLGV

SEQ ID NO: 824 - protein, 420 aa, Homo Sapiens
GPFPKPTLWAEPGSVISWGSPVTIWCQGSQEAQEYRLHKEGSPEPLDRNNPLEPKNKARFSIPSMTEHHAGRYRCHYYSSAGWSEPSDPLEMVMTGAYSKPTLSALPSPVVASGGNMTLRCGSQKGYHHFVLMKEGEHQLPRTLDSQQLHSRGFQALFPVGPVTPSHRWRFTCYYYYTNTPWVWSHPSDPLEILPSGVSRKPSLLTLQGPVLAPGQSLTLQCGSDVGYNRFVLYKEGERDFLQRPGQQPQAGLSQANFTLGPVSPSNGGQYRCYGAHNLSSEWSAPSDPLNILMAGQIYDTVSLSAQPGPTVASGENVTLLCQSWWQFDTFLLTKEGAAHPPLRLRSMYGAHKYQAEFPMSPVTSAHAGTYRCYGSYSSNPHLLSHPSEPLELVVSGHSGGSSLPPTGPPSTPGLGRYLE

SEQ ID NO: 825 - protein, 238 aa, Homo Sapiens
QAGPLPKPTLWAEPGSVISWGNSVTIWCQGTLEAREYRLDKEESPAPWDRQNPLEPKNKARFSIPSMTEDYAGRYRCYYRSPVGWSQPSDPLELVMTGAYSKPTLSALPSPLVTSGKSVTLLCQSRSPMDTFLLIKERAAHPLLHLRSEHGAQQHQAEFPMSPVTSVHGGTYRCFSSHGFSHYLLSHPSDPLELIVSGSLEGPRPSPTRSVSTAAGPEDQPLMPTGSVPHSGLRRHWE

SEQ ID NO: 826 - protein, 435 aa, Homo Sapiens
GTLPKPTLWAEPASVIARGKPVTLWCQGPLETEEYRLDKEGLPWARKRQNPLEPGAKAKFHIPSTVYDSAGRYRCYYETPAGWSEPSDPLELVATGFYAEPTLLALPSPVVASGGNVTLQCDTLDGLLTFVLVEEEQKLPRTLYSQKLPKGPSQALFPVGPVTPSCRWRFRCYYYYRKNPQVWSNPSDLLEILVPGVSRKPSLLIPQGSVVARGGSLTLQCRSDVGYDIFVLYKEGEHDLVQGSGQQPQAGLSQANFTLGPVSRSHGGQYRCYGAHNLSPRWSAPSDPLDILIAGLIPDIPALSVQPGPKVASGENVTLLCQSWHQIDTFFLTKEGAAHPPLCLKSKYQSYRHQAEFSMSPVTSAQGGTYRCYSAIRSYPYLLSSPSYPQELVVSGPSGDPSLSPTGSTPTPGPEDQPLTPTGLDPQSGLGRHLG

SEQ ID NO: 827 - protein, 424 aa, Homo Sapiens
GPFPKPTLWAEPGSVISWGSPVTIWCQGSLEAQEYQLDKEGSPEPLDRNNPLEPKNKARFSIPSMTQHHAGRYRCHYYSSAGWSEPSDPLELVMTGFYNKPTLSALPSPVVASGGNMTLRCGSQKGYHHFVLMKEGEHQLPRTLDSQQLHSGGFQALFPVGPVTPSHRWRFTCYYYYTNTPRVWSHPSDPLEILPSGVSRKPSLLTLQGPVLAPGQSLTLQCGSDVGYDRFVLYKEGERDFLQRPGQQPQAGLSQANFTLGPVSPSHGGQYRCYGAHNLSSEWSAPSDPLNILMAGQIYDTVSLSAQPGPTVASGENVTLLCQSRGYFDTFLLTKEGAAHPPLRLRSMYGAHKYQAEFPMSPVTSAHAGTYRCYGSYSSNPHLLSFPSEPLELMVSGHSGGSSLPPTGPPSTPASHAKDYTVEN

SEQ ID NO: 828 - protein, 520 aa, Homo Sapiens
CPPRCECSAQDRAVLCHRKRFVAVPEGIPTETRLLDLGKNRIKTLNQDEFASFPHLEELELNENIVSAVEPGAFNNLFNLRTLGLRSNRLKLIPLGVFTGLSNLTKLDISENKIVILLDYMFQDLYNLKSLEVGDNDLVYISHRAFSGLNSLEQLTLEKCNLTSIPTEALSHLHGLIVLRLRHLNINAIRDYSFKRLYRLKVLEISHWPYLDTMTPNCLYGLNLTSLSITHCNLTAVPYLAVRHLVYLRFLNLSYNPISTIEGSMLHELLRLQEIQLVGGQLAVVEPYAFRGLNYLRVLNVSGNQLTTLEESVFHSVGNLETLILDSNPLACDCRLLWVFRRRWRLNFNRQQPTCATPEFVQGKEFKDFPDVLLPNYFTCRRARIRDRKAQQVFVDEGHTVQFVCRADGDPPPAILWLSPRKHLVSAKSNGRLTVFPDGTLEVRYAQVQDNGTYLCIAANAGGNDSMPAHLHVRSYSPDWPHQPNKTFAFISNQPGEGEANSTRATVPFPFDIKTLIIAT

SEQ ID NO: 829 - protein, 518 aa, Homo Sapiens
CPARCECSAQNKSVSCHRRRLIAIPEGIPIETKILDLSKNRLKSVNPEEFISYPLLEEIDLSDNIIANVEPGAFNNLFNLRSLRLKGNRLKLVPLGVFTGLSNLTKLDISENKIVILLDYMFQDLHNLKSLEVGDNDLVYISHRAFSGLLSLEQLTLEKCNLTAVPTEALSHLRSLISLHLKHLNINNMPVYAFKRLFHLKHLEIDYWPLLDMMPANSLYGLNLTSLSVTNTNLSTVPFLAFKHLVYLTHLNLSYNPISTIEAGMFSDLIRLQELHIVGAQLRTIEPHSFQGLRFLRVLNVSQNLLETLEENVFSSPRALEVLSINNNPLACDCRLLWILQRQPTLQFGGQQPMCAGPDTIRERSFKDFHSTALSFYFTCKKPKIREKKLQHLLVDEGQTVQLECSADGDPQPVISWVTPRRRFITTKSNGRATVLGDGTLEIRFAQDQDSGMYVCIASNAAGNDTFTASLTVKGFASDRFLYANRTPMYMTDSNDTISNGTNANTFSLDLKTILVST

SEQ ID NO: 830 - protein, 507 aa, Homo Sapiens
CPARCECTVQTRAVACTRRRLTAVPDGIPAETRLLELSRNRIRCLNPGDLAALPALEELDLSENAIAHVEPGAFANLPRLRVLRLRGNQLKLIPPGVFTRLDNLTLLDLSENKLVILLDYTFQDLHSLRRLEVGDNDLVFVSRRAFAGLLALEELTLERCNLTALSGESLGHLRSLGALRLRHLAIASLEDQNFRRLPGLLHLEIDNWPLLEEVAAGSLRGLNLTSLSVTHTNITAVPAAALRHQAHLTCLNLSHNPISTVPRGSFRDLVRLRELHLAGALLAVVEPQAFLGLRQIRLLNLSNNLLSTLEESTFHSVNTLETLRVDGNPLACDCRLLWIVQRRKTLNFDGRLPACATPAEVRGDALRNLPDSVLFEYFVCRKPKIRERRLQRVTATAGEDVRFLCRAEGEPAPTVAWVTPQHRPVTATSAGRARVLPGGTLEIQDARPQDSGTYTCVASNAGGNDTYFATLTVRPEPAANRTPGEAHNETLAALRAPLDLTTILVST

SEQ ID NO: 831 - protein, 505 aa, Homo Sapiens
GSCPAVCDCTSQPQAVLCGHRQLEAVPGGLPLDTELLDLSGNRLWGLQQGMLSRLSLLQELDLSYNQLSTLEPGAFHGLQSLLTLRLQGNRLRIMGPGVFSGLSALTLLDLRLNQIVLFLDGAFGELGSLQKLEVGDNHLVFVAPGAFAGLAKLSTLTLERCNLSTVPGLALARLPALVALRLRELDIGRLPAGALRGLGQLKELEIHLWPSLEALDPGSLVGLNLSSLAITRCNLSSVPFQALYHLSFLRVLDLSQNPISAIPARRLSPLVRLQELRLSGACLTSIAAHAFHGLTAFHLLDVADNALQTLEETAFPSPDKLVTLRLSGNPLTCDCRLLWLLRLRRHLDFGMSPPACAGPHHVQGKSLKEFSDILPPGHFTCKPALIRKSGPRWVIAEEGGHAVFSCSGDGDPAPTVSWMRPHGAWLGRAGRVRVLEDGTLEIRSVQLRDRGAYVCVVSNVAGNDSLRTWLEVIQVEPPNGTLSDPNITVPGIPGPFFLDSRGVA

SEQ ID NO: 832 - protein, 420 aa, Homo Sapiens; identical to SEQ ID NO: 275

SEQ ID NO: 833 - protein, 249 aa, Homo Sapiens
DDPYNPYKYSDDNPYYNYYDTYERPRPGGRYRPGYGTGYFQYGLPDLVADPYYIQASTYVQKMSMYNLRCAAEENCLASTAYRADVRDYDHRVLLRFPQRVKNQGTSDFLPSRPRYSWEWHSCHQHYHSMDEFSHYDLLDANTQRRVAEGHKASFCLEDTSCDYGYHRRFACTAHTQGLSPGCYDTYGADIDCQWIDITDVKPGNYILKVSVNPSYLVPESDYTNNVVRCDIRYTGHHAYASGCTISPY

SEQ ID NO: 834 - protein, 480 aa, Homo Sapiens
RQAPSLPLPGRVGSDTVRGQARHPFGFGQVPDNWREVAVGDSTGMARARTSVSQQRHGDSASSVSASAFASTYRQQPSYPQQFPYPQAPFVSQYENYDPASRTYDQGFVYYRPAGGGVGAGAAAVASAGVIYPYQPRARYEEYGGGEELPEYPPQGFYPAPERPYVPPPPPPPDGLDRRYSHSLYSEGTPGFEQAYPDPGPEAAQAHGGDPRLGWYPPYANPPPEAYGPPRALEPPYLPVRSSDTPPPGGERNGAQQGRLSVGSVYRPNQNGRGLPDLVPDPNYVQASTYVQRAHLYSLRCAAEEKCLASTAYAPEATDYDVRVLLRFPQRVKNQGTADFLPNRPRHTWEWHSCHQHYHSMDEFSHYDLLDAATGKKVAEGHKASFCLEDSTCDFGNLKRYACTSHTQGLSPGCYDTYNADIDCQWIDITDVQPGNYILKVHVNPKYIVLESDFTNNVVRCNIHYTGRYVSATNCKIVQS

SEQ ID NO: 835 - protein, 629 aa, Homo Sapiens
GNLPGVHCGPSSGAGPGFGPGSWSRSLDRALEEAAVTGVLSLSGRKLREFPRGAANHDLTDTTRADLSRNRLSEIPIEACHFVSLENLNLYQNCIRYIPEAILNLQALTFLNISRNQLSTLPVHLCNLPLKVLIASNNKLVSLPEEIGHLRHLMELDVSCNEIQTIPSQIGNLEALRDLNVRRNHLVHLPEELAELPLIRLDFSCNKITTIPVCYRNLRHLQTITLDNNPLQSPPAQICIKGKVHIFKYLNIQACKIAPDLPDYDRRPLGFGSCHEELYSSRPYGALDSGFNSVDSGDKRWSGNEPTDEFSDLPLRVAEITKEQRLRRESQYQENRGSLVVTNGGVEHDLDQIDYIDSCTAEEEEAEVRQPKGPDPDSLSSQFMAYIEQRRISHEGSPVKPVAIREFQKTEDMRRYLHQNRVPAEPSSLLSLSASHNQLSHTDLELHQRREQLVERTRREAQLAALQYEEEKIRTKQIQRDAVLDFVKQKASQSPQKQHPLLDGVDGECPFPSRRSQHTDDSALCMSLSGLNQVGCAATLPHSSAFTPLKSDDRPNALLSSPATETVHHSPAYSFPAAIQRNQPQRPESFLFRAGVRAETNKGHASPLPPSAAPTTDSTDSITGQNSRQ

SEQ ID NO: 836 - protein, 238 aa, Homo Sapiens
PLITRQAGGRALVVEGQAVSLRCRAVGDPEPVVHWVAPDGRLLGNSSRTRVRGDGTLDVTITTLRDSGTFTCIASNAAGEATAPVEVCVVPLPLMAPPPAAPPPLTEPGSSDIATPGRPGANDSAAERRLVAAELTSNSVLIRWPAQRPVPGIRMYQVQYNSSVDDSLVYRMIPSTSQTFLVNDLAAGRAYDLCVLAVYDDGATALPATRVVGCVQFTTAGDPAPCRPLRAHFLGGTM

SEQ ID NO: 837 - protein, 514 aa, Homo Sapiens
CPKYCVCQNLSESLGTLCPSKGLLFVPPDIDRRTVELRLGGNFIIHISRQDFANMTGLVDLTLSRNTISHIQPFSFLDLESLRSLHLDSNRLPSLGEDTLRGLVNLQHLIVNNNQLGGIADEAFEDFLLTLEDLDLSYNNLHGLPWDSVRRMVNLHQLSLDHNLLDHIAEGTFADLQKLARLDLTSNRLQKLPPDPIFARSQASALTATPFAPPLSFSFGGNPLHCNCELLWLRRLERDDDLETCGSPGGLKGRYFWHVREEEFVCEPPLITQHTHKLLVLEGQAATLKCKAIGDPSPLIHWVAPDDRLVGNSSRTAVYDNGTLDIFITTSQDSGAFTCIAANAAGEATAMVEVSIVQLPHLSNSTSRTAPPKSRLSDITGSSKTSRGGGGSGGGEPPKSPPERAVLVSEVTTTSALVKWSVSKSAPRVKMYQLQYNCSDDEVLIYRMIPASNKAFVVNNLVSGTGYDLCVLAMWDDTATTLTATNIVGCAQFFTKADYPQCQSMHSQILGGTM

SEQ ID NO: 838 - protein, 523 aa, Homo Sapiens
SSPPQSATPSPCPRRCRCQTQSLPLSVLCPGAGLLFVPPSLDRRAAELRLADNFIASVRRRDLANMTGLLHLSLSRNTIRHVAAGAFADLRALRALHLDGNRLTSLGEGQLRGLVNLRHLILSNNQLAALAAGALDDCAETLEDLDLSYNNLEQLPWEALGRLGNVNTLGLDHNLLASVPAGAFSRLHKLARLDMTSNRLTTIPPDPLFSRLPLLARPRGSPASALVLAFGGNPLHCNCELVWLRRLAREDDLEACASPPALGGRYFWAVGEEEFVCEPPVVTHRSPPLAVPAGRPAALRCRAVGDPEPRVRWVSPQGRLLGNSSRARAFPNGTLELLVTEPGDGGIFTCIAANAAGEATAAVELTVGPPPPPQLANSTSCDPPRDGDPDALTPPSAASASAKVADTGPPTDRGVQVTEHGATAALVQWPDQRPIPGIRMYQIQYNSSADDILVYRMIPAESRSFLLTDLASGRTYDLCVLAVYEDSATGLTATRPVGCARFSTEPALRPCGAPHAPFLGGTM

SEQ ID NO: 839 - protein, 502 aa, Homo Sapiens
CPLPCVCQNLSESLSTLCAHRGLLFVPPNVDRRTVELRLADNFIQALGPPDFRNMTGLVDLTLSRNAITRIGARAFGDLESLRSLHLDGNRLVELGTGSLRGPVNLQHLILSGNQLGRIAPGAFDDFLESLEDLDLSYNNLRQVPWAGIGAMPALHTLNLDHNLIDALPPGAFAQLGQLSRLDLTSNRLATLAPDPLFSRGRDAEASPAPLVLSFSGNPLHCNCELLWLRRLARPDDLETCASPPGLAGRYFWAVPEGEFSCEPPLIARHTQRLWVLEGQRATLRCRALGDPAPTMHWVGPDDRLVGNSSRARAFPNGTLEIGVTGAGDAGGYTCIATNPAGEATARVELRVLALPHGGNSSAEGGRPGPSDIAASARTAAEGEGTLESEPAVQVTEVTATSGLVSWGPGRPADPVWMFQIQYNSSEDETLIYRIVPASSHHFLLKHLVPGADYDLCLLALSPAAGPSDLTATRLLGCAHFSTLPASPLCHALQAHVLGGTL

SEQ ID NO: 840 - protein, 512 aa, Homo Sapiens
QICPKRCVCQILSPNLATLCAKKGLLFVPPNIDRRTVELRLADNFVTNIKRKDFANMTSLVDLTLSRNTISFITPHAFADLRNLRALHLNSNRLTKITNDMFSGLSNLHHLILNNNQLTLISSTAFDDVFALEELDLSYNNLETIPWDAVEKMVSLHTLSLDHNMIDNIPKGTFSHLHKMTRLDVTSNKLQKLPPDPLFQRAQVLATSGIISPSTFALSFGGNPLHCNCELLWLRRLSREDDLETCASPPLLTGRYFWSIPEEEFLCEPPLITRHTHEMRVLEGQRATLRCKARGDPEPAIHWISPEGKLISNATRSLVYDNGTLDILITTVKDTGAFTCIASNPAGEATQIVDLHIIKLPHLLNSTNHIHEPDPGSSDISTSTKSGSNTSSSNGDTKLSQDKIVVAEATSSTALLKFNFQRNIPGIRMFQIQYNGTYDDTLVYRMIPPTSKTFLVNNLAAGTMYDLCVLAIYDDGITSLTATRVVGCIQFTTEQDYVRCHFMQSQFLGGTM

SEQ ID NO: 841 - protein, 312 aa, Homo Sapiens
VTLSPKDCQVFRSDHGSSISCQPPAEIPGYLPADTVHLAVEFFNLTHLPANLLQGASKLQELHLSSNGLESLSPEFLRPVPQLRVLDLTRNALTGLPSGLFQASATLDTLVLKENQLEVLEVSWLHGLKALGHLDLSGNRLRKLPPGLLANFTLLRTLDLGENQLETLPPDLLRGPLQLERLHLEGNKLQVLGKDLLLPQPDLRYLFLNGNKLARVAAGAFQGLRQLDMLDLSNNSLASVPEGLWASLGQPNWDMRDGFDISGNPWICDQNLSDLYRWLQAQKDKMFSQNDTRCAGPEAVKGQTLLAVAKSQ

SEQ ID NO: 842 - protein, 737 aa, Homo Sapiens
AGPRAPCAAACTCAGDSLDCGGRGLAALPGDLPSWTRSLNLSYNKFSEIDPAGFEDLPNLQEVYLNNNELTAVPSLGAASSHVVSLFLQHNKIRSVEGSQLKAYLSLEVLDLSLNNITEVRNTCFPHGPPIKELNLAGNRIGTLELGAFDGLSRSLLTLRLSKNRITQLPVRAFKLPRLTQLDLNRNRIRLIEGLTFQGLNSLEVLKLQRNNISKLTDGAFWGLSKMHVLHLEYNSLVEVNSGSLYGLTALHQLHLSNNSIARIHRKGWSFCQKLHELVLSFNNLTRLDEESLAELSSLSVLRLSHNSISHIAEGAFKGLRSLRVLDLDHNEISGTIEDTSGAFSGLDSLSKLLLLEPSQSAGCSSPSQPHMSAGGRTLFGNKIKSVAKRAFSGLEGLEHLNLGGNAIRSVQFDAFVKMKNLKELHISSDSFLCDCQLKWLPPWLIGRMLQAFVTATCAHPESLKGQSIFSVPPESFVCDDFLKPQIITQPETTMAMVGKDIRFTCSAASSSSSPMTFAWKKDNEVLTNADMENFVHVHAQDGEVMEYTTILHLRQVTFGHEGRYQCVITNHFGSTYSHKARLTVNVLPSFTKTPHDITIRTTTMARLECAATGHPNPQIAWQKDGGTDFPAAQTPSLVVPLEDRVVSVGETVALQCKATGNPPPRITWFKGDRPLSLTERHHLTPDNQLLVVQNVVAEDAGRYTCEMSNTLGTERAHSQLSVLPAAGCRKDGTTVG

SEQ ID NO: 843 - protein, 767 aa, Homo Sapiens
GLCPAPCSCRIPLLDCSRRKLPAPSWRALSGLLPPDTAILDFSHNRLSNWNISLESQTLQEVKMNYNELTEIPYFGEPTSNITLLSLVHNIIPEINAQALQFYPALESLDLSSNIISEIKTSSFPRMQLKYLNLSNNRITTLEAGCFDNLSSSLLVVKLNRNRMSMIPPKIFKLPHLQFLELKRNRIKIVEGLTFQGLDSLRSLKMQRNGISKLKDGAFFGLNNMEELELEHNNLTRVNKGWLYGLRMLQQLYVSQNAIERISPDAWEFCQRLSELDLSYNQLTRLDESAFVGLSLLERLNLGDNRVTHIADGVFRFLSNLQTLDLRNNEISWAIEDASEAFAGLTSLTKLILQGNQIKSITKKAFIGLESLEHLDLNNNAIMSIQENAFSQTHLKELILNTSSLLCDCHLKWLLQWLVDNNFQHSVNVSCAHPEWLAGQSILNVDLKDFVCDDFLKPQIRTHPETIIALRGMNVTLTCTAVSSSDSPMSTVWRKDSEILYDVDTENFVRYWQQAGEALEYTSILHLFNVNFTDEGKYQCIVTNHFGSNYSQKAKLTVNEMPSFLKTPMDLTIRTGAMARLECAAEGHPAPQISWQKDGGTDFPAARERRMHVMPEDDVFFIANVKIEDMGIYSCMAQNTAGGLSANASLTVLETPSFIRPLEDKTVTRGETAVLQCIAGGSPAPRLNWTKDDGPLLVTERHFFAAANQLLIIVDAGLEDAGKYTCIMSNTLGTERGHIYLNVISSPNCDSSQSSIGHEDDGWTTVG

SEQ ID NO: 844 - protein, 785 aa, Homo Sapiens
GRSDSGGRGELGQPSGVAAERPCPTTCRCLGDLLDCSRKRLARLPEPLPSWVARLDLSHNRLSFIKASSMSHLQSLREVKLNNNELETIPNLGPVSANITLLSLAGNRIVEILPEHLKEFQSLETLDLSSNNISELQTAFPALQLKYLYLNSNRVTSMEPGYFDNLANTLLVLKLNRNRISAIPPKMFKLPQLQHLELNRNKIKNVDGLTFQGLGALKSLKMQRNGVTKLMDGAFWGLSNMEILQLDHNNLTEITKGWLYGLLMLQELHLSQNAINRISPDAWEFCQKLSELDLTFNHLSRLDDSSFLGLSLLNTLHIGNNRVSYIADCAFRGLSSLKTLDLKNNEISWTIEDMNGAFSGLDKLRRLILQGNRIRSITKKAFTGLDALEHLDLSDNAIMSLQGNAFSQMKKLQQLHLNTSSLLCDCQLKWLPQWVAENNFQSFVNASCAHPQLLKGRSIFAVSPDGFVCDDFPKPQITVQPETQSAIKGSNLSFICSAASSSDSPMTFAWKKDNELLHDAEMENYAHLRAQGGEVMEYTTILRLREVEFASEGKYQCVISNHFGSSYSVKAKLTVNMLPSFTKTPMDLTIRAGAMARLECAAVGHPAPQIAWQKDGGTDFPAARERRMHVMPEDDVFFIVDVKIEDIGVYSCTAQNSAGSISANATLTVLETPSFLRPLLDRTVTKGETAVLQCIAGGSPPPKLNWTKDDSPLVVTERHFFAAGNQLLIIVDSDVSDAGKYTCEMSNTLGTERGNVRLSVIPTPTCDSPQMTAPSLDDDGWATVG

SEQ ID NO: 845 - protein, 456 aa, Homo Sapiens
AQPFCLPGCTCSEESFGRTLQCTSVSLGKIPGNLSEEFKQVRIENSPLFEMPQGSFINMSTLEYLWLNFNNISVIHLGALEHLPELRELRLEGNKLCSVPWTAFRATPLLRVLDLKRNKIDALPELALQFLVSLTYLDLSSNRLTVVSKSVFLNWPAYQKCRQPDCGAEILSSLVVALHDNPWVCDCRLRGLVQFVKSITLPVILVNSYLICQGPLSKAGQLFHETELSACMKPQISTPSANITIRAGQNVTLRCLAQASPSPSIAWTYPLSMWREFDGLLGGKHLTPVLTSSTGEDTALSELAIPAAHLVDSGNYTCMASNSIGKSNLVISLHVQPAQALHAPDSLSIPSEGNAYIDLRVVKQTVHGILLEWLAVADTSKEEWFTLYIASDEAFRKEVVHIGPGINTYAVDDLLPGTKYEACLSLEGQPPHQGQCVAFVTGRDAGGLEAREHLLH

SEQ ID NO: 846 - protein, 329 aa, Homo Sapiens
PSVMTSATKIMSALGSNVLLRCDATGFPTPQITWTRSDSSPVNYTVIQESPEEGVRWSIMSLTGISSKDAGDYKCKAKNLAGMSEAVVTVTVLGITTTPIPPDTSERTGDHPEWDVQPGSGRSTSVSSASSYLWSSSFSPTSSFSASTLSPPSTASFSLSPFSSSTVSSTTTLSTSISASTTMANKRSFQLHQGGKRNLKVAKNGSKLPPASTSKKEELALLDQTMLTETNATIENLRVVSETKESVTLMWNMINTTHNSAVTVLYSKYGGKDLLLLNADSSKNQVTIDGLEPGGQYMACVCPKGVPPQKDQCITFSTERVEGDDSQWS

SEQ ID NO: 847 - protein, 413 aa, Homo Sapiens
ALPPAAPLSELHAQLSGVEQLLEEFRRQLQQERPQEELELELRAGGGPQEDCPGRGSGGYSAMPDAIIRTKDSLAAGASFLRAPAAVRGWRQCVAACCSEPRCSVAVVELPRRPAPPAAVLGCYLFNCTARGRNVCKFALHSGYSSYSLSRAPDGAALATARASPRQEKDAPPLSKAGQDVVLHLPTDGVVLDGRESTDDHAIVQYEWALLQGDPSVDMKVPQSGTLKLSHLQEGTYTFQLTVTDTAGQRSSDNVSVTVLRAAYSTGGCLHTCSRYHFFCDDGCCIDITLACDGVQQCPDGSDEDFCQNLGLDHKMVTHTAASPALPRTTGPSEDAGGDSLVEKSQKATAPNKPPALSNTEKRNHSAFWGPESQIIPVMPDSSSSGKNRKEESYIFESKGDGGGGEHPAPETG

SEQ ID NO: 848 - protein, 1705 aa, Homo Sapiens
SSPECACGRSHFTCAVSALGECTCIPAQWQCDGDNDCGDHSDEDGCILPTCSPLDFHCDNGKCIRRSWVCDGDNDCEDDSDEQDCPPRECEEDEFPCQNGYCIRSLWHCDGDNDCGDNSDEQCDMRKCSDKEFRCSDGSCIAEHWYCDGDTDCKDGSDEENCPSAVPAPPCNLEEFQCAYGRCILDIYHCDGDDDCGDWSDESDCSSHQPCRSGEFMCDSGLCINAGWRCDGDADCDDQSDERNCTTSMCTAEQFRCHSGRCVRLSWRCDGEDDCADNSDEENCENTGSPQCALDQFLCWNGRCIGQRKLCNGVNDCGDNSDESPQQNCRPRTGEENCNVNNGGCAQKCQMVRGAVQCTCHTGYRLTEDGHTCQDVNECAEEGYCSQGCTNSEGAFQCWCETGYELRPDRRSCKALGPEPVLLFANRIDIRQVLPHRSEYTLLLNNLENAIALDFHHRRELVFWSDVTLDRILRANLNGSNVEEVVSTGLESPGGLAVDWVHDKLYWTDSGTSRIEVANLDGAHRKVLLWQNLEKPRAIALHPMEGTIYWTDWGNTPRIEASSMDGSGRRIIADTHLFWPNGLTIDYAGRRMYWVDAKHHVIERANLDGSHRKAVISQGLPHPFAITVFEDSLYWTDWHTKSINSANKFTGKNQEIIRNKLHFPMDIHTLHPQRQPAGKNRCGDNNGGCTHLCLPSGQNYTCACPTGFRKISSHACAQSLDKFLLFARRMDIRRISFDTEDLSDDVIPLADVRSAVALDWDSRDDHVYWTDVSTDTISRAKWDGTGQEVVVDTSLESPAGLAIDWVTNKLYWTDAGTDRIEVANTDGSMRTVLIWENLDRPRDIVVEPMGGYMYWTDWGASPKIERAGMDASGRQVIISSNLTWPNGLAIDYGSQRLYWADAGMKTIEFAGLDGSKRKVLIGSQLPHPFGLTLYGERIYWTDWQTKSIQSADRLTGLDRETLQENLENLMDIHVFHRRRPPVSTPCAMENGGCSHLCLRSPNPSGFSCTCPTGINLLSDGKTCSPGMNSFLIFARRIDIRMVSLDIPYFADVVVPINITMKNTIAVGVDPQEGKVYWSDSTLHRISRANLDGSQHEDIITTGLQTTDGLAVDAIGRKVYWTDTGTNRIEVGNLDGSMRKVLVWQNLDSPRAIVLYHEMGFMYWTDWGENAKLERSGMDGSDRAVLINNNLGWPNGLTVDKASSQLLWADAHTERIEAADLNGANRHTLVSPVQHPYGLTLLDSYIYWTDWQTRSIHRADKGTGSNVILVRSNLPGLMDMQAVDRAQPLGFNKCGSRNGGCSHLCLPRPSGFSCACPTGIQLKGDGKTCDPSPETYLLFSSRGSIRRISLDTSDHTDVHVPVPELNNVISLDYDSVDGKVYYTDVFLDVIRRADLNGSNMETVIGRGLKTTDGLAVDWVARNLYWTDTGRNTIEASRLDGSCRKVLINNSLDEPRAIAVFPRKGYLFWTDWGHIAKIERANLDGSERKVLINTDLGWPNGLTLDYDTRRIYWVDAHLDRIESADLNGKLRQVLVGHVSHPFALTQQDRWIYWTDWQTKSIQRVDKYSGRNKETVLANVEGLMDIIVVSPQRQTGTNACGVNNGGCTHLCFARASDFVCACPDEPDSQPCSLVPGLVPPAPRATGMSEKSPVLPNTPPTTLYSSTTRTRTSLEEVEGRCSERDARLGLCARSNDAVPAAPGEGLHIS

SEQ ID NO: 849 - protein, 741 aa, Homo Sapiens
EAFLVFTSRAAIHRISLETNNNDVAIPLTGVKEASALDFDVSNNHIYWTDVSLKTISRAFMNGSSVEHVVEFGLDYPEGMAVDWMGKNLYWADTGTNRIEVARLDGQFRQVLVWRDLDNPRSLALDPTKGYIYWTEWGGKPRIVRAFMDGTNCMTLVDKVGRANDLTIDYADQRLYWTDLDTNMIESSNMLGQERVVIADDLPHPFGLTQYSDYIYWTDWNLHSIERADKTSGRNRTLIQGHLDFVMDILVFHSSRQDGLNDCMHNNGQCGQLCLAIPGGHRCGCASHYTLDPSSRNCSPPTTFLLFSQKSAISRMIPDDQHSPDLILPLHGLRNVKAIDYDPLDKFIYWVDGRQNIKRAKDDGTQPFVLTSLSQGQNPDRQPHDLSIDIYSRTLFWTCEATNTINVHRLSGEAMGVVLRGDRDKPRAIVVNAERGYLYFTNMQDRAAKIERAALDGTEREVLFTTGLIRPVALVVDNTLGKLFWVDADLKRIESCDLSGANRLTLEDANIVQPLGLTILGKHLYWIDRQQQMIERVEKTTGDKRTRIQGRVAHLTGIHAVEEVSLEEFSAHPCARDNGGCSHICIAKGDGTPRCSCPVHLVLLQNLLTCGEPPTCSPDQFACATGEIDCIPGAWRCDGFPECDDQSDEEGCPVCSAAQFPCARGQCVDLRLRCDGEADCQDRSDEADCDAICLPNQFRCASGQCVLIKQQCDSFPDCIDGSDELMCEITKPPSDDSPAHS

SEQ ID NO: 850 - protein, 1351 aa, Homo Sapiens
APLLLYANRRDLRLVDATNGKENATIVVGGLEDAAAVDFVFSHGLIYWSDVSEEAIKRTEFNKTESVQNVVVSGLLSPDGLACDWLGEKLYWTDSETNRIEVSNLDGSLRKVLFWQELDQPRAIALDPSSGFMYWTDWGEVPKIERAGMDGSSRFIIINSEIYWPNGLTLDYEEQKLYWADAKLNFIHKSNLDGTNRQAVVKGSLPHPFALTLFEDILYWTDWSTHSILACNKYTGEGLREIHSDIFSPMDIHAFSQQRQPNATNPCGIDNGGCSHLCLMSPVKPFYQCACPTGVKLLENGKTCKDGATELLLLARRTDLRRISLDTPDFTDIVLQLEDIRHAIAIDYDPVEGYIYWTDDEVRAIRRSFIDGSGSQFVVTAQIAHPDGIAVDWVARNLYWTDTGTDRIEVTRLNGTMRKILISEDLEEPRAIVLDPMVGYMYWTDWGEIPKIERAALDGSDRVVLVNTSLGWPNGLALDYDEGKIYWGDAKTDKIEVMNTDGTGRRVLVEDKIPHIFGFTLLGDYVYWTDWQRRSIERVHKRSAEREVIIDQLPDLMGLKATNVHRVIGSNPCAEENGGCSHLCLYRPQGLRCACPIGFELISDMKTCIVPEAFLLFSRRADIRRISLETNNNNVAIPLTGVKEASALDFDVTDNRIYWTDISLKTISRAFMNGSALEHVVEFGLDYPEGMAVDWLGKNLYWADTGTNRIEVSKLDGQHRQVLVWKDLDSPRALALDPAEGFMYWTEWGGKPKIDRAAMDGSERTTLVPNVGRANGLTIDYAKRRLYWTDLDTNLIESSNMLGLNREVIADDLPHPFGLTQYQDYIYWTDWSRRSIERANKTSGQNRTIIQGHLDYVMDILVFHSSRQSGWNECASSNGHCSHLCLAVPVGGFVCGCPAHYSLNADNRTCSAPTTFLLFSQKSAINRMVIDEQQSPDIILPIHSLRNVRAIDYDPLDKQLYWIDSRQNMIRKAQEDGSQGFTVVVSSVPSQNLEIQPYDLSIDIYSRYIYWTCEATNVINVTRLDGRSVGVVLKGEQDRPRAVVVNPEKGYMYFTNLQERSPKIERAALDGTEREVLFFSGLSKPIALALDSRLGKLFWADSDLRRIESSDLSGANRIVLEDSNILQPVGLTVFENWLYWIDKQQQMIEKIDMTGREGRTKVQARIAQLSDIHAVKELNLQEYRQHPCAQDNGGCSHICLVKGDGTTRCSCPMHLVLLQDELSCGEPPTCSPQQFTCFTGEIDCIPVAWRCDGFTECEDHSDELNCPVCSESQFQCASGQCIDGALRCNGDANCQDKSDEKNCEVLCLIDQFRCANGQCIGKHKKCDHNVDCSDKSDELDCYPTEEPAPQA

SEQ ID NO: 851 - protein, 785 aa, Homo Sapiens
GPAKECEKDQFQCRNERCIPSVWRCDEDDDCLDHSDEDDCPKKTCADSDFTCDNGHCIHERWKCDGEEECPDGSDESEATCTKQVCPAEKLSCGPTSHKCVPASWRCDGEKDCEGGADEAGCATLCAPHEFQCGNRSCLAAVFVCDGDDDCGDGSDERGCADPACGPREFRCGGDGGGACIPERWVCDRQFDCEDRSDEAAELCGRPGPGATSAPAACATASQFACRSGECVHLGWRCDGDRDCKDKSDEADCPLGTCRGDEFQCGDGTCVLAIKHCNQEQDCPDGSDEAGCLQGLNECLHNNGGCSHICTDLKIGFECTCPAGFQLLDQKTCGDIDECKDPDACSQICVNYKGYFKCECYPGYEMDLLTKNCKAAAGKSPSLIFTNRHEVRRIDLVKRNYSRLIPMLKNVVALDVEVATNRIYWCDLSYRKIYSAYMDKASDPKEQEVLIDEQLHSPEGLAVDWVHKHIYWTDSGNKTISVATVDGGRRRTLFSRNLSEPRAIAVDPLRGFMYWSDWGDQAKIEKSGLNGVDRQTLVSDNIEWPNGITLDLLSQRLYWVDSKLHQLSSIDFSGGNRKTLISSTDFLSHPFGIAVFEDKVFWTDLENEAIFSANRLNGLEISILAENLNNPHDIVIFHELKQPRAPDACELSVQPNGGCEYLCLPAPQISSHSPKYTCACPDTMWLGPDMKRCYRAPQSTSTTTLASTMTRTVPATTRAPGTTVHRSTYQNHSTETPSLTAAVPSSVSVPRAPSISPSTLSPATSNHSQHYANEDSKMGSTVTAA

SEQ ID NO: 852 - protein, 517 aa, Homo Sapiens
YHGCPSECTCSRASQVECTGARIVAVPTPLPWNAMSLQILNTHITELNESPFLNISALIALRIEKNELSRITPGAFRNLGSLRYLSLANNKLQVLPIGLFQGLDSLESLLLSSNQLLQIQPAHFSQCSNLKELQLHGNHLEYIPDGAFDHLVGLTKLNLGKNSLTHISPRVFQHLGNLQVLRLYENRLTDIPMGTFDGLVNLQELALQQNQIGLLSPGLFHNNHNLQRLYLSNNHISQLPPSVFMQLPQLNRLTLFGNSLKELSPGIFGPMPNLRELWLYDNHISSLPDNVFSNLRQLQVLILSRNQISFISPGAFNGLTELRELSLHTNALQDLDGNVFRMLANLQNISLQNNRLRQLPGNIFANVNGLMAIQLQNNQLENLPLGIFDHLGKLCELRLYDNPWRCDSDILPLRNWLLLNQPRLGTDTVPVCFSPANVRGQSLIIINVNVAVPSVHVPEVPSYPETPWYPDTPSYPDTTSVSSTTELTSPVEDYTDLTTIQVTDDRSVWGMTQAQSG

SEQ ID NO: 853 - protein, 423 aa, Homo Sapiens
RKASPGSVRSRVNHGRAGGGRRGSNPVKRYAPGLPCDVYTYLHEKYLDCQERKLVYVLPGWPQDLLHMLLARNKIRTLKNNMFSKFKKLKSLDLQQNEISKIESEAFFGLNKLTTLLLQHNQIKVLTEEVFIYTPLLSYLRLYDNPWHCTCEIETLISMLQIPRNRNLGNYAKCESPQEQKNKKLRQIKSEQLCNEEEKEQLDPKPQVSGRPPVIKPEVDSTFCHNYVFPIQTLDCKRKELKKVPNNIPPDIVKLDLSYNKINQLRPKEFEDVHELKKLNLSSNGIEFIDPAAFLGLTHLEELDLSNNSLQNFDYGVLEDLYFLKLLWLRDNPWRCDYNIHYLYYWLKHHYNVHFNGLECKTPEEYKGWSVGKYIRSYYEECPKDKLPAYPESFDQDTEDDEWEKKHRDHTAKKQSVIITIVG

SEQ ID NO: 854 - protein, 246 aa, Homo Sapiens
SKREVQCNFTEKNYTLIPADIKKDVTILDLSYNQITLNGTDTRVLQTYFLLTELYLIENKVTILHNNGFGNLSSLEILNICRNSIYVIQQGAFLGLNKLKQLYLCQNKIEQLNADVFVPLRSLKLLNLQGNLISYLDVPPLFHLELITLYGNLWNCSCSLFNLQNWLNTSNVTLENENITMCSYPNSLQSYNIKTVPHKAECHSKFPSSVTEDLYIHFQPISNSIFNSSSNNLTRNSEHEPLGKSW

SEQ ID NO: 855 - protein, 505 aa, Homo Sapiens
FCPSQCSCSLHIMGDGSKARTVVCNDPDMTLPPASIPPDTSRLRLERTAIRRVPGEAFRPLGRLEQLWLPYNALSELNALMLRGLRRLRELRLPGNRLAAFPWAALRDAPKLRLLDLQANRLSAVPAEAARFLENLTFLDLSSNQLMRLPQELIVSWAHLETGIFPPGHHPRRVLGLQDNPWACDCRLYDLVHLLDGWAPNLAFIETELRCASPRSLAGVAFSQLELRKCQGPELHPGVASIRSLLGGTALLRCGATGVPGPEMSWRRANGRPLNGTVHQEVSSDGTSWTLLGLPAVSHLDSGDYICQAKNFLGASETVISLIVTEPPTSTEHSGSPGALWARTGGGGEAAAYNNKLVARHVPQIPKPAVLATGPSVPSTKEELTLEHFQMDALGELSDGRAGPSEARMVRSVKVVGDTYHSVSLVWKAPQAKNTTAFSVLYAVFGQHSMRRVIVQPGKTRVTITGLLPKTKYVACVCVQGLVPRKEQCVIFSTNEVVDAENTQQ

SEQ ID NO: 856 - protein, 385 aa, Homo Sapiens
AGCPAACRCYSATVECGALRLRVVPLGIPPGTQTLFLQDNNIARLEPGALAPLAALRRLYLHNNSLRALEAGAFRAQPRLLELALTSNRLRGLRSGAFVGLAQLRVLYLAGNQLARLLDFTFLHLPRLQELHLQENSIELLEDQALAGLSSLALLDLSRNQLGTISREALQPLASLQVLRLTENPWRCDCALHWLGAWIKEGGQRLLTSRDRKIMCAEPPRLALQSLLDVSHSSLICIPPSVHVQPLELTANLGEDLRVACQASGYPQPLVTWRKVPQPREGRPRAQAQLEGGLLGLGGHSASDTGSGMLFLSNITLAHAGKYECEASNAGGAARVPFRLLVNASRQQPQQPAQPPPPAARPAGSEPRPEAGSMAFRALGVATQT

SEQ ID NO: 857 - protein, 145 aa, Homo Sapiens
LEPSCTVSSADVDWNAEFSATCLNFSGLSLSLPHNQSLRASNVILLDLSGNGLRELPVTFFAHLQKLEVLNVLRNPLSRVDGALAARCDLDLQADCNCALESWHDIRRDNCSGQKPLLCWDTTSSQHNLSAFLEVSCAPGLASAT

SEQ ID NO: 858 - protein, 235 aa, Homo Sapiens
QVSATASPSGSLGAPDCPEVCTCVPGGLASCSALSLPAVPPGLSLRLRALLLDHNRVRALPPGAFAGAGALQRLDLRENGLHSVHVRAFWGLGALQLLDLSANQLEALAPGTFAPLRALRNLSLAGNRLARLEPAALGALPLLRSLSLQDNELAALAPGLLGRLPALDALHLRGNPWGCGCALRPLCAWLRRHPLPASEAETVLCVWPGRLTLSPLTAFSDAAFSHCAQPLALRD

SEQ ID NO: 859 - protein, 172 aa, Homo Sapiens
CPQPCRCPDHAGAVAVFCSLRGLQEVPEDIPANTVLLKLDANKISHLPDGAFQHLHRLRELDLSHNAIEAIGSATFAGLAGGLRLLDLSYNRIQRIPKDALGKLSAKIRLSHNPLHCECALQEALWELKLDPDSVDEIACHTSVQEEFVGKPLVQALDAGASLCSVPHRTTD

SEQ ID NO: 860 - protein, 608 aa, Homo Sapiens
HQDKVPCKMVDKKVSCQVLGLLQVPSVLPPDTETLDLSGNQLRSILASPLGFYTALRHLDLSTNEISFLQPGAFQALTHLEHLSLAHNRLAMATALSAGGLGPLPRVTSLDLSGNSLYSGLLERLLGEAPSLHTLSLAENSLTRLTRHTFRDMPALEQLDLHSNVLMDIEDGAFEGLPRLTHLNLSRNSLTCISDFSLQQLRVLDLSCNSIEAFQTASQPQAEFQLTWLDLRENKLLHFPDLAALPRLIYLNLSNNLIRLPTGPPQDSKGIHAPSEGWSALPLSAPSGNASGRPLSQLLNLDLSYNEIELIPDSFLEHLTSLCFLNLSRNCLRTFEARRLGSLPCLMLLDLSHNALETLELGARALGSLRTLLLQGNALRDLPPYTFANLASLQRLNLQGNRVSPCGGPDEPGPSGCVAFSGITSLRSLSLVDNEIELLRAGAFLHTPLTELDLSSNPGLEVATGALGGLEASLEVLALQGNGLMVLQVDLPCFICLKRLNLAENRLSHLPAWTQAVSLEVLDLRNNSFSLLPGSAMGGLETSLRRLYLQGNPLSCCGNGWLAAQLHQGRVDVDATQDLICRFSSQEEVSLSHVRPEDCEKGGLKNIN

SEQ ID NO: 861 - protein, 1547 aa, Homo Sapiens
EAQPLEWVKDPLQLTSNPLGPPDSWSSHSSHFPRESPHAPTLPADPWDFDHLGPSASSEMPAPPQESTENLVPFLDTWDSAGEQPLEPEQFLASQQDLKDKLSPQERLPVSPKKLKKDPAQRWSLAEIIGITRQLSTPQSQKQTLQNEYSSTDTPYPGSLPPELRVKSDEPPGPSEQVGPSQFHLEPETQNPETLEDIQSSSLQQEAPAQLPQLLEEEPSSMQQEAPALPPESSMESLTLPNHEVSVQPPGEDQAYYHLPNITVKPADVEVTITSEPTNETESSQAQQETPIQFPEEVEPSATQQEAPIEPPVSPMEHELSISEQQQPVQPSESSREVESSLTQQETPGQPPEHHEVTVSPPGHHQTHHLDSPSVSVKPPDVQLTIAAEPSAEVGTSLVHQEATARLSGSGNDVEPPAIQHGGPPLLPESSEEAGPLAVQQETSFQSPEPINNENPSPTQQEAAAEHPQTAEEGESSLTHQEAPAQTPEFPNVVVAQPPEHSHLTQATVQPLDLGFTITPESMTEVELSPTMKETPTQPPKKVVPQLRVYQGVTNPTPGQDQAQHPVSPSVTVQLLDLGLTITPEPTTEVGHSTAPKRTIVSPKHPEVTLPHPDQVQTQHSHLTRATVQPLDLGFTITPKSMTEVEPSTALMTTAPPPGHPEVTLPPSDKGQAQHSHLTQATVQPLDLELTITTKPTTEVKPSPTTEETSTQPPDLGLAIIPEPTTETGHSTALEKTTAPHPDRVQTLHQSLTEVTGPPTELEPAQDSLVQSESYTQNKALTAPEEHKASTSTNICELCTCGDEMLSCIDLNPEQRLRQVPVPEPNTHNGTFTILNFQGNYISYIDGNVWKAYSWTEKLILRENNLTELHKDSFEGLLSLQYLDLSCNKIQSIERHTFEPLPFLKFINLSCNVITELSFGTFQAWHGMQFLHKLILNHNPLTTVEDPYLFKLPALKYLDMGTTLVPLTTLKNILMMTVELEKLILPSHMACCLCQFKNSIEAVCKTVKLHCNSACLTNTTHCPEEASVGNPEGAFMKVLQARKNYTSTELIVEPEEPSDSSGINLSGFGSEQLDTNDESDFISTLSYILPYFSAVNLDVKSLLLPFIKLPTTGNSLAKIQTVGQNRQRVKRVLMGPRSIQKRHFKEVGRQSIRREQGAQASVENAAEEKRLTSPAPREVEQPHTQQGPEKLAGNAVYTKPSFTQEHKAAVSVLKPFSKGAPSTSSPAKALPQVRDRSKDLTHAISILESAKARVTNTKTSKPIVHARKKYRFHKTRSHVTHRTTKVKKSPKVRKKSYLSRLMLANRLPFSAAKSLINSPSQGAFSSLGDLSPQENPFLEVSALSEHFIGKNNTKHTTARNAFEENDFMENTNMPEGTISENTNYNHPPEADSAGTAFNLGPTVKQTETKWEYNNVGTDLSPEPKSFNYPLLSSPGDQFEIQLTQQLQSLIPNNNVRRLIAHVIRTLKMDCSGAHVQVTCAKLISRTGHLMKLLSGQQEVKASKIEWDTDQWKIENYINESTEAQSEQKEKSLELKKEVPGYGYTDKL

SEQ ID NO: 862 - protein, 1546 aa, Homo Sapiens
EAQPLEWVKDPLQLTPNPLGPPEPWSSHSSHFPRESPHAPTLPADPWDFDHLGPSASSEMPAPPQESTENLVPFLDTWDSAGELPLEPEQFLASQQDLKDKLSPQERLPVSPKKLKKDPAQRWSLAEIIGIIHQLSTPQSQKQTLQNEYSSTDTPYPGSLPPELRVKSDEPPGPSEQVGPSQFHLEPETQNPETLEDIQSSSLQQEAPAQLPQLLEEEPSSMQQEAPALPPESSMESLTLPNHEVSVQPPGEDQAYYHLPNITVKPADVEVTITSEPTNETESSQAQQETPIQFPEEVEPSATQQEAPIEPPVPPMEHELSISEQQQPVQPSESSREVESSPTQQETPGQPPEHHEVTVSPPGHHQTHHLASPSVSVKPPDVQLTIAAEPSAEVGTSLVHQEATTRLSGSGNDVEPPAIQHGGPPLLPESSEEAGPLAVQQETSFQSPEPINNENPSPTQQEAAAEHPQTAEEGESSLTHQEAPAQTPEFPNVVVAQPPEHSHLTQATVQPLDLGFTITPESMTEVELSPTMKETPTQPPKKVVPQLRVYQGVTNPTPGQDQAQHPVSPSVTVQLLDLGLTITPEPTTEVGHSTPPKRTIVSPKHPEVTLPHPDQVQTQHSHLTRATVQPLDLGFTITPKSMTEVEPSTALMTTAPPPGHPEVTLPPSDKGQAQHSHLTQATVQPLDLELTITTKPTTEVKPSPTTEETSTQLPDLGLAIIPEPTTETGHSTALEKTTAPRPDRVQTLHRSLTEVTGPPTELEPAQDSLVQSESYTQNKALTAPEEHKASTSTNICELCTCGDEMLSCIDLNPEQRLRQVPVPEPNTHNGTFTILNFQGNYISYIDGNVWKAYSWTEKLILRENNLTELHKDSFEGLLSLQYLDLSCNKIQSIERHTFEPLPFLKFINLSCNVITELSFGTFQAWHGMQFLHKLILNHNPLTTVEDPYLFKLPALKYLDMGTTLVPLTTLKNILMMTVELEKLIVPSHMACCLCQFKNSIEAVCKTVKLHCNSACLTNTTHCPEEASVGNPEGAFMKVLQARKNYTSTELTIEPEEPSDSSGINLSGFGSEQLDTNDESDVTSTLSYILPYFSAVNLDVKSLLLPFIKLPTTGNSLAKIQTVGKNRQRLNRVLMGPRSIQKRHFKEVGRQSIRREQGAQASVENTAEEKRLGSPAPRELKQPHTQQGPEKLAGNAVYTKPSFTQEHKAAVSVLKPFSKGAPSTSSPAKALPQVRDRWKDLTHAISILESAKARVTNMKTSKPIVHSRKKYRFHKTRSRMTHRTPKVKKSPKVRKKSYLSRLMLSNRLPFSAAKSLINSPSQGAFSSLRDLSPQENPFLEVSAPSEHFIENNNTKDTTARNAFEENVFMENTNMPEGTISENANYNHPPEADSAGTAFNLGPTVKQTETKWEYNNVGTDLSPEPKSFNYPLLSSPGDQFEIQLTQQLQSVIPNNNVRRLIAHVIRTLKMDCSGAHVQVTCAKLVSRTGHLMKLLSGQQEVKASKIEWDTDQWKTENYINESTEAQSEQKEKSLEFTKELPGYGYTKK

SEQ ID NO: 863 - protein, 827 aa, Homo Sapiens
LVWVKDPLQLTSNPLGPPEPWSSRSSHLPWESPHAPAPPAAPGDFDYLGPSASSQMSALPQEPTENLAPFLKELDSAGELPLGPEPFLAAHQDLNDKRTPEERLPEVVPLLNRDQNQALVQLPRLKWVQTTDLDRAAGHQADEILVPLDSKVSRPTKFVVSPKNLKKDLAERWSLPEIVGIPHQLSKPQRQKQTLPDDYLSMDTLYPGSLPPELRVNADEPPGPPEQVGLSQFHLEPKSQNPETLEDIQSSSLQEEAPAQLLQLPQEVEPSTQQEAPALPPESSMESLAQTPLNHEVTVQPPGEDQAHYNLPKFTVKPADVEVTMTSEPKNETESTQAQQEAPIQPPEEAEPSSTALRTTDPPPEHPEVTLPPSDKGQAQHSHLTEATVQPLDLELSITTEPTTEVKPSPTTEETSAQPPDPGLAITPEPTTEIGHSTALEKTRAPHPDQVQTLHRSLTEVTGPPTKLESSQDSLVQSETAPEEQKASTSTNICELCTCGDETLSCVGLSPKQRLRQVPVPEPDTYNGIFTTLNFQGNYISYLDGNVWKAYSWTEKLILSENYLTELPKDSFEGLLYLQYLILNRNPLTTVEDPYLFELPALKYLDMGTTHITLTTLKNILTMTVELEKLILPSHMACCLCQFKNSIEAVCKTVKLHCNTACLTNSIHCPEEASVGNPEGAFMKMLQARKQHMSTQLTIESEAPSDSSGINLSGFGGDQLEIQLTEQLRSLIPNEDVRKFMSHVIRTLKMECSETHVQGSCAKLMLRTGLLMKLLSEQQEAKALNVEWDTDQQKTNYINENMEQNEQKEQKSSELMKEVPGDDYKNK

SEQ ID NO: 864 - protein, 222 aa, Homo Sapiens
CPAGCACTDPHTVDCRDRGLPSVPDPFPLDVRKLLVAGNRIQRIPEDFFIFYGDLVYLDFRNNSLRSLEEGTFSGSAKLVFLDLSYNNLTQLGAGAFRSAGRLVKLSLANNNLVGVHEDAFETLESLQVLELNDNNLRSLSVAALAALPALRSLRLDGNPWLCDCDFAHLFSWIQENASKLPKGLDEIQCSLPMESRRISLRELSEASFSECRFSLSLTDLC

SEQ ID NO: 865 - protein, 171 aa, Homo Sapiens
CPKGCLCSSSGGLNVTCSNANLKEIPRDLPPETVLLYLDSNQITSIPNEIFKDLHQLRVLNLSKNGIEFIDEHAFKGVAETLQTLDLSDNRIQSVHKNAFNNLKARARIANNPWHCDCTLQQVLRSMASNHETAHNVICKTSVLDEHAGRPFLNAANDADLCNLPKKTTDY

SEQ ID NO: 866 - protein, 183 aa, Homo Sapiens
VPSPQVPPRGCYVAKEAGERTFRCSQAGLSAVPSGIPNDTRKLYLDANQLASVPAGAFQHLPVLEELDLSHNALAHLSGAAFQGLEGTLRHLDLSANQLASVPVEAFVGLQIQVNLSANPWHCDCALQEVLRQVRLVPGTGTGIVCGSGARPDLVGQEFLLLAGEEELCGSGWGGARRSTDVA

SEQ ID NO: 867 - protein, 489 aa, Homo Sapiens
ASAGPQNCPSVCSCSNQFSKVVCTRRGLSEVPQGIPSNTRYLNLMENNIQMIQADTFRHLHHLEVLQLGRNSIRQIEVGAFNGLASLNTLELFDNWLTVIPSGAFEYLSKLRELWLRNNPIESIPSYAFNRVPSLMRLDLGELKKLEYISEGAFEGLFNLKYLNLGMCNIKDMPNLTPLVGLEELEMSGNHFPEIRPGSFHGLSSLKKLWVMNSQVSLIERNAFDGLASLVELNLAHNNLSSLPHDLFTPLRYLVELHLHHNPWNCDCDILWLAWWLREYIPTNSTCCGRCHAPMHMRGRYLVEVDQASFQCSAPFIMDAPRDLNISEGRMAELKCRTPPMSSVKWLLPNGTVLSHASRHPRISVLNDGTLNFSHVLLSDTGVYTCMVTNVAGNSNASAYLNVSTAELNTSNYSFFTTVTVETTEISPEDTTRKYKPVPTTSTGYQPAYTTSTTVLIQTTRVPKQVAVPATDTTDKMQTSLDEVMKTTK

SEQ ID NO: 868 - protein, 541 aa, Homo Sapiens
AGGGGVAVTSAAGGGSPPATSCPVACSCSNQASRVICTRRDLAEVPASIPVNTRYLNLQENGIQVIRTDTFKHLRHLEILQLSKNLVRKIEVGAFNGLPSLNTLELFDNRLTTVPTQAFEYLSKLRELWLRNNPIESIPSYAFNRVPSLRRLDLGELKRLEYISEAAFEGLVNLRYLNLGMCNLKDIPNLTALVRLEELELSGNRLDLIRPGSFQGLTSLRKLWLMHAQVATIERNAFDDLKSLEELNLSHNNLMSLPHDLFTPLHRLERVHLNHNPWHCNCDVLWLSWWLKETVPSNTTCCARCHAPAGLKGRYIGELDQSHFTCYAPVIVEPPTDLNVTEGMAAELKCRTGTSMTSVNWLTPNGTLMTHGSYRVRISVLHDGTLNFTNVTVQDTGQYTCMVTNSAGNTTASATLNVSAVDPVAAGGTGSGGGGPGGSGGVGGGSGGYTYFTTVTVETLETQPGEEALQPRGTEKEPPGPTTDGVWGGGRPGDAAGPASSSTTAPAPRSSRPTEKAFTVPITDVTENALKDLDDVMKTTK

SEQ ID NO: 869 - protein, 483 aa, Homo Sapiens
QTCPSVCSCSNQFSKVICVRKNLREVPDGISTNTRLLNLHENQIQIIKVNSFKHLRHLEILQLSRNHIRTIEIGAFNGLANLNTLELFDNRLTTIPNGAFVYLSKLKELWLRNNPIESIPSYAFNRIPSLRRLDLGELKRLSYISEGAFEGLSNLRYLNLAMCNLREIPNLTPLIKLDELDLSGNHLSAIRPGSFQGLMHLQKLWMIQSQIQVIERNAFDNLQSLVEINLAHNNLTLLPHDLFTPLHHLERIHLHHNPWNCNCDILWLSWWIKDMAPSNTACCARCNTPPNLKGRYIGELDQNYFTCYAPVIVEPPADLNVTEGMAAELKCRASTSLTSVSWITPNGTVMTHGAYKVRIAVLSDGTLNFTNVTVQDTGMYTCMVSNSVGNTTASATLNVTAATTTPFSYFSTVTVETMEPSQDEARTTDNNVGPTPVVDWETTNVTTSLTPQSTRSTEKTFTIPVTDINSGIPGIDEVMKTTK

SEQ ID NO: 870 - protein, 221 aa, Homo Sapiens
SKCPNNCLCQAQEVICTGKQLTEYPLDIPLNTRRLFLNENRITSLPAMHLGLLSDLVYLDCQNNRIREVMDYTFIGVFKLIYLDLSSNNLTSISPFTFSVLSNLVQLNIANNPHLLSLHKFTFANTTSLRYLDLRNTGLQTLDSAALYHLTTLETLFLSGNPWKCNCSFLDFAIFLIVFHMDPSDDLNATCVEPTELTGWPITRVGNPLRYMCITHLDHKD

SEQ ID NO: 871 - protein, 224 aa, Homo Sapiens
GTSCPVLCTCRNQVVDCSSQRLFSVPPDLPMDTRNLSLAHNRITAVPPGYLTCYMELQVLDLHNNSLMELPRGLFLHAKRLAHLDLSYNNFSHVPADMFQEAHGLVHIDLSHNPWLRRVHPQAFQGLMQLRDLDLSYGGLAFLSLEALEGLPGLVTLQIGGNPWVCGCTMEPLLKWLRNRIQRCTADSQLAECRGPPEVEGAPLFSLTEESFKACHLTLTLDDY

SEQ ID NO: 872 - protein, 442 aa, Homo Sapiens
SLVALYLDNSNILYVYPKAFVQLRHLYFLFLNNNFIKRLDPGIFKGLLNLRNLYLQYNQVSFVPRGVFNDLVSVQYLNLQRNRLTVLGSGTFVGMVALRILDLSNNNILRISESGFQHLENLACLYLGSNNLTKVPSNAFEVLKSLRRLSLSHNPIEAIQPFAFKGLANLEYLLLKNSRIRNVTRDGFSGINNLKHLILSHNDLENLNSDTFSLLKNLIYLKLDRNRIISIDNDTFENMGASLKILNLSFNNLTALHPRVLKPLSSLIHLQANSNPWECNCKLLGLRDWLASSAITLNIYCQNPPSMRGRALRYINITNCVTSSINVSRAWAVVKSPHIHHKTTALMMAWHKVTTNGSPLENTETENITFWERIPTSPAGRFFQENAFGNPLETTAVLPVQIQLTTSVTLNLEKNSALPNDAASMSGKTSLICTQEVEKLNE

SEQ ID NO: 873 - protein, 78 aa, Homo Sapiens
QVTQDKMICLPCKWVTKDSCNDSFRGWAAPGPEPTYPNSTILPTPDTGPTGIKYDLDRHQYNYVDAVCYENRLHWFAK

SEQ ID NO: 874 - protein, 73 aa, Homo Sapiens
LTQSRVLCCLPCKVEFDNHCAVPWDILKASMNTSSNPGTPLPLPLRIQNDLHRQQYSYIDAVCYEKQLHWFAK

SEQ ID NO: 875 - protein, 82 aa, Homo Sapiens
TLQVMQDKIICLPKRVQPAQNHSSLSNVSQAVASTTPLPPPKPSPANPITVEMKGLKTDLDLQQYSFINQMCYERALHWYAK

SEQ ID NO: 876 - protein, 120 aa, Homo Sapiens
TMQLTKDQVVCLPVLPSPVNSKAHTPPGNAEVTTNIPKMEAATNQDQDGRTTNDISFGTSAVTPDIPLRATYPRTDFALPNQEAKKEKKDPTGRKTNLDFQQYVFINQMCYHLALPWYSK

SEQ ID NO: 877 - protein, 606 aa, Homo Sapiens
SIQNSECPQLCVCEIRPWFTPQSTYREATTVDCNDLRLTRIPSNLSSDTQVLLLQSNNIAKTVDELQQLFNLTELDFSQNNFTNIKEVGLANLTQLTTLHLEENQITEMTDYCLQDLSNLQELYINHNQISTISAHAFAGLKNLLRLHLNSNKLKVIDSRWFDSTPNLEILMIGENPVIGILDMNFKPLANLRSLVLAGMYLTDIPGNALVGLDSLESLSFYDNKLVKVPQLALQKVPSLKFLDLNKNPIHKIQEGDFKNMLRLKELGINNMGELVSVDRYALDNLPELTKLEATNNPKLSYIHRLAFRSVPALESLMLNNNALNAIYQKTVESLPNLREISIHSNPLRCDCVIHWINSNKTNIRFMEPLSMFCAMPPEYKGHQVKEVLIQDSSEQCLPMISHDSFPNRLNVDIGTTVFLDCRAMAEPEPEIYWVTPIGNKITVETLSDKYKLSSEGTLEISNIQIEDSGRYTCVAQNVQGADTRVATIKVNGTLLDGTQVLKIYVKQTESHSILVSWKVNSNVMTSNLKWSSATMKIDNPHITYTARVPVDVHEYNLTHLQPSTDYEVCLTVSNIHQQTQKSCVNVTTKNAAFAVDISDQETSTA

SEQ ID NO: 878 - protein, 606 aa, Homo Sapiens
VDKKVDCPRLCTCEIRPWFTPRSIYMEASTVDCNDLGLLTFPARLPANTQILLLQTNNIAKIEYSTDFPVNLTSLDLSQNNLSSVTNINVKKMPQLLSVYLEENKLTELPEKCLSELSNLQELYINHNLLSTISPGAFIGLHNLLRLHLNSNRLQMINSKWFDALPNLEILMIGENPIIRIKDMNFKPLINLRSLVIAGINLTEIPDNALVGLENLESISFYDNRLIKVPHVALQKVVNLKFLDLNKNPINRIRRGDFSNMLHLKELGINNMPELISIDSLAVDNLPDLRKIEATNNPRLSYIHPNAFFRLPKLESLMLNSNALSALYHGTIESLPNLKEISIHSNPIRCDCVIRWMNMNKTNIRFMEPDSLFCVDPPEFQGQNVRQVHFRDMMEICLPLIAPESFPSNLNVEAGSYVSFHCRATAEPQPEIYWITPSGQKLLPNTLTDKFYVHSEGTLDINGVTPKEGGLYTCIATNLVGADLKSVMIKVDGSFPQDNNGSLNIKIRDIHANSVLVSWKASSKILKSSVKWTAFVKTENSHAAQSARIPSDVKVYNLTHLNPSTEYKICIDIPTIYQKNRKKCVNVTTKGLHPDQKEYEKNNTTT

SEQ ID NO: 879 - protein, 661 aa, Homo Sapiens
DPPQEKVPLFRVTQQGPWGSSGSNATDSPCEGLPAADATALTLANRNLERLPGCLPRTLRSLDASHNLLRALSTSELGHLEQLQVLTLRHNRIAALRWGPGGPAGLHTLDLSYNQLAALLPCTGPALSSLRALALAGNPLRALQPRAFACFPALQLLNLSCTALGRGAQGGIAEAAFAGEDGAPLVTLEVLDLSGTFLERVESGWIRDLPKLTSLYLRKMPRLTTLEGDIFKMTPNLQQLDCQDSPALASVATHIFQDTPHLQVLLFQNCNLSSFPPWTLDSSQVLSINLFGNPLTCSCDLSWLLTDAKRTVLSRAADTMCAPAAGSSGPFSASLSLSQLPGVCQSDQSTTLGASHPPCFNRSTYAQGTTVAPSAAPATRPAGDQQSVSKAPNVGSRTIAAWPHSDAREGTAPSTTNSVAGHSNSSVFPRAASTTRTQHRGEHAPELVLEPDISAASTPLASKLLGPFPTSWDRSISSPQPGQRTHATPQAPNPSLSEGEIPVLLLDDYSEEEEGRKEEVGTPHQDVPCDYHPCKHLQTPCAELQRRWRCRCPGLSGEDTIPDPPRLQGVTETTDTSALVHWCAPNSVVHGYQIRYSAEGWAGNQSVVGVIYATARQHPLYGLSPGTTYRVCVLAANRAGLSQPRSSGWRSPCAAFTTKPS

SEQ ID NO: 880 - protein, 172 aa, Homo Sapiens
LAPQDFEEEEADETETAWPPLPAVPCDYDHCRHLQVPCKELQRVGPAACLCPGLSSPAQPPDPPRMGEVRIAAEEGRAVVHWCAPFSPVLHYWLLLWDGSEAAQKGPPLNATVRRAELKGLKPGGIYVVCVVAANEAGASRVPQAGGEGLEGADIPAFGPCSRLAVPPNPRT

SEQ ID NO: 881 - protein, 612 aa, Homo Sapiens
AVPVVPWHVPCPPQCACQIRPWYTPRSSYREATTVDCNDLFLTAVPPALPAGTQTLLLQSNSIVRVDQSELGYLANLTELDLSQNSFSDARDCDFHALPQLLSLHLEENQLTRLEDHSFAGLASLQELYLNHNQLYRIAPRAFSGLSNLLRLHLNSNLLRAIDSRWFEMLPNLEILMIGGNKVDAILDMNFRPLANLRSLVLAGMNLREISDYALEGLQSLESLSFYDNQLARVPRRALEQVPGLKFLDLNKNPLQRVGPGDFANMLHLKELGLNNMEELVSIDKFALVNLPELTKLDITNNPRLSFIHPRAFHHLPQMETLMLNNNALSALHQQTAESLPNLQEVGLHGNPIRCDCVIRWANATGTRVRFIEPQSTLCAEPPDLQRLPVREVPFREMTDHCLPLISPRSFPPSLQVASGESMVLHCRALAEPEPEIYWVTPAGLRLTPAHAGRRYRVYPEGTLELRRVTAEEAGLYTCVAQNLVGADTKTVSVVVGRALLQPGRDEGQGLELRVQETHPYHILLSWVTPPNTVSTNLTWSSASSLRGQGATALARLPRGTHSYNITRLLQATEYWACLQVAFADAHTQLACVWARTKEATSCHRALGDRPG

SEQ ID NO: 882 - protein, 393 aa, Homo Sapiens
APSGCPQLCRCEGRLLYCEALNLTEAPHNLSGLLGLSLRYNSLSELRAGQFTGLMQLTWLYLDHNHICSVQGDAFQKLRRVKELTLSSNQITQLPNTTFRPMPNLRSVDLSYNKLQALAPDLFHGLRKLTTLHMRANAIQFVPVRIFQDCRSLKFLDIGYNQLKSLARNSFAGLFKLTELHLEHNDLVKVNFAHFPRLISLHSLCLRRNKVAIVVSSLDWVWNLEKMDLSGNEIEYMEPHVFETVPHLQSLQLDSNRLTYIEPRILNSWKSLTSITLAGNLWDCGRNVCALASWLSNFQGRYDGNLQCASPEYAQGEDVLDAVYAFHLCEDGAEPTSGHLLSAVTNRSDLGPPASSATTLADGGEGQHDGTFEPATVALPGGEHAENAVQIHK

SEQ ID NO: 883 - protein, 389 aa, Homo Sapiens
CPPKCRCEKLLFYCDSQGFHSVPNATDKGSLGLSLRHNHITELERDQFASFSQLTWLHLDHNQISTVKEDAFQGLYKLKELILSSNKIFYLPNTTFTQLINLQNLDLSFNQLSSLHPELFYGLRKLQTLHLRSNSLRTIPVRLFWDCRSLEFLDLSTNRLRSLARNGFAGLIKLRELHLEHNQLTKINFAHFLRLSSLHTLFLQWNKISNLTCGMEWTWGTLEKLDLTGNEIKAIDLTVFETMPNLKILLMDNNKLNSLDSKILNSLRSLTTVGLSGNLWECSARICALASWLGSFQGRWEHSILCHSPDHTQGEDILDAVHGFQLCWNLSTTVTVMATTYRDPTTEYTKRISSSSYHVGDKEIPTTAGIAVTTEEHFPEPDNAIFTQR

SEQ ID NO: 884 - protein, 389 aa, Homo Sapiens
ERGCPKGCRCEGKMVYCESQKLQEIPSSISAGCLGLSLRYNSLQKLKYNQFKGLNQLTWLYLDHNHISNIDENAFNGIRRLKELILSSNRISYFLNNTFRPVTNLRNLDLSYNQLHSLGSEQFRGLRKLLSLHLRSNSLRTIPVRIFQDCRNLELLDLGYNRIRSLARNVFAGMIRLKELHLEHNQFSKLNLALFPRLVSLQNLYLQWNKISVIGQTMSWTWSSLQRLDLSGNEIEAFSGPSVFQCVPNLQRLNLDSNKLTFIGQEILDSWISLNDISLAGNIWECSRNICSLVNWLKSFKGLRENTIICASPKELQGVNVIDAVKNYSICGKSTTERFDLARALPKPTFKPKLPRPKHESKPPLPPTVGATEPGPETDADAEHISFHK

SEQ ID NO: 885 - protein, 394 aa, Homo Sapiens
QRACPKNCRCDGKIVYCESHAFADIPENISGGSQGLSLRFNSIQKLKSNQFAGLNQLIWLYLDHNYISSVDEDAFQGIRRLKELILSSNKITYLHNKTFHPVPNLRNLDLSYNKLQTLQSEQFKGLRKLIILHLRSNSLKTVPIRVFQDCRNLDFLDLGYNRLRSLSRNAFAGLLKLKELHLEHNQFSKINFAHFPRLFNLRSIYLQWNRIRSISQGLTWTWSSLHNLDLSGNDIQGIEPGTFKCLPNLQKLNLDSNKLTNISQETVNAWISLISITLSGNMWECSRSICPLFYWLKNFKGNKESTMICAGPKHIQGEKVSDAVETYNICSEVQVVNTERSHLVPQTPQKPLIIPRPTIFKPDVTQSTFETPSPSPGFQIPGAEQEYEHVSFHK

SEQ ID NO: 886 - protein, 261 aa, Homo Sapiens
QSSTNFVDCSQQGLAEIPSHLPPQTRTLHLQDNQIHHLPAFAFRSVPWLMTLNLSNNSLSNLAPGAFHGLQHLQVLNLTQNSLLSLESRLFHSLPQLRELDLSSNNISHLPTSLGETWENLTILAVQQNQLQQLDRALLESMPSVRLLLLKDNLWKCNCHLLGLKLWLEKFVYKGGLTDGIICESPDTWKGKDLLRIPHELYQPCPLPAPDPVSSQAQWPGSAHGVVLRPPENHNAGERELLECELKPKPRPANLRHAIAT

SEQ ID NO: 887 - protein, 275 aa, Homo Sapiens
LPTCPFSCKCDSRSLEVDCSGLGLTTVPPDVPAATRTLLLLNNKLSALPSWAFANLSSLQRLDLSNNFLDRLPRSIFGDLTNLTELQLRNNSIRTLDRDLLRHSPLLRHLDLSINGLAQLPPGLFDGLLALRSLSLRSNRLQNLDRLTFEPLANLQLLQVGDNPWECDCNLREFKHWMEWFSYRGGRLDQLACTLPKELRGKDMRMVPMEMFNYCSQLEDENSSAGLDIPGPPCTKASPEPAKPKPGAEPEPEPSTACPQKQRHRPASVRRAMGT

SEQ ID NO: 888 - protein, 287 aa, Homo Sapiens
VRSVDFNRGTDNITVRQGDTAILRCVVEDKNSKVAWLNRSGIIFAGHDKWSLDPRVELEKRHSLEYSLRIQKVDVYDEGSYTCSVQTQHEPKTSQVYLIVQVPPKISNISSDVTVNEGSNVTLVCMANGRPEPVITWRHLTPTGREFEGEEEYLEILGITREQSGKYECKAANEVSSADVKQVKVTVNYPPTITESKSNEATTGRQASLKCEASAVPAPDFEWYRDDTRINSANGLEIKSTEGQSSLTVTNVTEEHYGNYTCVAANKLGVTNASLVLFRPGSVRGIN

SEQ ID NO: 889 - protein, 259 aa, Homo Sapiens
MQQDGLGVGTRNGSGKGRSVHPSWPWCAPRPLRYFGRDARARRAQTAAMALLAGGLSRGLGSHPAAAGRDAVVFVWLLLSTWCTAPARAIQVTVSNPYHVVILFQPVTLPCTYQMTSTPTQPIVIWKYKSFCRDRIADAFSPASVDNQLNAQLAAGNPGYNPYVECQDSVRTVRVVATKQGNAVTLGDYYQGRRITITGNADLTFDQTAWGDSGVYYCSVVSAQDLQGNNEAYAELIVLGRTSGVAELLPGFQAGPIED

SEQ ID NO: 890 - protein, 171 aa, Homo Sapiens
LPGVGLTPSAAQTARQHPKMHLAHSTLKPAAHLIGDPSKQNSLLWRANTDRAFLQDGFSLSNNSLLVPTSGIYFVYSQVVFSGKAYSPKATSSPLYLAHEVQLFSSQYPFHVPLLSSQKMVYPGLQEPWLHSMYHGAAFQLTQGDQLSTHTDGIPHLVLSPSTVFFGAFAL

SEQ ID NO: 891 - protein, 196 aa, Homo Sapiens
QDQGGLVTETADPGAQAQQGLGFQKLPEEEPETDLSPGLPAAHLIGAPLKGQGLGWETTKEQAFLTSGTQFSDAEGLALPQDGLYYLYCLVGYRGRAPPGGGDPQGRSVTLRSSLYRAGGAYGPGTPELLLEGAETVTPVLDPARRQGYGPLWYTSVGFGGLVQLRRGERVYVNISHPDMVDFARGKTFFGAVMVG

SEQ ID NO: 892 - protein, 1375 aa, Homo Sapiens
NHTGRIKVVFTPSICKVTCTKGSCQNSCEKGNTTTLISENGHAADTLTATNFRVVICHLPCMNGGQCSSRDKCQCPPNFTGKLCQIPVHGASVPKLYQHSQQPGKALGTHVIHSTHTLPLTVTSQQGVKVKFPPNIVNIHVKHPPEASVQIHQVSRIDGPTGQKTKEAQPGQSQVSYQGLPVQKTQTIHSTYSHQQVIPHVYPVAAKTQLGRCFQETIGSQCGKALPGLSKQEDCCGTVGTSWGFNKCQKCPKKPSYHGYNQMMECLPGYKRVNNTFCQDINECQLQGVCPNGECLNTMGSYRCTCKIGFGPDPTFSSCVPDPPVISEEKGPCYRLVSSGRQCMHPLSVHLTKQLCCCSVGKAWGPHCEKCPLPGTAAFKEICPGGMGYTVSGVHRRRPIHHHVGKGPVFVKPKNTQPVAKSTHPPPLPAKEEPVEALTFSREHGPGVAEPEVATAPPEKEIPSLDQEKTKLEPGQPQLSPGISTIHLHPQFPVVIEKTSPPVPVEVAPEASTSSASQVIAPTQVTEINECTVNPDICGAGHCINLPVRYTCICYEGYRFSEQQRKCVDIDECTQVQHLCSQGRCENTEGSFLCICPAGFMASEEGTNCIDVDECLRPDVCGEGHCVNTVGAFRCEYCDSGYRMTQRGRCEDIDECLNPSTCPDEQCVNSPGSYQCVPCTEGFRGWNGQCLDVDECLEPNVCANGDCSNLEGSYMCSCHKGYTRTPDHKHCRDIDECQQGNLCVNGQCKNTEGSFRCTCGQGYQLSAAKDQCEDIDECQHRHLCAHGQCRNTEGSFQCVCDQGYRASGLGDHCEDINECLEDKSVCQRGDCINTAGSYDCTCPDGFQLDDNKTCQDINECEHPGLCGPQGECLNTEGSFHCVCQQGFSISADGRTCEDIDECVNNTVCDSHGFCDNTAGSFRCLCYQGFQAPQDGQGCVDVNECELLSGVCGEAFCENVEGSFLCVCADENQEYSPMTGQCRSRTSTDLDVDVDQPKEEKKECYYNLNDASLCDNVLAPNVTKQECCCTSGAGWGDNCEIFPCPVLGTAEFTEMCPKGKGFVPAGESSSEAGGENYKDADECLLFGQEICKNGFCLNTRPGYECYCKQGTYYDPVKLQCFDMDECQDPSSCIDGQCVNTEGSYNCFCTHPMVLDASEKRCIRPAESNEQIEETDVYQDLCWEHLSDEYVCSRPLVGKQTTYTECCCLYGEAWGMQCALCPLKDSDDYAQLCNIPVTGRRQPYGRDALVDFSEQYTPEADPYFIQDRFLNSFEELQAEECGILNGCENGRCVRVQEGYTCDCFDGYHLDTAKMTCVDVNECDELNNRMSLCKNAKCINTDGSYKCLCLPGYVPSDKPNYCTPLNTALNLEKDSDLE

SEQ ID NO: 893 - protein, 197 aa, Homo Sapiens
QAVPPYASENQTCRDQEKEYYEPQHRICCSRCPPGTYVSAKCSRIRDTVCATCAENSYNEHWNYLTICQLCRPCDPVMGLEEIAPCTSKRKTQCRCQPGMFCAAWALECTHCELLSDCPPGTEAELKDEVGKGNNHCVPCKAGHFQNTSSPSARCQPHTRCENQGLVEAAPGTAQSDTTCKNPLEPLPPEMSGTMLM

SEQ ID NO: 894 - protein, 692 aa, Homo Sapiens
GRRRRSVQWCAVSQPEATKCFQWQRNMRKVRGPPVSCIKRDSPIQCIQAIAENRADAVTLDGGFIYEAGLAPYKLRPVAAEVYGTERQPRTHYYAVAVVKKGGSFQLNELQGLKSCHTGLRRTAGWNVPIGTLRPFLNWTGPPEPIEAAVARFFSASCVPGADKGQFPNLCRLCAGTGENKCAFSSQEPYFSYSGAFKCLRDGAGDVAFIRESTVFEDLSDEAERDEYELLCPDNTRKPVDKFKDCHLARVPSHAVVARSVNGKEDAIWNLLRQAQEKFGKDKSPKFQLFGSPSGQKDLLFKDSAIGFSRVPPRIDSGLYLGSGYFTAIQNLRKSEEEVAARRARVVWCAVGEQELRKCNQWSGLSEGSVTCSSASTTEDCIALVLKGEADAMSLDGGYVYTAGKCGLVPVLAENYKSQQSSDPDPNCVDRPVEGYLAVAVVRRSDTSLTWNSVKGKKSCHTAVDRTAGWNIPMGLLFNQTGSCKFDEYFSQSCAPGSDPRSNLCALCIGDEQGENKCEPNSNERYYGYTGAFRCLAENAGDVAFVKDVTVLQNTDGNNNEAWAKDLKLADFALLCLDGKRKPVTEARSCHLAMAPNHAVVSRMDKVERLKQVLLHQQAKFGRNGSDCPDKFCLFQSETKNLLFNDNTECLARLHGKTTYEKYLGPQYVAGITNLKKCSTSPLLEACEFLRK

SEQ ID NO: 895 - protein, 408 aa, Homo Sapiens
ILCSSPGSQETFLRSSPLPLASPSPRDPKVSAPPSILEPASPLNSPGTEGSWLFSTCGASGRHGPTQTQCDGAYAGTSVVVTVGAAGQLRGVQLWRVPGPGQYLISAYGAAGGKGAKNHLSRAHGVFVSAIFSLGLGESLYILVGQQGEDACPGGSPESQLVCLGESRAVEEHAAMDGSEGVPGSRRWAGGGGGGGGATYVFRVRAGELEPLLVAAGGGGRAYLRPRDRGRTQASPEKLENRSEAPGSGGRGGAAGGGGGWTSRAPSPQAGRSLQEGAEGGQGCSEAWATLGWAAAGGFGGGGGACTAGGGGGGYRGGDASETDNLWADGEDGVSFIHPSSELFLQPLAVTENHGEVEIRRHLNCSHCPLRDCQWQAELQLAECLCPEGMELAVDNVTCMDLRKPPGP

SEQ ID NO: 896 - protein, 320 aa, Homo Sapiens
QYYDYDFPLSIYGQSSPNCAPECNCPESYPSAMYCDELKLKSVPMVPPGIKYLYLRNNQIDHIDEKAFENVTDLQWLILDHNLLENSKIKGRVFSKLKQLKKLHINHNNLTESVGPLPKSLEDLQLTHNKITKLGSFEGLVNLTFIHLQHNRLKEDAVSAAFKGLKSLEYLDLSFNQIARLPSGLPVSLLTLYLDNNKISNIPDEYFKRFNALQYLRLSHNELADSGIPGNSFNVSSLVELDLSYNKLKNIPTVNENLENYYLEVNQLEKFDIKSFCKILGPLSYSKIKHLRLDGNRISETSLPPDMYECLRVANEVTLN

SEQ ID NO: 897 - protein, 78 aa, Homo Sapiens
LRCHVCTSSSNCKHSVVCPASSRFCKTTNTVEPLRGNLVKKDCAESCTPSYTLQGQVSSGTSSTQCCQEDLCNEKLHN

SEQ ID NO: 898 - protein, 81 aa, Homo Sapiens
LMCFSCLNQKSNLYCLKPTICSDQDNYCVTVSASAGIGNLVTFGHSLSKTCSPACPIPEGVNVGVASMGISCCQSFLCNFS

SEQ ID NO: 899 - protein, 183 aa, Homo Sapiens
KVPVPDIRTCHFCLVEDPSVGCISGSEKCTISSSSLCMVITIYYDVKVRFIVRGCGQYISYRCQEKRNTYFAEYWYQAQCCQYDYCNSWSSPQLQSSLPEPHDRPLALPLSDSQIQWFYQALNLSLPLPNFHAGTEPDGLDPMVTLSLNLGLSFAELRRMYLFLNSSGLLVLPQAGLLTPHPS

SEQ ID NO: 900 - protein, 109 aa, Homo Sapiens
KFVPVNWEPPQPLPFPKYLRCYRCLLETKELGCLLGSDICLTPAGSSCITLHKKNSSGSDVMVSDCRSKEQMSDCSNTRTSPVSGFWIFSQYCFLDFCNDPQNRGLYTP

SEQ ID NO: 901 - protein, 81 aa, Homo Sapiens
DIRCHSCYKVPVLGCVDRQSCRLEPGQQCLTTHAYLGKMWVFSNLRCGTPEEPCQEAFNQTNRKLGLTYNTTCCNKDNCNS

SEQ ID NO: 902 - protein, 85 aa, Homo Sapiens
NRMRCYNCGGSPSSSCKEAVTTCGEGRPQPGLEQIKLPGNPPVTLIHQHPACVAAHHCNQVETESVGDVTYPAHRDCYLGDLCNS

SEQ ID NO: 903 - protein, 219 aa, Homo Sapiens
ADNMQAIYVALGEAVELPCPSPPTLHGDEHLSWFCSPAAGSFTTLVAQVQVGRPAPDPGKPGRESRLRLLGNYSLWLEGSKEEDAGRYWCAVLGQHHNYQNWRVYDVLVLKGSQLSARAADGSPCNVLLCSVVPSRRMDSVTWQEGKGPVRGRVQSFWGSEAALLLVCPGEGLSEPRSRRPRIIRCLMTHNKGVSFSLAASIDASPALCAPSTGWDMPW

SEQ ID NO: 904 - protein, 90 aa, Homo Sapiens
LWCQDCTLTTNSSHCTPKQCQPSDTVCASVRITDPSSSRKDHSVNKMCASSCDFVKRHFFSDYLMGFINSGILKVDVDCCEKDLCNGAAG

SEQ ID NO: 905 - protein, 121 aa, Homo Sapiens
DANLTARQRDPEDSQRTDEGDNRVWCHVCERENTFECQNPRRCKWTEPYCVIAAVKIFPRFFMVAKQCSAGCAAMERPKPEEKRFLLEEPMPFFYLKCCKIRYCNLEGPPINSSVFKEYAG

SEQ ID NO: 906 - protein, 101 aa, Homo Sapiens
SAGCATTPARNLSCYQCFKVSSWTECPPTWCSPLDQVCISNEVVVSFKWSVRVLLSKRCAPRCPNDNMKFEWSPAPMVQGVITRRCCSWALCNRALTPQEG

SEQ ID NO: 907 - protein, 266 aa, Homo Sapiens
YEDGIYSVIQKKVTWYEALNMCSQSGGHLASVHNQNGQLFLEDIVKRDGFPLWVGLSSHDGSESSFEWSDGSTFDYIPWKGQTSPGNCVLLDPKGTWKHEKCNSVKDGAICYKPTKSKKLSRLTYSSRCPAAKENGSRWIQYKGHCYKSDQALHSFSEAKKLCSKHDHSATIVSIKDEDENKFVSRLMRENNNITMRVWLGLSQHSVDQSWSWLDGSEVTFVKWENKSKSGVGRCSMLIASNETWKKVECEHGFGRVVCKVPLGPD

SEQ ID NO: 908 - protein, 206 aa, Homo Sapiens
VTMKSVKVSENFSCNITLMCSVKGAEKSVLYSWTPREPHASESNGGSILTVSRTPCDPDLPYICTAQNPVSQRSSLPVHVGQFCTDPGASRGGTTGETVVGVLGEPVTLPLALPACRDTEKVVWLFNTSIISKEREEAATADPLIKSRDPYKNRVWVSSQDCSLKISQLKIEDAGPYHAYVCSEASSVTSMTHVTLLIYRPERNTK

SEQ ID NO: 909 - protein, 111 aa, Homo Sapiens
LDCHVCAYNGDNCFNPMRCPAMVAYCMTTRTSAAEAIWCHQCTGFGGCSHGSRCLRDSTHCVTTATRVLSNTEDLPLVTKMCHIGCPDIPSLGLGPYVSIACCQTSLCNHD

SEQ ID NO: 910 - protein, 97 aa, Homo Sapiens
LQIQCYQCEEFQLNNDCSSPEFIVNCTVNVQDMCQKEVMEQSAGIMYRKSCASSAACLIASAGYQSFCSPGKLNSVCISCCNTPLCNGPRPKKRGSS

SEQ ID NO: 911 - protein, 81 aa, Homo Sapiens
LRCYVCPEPTGVSDCVTIATCTTNETMCKTTLYSREIVYPFQGDSTVTKSCASKCKPSDVDGIGQTLPVSCCNTELCNVDG

SEQ ID NO: 912 - protein, 296 aa, Homo Sapiens
LECYSCVQKADDGCSPNKMKTVKCAPGVDVCTEAVGAVETIHGQFSLAVRGCGSGLPGKNDRGLDLHGLLAFIQLQQCAQDRCNAKLNLTSRALDPAGNESAYPPNGVECYSCVGLSREACQGTSPPVVSCYNASDHVYKGCFDGNVTLTAANVTVSLPVRGCVQDEFCTRDGVTGPGFTLSGSCCQGSRCNSDLRNKTYFSPRIPPLVRLPPPEPTTVASTTSVTTSTSAPVRPTSTTKPMPAPTSQTPRQGVEHEASRDEEPRLTGGAAGHQDRSNSGQYPAKGGPQQPHNKGC

SEQ ID NO: 913 - protein, 170 aa, Homo Sapiens
LPRMSCGAGCYKTQKGTARGVVGFKGCSSSSSYPAQISYLVSPPGVSIASYSRVCRSYLCNNLTNLEPFVKLKASTPKSITSASCSCPTCVGEHMKDCLPNFVTTNSCPLAASTCYSSTLKFQAGFLNTTFLLMGCAREHNQLLADFHHIGSIKVTEVLNILEKSQIVGA

SEQ ID NO: 914 - protein, 200 aa, Homo Sapiens
LQCYSFEHTYFGPFDLRAMKLPSISCPHECFEAILSLDTGYRAPVTLVRKGCWTGPPAGQTQSNADALPPDYSVVRGCTTDKCNAHLMTHDALPNLSQAPDPPTLSGAECYACIGVHQDDCAIGRSRRVQCHQDQTACFQGNGRMTVGNFSVPVYIRTCHRPSCTTEGSTSPWTAIDLQGSCCEGYLCNRKSMTQPFTSA

SEQ ID NO: 915 - protein, 128 aa, Homo Sapiens
AQSRDFTVKDIIYLHPSTTPYPGGFKCFTCEKAADNYECNRWAPDIYCPRETRYCYTQHTMEVTGNSISVTKRCVPLEECLSTGCRDSEHEGHKVCTSCCEGNICNLPLPRNETDATFATTSPINQTN

SEQ ID NO: 916 - protein, 125 aa, Homo Sapiens
KNINFYNVRPPLDPTPFPNSFKCFTCENAGDNYNCNRWAEDKWCPQNTQYCLTVHHFTSHGRSTSITKKCASRSECHFVGCHHSRDSEHTECRSCCEGMICNVELPTNHTNAVFAVMHAQRTSGS

SEQ ID NO: 917 - protein, 196 aa, Homo Sapiens
LSCVQCNSWEKSCVNSIASECPSHANTSCISSSASSSLETPVRLYQNMFCSAENCSEETHITAFTVHVSAEEHFHFVSQCCQGKECSNTSDALDPPLKNVSSNAECPACYESNGTSCHGKPWKCYEEEQCVFLVAELKNDIESKSLVLKGCSNVSNATCQFLSGENKTLGGVIFRKFECANVNSLTPTSAPTTSHN

SEQ ID NO: 918 - protein, 323 aa, Homo Sapiens
QSLQVKPLQVEPPEPVVAVALGASRQLTCRLACADRGASVQWRGLDTSLGAVQSDTGRSVLTVRNASLSAAGTRVCVGSCGGRTFQHTVQLLVYAFPDQLTVSPAALVPGDPEVACTAHKVTPVDPNALSFSLLVGGQELEGAQALGPEVQEEEEEPQGDEDVLFRVTERWRLPPLGTPVPPALYCQATMRLPGLELSHRQAIPVLHSPTSPEPPDTTSPEPPNTTSPESPDTTSPESPDTTSQEPPDTTSQEPPDTTSQEPPDTTSPEPPDKTSPEPAPQQGSTHTPRSPGSTRTRRPEISQAGPTQGEVIPTGSSKPAGDQ

SEQ ID NO: 919 - protein, 497 aa, Homo Sapiens
GHWGAWMPSSISAFEGTCVSIPCRFDFPDELRPAVVHGVWYFNSPYPKNYPPVVFKSRTQVVHESFQGRSRLLGDLGLRNCTLLLSNVSPELGGKYYFRGDLGGYNQYTFSEHSVLDIVNTPNIVVPPEVVAGTEVEVSCMVPDNCPELRPELSWLGHEGLGEPAVLGRLREDEGTWVQVSLLHFVPTREANGHRLGCQASFPNTTLQFEGYASMDVKYPPVIVEMNSSVEAIEGSHVSLLCGADSNPPPLLTWMRDGTVLREAVAESLLLELEEVTPAEDGVYACLAENAYGQDNRTVGLSVMYAPWKPTVNGTMVAVEGETVSILCSTQSNPDPILTIFKEKQILSTVIYESELQLELPAVSPEDDGEYWCVAENQYGQRATAFNLSVEFAPVLLLESHCAAARDTVQCLCVVKSNPEPSVAFELPSRNVTVNESEREFVYSERSGLVLTSILTLRGQAQAPPRVICTARNLYGAKSLELPFQGAHRLMWAKIGP

SEQ ID NO: 920 - protein, 862 aa, Homo Sapiens
AAELSYSLRGNWSICNGNGSLELPGAVPGCVHSALFQQGLIQDSYYRFNDLNYRWVSLDNWTYSKEFKIPFEISKWQKVNLILEGVDTVSKILFNEVTIGETDNMFNRYSFDITNVVRDVNSIELRFQSAVLYAAQQSKAHTRYQVPPDCPPLVQKGECHVNFVRKEQCSFSWDWGPSFPTQGIWKDVRIEAYNICHLNYFTFSPIYDKSAQEWNLEIESTFDVVSSKPVGGQVIVAIPKLQTQQTYSIELQPGKRIVELFVNISKNITVETWWPHGHGNQTGYNMTVLFELDGGLNIEKSAKVYFRTVELIEEPIKGSPGLSFYFKINGFPIFLKGSNWIPADSFQDRVTSELLRLLLQSVVDANMNTLRVWGGGIYEQDEFYELCDELGIMVWQDFMFACALYPTDQGFLDSVTAEVAYQIKRLKSHPSIIIWSGNNENEEALMMNWYHISFTDRPIYIKDYVTLYVKNIRELVLAGDKSRPFITSSPTNGAETVAEAWVSQNPNSNYFGDVHFYDYISDCWNWKVFPKARFASEYGYQSWPSFSTLEKVSSTEDWSFNSKFSLHRQHHEGGNKQMLYQAGLHFKLPQSTDPLRTFKDTIYLTQVMQAQCVKTETEFYRRSRSEIVDQQGHTMGALYWQLNDIWQAPSWASLEYGGKWKMLHYFAQNFFAPLLPVGFENENMFYIYGVSDLHSDYSMTLSVRVHTWSSLEPVCSRVTERFVMKGGEAVCLYEEPVSELLRRCGNCTRESCVVSFYLSADHELLSPTNYHFLSSPKEAVGLCKAQITAIISQQGDIFVFDLETSAVAPFVWLDVGSIPGRFSDNGFLMTEKTRTILFYPWEPTSKNELEQSFHVTSLTDIY

SEQ ID NO: 921 - protein, 709 aa, Homo Sapiens
HTVELNNMFGQIQSPGYPDSYPSDSEVTWNITVPDGFRIKLYFMHFNLESSYLCEYDYVKVETEDQVLATFCGRETTDTEQTPGQEVVLSPGSFMSITFRSDFSNEERFTGFDAHYMAVDVDECKEREDEELSCDHYCHNYIGGYYCSCRFGYILHTDNRTCRVECSDNLFTQRTGVITSPDFPNPYPKSSECLYTIELEEGFMVNLQFEDIFDIEDHPEVPCPYDYIKIKVGPKVLGPFCGEKAPEPISTQSHSVLILFHSDNSGENRGWRLSYRAAGNECPELQPPVHGKIEPSQAKYFFKDQVLVSCDTGYKVLKDNVEMDTFQIECLKDGTWSNKIPTCKIVDCRAPGELEHGLITFSTRNNLTTYKSEIKYSCQEPYYKMLNNNTGIYTCSAQGVWMNKVLGRSLPTCLPECGQPSRSLPSLVKRIIGGRNAEPGLFPWQALIVVEDTSRVPNDKWFGSGALLSASWILTAAHVLRSQRRDTTVIPVSKEHVTVYLGLHDVRDKSGAVNSSAARVVLHPDFNIQNYNHDIALVQLQEPVPLGPHVMPVCLPRLEPEGPAPHMLGLVAGWGISNPNVTVDEIISSGTRTLSDVLQYVKLPVVPHAECKTSYESRSGNYSVTENMFCAGYYEGGKDTCLGDSGGAFVIFDDLSQRWVVQGLVSWGGPEECGSKQVYGVYTKVSNYVDWVWEQMGLPQSVVEPQVER

SEQ ID NO: 922 - protein, 474 aa, Homo Sapiens
SPGLAPQSRGHLCRTRPTDLVFVVDSSRSVRPVEFEKVKVFLSQVIESLDVGPNATRVGMVNYASTVKQEFSLRAHVSKAALLQAVRRIQPLSTGTMTGLAIQFAITKAFGDAEGGRSRSPDISKVVIVVTDGRPQDSVQDVSARARASGVELFAIGVGSVDKATLRQIASEPQDEHVDYVESYSVIEKLSRKFQEAFCVVSDLCATGDHDCEQVCISSPGSYTCACHEGFTLNSDGKTCNVCSGGGGSSATDLVFLIDGSKSVRPENFELVKKFISQIVDTLDVSDKLAQVGLVQYSSSVRQEFPLGRFHTKKDIKAAVRNMSYMEKGTMTGAALKYLIDNSFTVSSGARPGAQKVGIVFTDGRSQDYINDAAKKAKDLGFKMFAVGVGNAVEDELREIASEPVAEHYFYTADFKTINQIGKKLQKKICVEEDPCACESLVKFQAKVEGLLQALTRKLEAVSKRLAILENTVV

SEQ ID NO: 923 - protein, 914 aa, Homo Sapiens
RERSRGRSISRGRHARTHPQTALLESSCENKRADLVFIIDSSRSVNTHDYAKVKEFIVDILQFLDIGPDVTRVGLLQYGSTVKNEFSLKTFKRKSEVERAVKRMRHLSTGTMTGLAIQYALNIAFSEAEGARPLRENVPRVIMIVTDGRPQDSVAEVAAKARDTGILIFAIGVGQVDFNTLKSIGSEPHEDHVFLVANFSQIETLTSVFQKKLCTAHMCSTLEHNCAHFCINIPGSYVCRCKQGYILNSDQTTCRIQDLCAMEDHNCEQLCVNVPGSFVCQCYSGYALAEDGKRCVAVDYCASENHGCEHECVNADGSYLCQCHEGFALNPDEKTCTKIDYCASSNHGCQHECVNTDDSYSCHCLKGFTLNPDKKTCRRINYCALNKPGCEHECVNMEESYYCRCHRGYTLDPNGKTCSRVDHCAQQDHGCEQLCLNTEDSFVCQCSEGFLINEDLKTCSRVDYCLLSDHGCEYSCVNMDRSFACQCPEGHVLRSDGKTCAKLDSCALGDHGCEHSCVSSEDSFVCQCFEGYILREDGKTCRRKDVCQAIDHGCEHICVNSDDSYTCECLEGFRLAEDGKRCRRKDVCKSTHHGCEHICVNNGNSYICKCSEGFVLAEDGRRCKKCTEGPIDLVFVIDGSKSLGEENFEVVKQFVTGIIDSLTISPKAARVGLLQYSTQVHTEFTLRNFNSAKDMKKAVAHMKYMGKGSMTGLALKHMFERSFTQGEGARPLSTRVPRAAIVFTDGRAQDDVSEWASKAKANGITMYAVGVGKAIEEELQEIASEPTNKHLFYAEDFSTMDEISEKLKKGICEALEDSDGRQDSPAGELPKTVQQPTVQHRYLFEEDNLLRSTQKLSHSTKPSGSPLEEKHDQCKCENLIMFQNLANEEVRKLTQRLEEMTQRMEALENRLRYR

SEQ ID NO: 924 - protein, 458 aa, Homo Sapiens
DPVARPGFRRLETRGPGGSPGRRPSPAAPDGAPASGTSEPGRARGAGVCKSRPLDLVFIIDSSRSVRPLEFTKVKTFVSRIIDTLDIGPADTRVAVVNYASTVKIEFQLQAYTDKQSLKQAVGRITPLSTGTMSGLAIQTAMDEAFTVEAGAREPSSNIPKVAIIVTDGRPQDQVNEVAARAQASGIELYAVGVDRADMASLKMMASEPLEEHVFYVETYGVIEKLSSRFQETFCALDPCVLGTHQCQHVCISDGEGKHHCECSQGYTLNADKKTCSALDRCALNTHGCEHICVNDRSGSYHCECYEGYTLNEDRKTCSAQDKCALGTHGCQHICVNDRTGSHHCECYEGYTLNADKKTCSVRDKCALGSHGCQHICVSDGAASYHCDCYPGYTLNEDKKTCSATEEARRLVSTEDACGCEATLAFQDKVSSYLQRLNTKLDDILEKLKINEYGQIHR

SEQ ID NO: 925 - protein, 563 aa, Homo Sapiens
TQLQLTGPRCHTGPLDLVFVIDSSRSVRPFEFETMRQFLMGLLRGLNVGPNATRVGVIQYSSQVQSVFPLRAFSRREDMERAIRDLVPLAQGTMTGLAIQYAMNVAFSVAEGARPPEERVPRVAVIVTDGRPQDRVAEVAAQARASGIEIYAVGVQRADVGSLRAMASPPLDEHVFLVESFDLIQEFGLQFQSRLCAIDLCAEGTHGCEHHCVNSPGSYFCHCQVGFVLQQDQRSCRAIDYCSFGNHSCQHECVSTPGGPRCHCREGHDLQPDGRSCQVRDLCNGVDHGCEFQCVSEGLSYRCLCPEGRQLQADGKSCNRCREGHVDLVLLVDGSKSVRPQNFELVKRFVNQIVDFLDVSPEGTRVGLVQFSSRVRTEFPLGRYGTAAEVKQAVLAVEYMERGTMTGLALRHMVEHSFSEAQGARPRALNVPRVGLVFTDGRSQDDISVWAARAKEEGIVMYAVGVGKAVEAELREIASEPAELHVSYAPDFGTMTHLLENLRGSICPEEGISAGTELRSPCECESLVEFQGRTLGALESLTLNLAQLTARLEDLENQLANQK

SEQ ID NO: 926 - protein, 228 aa, Homo Sapiens
ETVTCEDAQKTCPAVIACSSPGINGFPGKDGRDGTKGEKGEPGQGLRGLQGPPGKLGPPGNPGPSGSPGPKGQKGDPGKSPDGDSSLAASERKALQTEMARIKKWLTFSLGKQVGNKFFLTNGEIMTFEKVKALCVKFQASVATPRNAAENGAIQNLIKEEAFLGITDEKTEGQFVDLTGNRLTYTNWNEGEPNNAGSDEDCVLLLKNGQWNDVPCSTSHLAVCEFPI

SEQ ID NO: 927 - protein, 536 aa, Homo Sapiens
VPGEAEQPAPELVEVEVGSTALLKCGLSQSQGNLSHVDWFSVHKEKRTLIFRVRQGQGQSEPGEYEQRLSLQDRGATLALTQVTPQDERIFLCQGKRPRSQEYRIQLRVYKAPEEPNIQVNPLGIPVNSKEPEEVATCVGRNGYPIPQVIWYKNGRPLKEEKNRVHIQSSQTVESSGLYTLQSILKAQLVKEDKDAQFYCELNYRLPSGNHMKESREVTVPVFYPTEKVWLEVEPVGMLKEGDRVEIRCLADGNPPPHFSISKQNPSTREAEEETTNDNGVLVLEPARKEHSGRYECQGLDLDTMISLLSEPQELLVNYVSDVRVSPAAPERQEGSSLTLTCEAESSQDLEFQWLREETGQVLERGPVLQLHDLKREAGGGYRCVASVPSIPGLNRTQLVNVAIFGPPWMAFKERKVWVKENMVLNLSCEASGHPRPTISWNVNGTASEQDQDPQRVLSTLNVLVTPELLETGVECTASNDLGKNTSILFLELVNLTTLTPDSNTTTGLSTSTASPHTRANSTSTERKLPEPESRG

SEQ ID NO: 928 - protein, 294 aa, Homo Sapiens
CEEPPTFEAMELIGKPKPYYEIGERVDYKCKKGYFYIPPLATHTICDRNHTWLPVSDDACYRETCPYIRDPLNGQAVPANGTYEFGYQMHFICNEGYYLIGEEILYCELKGSVAIWSGKPPICEKVLCTPPPKIKNGKHTFSEVEVFEYLDAVTYSCDPAPGPDPFSLIGESTIYCGDNSVWSRAAPECKVVKCRFPVVENGKQISGFGKKFYYKATVMFECDKGFYLDGSDTIVCDSNSTWDPPVPKCLKVSTSSTTKSPASSASGPRPTYKPPVSNYPGYPKPEEGILDSLD

SEQ ID NO: 929 - protein, 914 aa, Homo Sapiens
QGVYAPAQAQIVHAGQACVVKEDNISERVYTIREGDTLMLQCLVTGHPRPQVRWTKTAGSASDKFQETSVFNETLRIERIARTQGGRYYCKAENGVGVPAIKSIRVDVQYLDEPMLTVHQTVSDVRGNFYQEKTVFLRCTVNSNPPARFIWKRGSDTLSHSQDNGVDIYEPLYTQGETKVLKLKNLRPQDYASYTCQVSVRNVCGIPDKAITFRLTNTTAPPALKLSVNETLVVNPGENVTVQCLLTGGDPLPQLQWSHGPGPLPLGALAQGGTLSIPSVQARDSGYYNCTATNNVGNPAKKTVNLLVRSMKNATFQITPDVIKESENIQLGQDLKLSCHVDAVPQEKVTYQWFKNGKPARMSKRLLVTRNDPELPAVTSSLELIDLHFSDYGTYLCMASFPGAPVPDLSVEVNISSETVPPTISVPKGRAVVTVREGSPAELQCEVRGKPRPPVLWSRVDKEAALLPSGLPLEETPDGKLRLERVSRDMSGTYRCQTARYNGFNVRPREAQVQLNVQFPPEVEPSSQDVRQALGRPVLLRCSLLRGSPQRIASAVWRFKGQLLPPPPVVPAAAEAPDHAELRLDAVTRDSSGSYECSVSNDVGSAACLFQVSAKAYSPEFYFDTPNPTRSHKLSKNYSYVLQWTQREPDAVDPVLNYRLSIRQLNQHNAVVKAIPVRRVEKGQLLEYILTDLRVPHSYEVRLTPYTTFGAGDMASRIIHYTEPINSPNLSDNTCHFEDEKICGYTQDLTDNFDWTRQNALTQNPKRSPNTGPPTDISGTPEGYYMFIETSRPRELGDRARLVSPLYNASAKFYCVSFFYHMYGKHIGSLNLLVRSRNKGALDTHAWSLSGNKGNVWQQAHVPISPSGPFQIIFEGVRGPGYLGDIAIDDVTLKKGECPRKQTDPNKVVVMPGS

SEQ ID NO: 930 - protein, 303 aa, Homo Sapiens
PVVTVHQSIGEAKEQFYYERTVFLRCVANSNPPVRYSWRRGQEVLLQGSDKGVEIYEPFFTQGETKILKLKNLRPQDYANYSCIASVRNVCNIPDKMVSFRLSNKTASPSIKLLVDDPIVVNPGEAITLVCVTTGGEPAPSLTWVRSFGTLPEKTVLNGGTLTIPAITSDDAGTYSCIANNNVGNPAKKSTNIIVRALKKGRFWITPDPYHKDDNIQIGREVKISCQVEAVPSEELTFSWFKNGRPLRSSERMVITQTDPDVSPGTTNLDIIDLKFTDFGTYTCVASLKGGGISDISIDVNIS

SEQ ID NO: 931 - protein, 542 aa, Homo Sapiens
LNLEDPNVCSHWESYSVTVQESYPHPFDQIYYTSCTDILNWFKCTRHRVSYRTAYRHGEKTMYRRKSQCCPGFYESGEMCVPHCADKCVHGRCIAPNTCQCEPGWGGTNCSSACDGDHWGPHCTSRCQCKNGALCNPITGACHCAAGFRGWRCEDRCEQGTYGNDCHQRCQCQNGATCDHVTGECRCPPGYTGAFCEDLCPPGKHGPQCEQRCPCQNGGVCHHVTGECSCPSGWMGTVCGQPCPEGRFGKNCSQECQCHNGGTCDAATGQCHCSPGYTGERCQDECPVGTYGVLCAETCQCVNGGKCYHVSGACLCEAGFAGERCEARLCPEGLYGIKCDKRCPCHLENTHSCHPMSGECACKPGWSGLYCNETCSPGFYGEACQQICSCQNGADCDSVTGKCTCAPGFKGIDCSTPCPLGTYGINCSSRCGCKNDAVCSPVDGSCTCKAGWHGVDCSIRCPSGTWGFGCNLTCQCLNGGACNTLDGTCTCAPGWRGEKCELPCQDGTYGLNCAERCDCSHADGCHPTTGHCRCLPGWSGLF

SEQ ID NO: 932 - protein, 829 aa, Homo Sapiens
LNPEDPNVCSHWESYAVTVQESYAHPFDQIYYTRCTDILNWFKCTRHRISYKTAYRRGLRTMYRRRSQCCPGYYENGDFCIPLCTEECVHGRCVSPDTCHCEPGWGGPDCSSGCDSDHWGPHCSNRCQCQNGALCNPITGACVCAAGFRGWRCEELCAPGTHGKGCQLPCQCRHGASCDPRAGECLCAPGYTGVYCEELCPPGSHGAHCELRCPCQNGGTCHHITGECACPPGWTGAVCAQPCPPGTFGQNCSQDCPCHHGGQCDHVTGQCHCTAGYMGDRCQEECPFGSFGFQCSQRCDCHNGGQCSPTTGACECEPGYKGPRCQERLCPEGLHGPGCTLPCPCDADNTISCHPVTGACTCQPGWSGHHCNESCPVGYYGDGCQLPCTCQNGADCHSITGGCTCAPGFMGEVCAVSCAAGTYGPNCSSICSCNNGGTCSPVDGSCTCKEGWQGLDCTLPCPSGTWGLNCNESCTCANGAACSPIDGSCSCTPGWLGDTCELPCPDGTFGLNCSEHCDCSHADGCDPVTGHCCCLAGWTGIRCDSTCPPGRWGPNCSVSCSCENGGSCSPEDGSCECAPGFRGPLCQRICPPGFYGHGCAQPCPLCVHSSRPCHHISGICECLPGFSGALCNQVCAGGYFGQDCAQLCSCANNGTCSPIDGSCQCFPGWIGKDCSQACPPGFWGPACFHACSCHNGASCSAEDGACHCTPGWTGLFCTQRCPAAFFGKDCGRVCQCQNGASCDHISGKCTCRTGFTGQHCEQRCAPGTFGYGCQQLCECMNNSTCDHVTGTCYCSPGFKGIRCDQAALMMEELNPYTKISPALGAERHS

SEQ ID NO: 933 - protein, 529 aa, Homo Sapiens
AVASAASAGNVTGGGGAAGQVDASPGPGLRGEPSHPFPRATAPTAQAPRTGPPRATVHRPLAATSPAQSPETTPLWATAGPSSTTFQAPLGPSPTTPPAAERTSTTSQAPTRPAPTTLSTTTGPAPTTPVATTVPAPTTPRTPTPDLPSSSNSSVLPTPPATEAPSSPPPGHQWPVAKMPQKYLGKYACESNLKSKYLPLTQPVMNLRVSEAVKTEYVCNCSVVGSLNVNRCNQTTGQCECRPGYQGLHCETCKEGFYLNYTSGLCQPCDCSPHGALSIPCNSSGKCQCKVGVIGSICDRCQDGYYGFSKNGCLPCQCNNRSASCDALTGACLNCQENSKGNHCEECKEGFYQSPDATKECLRCPCSAVTSTGSCSIKSSELEPECDQCKDGYIGPNCNKCENGYYNFDSICRKCQCHGHVDPVKTPKICKPESGECINCLHNTTGFWCENCLEGYVHDLEGNCIKKEVILPTPEGSTILVSNASLTTSVPTPVINSTFTPTTLQTIFSVSTSENSTSALADVSWTQFN

SEQ ID NO: 934 - protein, 647 aa, Homo Sapiens
NGLRDPNTRWTFPIPYILADNLGLNAKGAILYAFEMFRLKSCVDFKPYEGESSYIIFQQFDGCWSEVGDQHVGQNISIGQGCAYKAIIEHEILHALGFYHEQSRTDRDDYVNIWWDQILSGYQHNFDTYDDSLITDLNTPYDYESLMHYQPFSFNKNASVPTITAKIPEFNSIIGQRLDFSAIDLERLNRMYNCTTTHTLLDHCTFEKANICGMIQGTRDDTDWAHQDSAQAGEVDHTLLGQCTGAGYFMQFSTSSGSAEEAALLESRILYPKRKQQCLQFFYKMTGSPSDRLVVWVRRDDSTGNVRKLVKVQTFQGDDDHNWKIAHVVLKEEQKFRYLFQGTKGDPQNSTGGIYLDDITLTETPCPTGVWTVRNFSQVLENTSKGDKLQSPRFYNSEGYGFGLTLYPNSGESSGYLRLAFHVCSGENDAILEWPVENRQVIITILDQEPDVRNRMSSSMVFTTSKSHTSPAINDTVIWDRPSRVGTYHTDCNCFRSIDLGWSGFISHQMLKRRSFLKNDDLIIFVDFEDITHLSQTEVPTKGKRLSPQGLILQGQEQQVSEEGSGKAMLEEALPVSLSQGQPSRQKRSVENTGPLEDHNWPQYFRDPCDPNPCQNDGICVNVKGMASCRCISGHAFFYTGERCQAV

SEQ ID NO: 935 - protein, 591 aa, Homo Sapiens
NSIIGEKYRWPHTIPYVLEDSLEMNAKGVILNAFERYRLKTCIDFKPWAGETNYISVFKGSGCWSSVGNRRVGKQELSIGANCDRIATVQHEFLHALGFWHEQSRSDRDDYVRIMWDRILSGREHNFNTYSDDISDSLNVPYDYTSVMHYSKTAFQNGTEPTIVTRISDFEDVIGQRMDFSDSDLLKLNQLYNCSSSLSFMDSCSFELENVCGMIQSSGDNADWQRVSQVPRGPESDHSNMGQCQGSGFFMHFDSSSVNVGATAVLESRTLYPKRGFQCLQFYLYNSGSESDQLNIYIREYSADNVDGNLTLVEEIKEIPTGSWQLYHVTLKVTKKFRVVFEGRKGSGASLGGLSIDDINLSETRCPHHIWHIRNFTQFIGSPNGTLYSPPFYSSKGYAFQIYLNLAHVTNAGIYFHLISGANDDQLQWPCPWQQATMTLLDQNPDIRQRMSNQRSITTDPFMTTDNGNYFWDRPSKVGTVALFPNGTQFRRGGGYGTSAFITHERLKSRDFIKGDDVYILLTVEDISHLNSTQIQLTPAPSVQDLCSKTTCKNDGVCTVRDGKAECRCQSGEDWWYMGERCEKRGSTRDT

SEQ ID NO: 936 - protein, 309 aa, Homo Sapiens
PHFTKQPESMNVTRNTAFNLTCQAVGPPEPVNIFWVQNSSRVNEQPEKSPSVLTVPGLTEMAVFSCEAHNDKGLTVSKGVQINIKAIPSPPTEVSIRNSTAHSILISWVPGFDGYSPFRNCSIQVKEADPLSNGSVMIFNTSALPHLYQIKQLQALANYSIGVSCMNEIGWSAVSPWILASTTEGAPSVAPLNVTVFLNESSDNVDIRWMKPPTKQQDGELVGYRISHVWQSAGISKELLEEVGQNGSRARISVQVHNATCTVRIAAVTKGGVGPFSDPVKIFIPAHGWVDYAPSSTPAPGNADPVLII

SEQ ID NO: 937 - protein, 908 aa, Homo Sapiens
ECKEALAKSEMNVNMKYQLPNFTAETPIQNVILHEHHIFLGATNYIYVLNEEDLQKVAEYKTGPVLEHPDCFPCQDCSSKANLSGGVWKDNINMALVVDTYYDDQLISCGSVNRGTCQRHVFPHNHTADIQSEVHCIFSPQIEEPSQCPDCVVSALGAKVLSSVKDRFINFFVGNTINSSYFPDHPLHSISVRRLKETKDGFMFLTDQSYIDVLPEFRDSYPIKYVHAFESNNFIYFLTVQRETLDAQTFHTRIIRFCSINSGLHSYMEMPLECILTEKRKKRSTKKEVFNILQAAYVSKPGAQLARQIGASLNDDILFGVFAQSKPDSAEPMDRSAMCAFPIKYVNDFFNKIVNKNNVRCLQHFYGPNHEHCFNRTLLRNSSGCEARRDEYRTEFTTALQRVDLFMGQFSEVLLTSISTFIKGDLTIANLGTSEGRFMQVVVSRSGPSTPHVNFLLDSHPVSPEVIVEHTLNQNGYTLVITGKKITKIPLNGLGCRHFQSCSQCLSAPPFVQCGWCHDKCVRSEECLSGTWTQQICLPAIYKVFPNSAPLEGGTRLTICGWDFGFRRNNKFDLKKTRVLLGNESCTLTLSESTMNTLKCTVGPAMNKHFNMSIIISNGHGTTQYSTFSYVDPVITSISPKYGPMAGGTLLTLTGNYLNSGNSRHISIGGKTCTLKSVSNSILECYTPAQTISTEFAVKLKIDLANRETSIFSYREDPIVYEIHPTKSFISGGSTITGVGKNLNSVSVPRMVINVHEAGRNFTVACQHRSNSEIICCTTPSLQQLNLQLPLKTKAFFMLDGILSKYFDLIYVHNPVFKPFEKPVMISMGNENVLEIKGNDIDPEAVKGEVLKVGNKSCENIHLHSEAVLCTVPNDLLKLNSELNIEWKQAISSTVLGKVIVQPDQNFT

SEQ ID NO: 938 - protein, 129 aa, Homo Sapiens
AFVLEDVDFDQMVSLEANRSSYNASFPSSFELSASSHSDDDVIIAKEGTSVSIECLLTASHYEDVHWHNSKGQQLDGRSRGGKWLVSDNFLNITNVAFDDRGLYTCFVTSPIRASYSVTLRVIFTSGDM

SEQ ID NO: 939 - protein, 121 aa, Homo Sapiens
KSVTNSTLNGTNVVLGSVPVIIARTDHIIVKEGNSALINCSVYGIPDPQFKWYNSIGKLLKEEEDEKERGGGKWQMHDSGLLNITKVSFSDRGKYTCVASNIYGTVNNTVTLRVIFTSGDM

SEQ ID NO: 940 - protein, 312 aa, Homo Sapiens
LDICSKNPCHNGGLCEEISQEVRGDVFPSYTCTCLKGYAGNHCETKCVEPLGMENGNIANSQIAASSVRVTFLGLQHWVPELARLNRAGMVNAWTPSSNDDNPWIQVNLLRRMWVTGVVTQGASRLASHEYLKAFKVAYSLNGHEFDFIHDVNKKHKEFVGNWNKNAVHVNLFETPVEAQYVRLYPTSCHTACTLRFELLGCELNGCANPLGLKNNSIPDKQITASSSYKTWGLHLFSWNPSYARLDKQGNFNAWVAGSYGNDQWLQIFPGNWDNHSHKKNLFETPILARYVRILPVAWHNRIALRLELLGC

SEQ ID NO: 941 - protein, 690 aa, Homo Sapiens
GMEVRWCATSDPEQHKCGNMSEAFREAGIQPSLLCVRGTSADHCVQLIAAQEADAITLDGGAIYEAGKEHGLKPVVGEVYDQEVGTSYYAVAVVRRSSHVTIDTLKGVKSCHTGINRTVGWNVPVGYLVESGRLSVMGCDVLKAVSDYFGGSCVPGAGETSYSESLCRLCRGDSSGEGVCDKSPLERYYDYSGAFRCLAEGAGDVAFVKHSTVLENTDGKTLPSWGQALLSQDFELLCRDGSRADVTEWRQCHLARVPAHAVVVRADTDGGLIFRLLNEGQRLFSHEGSSFQMFSSEAYGQKDLLFKDSTSELVPIATQTYEAWLGHEYLHAMKGLLCDPNRLPPYLRWCVLSTPEIQKCGDMAVAFRRQRLKPEIQCVSAKSPQHCMERIQAEQVDAVTLSGEDIYTAGKTYGLVPAAGEHYAPEDSSNSYYVVAVVRRDSSHAFTLDELRGKRSCHAGFGSPAGWDVPVGALIQRGFIRPKDCDVLTAVSEFFNASCVPVNNPKNYPSSLCALCVGDEQGRNKCVGNSQERYYGYRGAFRCLVENAGDVAFVRHTTVFDNTNGHNSEPWAAELRSEDYELLCPNGARAEVSQFAACNLAQIPPHAVMVRPDTNIFTVYGLLDKAQDLFGDDHNKNGFKMFDSSNYHGQDLLFKDATVRAVPVGEKTTYRGWLGLDYVAALEGMSSQQC

SEQ ID NO: 942 - protein, 284 aa, Homo Sapiens
EPHSLRYNLTVLSWDGSVQSGFLTEVHLDGQPFLRCDRQKCRAKPQGQWAEDVLGNKTWDRETRDLTGNGKDLRMTLAHIKDQKEGLHSLQEIRVCEIHEDNSTRSSQHFYYDGELFLSQNLETEEWTMPQSSRAQTLAMNVRNFLKEDAMKTKTHYHAMHADCLQELRRYLKSGVVLRRTVPPMVNVTRSEASEGNITVTCRASGFYPWNITLSWRQDGVSLSHDTQQWGDVLPDGNGTYQTWVATRICQGEEQRFTCYMEHSGNHSTHPVPSGKVLVLQSHW

SEQ ID NO: 943 - protein, 244 aa, Homo Sapiens
AEPHSLRYNLMVLSQDGSVQSGFLAEGHLDGQPFLRYDRQKRRAKPQGQWAEDVLGAETWDTETEDLTENGQDLRRTLTHIKDQKGVPQSSRAQTLAMNVTNFWKEDAMKTKTHYRAMQADCLQKLQRYLKSGVAIRRTVPPMVNVTCSEVSEGNITVTCRASSFYPRNITLTWRQDGVSLSHNTQQWGDVLPDGNGTYQTWVATRIRQGEEQRFTCYMEHSGNHGTHPVPSGKALVLQSQRTD

SEQ ID NO: 944 - protein, 114 aa, Homo Sapiens
PMFIVNTNVPRASVPDGFLSELTQQLAQATGKPPQYIAVHVVPDQLMAFGGSSEPCALCSLHSIGKIGGAQNRSYSKLLCGLLAERLRISPDRVYINYYDMNAANVGWNNSTFA

SEQ ID NO: 945 - protein, 208 aa, Homo Sapiens
RKAVLDCEAMKTNEFPSPCLDSKTKVVMKGQNVSMFCSHKNKSLQITYSLFRRKTHLGTQDGKGEPAIFNLSITEAHESGPYKCKAQVTSCSKYSRDFSFTIVDPVTSPVLNIMVIQTETDRHITLHCLSVNGSLPINYTFFENHVAISPAISKYDREPAEFNLTKKNPGEEEEYRCEAKNRLPNYATYSHPVTMPSTGGDSCPFCLK

SEQ ID NO: 946 - protein, 494 aa, Homo Sapiens
YALTGRKWNNHHLTFSIQNYTEKLGWYHSMEAVRRAFRVWEQATPLVFQEVPYEDIRLRRQKEADIMVLFASGFHGDSSPFDGTGGFLAHAYFPGPGLGGDTHFDADEPWTFSSTDLHGNNLFLVAVHELGHALGLEHSSNPNAIMAPFYQWKDVDNFKLPEDDLRGIQQLYGTPDGQPQPTQPLPTVTPRRPGRPDHRPPRPPQPPPPGGKPERPPKPGPPVQPRATERPDQYGPNICDGDFDTVAMLRGEMFVFKGRWFWRVRHNRVLDNYPMPIGHFWRGLPGDISAAYERQDGRFVFFKGDRYWLFREANLEPGYPQPLTSYGLGIPYDRIDTAIWWEPTGHTFFFQEDRYWRFNEETQRGDPGYPKPISVWQGIPASPKGAFLSNDAAYTYFYKGTKYWKFDNERLRMEPGYPKSILRDFMGCQEHVEPGPRWPDVARPPFNPHGGAEPGADSAEGDVGDGDGDFGAGVNKDGGSRVVVQMEEVARTVN

SEQ ID NO: 947 - protein, 445 aa, Homo Sapiens
YALTGQKWQHKHITYSIKNVTPKVGDPETRKAIRRAFDVWQNVTPLTFEEVPYSELENGKRDVDITIIFASGFHGDSSPFDGEGGFLAHAYFPGPGIGGDTHFDSDEPWTLGNPNHDGNDLFLVAVHELGHALGLEHSNDPTAIMAPFYQYMETDNFKLPNDDLQGIQKIYGPPDKIPPPTRPLPTVPPHRSIPPADPRKNDRPKPPRPPTGRPSYPGAKPNICDGNFNTLAILRREMFVFKDQWFWRVRNNRVMDGYPMQITYFWRGLPPSIDAVYENSDGNFVFFKGNKYWVFKDTTLQPGYPHDLITLGSGIPPHGIDSAIWWEDVGKTYFFKGDRYWRYSEEMKTMDPGYPKPITVWKGIPESPQGAFVHKENGFTYFYKGKEYWKFNNQILKVEPGYPRSILKDFMGCDGPTDRVKEGHSPPDDVDIVIKLDNTASTVKA

SEQ ID NO: 948 - protein, 440 aa, Homo Sapiens
QAPAPTKWNKRNLSWRVRTFPRDSPLGHDTVRALMYYALKVWSDIAPLNFHEVAGSTADIQIDFSKANHNDGYPFDGPGGTVAHAFFPGHHNTAGDTHFDDDEAWTFRSSDAHGMDLFAVAVHEFGHAIGLSHVAAAHSIMRPYYQGPVGDPLRYGLPYEDKVRVWQLYGVRESVSPTAQPEEPPLLPEPPDNRSSAPPRKDVPHRCSTHFDAVAQIRGEAFFFKGKYFWRLTRDRHLVSLQPAQMHRFWRGLPLHLDSVDAVYERTSDHKIVFFKGDRYWVFKDNNVEEGYPRPVSDFSLPPGGIDAAFSWAHNDRTYFFKDQLYWRYDDHTRHMDPGYPAQSPLWRGVPSTLDDAMRWSDGAYYFFRGQEYWKVLDGELEVAPGYPQSTARDWLVCGDSQADGSVAAGVDAAEGPRAPPGQHDQSRSEDGYEVCSCTS

SEQ ID NO: 949 - protein, 551 aa, Homo Sapiens
YNFFPRKPKWDKNQITYRIIGYTPDLDPETVDDAFARAFQVWSDVTPLRFSRIHDGEADIMINFGRWEHGDGYPFDGKDGLLAHAFAPGTGVGGDSHFDDDELWTLGEGQVVRVKYGNADGEYCKFPFLFNGKEYNSCTDTGRSDGFLWCSTTYNFEKDGKYGFCPHEALFTMGGNAEGQPCKFPFRFQGTSYDSCTTEGRTDGYRWCGTTEDYDRDKKYGFCPETAMSTVGGNSEGAPCVFPFTFLGNKYESCTSAGRSDGKMWCATTANYDDDRKWGFCPDQGYSLFLVAAHEFGHAMGLEHSQDPGALMAPIYTYTKNFRLSQDDIKGIQELYGASPDIDLGTGPTPTLGPVTPEICKQDIVFDGIAQIRGEIFFFKDRFIWRTVTPRDKPMGPLLVATFWPELPEKIDAVYEAPQEEKAVFFAGNEYWIYSASTLERGYPKPLTSLGLPPDVQRVDAAFNWSKNKKTYIFAGDKFWRYNEVKKKMDPGFPKLIADAWNAIPDNLDAVVDLQGGGHSYFFKGAYYLKLENQSLKSVKFGSIKSDWLGC

SEQ ID NO: 950 - protein, 426 aa, Homo Sapiens
YALTGQKWRQKHITYSIHNYTPKVGELDTRKAIRQAFDVWQKVTPLTFEEVPYHEIKSDRKEADIMIFFASGFHGDSSPFDGEGGFLAHAYFPGPGIGGDTHFDSDEPWTLGNANHDGNDLFLVAVHELGHALGLEHSSDPSAIMAPFYQYMETHNFKLPQDDLQGIQKIYGPPAEPLEPTRPLPTLPVRRIHSPSERKHERQPRPPRPPLGDRPSTPGTKPNICDGNFNTVALFRGEMFVFKDRWFWRLRNNRVQEGYPMQIEQFWKGLPARIDAAYERADGRFVFFKGDKYWVFKEVTVEPGYPHSLGELGSCLPREGIDTALRWEPVGKTYFFKGERYWRYSEERRATDPGYPKPITVWKGIPQAPQGAFISKEGYYTYFYKGRDYWKFDNQKLSVEPGYPRNILRDWMGCNQKEVERRKERR

SEQ ID NO: 951 - protein, 271 aa, Homo Sapiens
FAKQGNKWYKQHLSYRLVNWPEHLPEPAVRGAVRAAFQLWSNVSALEFWEAPATGPADIRLTFFQGDHNDGLGNAFDGPGGALAHAFLPRRGEAHFDQDERWSLSRRRGRNLFVVLAHEIGHTLGLTHSPAPRALMAPYYKRLGRDALLSWDDVLAVQSLYGKPLGGSVAVQLPGKLFTDFETWDSYSPQGRRPETQGPKYCHSSFDAITVDRQQQLYIFKGSHFWEVAADGNVSEPRPLQERWVGLPPNIEAAAVSLNDGDFYFFKVQSV

SEQ ID NO: 952 - protein, 601 aa, Homo Sapiens
FQTFEGDLKWHHHNITYWIQNYSEDLPRAVIDDAFARAFALWSAVTPLTFTRVYSRDADIVIQFGVAEHGDGYPFDGKDGLLAHAFPPGPGIQGDAHFDDDELWSLGKGVVVPTRFGNADGAACHFPFIFEGRSYSACTTDGRSDGLPWCSTTANYDTDDRFGFCPSERLYTRDGNADGKPCQFPFIFQGQSYSACTTDGRSDGYRWCATTANYDRDKLFGFCPTRADSTVMGGNSAGELCVFPFTFLGKEYSTCTSEGRGDGRLWCATTSNFDSDKKWGFCPDQGYSLFLVAAHEFGHALGLDHSSVPEALMYPMYRFTEGPPLHKDDVNGIRHLYGPRPEPEPRPPTTTTPQPTAPPTVCPTGPPTVHPSERPTAGPTGPPSAGPTGPPTAGPSTATTVPLSPVDDACNVNIFDAIAEIGNQLYLFKDGKYWRFSEGRGSRPQGPFLIADKWPALPRKLDSVFEEPLSKKLFFFSGRQVWVYTGASVLGPRRLDKLGLGADVAQVTGALRSGRGKMLLFSGRRLWRFDVKAQMVDPRSASEVDRMFPGVPLDTHDVFQYREKAYFCQDRFYWRVSSRSELNQVDQVGYVTYDILQCPED

SEQ ID NO: 953 - protein, 1209 aa, Homo Sapiens
LNNSKHSWTIPEDGNSQKTMPSASVPPNKIQSLQILPTTRVMSAEIATTPEARTSEDSLLKSTLPPSETSAPAEGVRNQTLTSTEKAEGVVKLQNLTLPTNASIKFNPGAESVVLSNSTLKFLQSFARKSNEQATSLNTVGGTGGIGGVGGTGGVGNRAPRETYLSRGDSSSSQRTDYQKSNFETTRGKNWCAYVHTRLSPTVILDNQVTYVPGGKGPCGWTGGSCPQRSQKISNPVYRMQHKIVTSLDWRCCPGYSGPKCQLRAQEQQSLIHTNQAESHTAVGRGVAEQQQQQGCGDPEVMQKMTDQVNYQAMKLTLLQKKIDNISLTVNDVRNTYSSLEGKVSEDKSREFQSLLKGLKSKSINVLIRDIVREQFKIFQNDMQETVAQLFKTVSSLSEDLESTRQIIQKVNESVVSIAAQQKFVLVQENRPTLTDIVELRNHIVNVRQEMTLTCEKPIKELEVKQTHLEGALEQEHSRSILYYESLNKTLSKLKEVHEQLLSTEQVSDQKNAPAAESVSNNVTEYMSTLHENIKKQSLMMLQMFEDLHIQESKINNLTVSLEMEKESLRGECEDMLSKCRNDFKFQLKDTEENLHVLNQTLAEVLFPMDNKMDKMSEQLNDLTYDMEILQPLLEQGASLRQTMTYEQPKEAIVIRKKIENLTSAVNSLNFIIKELTKRHNLLRNEVQGRDDALERRINEYALEMEDGLNKTMTIINNAIDFIQDNYALKETLSTIKDNSEIHHKCTSDMETILTFIPQFHRLNDSIQTLVNDNQRYNFVLQVAKTLAGIPRDEKLNQSNFQKMYQMFNETTSQVRKYQQNMSHLEEKLLLTTKISKNFETRLQDIESKVTQTLIPYYISVKKGSVVTNERDQALQLQVLNSRFKALEAKSIHLSINFFSLNKTLHEVLTMCHNASTSVSELNATIPKWIKHSLPDIQLLQKGLREFVEPIIQIKTQAALSNLTCCIDRSLPGSLANVVKSQKQVKSLPKKINALKKPTVNLTTVLIGRTQRNTDNIIYPEEYSSCSRHPCQNGGTCINGRTSFTCACRHPFTGDNCTIKLVEENALAPDFSKGSYRYAPMVAFFASHTYGMTIPGPILFNNLDVNYGASYTPRTGKFRIPYLGVYVFKYTIESFSAHISGFLVVDGIDKLAFESENINSEIHCDRVLTGDALLELNYGQEVWLRLAKGTIPAKFPPVTTFSGYLLYRT

SEQ ID NO: 954 - protein, 125 aa, Homo Sapiens
GQFRVIGPRHPIRALVGDEVELPCRISPGKNATGMEVGWYRPPFSRVVHLYRNGKDQDGDQAPEYRGRTELLKDAIGEGKVTLRIRNVRFSDEGGFTCFFRDHSYQEEAAMELKVEDPFYWVSPG

SEQ ID NO: 955 - protein, 466 aa, Homo Sapiens
QDVSLLASDSEPLKCFSRTFEDLTCFWDEEEAAPSGTYQLLYAYPREKPRACPLSSQSMPHFGTRYVCQFPDQEEVRLFFPLHLWVKNVFLNQTRTQRVLFVDSVGLPAPPSIIKAMGGSQPGELQISWEEPAPEISDFLRYELRYGPRDPKNSTGPTVIQLIATETCCPALQRPHSASALDQSPCAQPTMPWQDGPKQTSPSREASALTAEGGSCLISGLQPGNSYWLQLRSEPDGISLGGSWGSWSLPVTVDLPGDAVALGLQCFTLDLKNVTCQWQQQDHASSQGFFYHSRARCCPRDRYPIWENCEEEEKTNPGLQTPQFSRCHFKSRNDSIIHILVEVTTAPGTVHSYLGSPFWIHQAVRLPTPNLHWREISSGHLELEWQHPSSWAAQETCYQLRYTGEGHQDWKVLEPPLGARGGTLELRPRSRYRLQLRARLNGPTYQGPWSSWSDPTRVETATETAW

SEQ ID NO: 956 - protein, 124 aa, Homo Sapiens
IVVYTDREVHGAVGSRVTLHCSFWSSEWVSDDISFTWRYQPEGGRDAISIFHYAKGQPYIDEVGTFKERIQWVGDPRWKDGSIVIHNLDYSDNGTFTCDVKNPPDIVGKTSQVTLYVFEKVPTR

SEQ ID NO: 957 - protein, 127 aa, Homo Sapiens
SALEVYTPKEIFVANGTQGKLTCKFKSTSTTGGLTSVSWSFQPEGADTTVSFFHYSQGQVYLGNYPPFKDRISWAGDLDKKDASINIENMQFIHNGTYICDVKNPPDIVVQPGHIRLYVVEKENLPV

SEQ ID NO: 958 - protein, 128 aa, Homo Sapiens
VEIYTSRVLEAVNGTDARLKCTFSSFAPVGDALTVTWNFRPLDGGPEQFVFYYHIDPFQPMSGRFKDRVSWDGNPERYDASILLWKLQFDDNGTYTCQVKNPPDVDGVIGEIRLSVVHTVRFSEIHFL

SEQ ID NO: 959 - protein, 127 aa, Homo Sapiens
LEIRADAHVRGYVGEKIKLKCTFKSTSDVTDKLTIDWTYRPPSSSHTVSIFHYQSFQYPTTAGTFRDRISWVGNVYKGDASISISNPTIKDNGTFSCAVKNPPDVHHNIPMTELTVTERGFGTMLSS

SEQ ID NO: 960 - protein, 235 aa, Homo Sapiens
RTHSLRYFRLGVSDPIHGVPEFISVGYVDSHPITTYDSVTRQKEPRAPWMAENLAPDHWERYTQLLRGWQQMFKVELKRLQRHYNHSDNVAHTIKQAWEANQHELLYQKNWLEEECIAWLKRFLEYGKDTLQRTEPPLVRVNRKETFPGVTALFCKAHGFYPPEIYMTWMKNGEEIVQEIDYGDILPSGDGTYQAWASIELDPQSSNLYSCHVEHCGVHMVLQVPQESETIPLVM

SEQ ID NO: 961 - protein, 480 aa, Homo Sapiens
LLDTRQFLIYNEDHKRCVDAVSPSAVQTAACNQDAESQKFRWVSESQIMSVAFKLCLGVPSKTDWVAITLYACDSKSEFQKWECKNDTLLGIKGEDLFFNYGNRQEKNIMLYKGSGLWSRWKIYGTTDNLCSRGYEAMYTLLGNANGATCAFPFKFENKWYADCTSAGRSDGWLWCGTTTDYDTDKLFGYCPLKFEGSESLWNKDPLTSVSYQINSKSALTWHQARKSCQQQNAELLSITEIHEQTYLTGLTSSLTSGLWIGLNSLSFNSGWQWSDRSPFRYLNWLPGSPSAEPGKSCVSLNPGKNAKWENLECVQKLGYICKKGNTTLNSFVIPSESDVPTHCPSQWWPYAGHCYKIHRDEKKIQRDALTTCRKEGSDLASIHTIEEFDFIISQLGYEPNDELWIGLNDIKIQMYFEWSDGTPVTFTKWLRGEPSHENNRQEDCVVMKGKAGVQWHNLGSMQPLPREFKRFSCLSLPSS

SEQ ID NO: 962 - protein, 1384 aa, Homo Sapiens
GAPGDAALPEPNVFLIFSHGLQGCLEAQGGQVRVTPACNTSLPAQRWKWVSRNRLFNLGTMQCLGTGWPGTNTTASLGMYECDREALNLRWHCRTLGDQLSLLLGARTSNISKPGTLERGDQTRSGQWRIYGSEEDLCALPYHEVYTIQGNSHGKPCTIPFKYDNQWFHGCTSTGREDGHLWCATTQDYGKDERWGFCPIKSNDCETFWDKDQLTDSCYQFNFQSTLSWREAWASCEQQGADLLSITEIHEQTYINGLLTGYSSTLWIGLNDLDTSGGWQWSDNSPLKYLNWESDQPDNPSEENCGVIRTESSGGWQNRDCSIALPYVCKKKPNATAEPTPPDRWANVKVECEPSWQPFQGHCYRLQAEKRSWQESKKACLRGGGDLVSIHSMAELEFITKQIKQEVEELWIGLNDLKLQMNFEWSDGSLVSFTHWHPFEPNNFRDSLEDCVTIWGPEGRWNDSPCNQSLPSICKKAGQLSQGAAEEDHGCRKGWTWHSPSCYWLGEDQVTYSEARRLCTDHGSQLVTITNRFEQAFVSSLIYNWEGEYFWTALQDLNSTGSFFWLSGDEVMYTHWNRDQPGYSRGGCVALATGSAMGLWEVKNCTSFRARYICRQSLGTPVTPELPGPDPTPSLTGSCPQGWASDTKLRYCYKVFSSERLQDKKSWVQAQGACQELGAQLLSLASYEEEHFVANMLNKIFGESEPEIHEQHWFWIGLNRRDPRGGQSWRWSDGVGFSYHNFDRSRHDDDDIRGCAVLDLASLQWVAMQCDTQLDWICKIPRGTDVREPDDSPQGRREWLRFQEAEYKFFEHHSTWAQAQRICTWFQAELTSVHSQAELDFLSHNLQKFSRAQEQHWWIGLHTSESDGRFRWTDGSIINFISWAPGKPRPVGKDKKCVYMTASREDWGDQRCLTALPYICKRSNVTKETQPPDLPTTALGGCPSDWIQFLNKCFQVQGQEPQSRVKWSEAQFSCEQQEAQLVTITNPLEQAFITASLPNVTFDLWIGLHASQRDFQWVEQEPLMYANWAPGEPSGPSPAPSGNKPTSCAVVLHSPSAHFTGRWDDRSCTEETHGFICQKGTDPSLSPSPAALPPAPGTELSYLNGTFRLLQKPLRWHDALLLCESHNASLAYVPDPYTQAFLTQAARGLRTPLWIGLAGEEGSRRYSWVSEEPLNYVGWQDGEPQQPGGCTYVDVDGAWRTTSCDTKLQGAVCGVSSGPPPPRRISYHGSCPQGLADSAWIPFREHCYSFHMELLLGHKEARQRCQRAGGAVLSILDEMENVFVWEHLQSYEGQSRGAWLGMNFNPKGGTLVWQDNTAVNYSNWGPPGLGPSMLSHNSCYWIQSNSGLWRPGACTNITMGVVCKLPRAEQSSFSPSALPENPAA

SEQ ID NO: 963 - protein, 375 aa, Homo Sapiens
KWETKNCSVSSTNANDITQSLTGKGNDSEEEMRFQEVFMEHMSNMEKRIQHILDMEANLMDTEHFQNFSMTTDQRFNDILLQLSTLFSSVQGHGNAIDEISKSLISLNTTLLDLQLNIENLNGKIQENTFKQQEEISKLEERVYNVSAEIMAMKEEQVHLEQEIKGEVKVLNNITNDLRLKDWEHSQTLRNITLIQGPPGPPGEKGDRGPTGESGPRGFPGPIGPPGLKGDRGAIGFPGSRGLPGYAGRPGNSGPKGQKGEKGSGNTLTPFTKVRLVGGSGPHEGRVEILHSGQWGTICDDRWEVRVGQVVCRSLGYPGVQAVHKAAHFGQGTGPIWLNEVFCFGRESSIEECKIRQWGTRACSHSEDAGVTCTL

SEQ ID NO: 964 - protein, 693 aa, Homo Sapiens
QRSPLNDFQVLRGTELQHLLHAVVPGPWQEDVADAEECAGRCGPLMDCRAFHYNVSSHGCQLLPWTQHSPHTRLRRSGRCDLFQKKDYVRTCIMNNGVGYRGTMATTVGGLPCQAWSHKFPNDHKYTPTLRNGLEENFCRNPDGDPGGPWCYTTDPAVRFQSCGIKSCREAACVWCNGEEYRGAVDRTESGRECQRWDLQHPHQHPFEPGKFLDQGLDDNYCRNPDGSERPWCYTTDPQIEREFCDLPRCGSEAQPRQEATTVSCFRGKGEGYRGTANTTTAGVPCQRWDAQIPHQHRFTPEKYACKDLRENFCRNPDGSEAPWCFTLRPGMRAAFCYQIRRCTDDVRPQDCYHGAGEQYRGTVSKTRKGVQCQRWSAETPHKPQFTFTSEPHAQLEENFCRNPDGDSHGPWCYTMDPRTPFDYCALRRCADDQPPSILDPPDQVQFEKCGKRVDRLDQRRSKLRVVGGHPGNSPWTVSLRNRQGQHFCGGSLVKEQWILTARQCFSSCHMPLTGYEVWLGTLFQNPQHGEPSLQRVPVAKMVCGPSGSQLVLLKLERSVTLNQRVALICLPPEWYVVPPGTKCEIAGWGETKGTGNDTVLNVALLNVISNQECNIKHRGRVRESEMCTEGLLAPVGACEGDYGGPLACFTHNCWVLEGIIIPNRVCARSRWPAVFTRVSVFVDWIHKVMRLG

SEQ ID NO: 965 - protein, 144 aa, Homo Sapiens
PKPATVVTGSGHASSTPGGEKETSATQRSSVPSSTEKNAFNSSLEDPSTDYYQELQRDISEMFLQIYKQGGFLGLSNIKFRPGSVVVQLTLAFREGTINVHDVETQFNQYKTEAASRYNLTISDVSVSDVPFPFSAQSGAGVPG

SEQ ID NO: 966 - protein, 403 aa, Homo Sapiens
TNQGNSADAVTTTETATSGPTVAAADTTETNFPETASTTANTPSFPTATSPAPPIISTHSSSTIPTPAPPIISTHSSSTIPIPTAADSESTTNVNSLATSDIITASSPNDGLITMVPSETQSNNEMSPTTEDNQSSGPPTGTALLETSTLNSTGPSNPCQDDPCADNSLCVKLHNTSFCLCLEGYYYNSSTCKKGKVFPGKISVTVSETFDPEEKHSMAYQDLHSEITSLFKDVFGTSVYGQTVILTVSTSLSPRSEMRADDKFVNVTIVTILAETTSDNEKTVTEKINKAIRSSSSNFLNYDLTLRCDYYGCNQTADDCLNGLACDCKSDLQRPNPQSPFCVASSLKCPDACNAQHKQCLIKKSGGAPECACVPGYQEDANGNCQKCAFGYSGLDCKDKFQL

SEQ ID NO: 967 - protein, 731 aa, Homo Sapiens
STPVITSTQVSSSPVTPEGTTMPIWTPSEGSTPLTTMPVSTTRVTSSEGSTLSTPSVVTSTPVTTSTEAISSSATLDSTTMSVSMPMEISTLGTTILVSTTPVTRFPESSTPSIPSVYTSMSMTTASEGSSSPTTLEGTTTMPMSTTSERSTLLTTVLISPISVMSPSEASTLSTPPGDTSTPLLTSTKAGSFSIPAEVTTIRISITSERSTPLTTLLVSTTLPTSFPGASIASTPPLDTSTTFTPSTDTASTPTIPVATTISVSVITEGSTPGTTIFIPSTPVTSSTADVFPATTGAVSTPVITSTELNTPSTSSSSTTTSFSTTKEFTTPAMTTAAPLTYVTMSTAPSTPRTTSRGCTTSASTLSATSTPHTSTSVTTRPVTPSSESSRPSTITSHTIPPTFPPAHSSTPPTTSASSTTVNPEAVTTMTTRTKPSTRTTSFPTVTTTAVPTNTTIKSNPTSTPTVPRTTTCFGDGCQNTASRCKNGGTWDGLKCQCPNLYYGELCEEVVSSIDIGPPETISAQMELTVTVTSVKFTEELKNHSSQEFQEFKQTFTEQMNIVYSGIPEYVGVNITKLRLGSVVVEHDVLLRTKYTPEYKTVLDNATEVVKEKITKVTTQQIMINDICSDMMCFNTTGTQVQNITVTQYDPEEDCRKMAKEYGDYFVVEYRDQKPYCISPCEPGFSVSKNCNLGKCQMSLSGPQCLCVTTETHWYSGETCNQGTQKSLVYG

SEQ ID NO: 968 - protein, 530 aa, Homo Sapiens
GPSTRRADTAMTTDDTEVPAMTLAPGHAALETQTLSAETSSRASTPAGPVPEAETRGAKRISPARETRSFTKTSPNFMVLIATSVETSAASGSPEGAGMTTVQTITGSDPEEAIFDTLCTDDSSEEAKTLTMDILTLAHTSTEAKGLSSESSASSDGPHPVITPSRASESSASSDGPHPVITPSRASESSASSDGPHPVITPSRASESSASSDGPHPVITPSWSPGSDVTLLAEALVTVTNIEVINCSITEIETTTSSIPGASDTDPIPTEGVKASSTSDPPALPDSTEAKPHITEVTASAETLSTAGTTESAAPDATIGTPLPTNSTIEREVTAPGATTLSGALATGNPLEETSALSVETPSYVKVSGAAPVSIEAGSAVGKTTSFAGSSASSYSPSEAALKNFTPSETLTTDIATKGPFPTSRDPLPSVPPTTTNSSRGTNSTLAKITTSAKTTMKPPTATPTTARTRPTTDMSAGENGGFLLLRLSVASPEDLTDPRVAERLMQQLHRELHAHAPHFQVSLLRVRRG

SEQ ID NO: 969 - protein, 305 aa, Homo Sapiens
NETSTSANTGSSVISSGASTATNSGSSVTSSGVSTATISGSSVTSNGVSIVTNSEFHTTSSGISTATNSEFSTASSGISIATNSESSTTSSGASTATNSESSTPSSGASTATNSDSSTTSSGASTATNSDSSTTSSEASTATNSESSTTSSGASTATNSESSTTSSGASTATNSESSTTSSGASTATNSGSSTTSSGTSTATNSESSTVSSGASTATTSESSTTSSGASTATNSESSTVSSGASTATNSESSTTSSGANTATNSGSSVTSAGSGTAALTGMHTTSHSASTAVSEAKPGGSLVPWE

SEQ ID NO: 970 - protein, 379 aa, Homo Sapiens
PRCLGPHGEPVKVGHTVGMDCQECTCEAATWTLTCRPKLCPLPPACPLPGFVPVPAAPQAGQCCPQYSCACNTSRCPAPVGCPEGARAIPTYQEGACCPVQNCSWTVCSINGTLYQPGAVVSSSLCETCRCELPGGPPSDAFVVSCETQICNTHCPVGFEYQEQSGQCCGTCVQVACVTNTSKSPAHLFYPGETWSDAGNHCVTHQCEKHQDGLVVVTTKKACPPLSCSLDEARMSKDGCCRFCPPPPPPYQNQSTCAVYHRSLIIQQQGCSSSEPVRLAYCRGNCGDSSSMYSLEGNTVEHRCQCCQELRTSLRNVTLHCTDGSSRAFSYTEVEECGCMGRRCPAPGDTQHSEEAEPEPSQEAESGSWERGVPVSPMH

SEQ ID NO: 971 - protein, 386 aa, Homo Sapiens
LPKAPVITTPLETVDALVEEVATFMCAVESYPQPEISWTRNKILIKLFDTRYSIRENGQLLTILSVEDSDDGIYCCTANNGVGGAVESCGALQVKMKPKITRPPINVKIIEGLKAVLPCTTMGNPKPSVSWIKGDSPLRENSRIAVLESGSLRIHNVQKEDAGQYRCVAKNSLGTAYSKVVKLEVEEESEPEQDTKVFARILRAPESHNVTFGSFVTLHCTATGIPVPTITWIENGNAVSSGSIQESVKDRVIDSRLQLFITKPGLYTCIATNKHGEKFSTAKAAATISIAEWREYCLAVKELFCAKEWLVMEEKTHRGLYRSEMHLLSVPECSKLPSMHWDPTACARLPHLAFPPMTSSKPSVDIPNLPSSSSSSFSVSPTYSMT

SEQ ID NO: 972 - protein, 322 aa, Homo Sapiens
VLLHSGSSVPAAAGSSVVSESAVSWEAGARAVLRCQSPRMVWTQDRLHDRQRVLHWDLRGPGGGPARRLLDLYSAGEQRVYEARDRGRLELSASAFDDGNFSLLIRAVEETDAGLYTCNLHHHYCHLYESLAVRLEVTDGPPATPAYWDGEKEVLAVARGAPALLTCVNRGHVWTDRHVEEAQQVVHWDRQPPGVPHDRADRLLDLYASGERRAYGPLFLRDRVAVGADAFERGDFSLRIEPLEVADEGTYSCHLHHHYCGLHERRVFHLTVAEPHAEPPPRGSPGNGSSHSGAPGPDPTLARGHNVINVIVPESRAHFFQQ

SEQ ID NO: 973 - protein, 309 aa, Homo Sapiens
MATSTGRWLLLRLALFGFLWEASGGLDSGASRDDDLLLPYPRARARLPRDCTRVRAGNREHESWPPPPATPGAGGLAVRTFVSHFRDRAVAGHLTRAVEPLRTFSVLEPGGPGGCAARRRATVEETARAADCRVAQNGGFFRMNSGECLGNVVSDERRVSSSGGLQNAQFGIRRDGTLVTGYLSEEEVLDTENPFVQLLSGVVWLIRNGSIYINESQATECDETQETGSFSKFVNVISARTAIGHDRKGQLVLFHADGQTEQRGINLWEMAEFLLKQDVVNAINLDGGGSATFVLNGTLASYPSDHWQA

SEQ ID NO: 974 - protein, 699 aa, Homo Sapiens
LQVDIVPSQGEISVGESKFFLCQVAGDAKDKDISWFSPNGEKLTPNQQRISVVWNDDSSSTLTIYNANIDDAGIYKCVVTGEDGSESEATVNVKIFQKLMFKNAPTPQEFREGEDAVIVCDVVSSLPPTIIWKHKGRDVILKKDVRFIVLSNNYLQIRGIKKTDEGTYRCEGRILARGEINFKDIQVIVNVPPTIQARQNIVNATANLGQSVTLVCDAEGFPEPTMSWTKDGEQIEQEEDDEKYIFSDDSSQLTIKKVDKNDEAEYICIAENKAGEQDATIHLKVFAKPKITYVENQTAMELEEQVTLTCEASGDPIPSITWRTSTRNISSEEKASWTRPEKQETLDGHMVVRSHARVSSLTLKSIQYTDAGEYICTASNTIGQDSQSMYLEVQYAPKLQGPVAVYTWEGNQVNITCEVFAYPSATISWFRDGQLLPSSNYSNIKIYNTPSASYLEVTPDSENDFGNYNCTAVNRIGQESLEFILVQADTPSSPSIDQVEPYSSTAQVQFDEPEATGGVPILKYKAEWRAVGEEVWHSKWYDAKEASMEGIVTIVGLKPETTYAVRLAALNGKGLGEISAASEFKTQPVQGEPSAPKLEGQMGEDGNSIKVNLIKQDDGGSPIRHYLVRYRALSSEWKPEIRLPSGSDHVMLKSLDWNAEYEVYVVAENQQGKSKAAHFVFRTSAQPTAIPANGSPTSG

SEQ ID NO: 975 - protein, 678 aa, Homo Sapiens
LLQVTISLSKVELSVGESKFFTCTAIGEPESIDWYNPQGEKIISTQRVVVQKEGVRSRLTIYNANIEDAGIYRCQATDAKGQTQEATVVLEIYQKLTFREVVSPQEFKQGEDAEVVCRVSSSPAPAVSWLYHNEEVTTISDNRFAMLANNNLQILNINKSDEGIYRCEGRVEARGEIDFRDIIVIVNVPPAISMPQKSFNATAERGEEMTFSCRASGSPEPAISWFRNGKLIEENEKYILKGSNTELTVRNIINSDGGPYVCRATNKAGEDEKQAFLQVFVQPHIIQLKNETTYENGQVTLVCDAEGEPIPEITWKRAVDGFTFTEGDKSLDGRIEVKGQHGSSSLHIKDVKLSDSGRYDCEAASRIGGHQKSMYLDIEYAPKFISNQTIYYSWEGNPINISCDVKSNPPASIHWRRDKLVLPAKNTTNLKTYSTGRKMILEIAPTSDNDFGRYNCTATNHIGTRFQEYILALADVPSSPYGVKIIELSQTTAKVSFNKPDSHGGVPIHHYQVDVKEVASEIWKIVRSHGVQTMVVLNNLEPNTTYEIRVAAVNGKGQGDYSKIEIFQTLPVREPSPPSIHGQPSSGKSFKLSITKQDDGGAPILEYIVKYRSKDKEDQWLEKKVQGNKDHIILEHLQWTMGYEVQITAANRLGYSEPTVYEFSMPPKPNIIKDTLFN

SEQ ID NO: 976 - protein, 1299 aa, Homo Sapiens
EQGTQDITDASERGLHMQKLGSGSVQAALAELVALPCLFTLQPRPSAARDAPRIKWTKVRTASGQRQDLPILVAKDNVVRVAKSWQGRVSLPSYPRRRANATLLLGPLRASDSGLYRCQVVRGIEDEQDLVPLEVTGVVFHYRSARDRYALTFAEAQEACRLSSAIIAAPRHLQAAFEDGFDNCDAGWLSDRTVRYPITQSRPGCYGDRSSLPGVRSYGRRNPQELYDVYCFARELGGEVFYVGPARRLTLAGARAQCRRQGAALASVGQLHLAWHEGLDQCDPGWLADGSVRYPIQTPRRRCGGPAPGVRTVYRFANRTGFPSPAERFDAYCFRAHHPTSQHGDLETPSSGDEGEILSAEGPPVRELEPTLEEEEVVTPDFQEPLVSSGEEETLILEEKQESQQTLSPTPGDPMLASWPTGEVWLSTVAPSPSDMGAGTAASSHTEVAPTDPMPRRRGRFKGLNGRYFQQQEPEPGLQGGMEASAQPPTSEAAVNQMEPPLAMAVTEMLGSGQSRSPWADLTNEVDMPGAGSAGGKSSPEPWLWPPTMVPPSISGHSRAPVLELEKAEGPSARPATPDLFWSPLEATVSAPSPAPWEAFPVATSPDLPMMAMLRGPKEWMLPHPTPISTEANRVEAHGEATATAPPSPAAETKVYSLPLSLTPTGQGGEAMPTTPESPRADFRETGETSPAQVNKAEHSSSSPWPSVNRNVAVGFVPTETATEPTGLRGIPGSESGVFDTAESPTSGLQATVDEVQDPWPSVYSKGLDASSPSAPLGSPGVFLVPKVTPNLEPWVATDEGPTVNPMDSTVTPAPSDASGIWEPGSQVFEEAESTTLSPQVALDTSIVTPLTTLEQGDKVGVPAMSTLGSSSSQPHPEPEDQVETQGTSGASVPPHQSSPLGKPAVPPGTPTAASVGESASVSSGEPTVPWDPSSTLLPVTLGIEDFELEVLAGSPGVESFWEEVASGEEPALPGTPMNAGAEEVHSDPCENNPCLHGGTCNANGTMYGCSCDQGFAGENCEIDIDDCLCSPCENGGTCIDEVNGFVCLCLPSYGGSFCEKDTEGCDRGWHKFQGHCYRYFAHRRAWEDAEKDCRRRSGHLTSVHSPEEHSFINSFGHENTWIGLNDRIVERDFQWTDNTGLQFENWRENQPDNFFAGGEDCVVMVAHESGRWNDVPCNYNLPYVCKKGTVLCGPPPAVENASLIGARKAKYNVHATVRYQCNEGFAQHHVATIRCRSNGKWDRPQIVCTKPRRSHRMRRHHHHHQHHHQHHHHKSRKERRKHKKHPTEDWEKDEGNFC

SEQ ID NO: 977 - protein, 236 aa, Homo Sapiens
QQQTLPKPFIWAEPHFMVPKEKQVTICCQGNYGAVEYQLHFEGSLFAVDRPKPPERINKVKFYIPDMNSRMAGQYSCIYRVGELWSEPSNLLDLVVTEMYDTPTLSVHPGPEVISGEKVTFYCRLDTATSMFLLLKEGRSSHVQRGYGKVQAEFPLGPVTTAHRGTYRCFGSYNNHAWSFPSEPVKLLVTGDIENTSLAPEDPTFPDTWGTYLLTTETGLQKDHALWDHTAQNLLR

SEQ ID NO: 978 - protein, 171 aa, Homo Sapiens
QSKAQVLQSVAGQTLTVRCQYPPTGSLYEKKGWCKEASALVCIRLVTSSKPRTMAWTSRFTIWDDPDAGFFTVTMTDLREEDSGHYWCRIYRPSDNSVSKSVRFYLVVSPASASTQTSWTPRDLVSSQTQTQSCVPPTAGARQAPESPSTIPVPSQPQNSTLRPGPAAPIA

SEQ ID NO: 979 - protein, 117 aa, Homo Sapiens
LWVSQPPEIRTLEGSSAFLPCSFNASQGRLAIGSVTWFRDEVVPGKEVRNGTPEFRGRLAPLASSRFLHDHQAELHIRDVRGHDASIYVCRVEVLGLGVGTGNGTRLVVEKEHPQLG

SEQ ID NO: 980 - protein, 549 aa, Homo Sapiens
QKLPTRDEELFQMQIRDKAFFHDSSVIPDGAEISSYLFRDTPKRYFFVVEEDNTPLSVTVTPCDAPLEWKLSLQELPEDRSGEGSGDLEPLEQQKQQIINEEGTELFSYKGNDVEYFISSSSPSGLYQLDLLSTEKDTHFKVYATTTPESDQPYPELPYDPRVDVTSLGRTTVTLAWKPSPTASLLKQPIQYCVVINKEHNFKSLCAVEAKLSADDAFMMAPKPGLDFSPFDFAHFGFPSDNSGKERSFQAKPSPKLGRHVYSRPKVDIQKICIGNKNIFTVSDLKPDTQYYFDVFVVNINSNMSTAYVGTFARTKEEAKQKTVELKDGKITDVFVKRKGAKFLRFAPVSSHQKVTFFIHSCLDAVQIQVRRDGKLLLSQNVEGIQQFQLRGKPKAKYLVRLKGNKKGASMLKILATTRPTKQSFPSLPEDTRIKAFDKLRTCSSATVAWLGTQERNKFCIYKKEVDDNYNEDQKKREQNQCLGPDIRKKSEKVLCKYFHSQNLQKAVTTETIKGLQPGKSYLLDVYVIGHGGHSVKYQSKVVKTRKFC

SEQ ID NO: 981 - protein, 196 aa, Homo Sapiens
MQVHLTVQVPPKIYDISNDMTVNEGTNVTLTCLATGKPEPSISWRHISPSAKPFENGQYLDIYGITRDQAGEYECSAENDVSFPDVRKVKVVVNFAPTIQEIKSGTVTPGRSGLIRCEGAGVPPPAFEWYKGEKKLFNGQQGIIIQNFSTRSILTVTNVTQEHFGNYTCVAANKLGTTNASLPLNPPSTAQYGITG

SEQ ID NO: 982 - protein, 789 aa, Homo Sapiens
FGMDPDLQMDIVTELDLVNTTLGVAQVSGMHNASKAFLFQDIEREIHAAPHVSEKLIQLFQNKSEFTILATVQQKPSTSGVILSIRELEHSYFELESSGLRDEIRYHYIHNGKPRTEALPYRMADGQWHKVALSVSASHLLLHVDCNRIYERVIDPPDTNLPPGINLWLGQRNQKHGLFKGIIQDGKIIFMPNGYITQCPNLNHTCPTCSDFLSLVQGIMDLQELLAKMTAKLNYAETRLSQLENCHCEKTCQVSGLLYRDQDSWVDGDHCRNCTCKSGAVECRRMSCPPLNCSPDSLPVHIAGQCCKVCRPKCIYGGKVLAEGQRILTKSCRECRGGVLVKITEMCPPLNCSEKDHILPENQCCRVCRGHNFCAEGPKCGENSECKNWNTKATCECKSGYISVQGDSAYCEDIDECAAKMHYCHANTVCVNLPGLYRCDCVPGYIRVDDFSCTEHDECGSGQHNCDENAICTNTVQGHSCTCKPGYVGNGTICRAFCEEGCRYGGTCVAPNKCVCPSGFTGSHCEKDIDECSEGIIECHNHSRCVNLPGWYHCECRSGFHDDGTYSLSGESCIDIDECALRTHTCWNDSACINLAGGFDCLCPSGPSCSGDCPHEGGLKHNGQVWTLKEDRCSVCSCKDGKIFCRRTACDCQNPSADLFCCPECDTRVTSQCLDQNGHKLYRSGDNWTHSCQQCRCLEGEVDCWPLTCPNLSCEYTAILEGECCPRCVSDPCLADNITYDIRKTCLDSYGVSRLSGSVWTMAGSPCTTCKCKNGRVCCSVDFECLQNN

SEQ ID NO: 983 - protein, 795 aa, Homo Sapiens
LGVDPSLQIDVLTELELGESTTGVRQVPGLHNGTKAFLFQDTPRSIKASTATAEQFFQKLRNKHEFTILVTLKQTHLNSGVILSIHHLDHRYLELESSGHRNEVRLHYRSGSHRPHTEVFPYILADDKWHKLSLAISASHLILHIDCNKIYERVVEKPSTDLPLGTTFWLGQRNNAHGYFKGIMQDVQLLVMPQGFIAQCPDLNRTCPTCNDFHGLVQKIMELQDILAKTSAKLSRAEQRMNRLDQCYCERTCTMKGTTYREFESWIDGCKNCTCLNGTIQCETLICPNPDCPLKSALAYVDGKCCKECKSICQFQGRTYFEGERNTVYSSSGVCVLYECKDQTMKLVESSGCPALDCPESHQITLSHSCCKVCKGYDFCSERHNCMENSICRNLNDRAVCSCRDGFRALREDNAYCEDIDECAEGRHYCRENTMCVNTPGSFMCICKTGYIRIDDYSCTEHDECITNQHNCDENALCFNTVGGHNCVCKPGYTGNGTTCKAFCKDGCRNGGACIAANVCACPQGFTGPSCETDIDECSDGFVQCDSRANCINLPGWYHCECRDGYHDNGMFSPSGESCEDIDECGTGRHSCANDTICFNLDGGYDCRCPHGKNCTGDCIHDGKVKHNGQIWVLENDRCSVCSCQNGFVMCRRMVCDCENPTVDLFCCPECDPRLSSQCLHQNGETLYNSGDTWVQNCQQCRCLQGEVDCWPLPCPDVECEFSILPENECCPRCVTDPCQADTIRNDITKTCLDEMNVVRFTGSSWIKHGTECTLCQCKNGHICCSVDPQCLQEL

SEQ ID NO: 984 - protein, 1072 aa, Homo Sapiens
ARSGSAPQSPGASIRTFTPFYFLVEPVDTLSVRGSSVILNCSAYSEPSPKIEWKKDGTFLNLVSDDRRQLLPDGSLFISNVVHSKHNKPDEGYYQCVATVESLGTIISRTAKLIVAGLPRFTSQPEPSSVYAGNNAILNCEVNADLVPFVRWEQNRQPLLLDDRVIKLPSGMLVISNATEGDGGLYRCVVESGGPPKYSDEVELKVLPDPEVISDLVFLKQPSPLVRVIGQDVVLPCVASGLPTPTIKWMKNEEALDTESSERLVLLAGGSLEISDVTEDDAGTYFCIADNGNETIEAQAELTVQAQPEFLKQPTNIYAHESMDIVFECEVTGKPTPTVKWVKNGDMVIPSDYFKIVKEHNLQVLGLVKSDEGFYQCIAENDVGNAQAGAQLIILEHAPATTGPLPSAPRDVVASLVSTRFIKLTWRTPASDPHGDNLTYSVFYTKEGIARERVENTSHPGEMQVTIQNLMPATVYIFRVMAQNKHGSGESSAPLRVETQPEVQLPGPAPNLRAYAASPTSITVTWETPVSGNGEIQNYKLYYMEKGTDKEQDVDVSSHSYTINGLKKYTEYSFRVVAYNKHGPGVSTPDVAVRTLSDVPSAAPQNLSLEVRNSKSIMIHWQPPAPATQNGQITGYKIRYRKASRKSDVTETLVSGTQLSQLIEGLDRGTEYNFRVAALTINGTGPATDWLSAETFESDLDETRVPEVPSSLHVRPLVTSIVVSWTPPENQNIVVRGYAIGYGIGSPHAQTIKVDYKQRYYTIENLDPSSHYVITLKAFNNVGEGIPLYESAVTRPHTDTSEVDLFVINAPYTPVPDPTPMMPPVGVQASILSHDTIRITWADNSLPKHQKITDSRYYTVRWKTNIPANTKYKNANATTLSYLVTGLKPNTLYEFSVMVTKGRRSSTWSMTAHGTTFELVPTSPPKDVTVVSKEGKPKTIIVNWQPPSEANGKITGYIIYYSTDVNAEIHDWVIEPVVGNRLTHQIQELTLDTPYYFKIQARNSKGMGPMSEAVQFRTPKADSSDKMPNDQASGSGGKGSRLPDLGSDYKPPMSGSNSPHGSPTSPLDSNML

SEQ ID NO: 985 - protein, 121 aa, Homo Sapiens
QSVTHTGLPIMASLANTAISFSCRITYPYTPQFKVFTVSYFHEDLQGQRSPKKPTNCHPGLGTENQSHTLDCQVTLVLPGASATGTYYCSVHWPHSTVRGSGTFILVRDAGYREPPQSPQK

SEQ ID NO: 986 - protein, 1086 aa, Homo Sapiens
IEIPMDPSIQNELTQPPTITKQSAKDHIVDPRDNILIECEAKGNPAPSFHWTRNSRFFNIAKDPRVSMRRRSGTLVIDFRSGGRPEEYEGEYQCFARNKFGTALSNRIRLQVSKSPLWPKENLDPVVVQEGAPLTLQCNPPPGLPSPVIFWMSSSMEPITQDKRVSQGHNGDLYFSNVMLQDMQTDYSCNARFHFTHTIQQKNPFTLKVLTTRGVAERTPSFMYPQGTASSQMVLRGMDLLLECIASGVPTPDIAWYKKGGDLPSDKAKFENFNKALRITNVSEEDSGEYFCLASNKMGSIRHTISVRVKAAPYWLDEPKNLILAPGEDGRLVCRANGNPKPTVQWMVNGEPLQSAPPNPNREVAGDTIIFRDTQISSRAVYQCNTSNEHGYLLANAFVSVLDVPPRMLSPRNQLIRVILYNRTRLDCPFFGSPIPTLRWFKNGQGSNLDGGNYHVYENGSLEIKMIRKEDQGIYTCVATNILGKAENQVRLEVKDPTRIYRMPEDQVARRGTTVQLECRVKHDPSLKLTVSWLKDDEPLYIGNRMKKEDDSLTIFGVAERDQGSYTCVASTELDQDLAKAYLTVLADQATPTNRLAALPKGRPDRPRDLELTDLAERSVRLTWIPGDANNSPITDYVVQFEEDQFQPGVWHDHSKYPGSVNSAVLRLSPYVNYQFRVIAINEVGSSHPSLPSERYRTSGAPPESNPGDVKGEGTRKNNMEITWTPMNATSAFGPNLRYIVKWRRRETREAWNNVTVWGSRYVVGQTPVYVPYEIRVQAENDFGKGPEPESVIGYSGEDLPSAPRRFRVRQPNLETINLEWDHPEHPNGIMIGYTLKYVAFNGTKVGKQIVENFSPNQTKFTVQRTDPVSRYRFTLSARTQVGSGEAVTEESPAPPNEATPTAAPPTLPPTTVGATGAVSSTDATAIAATTEATTVPIIPTVAPTTIATTTTVATTTTTTAAATTTTESPPTTTSGTKIHESAPDEQSIWNVTVLPNSKWANITWKHNFGPGTDFVVEYIDSNHTKKTVPVKAQAQPIQLTDLYPGMTYTLRVYSRDNEGISSTVITFMTSTAYTNNQADIATQGW

SEQ ID NO: 987 - protein, 120 aa, Homo Sapiens
SSSHPIFHRGEFSVCDSVSVWVGDKTTATDIKGKEVMVLGEVNINNSVFKQYFFETKCRDPNPVDSGCRGIDSKHWNSYCTTTHTFVKALTMDGKQAAWRFIRIDTACVCVLSRKAVRRA

SEQ ID NO: 988 - protein, 222 aa, Homo Sapiens
KEACPTGLYTHSGECCKACNLGEGVAQPCGANQTVCEPCLDSVTFSDVVSATEPCKPCTECVGLQSMSAPCVEADDAVCRCAYGYYQDETTGRCEACRVCEAGSGLVFSCQDKQNTVCEECPDGTYSDEANHVDPCLPCTVCEDTERQLRECTRWADAECEEIPGRWITRSTPPEGSDSTAPSTQEPEAPPEQDLIASTVAGVVTTVMGSSQPVVTRGTTDN

SEQ ID NO: 989 - protein, 729 aa, Homo Sapiens
SRQTCANNRHQCSVHAECRDYATGFCCSCVAGYTGNGRQCVAEGSPQRVNGKVKGRIFVGSSQVPIVFENTDLHSYVVMNHGRSYTAISTIPETVGYSLLPLAPVGGIIGWMFAVEQDGFKNGFSITGGEFTRQAEVTFVGHPGNLVIKQRFSGIDEHGHLTIDTELEGRVPQIPFGSSVHIEPYTELYHYSTSVITSSSTREYTVTEPERDGASPSRIYTYQWRQTITFQECVHDDSRPALPSTQQLSVDSVFVLYNQEEKILRYALSNSIGPVREGSPDALQNPCYIGTHGCDTNAACRPGPRTQFTCECSIGFRGDGRTCYEVEKTRCQHEREHILGAAGATDPQRPIPPGLFVPECDAHGHYAPTQCHGSTGYCWCVDRDGREVEGTRTRPGMTPPCLSTVAPPIHQGPAVPTAVIPLPPGTHLLFAQTGKIERLPLEGNTMRKTEAKAFLHVPAKVIIGLAFDCVDKMVYWTDITEPSIGRASLHGGEPTTIIRQDLGSPEGIAVDHLGRNIFWTDSNLDRIEVAKLDGTQRRVLFETDLVNPRGIVTDSVRGNLYWTDWNRDNPKIETSYMDGTNRRILVQDDLGLPNGLTFDAFSSQLCWVDAGTNRAECLNPSQPSRRKALEGLQYPFAVTSYGKNLYFTDWKMNSVVALDLAISKETDAFQPHKQTRLYGITTALSQCPQGHNYCSVNNGGCTHLCLATPGSRTCRCPDNTLGVDCIEQK

SEQ ID NO: 990 - protein, 939 aa, Homo Sapiens
LHPDELFPHGESWGDQLLQEGDDESSAVVKLANPLHFYEARFSNLYVGTNGIISTQDFPRETQYVDYDFPTDFPAIAPFLADIDTSHGRGRVLYRVNGKVSGHLHVGHTPVHFTDVDLHAYIVGNDGRAYTAISHIPQPAAQALLPLTPIGGLFGWLFALEKPGSENGFSLAGAAFTHDMEVTFYPGEETVRITQTAEGLDPENYLSIKTNIQGQVPYVPANFTAHISPYKELYHYSDSTVTSTSSRDYSLTFGAINQTWSYRIHQNITYQVCRHAPRHPSFPTTQQLNVDRVFALYNDEERVLRFAVTNQIGPVKEDSDPTPVNPCYDGSHMCDTTARCHPGTGVDYTCECASGYQGDGRNCVDENECATGFHRCGPNSVCINLPGSYRCECRSAYEFADDRHTCILITPPANPCEDGSHTCAPAGQARCVHHGGSTFSCACLPGYAGDGHQCTDVDECSENRCHPAATCYNTPGSFSCRCQPGYYGDGFQCIPDSTSSLTPCEQQQRHAQAQYAYPGARFHIPQCDEQGNFLPLQCHGSTGFCWCVDPDGHEVPGTQTPPGSTPPHCGPSPEPTQRPPTICERWRENLLEHYGGTPRDDQYVPQCDDLGHFIPLQCHGKSDFCWCVDKDGREVQGTRSQPGTTPACIPTVAPPMVRPTPRPDVTPPSVGTFLLYTQGQQIGYLPLNGTRLQKDAAKTLLSLHGSIIVGIDYDCRERMVYWTDVAGRTISRAGLELGAEPETIVNSGLISPEGLAIDHIRRTMYWTDSVLDKIESALLDGSERKVLFYTDLVNPRAIAVDPIRGNLYWTDWNREAPKIETSSLDGENRRILINTDIGLPNGLTFDPFSKLLCWADAGTKKLECTLPDGTGRRVIQNNLKYPFSIVSYADHFYHTDWRRDGVVSVNKHSGQFTDEYLPEQRSHLYGITAVYPYCPTGRK

SEQ ID NO: 991 - protein, 633 aa, Homo Sapiens
QYPVVNTNYGKIQGLRTPLPSEILGPVEQYLGVPYASPPTGERRFQPPESPSSWTGIRNATQFSAVCPQHLDERFLLHDMLPIWFTTSLDTLMTYVQDQNEDCLYLNIYVPMEDDIHEQNSKKPVMVYIHGGSYMEGTGNMIDGSILASYGNVIVITINYRLGILGFLSTGDQAAKGNYGLLDQIQALRWIEENVGAFGGDPKRVTIFGSGAGASCVSLLTLSHYSEGLFQKAIIQSGTALSSWAVNYQPAKYTRILADKVGCNMLDTTDMVECLKNKNYKELIQQTITPATYHIAFGPVIDGDVIPDDPQILMEQGEFLNYDIMLGVNQGEGLKFVDGIVDNEDGVTPNDFDFSVSNFVDNLYGYPEGKDTLRETIKFMYTDWADKENPETRRKTLVALFTDHQWVAPAVATADLHAQYGSPTYFYAFYHHCQSEMKPSWADSAHGDEVPYVFGIPMIGPTELFSCNFSKNDVMLSAVVMTYWTNFAKTGDPNQPVPQDTKFIHTKPNRFEEVAWSKYNPKDQLYLHIGLKPRVRDHYRATKVAFWLELVPHLHNLNEIFQYVSTTTKVPPPDMTSFPYGTRRSPAKIWPTTKRPAITPANNPKHSKDPHKTGPEDTTVLIETKRDYSTELS

SEQ ID NO: 992 - protein, 213 aa, Homo Sapiens
QYPVVNTNYGKIQGLRTPLPSEILGPVEQYLGVPYASPPTGERRFQPPESPSSWTGIRNATQFSAVCPQHLDERFLLHDMLPIWFTTSLDTLMTYVQDQNEDCLYLNIYVPMEDGTNIKRNADDITSNDHGEDKDIHEQNSKKPVMVYIHGGSYMEGTGNMIDGSILASYGNVIVITINYRLGILGMQEARLCGSSKMFNYFKSPFTNLINFF

SEQ ID NO: 993 - protein, 979 aa, Homo Sapiens
MKMASTRCKLARYLEDLEDVDLKKFKMHLEDYPPQKGCIPLPRGQTEKADHVDLATLMIDFNGEEKAWAMAVWIFAAINRRDLYEKAKRDEPKWGSDNARVSNPTVICQEDSIEEEWMGLLEYLSRISICKMKKDYRKKYRKYVRSRFQCIEDRNARLGESVSLNKRYTRLRLIKEHRSQQEREQELLAIGKTKTCESPVSPIKMELLFDPDDEHSEPVHTVVFQGAAGIGKTILARKMMLDWASGTLYQDRFDYLFYIHCREVSLVTQRSLGDLIMSCCPDPNPPIHKIVRKPSRILFLMDGFDELQGAFDEHIGPLCTDWQKAERGDILLSSLIRKKLLPEASLLITTRPVALEKLQHLLDHPRHVEILGFSEAKRKEYFFKYFSDEAQARAAFSLIQENEVLFTMCFIPLVCWIVCTGLKQQMESGKSLAQTSKTTTAVYVFFLSSLLQPRGGSQEHGLCAHLWGLCSLAADGIWNQKILFEESDLRNHGLQKADVSAFLRMNLFQKEVDCEKFYSFIHMTFQEFFAAMYYLLEEEKEGRTNVPGSRLKLPSRDVTVLLENYGKFEKGYLIFVVRFLFGLVNQERTSYLEKKLSCKISQQIRLELLKWIEVKAKAKKLQIQPSQLELFYCLYEMQEEDFVQRAMDYFPKIEINLSTRMDHMVSSFCIENCHRVESLSLGFLHNMPKEEEEEEKEGRHLDMVQCVLPSSSHAACSHGLGRCGLSHECCFDISLVLSSNQKLVELDLSDNALGDFGIRLLCVGLKHLLCNLKKLWLVSCCLTSACCQDLASVLSTSHSLTRLYVGENALGDSGVAILCEKAKNPQCNLQKLGLVNSGLTSVCCSALSSVLSTNQNLTHLYLRGNTLGDKGIKLLCEGLLHPDCKLQVLELDNCNLTSHCCWDLSTLLTSSQSLRKLSLGNNDLGDLGVMMFCEVLKQQSCLLQNLGLSEMYFNYETKSALETLQEEKPELTVVFEPSW

SEQ ID NO: 994 - protein, 933 aa, Homo Sapiens
ELLLPQETTVELSCGVGPLQVILGPEQAAVLNCSLGAAAAGPPTRVTWSKDGDTLLEHDHLHLLPNGSLWLSQPLAPNGSDESVPEAVGVIEGNYSCLAHGPLGVLASQTAVVKLATLADFSLHPESQTVEENGTARFECHIEGLPAPIITWEKDQVTLPEEPRLIVLPNGVLQILDVQESDAGPYRCVATNSARQHFSQEALLSVAHRGSLASTRGQDVVIVAAPENTTVVSGQSVVMECVASADPTPFVSWVRQDGKPISTDVIVLGRTNLLIANAQPWHSGVYVCRANKPRTRDFATAAAELRVLAAPAITQAPEALSRTRASTARFVCRASGEPRPALRWLHNGAPLRPNGRVKVQGGGGSLVITQIGLQDAGYYQCVAENSAGMACAAASLAVVVREGLPSAPTRVTATPLSSSAVLVAWERPEMHSEQIIGFSLHYQKARGMDNVEYQFAVNNDTTELQVRDLEPNTDYEFYVVAYSQLGASRTSTPALVHTLDDVPSAAPQLSLSSPNPSDIRVAWLPLPPSLSNGQVVKYKIEYGLGKEDQIFSTEVRGNETQLMLNSLQPNKVYRVRISAGTAAGFGAPSQWMHHRTPSMHNQSHVPFAPAELKVQAKMESLVVSWQPPPHPTQISGYKLYWREVGAEEEANGDRLPGGRGDQAWDVGPVRLKKKVKQYELTQLVPGRLYEVKLVAFNKHEDGYAAVWKGKTEKAPAPDMPIQRGPPLPPAHVHAESNSSTSIWLRWKKPDFTTVKIVNYTVRFSPWGLRNASLVTYYTSSGEDILIGGLKPFTKYEFAVQSHGVDMDGPFGSVVERSTLPDRPSTPPSDLRLSPLTPSTVRLHWCPPTEPNGEIVEYLILYSSNHTQPEHQWTLLTTQGNIFSAEVHGLESDTRYFFKMGARTEVGPGPFSRLQDVITLQEKLSDSLDMHSVT

SEQ ID NO: 995 - protein, 1210 aa, Homo Sapiens
LQCRDGYEPCVNEGMCVTYHNGTGYCKCPEGFLGEYCQHRDPCEKNRCQNGGTCVAQAMLGKATCRCASGFTGEDCQYSTSHPCFVSRPCLNGGTCHMLSRDTYECTCQVGFTGKECQWTDACLSHPCANGSTCTTVANQFSCKCLTGFTGQKCETDVNECDIPGHCQHGGTCLNLPGSYQCQCPQGFTGQYCDSLYVPCAPSPCVNGGTCRQTGDFTFECNCLPGFEGSTCERNIDDCPNHRCQNGGVCVDGVNTYNCRCPPQWTGQFCTEDVDECLLQPNACQNGGTCANRNGGYGCVCVNGWSGDDCSENIDDCAFASCTPGSTCIDRVASFSCMCPEGKAGLLCHLDDACISNPCHKGALCDTNPLNGQYICTCPQGYKGADCTEDVDECAMANSNPCEHAGKCVNTDGAFHCECLKGYAGPRCEMDINECHSDPCQNDATCLDKIGGFTCLCMPGFKGVHCELEINECQSNPCVNNGQCVDKVNRFQCLCPPGFTGPVCQIDIDDCSSTPCLNGAKCIDHPNGYECQCATGFTGVLCEENIDNCDPDPCHHGQCQDGIDSYTCICNPGYMGAICSDQIDECYSSPCLNDGRCIDLVNGYQCNCQPGTSGVNCEINFDDCASNPCIHGICMDGINRYSCVCSPGFTGQRCNIDIDECASNPCRKGATCINGVNGFRCICPEGPHHPSCYSQVNECLSNPCIHGNCTGGLSGYKCLCDAGWVGINCEVDKNECLSNPCQNGGTCDNLVNGYRCTCKKGFKGYNCQVNIDECASNPCLNQGTCFDDISGYTCHCVLPYTGKNCQTVLAPCSPNPCENAAVCKESPNFESYTCLCAPGWQGQRCTIDIDECISKPCMNHGLCHNTQGSYMCECPPGFSGMDCEEDIDDCLANPCQNGGSCMDGVNTFSCLCLPGFTGDKYQTDMNECLSEPCKNGGTCSDYVNSYTCKCQAGFDGVHCENNINECTESSCFNGGTCVDGINSFSCLCPVGFTGSFCLHEINECSSHPCLNEGTCVDGLGTYRCSCPLGYTGKNCQTLVNLCSRSPCKNKGTCVQKKAESQCLCPSGWAGAYCDVPNVSCDIAASRRGVLVEHLCQHSGVCINAGNTHYCQCPLGYTGSYCEEQLDECASNPCQHGATCSDFIGGYRCECVPGYQGVNCEYEVDECQNQPCQNGGTCIDLVNHFKCSCPPGTRGMKSSLSIFHPGHCLKL

SEQ ID NO: 996 - protein, 236 aa, Homo Sapiens
MCVTYHNGTGYCKCPEGFLGEYCQHRDPCEKNRCQNGGTCVAQAMLGKATCRCASGFTGEDCQYSTSHPCFVSRPCLNGGTCHMLSRDTYECTCQVGFTGKECQWTDACLSHPCANGSTCTTVANQFSCKCLTGFTGQKCETDVNECDIPGHCQHGGTCLNLPGSYQCQCLQGFTGQYCDSLYVPCAPSPCVNGGTCRQTGDFTFECNCLPETVRRGTELWERDREVWNGKEHDEN

SEQ ID NO: 997 - protein, 1424 aa, Homo Sapiens
RGLLCGSFPEPCANGGTCLSLSLGQGTCQCAPGFLGETCQFPDPCQNAQLCQNGGSCQALLPAPLGLPSSPSPLTPSFLCTCLPGFTGERCQAKLEDPCPPSFCSKRGRCHIQASGRPQCSCMPGWTGEQCQLRDFCSANPCVNGGVCLATYPQIQCHCPPGFEGHACERDVNECFQDPGPCPKGTSCHNTLGSFQCLCPVGQEGPRCELRAGPCPPRGCSNGGTCQLMPEKDSTFHLCLCPPGFIGPDCEVNPDNCVSHQCQNGGTCQDGLDTYTCLCPETWTGWDCSEDVDECETQGPPHCRNGGTCQNSAGSFHCVCVSGWGGTSCEENLDDCIAATCAPGSTCIDRVGSFSCLCPPGRTGLLCHLEDMCLSQPCHGDAQCSTNPLTGSTLCLCQPGYSGPTCHQDLDECLMAQQGPSPCEHGGSCLNTPGSFNCLCPPGYTGSRCEADHNECLSQPCHPGSTCLDLLATFHCLCPPGLEGQLCEVETNECASAPCLNHADCHDLLNGFQCICLPGFSGTRCEEDIDECRSSPCANGGQCQDQPGAFHCKCLPGFEGPRCQTEVDECLSDPCPVGASCLDLPGAFFCLCPSGFTGQLCEVPLCAPNLCQPKQICKDQKDKANCLCPDGSPGCAPPEDNCTCHHGHCQRSSCVCDVGWTGPECEAELGGCISAPCAHGGTCYPQPSGYNCTCPTGYTGPTCSEEMTACHSGPCLNGGSCNPSPGGYYCTCPPSHTGPQCQTSTDYCVSAPCFNGGTCVNRPGTFSCLCAMGFQGPRCEGKLRPSCADSPCRNRATCQDSPQGPRCLCPTGYTGGSCQTLMDLCAQKPCPRNSHCLQTGPSFHCLCLQGWTGPLCNLPLSSCQKAALSQGIDVSSLCHNGGLCVDSGPSYFCHCPPGFQGSLCQDHVNPCESRPCQNGATCMAQPSGYLCQCAPGYDGQNCSKELDACQSQPCHNHGTCTPKPGGFHCACPPGFVGLRCEGDVDECLDQPCHPTGTAACHSLANAFYCQCLPGHTGQWCEVEIDPCHSQPCFHGGTCEATAGSPLGFICHCPKGFEGPTCSHRAPSCGFHHCHHGGLCLPSPKPGFPPRCACLSGYGGPDCLTPPAPKGCGPPSPCLYNGSCSETTGLGGPGFRCSCPHSSPGPRCQKPGAKGCEGRSGDGACDAGCSGPGGNWDGGDCSLGVPDPWKGCPSHSRCWLLFRDGQCHPQCDSEECLFDGYDCETPPACTPAYDQYCHDHFHNGHCEKGCNTAECGWDGGDCRPEDGDPEWGPSLALLVVLSPPALDQQLFALARVLSLTLRVGLWVRKDRDGRDMVYPYPGARAEEKLGGTRDPTYQERAAPQTQPLGKETDSLSAGFVVVMGVDLSRCGPDHPASRCPWDPGLLLRFLAAMAAVGALEPLLPGPLLAVHPHAGTAPPANQLPW

SEQ ID NO: 998 - protein, 1033 aa, Homo Sapiens
QLAIPASVPRGFWALPENLTVVEGASVELRCGVSTPGSAVQWAKDGLLLGPDPRIPGFPRYRLEGDPARGEFHLHIEACDLSDDAEYECQVGRSEMGPELVSPRVILSILVPPKLLLLTPEAGTMVTWVAGQEYVVNCVSGDAKPAPDITILLSGQTISDISANVNEGSQQKLFTVEATARVTPRSSDNRQLLVCEASSPALEAPIKASFTVNVLFPPGPPVIEWPGLDEGHVRAGQSLELPCVARGGNPLATLQWLKNGQPVSTAWGTEHTQAVARSVLVMTVRPEDHGAQLSCEAHNSVSAGTQEHGITLQVTFPPSAIIILGSASQTENKNVTLSCVSKSSRPRVLLRWWLGWRQLLPMEETVMDGLHGGHISMSNLTFLARREDNGLTLTCEAFSEAFTKETFKKSLILNVKYPAQKLWIEGPPEGQKLRAGTRVRLVCLAIGGNPEPSLMWYKDSRTVTESRLPQESRRVHLGSVEKSGSTFSRELVLVTGPSDNQAKFTCKAGQLSASTQLAVQFPPTNVTILANASALRPGDALNLTCVSVSSNPPVNLSWDKEGERLEGVAAPPRRAPFKGSAAARSVLLQVSSRDHGQRVTCRAHSAELRETVSSFYRLNVLYRPEFLGEQVLVVTAVEQGEALLPVSVSANPAPEAFNWTFRGYRLSPAGGPRHRILSSGALHLWNVTRADDGLYQLHCQNSEGTAEARLRLDVHYAPTIRALQDPTEVNVGGSVDIVCTVDANPILPGMFNWERLGEDEEDQSLDDMEKISRGPTGRLRIHHAKLAQAGAYQCIVDNGVAPPARRLLRLVVRFAPQVEHPTPLTKVAAAGDSTSSATLHCRARGVPNIVFTWTKNGVPLDLQDPRYTEHTYHQGGVHSSLLTIANVSAAQDYALFTCTATNALGSDQTNIQLVSISRPDPPSGLKVVSLTPHSVGLEWKPGFDGGLPQRFCIRYEALGTPGFHYVDVVPPQATTFTLTGLQPSTRYRVWLLASNALGDSGLADKGTQLPITTPGLHQPSGEPEDQLPTEPPS

SEQ ID NO: 999 - protein, 546 aa, Homo Sapiens
EFDGRWPRQIVSSIGLCRYGGRIDCCWGWARQSWGQCQPVCQPRCKHGECIGPNKCKCHPGYAGKTCNQDLNECGLKPRPCKHRCMNTYGSYKCYCLNGYMLMPDGSCSSALTCSMANCQYGCDVVKGQIRCQCPSPGLQLAPDGRTCVDVDECATGRASCPRFRQCVNTFGSYICKCHKGFDLMYIGGKYQCHDIDECSLGQYQCSSFARCYNIRGSYKCKCKEGYQGDGLTCVYIPKVMIEPSGPIHVPKGNGTILKGDTGNNNWIPDVGSTWWPPKTPYIPPIITNRPTSKPTTRPTPKPTPIPTPPPPPPLPTELRTPLPPTTPERPTTGLTTIAPAASTPPGGITVDNRVQTDPQKPRGDVFIPRQPSNDLFEIFEIERGVSADDEAKDDPGVLVHSCNFDHGLCGWIREKDNDLHWEPIRDPAGGQYLTVSAAKAPGGKAARLVLPLGRLMHSGDLCLSFRHKVTGLHSGTLQVFVRKHGAHGAALWGRNGGHGWRQTQITLRGADIKSVVFKGEKRRGHTGEIGLDDVSLKKGHCSEER

SEQ ID NO: 1000 - protein, 195 aa, Homo Sapiens
QNEPRIVTSEEVIIRDSPVLPVTLQCNLTSSSHTLTYSYWTKNGVELSATRKNASNMEYRINKPRAEDSGEYHCVYHFVSAPKANATIEVKAAPDITGHKRSENKNEGQDATMYCKSVGYPHPDWIWRKKENGMPMDIVNTSGRFFIINKENYTELNIVNLQITEDPGEYECNATNAIGSASVVTVLRVRSHLAP

SEQ ID NO: 1001 - protein, 1031 aa, Homo Sapiens
QMISALEVPLDPKLLEDLVQPPTITQQSPKDYIIDPRENIVIQCEAKGKPPPSFSWTRNGTHFDIDKDPLVTMKPGTGTLIINIMSEGKAETYEGVYQCTARNERGAAVSNNIVVRPSRSPLWTKEKLEPITLQSGQSLVLPCRPPIGLPPPIIFWMDNSFQRLPQSERVSQGLNGDLYFSNVLPEDTREDYICYARFNHTQTIQQKQPISVKVISAKSSRERPPTFLTPEGNASNKEELRGNVLSLECIAEGLPTPIIYWAKEDGMLPKNRTVYKNFEKTLQIIHVSEADSGNYQCIAKNALGAIHHTISVRVKAAPYWITAPQNLVLSPGEDGTLICRANGNPKPRISWLTNGVPIEIAPDDPSRKIDGDTIIFSNVQERSSAVYQCNASNEYGYLLANAFVNVLAEPPRILTPANTLYQVIANRPALLDCAFFGSPLPTIEWFKGAKGSALHEDIYVLHENGTLEIPVAQKDSTGTYTCVARNKLGMAKNEVHLEIKDATWIVKQPEYAVVQRGSMVSFECKVKHDHTLSLTVLWLKDNRELPSDERFTVDKDHLVVADVSDDDSGTYTCVANTTLDSVSASAVLSVVAPTPTPAPVYDVPNPPFDLELTDQLDKSVQLSWTPGDDNNSPITKFIIEYEDAMHKPGLWHHQTEVSGTQTTAQLKLSPYVNYSFRVMAVNSIGKSLPSEASEQYLTKASEPDKNPTAVEGLGSEPDNLVITWKPLNGFESNGPGLQYKVSWRQKDGDDEWTSVVVANVSKYIVSGTPTFVPYLIKVQALNDMGFAPEPAVVMGHSGEDLPMVAPGNVRVNVVNSTLAEVHWDPVPLKSIRGHLQGYRIYYWKTQSSSKRNRRHIEKKILTFQGSKTHGMLPGLEPFSHYTLNVRVVNGKGEGPASPDRVFNTPEGVPSAPSSLKIVNPTLDSLTLEWDPPSHPNGILTEYTLKYQPINSTHELGPLVDLKIPANKTRWTLKNLNFSTRYKFYFYAQTSAGSGSQITEEAVTTVDEAGILPPDVGAGKAMASRQVDIATQ

SEQ ID NO: 1002 - protein, 223 aa, Homo Sapiens
SGKKPESAAGSQSPALPPQLKEMKSQESAAGSKLVLRCETSSEYSSLRFKWFKNGNELNRKNKPQNIKIQKKPGKSELRINKASLADSGEYMCKVISKLGNDSASANITIVESNEIITGMPASTEGAYVSSESPIRISVSTEGANTSSSTSTSTTGTSHLVKCAEKEKTFCVNGGECFMVKDLSNPSRYLCKCQPGFTGARCTENVPMKVQNQEKAEELYQKR

SEQ ID NO: 1003 - protein, 196 aa, Homo Sapiens
DKIFEYDSPTHLDPGGLGQDPIISLDATAASALWVSSEAYTSPVSRAQSESEVQVTVQGDKAVVSFEPSAAPTPKNRIFAFSFLPSTAPSFPSPTRNPEVRTPKSATQPQTTETNLQTAPKLSTSTSTTGTSHLVKCAEKEKTFCVNGGECFMVKDLSNPSRYLCKCPNEFTGDRCQNYVMASFYSTSTPFLSLPE

SEQ ID NO: 1004 - protein, 294 aa, Homo Sapiens
CYSPSLKSVQDQAYKAPVVVEGKVQGLVPAGGSSSNSTREPPASGRVALVKVLDKWPLRSGGLQREQVISVGSCVPLERNQRYIFFLEPTEQPLVFKTAFAPLDTNGKNLKKEVGKILCTDCATRPKLKKMKSQTGQVGEKQSLKCEAAAGNPQPSYRWFKDGKELNRSRDIRIKYGNGRKNSRLQFNKVKVEDAGEYVCEAENILGKDTVRGRLYVNSVSTTLSSWSGHARKCNETAKSYCVNGGVCYYIEGINQLSCKCPNGFFGQRCLEKLPLRLYMPDPKQKAEELYQKR

SEQ ID NO: 1005 - protein, 359 aa, Homo Sapiens
MSEGAAAASPPGAASAAAASAEEGTAAAAAAAAAGGGPDGGGEGAAEPPRELRCSDCIVWNRQQTWLCVVPLFIGFIGLGLSLMLLKWIVVGSVKEYVPTDLVDSKGMGQDPFFLSKPSSFPKAMETTTTTTSTTSPATPSAGGAASSRTPNRISTRLTTITRAPTRFPGHRVPIRASPRSTTARNTAAPATVPSTTAPFFSSSTLGSRPPVPGTPSTQAMPSWPTAAYATSSYLHDSTPSWTLSPFQDAASSSSSSSSSATTTTPETSTSPKFHTTTYSTERSEHFKPCRDKDLAYCLNDGECFVIETLTGSHKHCRCKEGYQGVRCDQFLPKTDSILSDPNHLGIEFMESEEVYQRQ

SEQ ID NO: 1006 - protein, 61 aa, Homo Sapiens
MPTDHEEPCGPSHKSFCLNGGLCYVIPTIPSPFCRCVENYTGARCEEVFLPGSSIQTKSNL

SEQ ID NO: 1007 - protein, 835 aa, Homo Sapiens
FRNDKCGDTIKIESPGYLTSPGYPHSYHPSEKCEWLIQAPDPYQRIMINFNPHFDLEDRDCKYDYVEVFDGENENGHFRGKFCGKIAPPPVVSSGPFLFIKFVSDYETHGAGFSIRYEIFKRGPECSQNYTTPSGVIKSPGFPEKYPNSLECTYIVFAPKMSEIILEFESFDLEPDSNPPGGMFCRYDRLEIWDGFPGVGPHIGRYCGQKTPGRIRSSSGILSMVFYTDSAIAKEGFSANYSVLQSSVSEDFKCMEALGMESGEIHSDQITASSQYSTNWSAERSRLNYPENGWTPGEDSYREWIQVDLGLLRFVTAVGTQGAISKETKKKYYVKTYKIDVSSNGEDWITIKEGNKPVLFQGNTNPTDVVVAVFPKPLITRFVRIKPATWETGISMRFEVYGCKITDYPCSGMLGMVSGLISDSQITSSNQGDRNWMPENIRLVTSRSGWALPPAPHSYINEWLQIDLGEEKIVRGIIIQGGKHRENKVFMRKFKIGYSNNGSDWKMIMDDSKRKAKSFEGNNNYDTPELRTFPALSTRFIRIYPERATHGGLGLRMELLGCEVEAPTAGPTTPNGNLVDECDDDQANCHSGTGDDFQLTGGTTVPATEKPTVIDSTIQSEFPTYGFNCEFGWGSHKTFCHWEHDNHVQLKWSVLTSKTGPIQDHTGDGNFIYSQADENQKGKVARLVSPVVYSQNSAHCMTFWYHMSGSHVGTLRVKLRYQKPEEYDQLVWMAIGHQGDHWKEGRVLLHKSLKLYQVIFEGEIGKGNLGGIAVDDISINNHISQEDCAKPADLDKKNPEIKIDETGSTPGYEGEGEGDKNISRKPGNVLKTLDP

SEQ ID NO: 1008 - protein, 839 aa, Homo Sapiens
RGQPDPPCGGRLNSKDAGYITSPGYPQDYPSHQNCEWIVYAPEPNQKIVLNFNPHFEIEKHDCKYDFIEIRDGDSESADLLGKHCGNIAPPTIISSGSMLYIKFTSDYARQGAGFSLRYEIFKTGSEDCSKNFTSPNGTIESPGFPEKYPHNLDCTFTILAKPKMEIILQFLIFDLEHDPLQVGEGDCKYDWLDIWDGIPHVGPLIGKYCGTKTPSELRSSTGILSLTFHTDMAVAKDGFSARYYLVHQEPLENFQCNVPLGMESGRIANEQISASSTYSDGRWTPQQSRLHGDDNGWTPNLDSNKEYLQVDLRFLTMLTAIATQGAISRETQNGYYVKSYKLEVSTNGEDWMVYRHGKNHKVFQANNDATEVVLNKLHAPLLTRFVRIRPQTWHSGIALRLELFGCRVTDAPCSNMLGMLSGLIADSQISASSTQEYLWSPSAARLVSSRSGWFPRIPQAQPGEEWLQVDLGTPKTVKGVIIQGARGGDSITAVEARAFVRKFKVSYSLNGKDWEYIQDPRTQQPKLFEGNMHYDTPDIRRFDPIPAQYVRVYPERWSPAGIGMRLEVLGCDWTDSKPTVETLGPTVKSEETTTPYPTEEEATECGENCSFEDDKDLQLPSGFNCNFDFLEEPCGWMYDHAKWLRTTWASSSSPNDRTFPDDRNFLRLQSDSQREGQYARLISPPVHLPRSPVCMEFQYQATGGRGVALQVVREASQESKLLWVIREDQGGEWKHGRIILPSYDMEYQIVFEGVIGKGRSGEIAIDDIRISTDVPLENCMEPISAFAVDIPEIHEREGYEDEIDDEYEVDWSNSSSATSGSGAPSTDKEKSWLYTLDP

SEQ ID NO: 1009 - protein, 632 aa, Homo Sapiens
WRNRSGTATAASQGVCKLVGGAADCRGQSLASVPSSLPPHARMLTLDANPLKTLWNHSLQPYPLLESLSLHSCHLERISRGAFQEQGHLRSLVLGDNCLSENYEETAAALHALPGLRRLDLSGNALTEDMAALMLQNLSSLRSVSLAGNTIMRLDDSVFEGLERLRELDLQRNYIFEIEGGAFDGLAELRHLNLAFNNLPCIVDFGLTRLRVLNVSYNVLEWFLATGGEAAFELETLDLSHNQLLFFPLLPQYSKLRTLLLRDNNMGFYRDLYNTSSPREMVAQFLLVDGNVTNITTVSLWEEFSSSDLADLRFLDMSQNQFQYLPDGFLRKMPSLSHLNLHQNCLMTLHIREHEPPGALTELDLSHNQLSELHLAPGLASCLGSLRLFNLSSNQLLGVPPGLFANARNITTLDMSHNQISLCPLPAASDRVGPPSCVDFRNMASLRSLSLEGCGLGALPDCPFQGTSLTYLDLSSNWGVLNGSLAPLQDVAPMLQVLSLRNMGLHSSFMALDFSGFGNLRDLDLSGNCLTTFPRFGGSLALETLDLRRNSLTALPQKAVSEQLSRGLRTIYLSQNPYDCCGVDGWGALQHGQTVADWAMVTCNLSSKIIRVTELPGGVPRDCKWERLDLGL

SEQ ID NO: 1010 - protein, 248 aa, Homo Sapiens
LEFPGAEGQWTRFPKWNACCESEMSFQLKTRSARGLVLYFDDEGFCDFLELILTRGGRLQLSFSVFCAEPATLLADTPVNDGAWHSVRIRRQFRNTTLFIDQVEAKWVEVKSKRRDMTVFSGLFVGGLPPELRAAALKLTLASVREREPFKGWIRDVGVNSSQVLPVDSGEVKLDDEPPNSGGGSPCEAGEEGEGGVCLNGGVCSVVDDQAVCDCSRTGFRGKDCSQEDNNVEGLAHLMMGDQGKSKD

SEQ ID NO: 1011 - protein, 349 aa, Homo Sapiens
SSNVASSSSTSSSPGSHSQHEHHFHGSKHHSVPISIYRSPVSLRGGHAGATYIFGKSGGLILYTWPANDRPSTRSDRLAVGFSTTVKDGILVRIDSAPGLGDFLQLHIEQGKIGVVFNIGTVDISIKEERTPVNDGKYHVVRFTRNGGNATLQVDNWPVNEHYPTGNTDNERFQMVKQKIPFKYNRPVEEWLQEKGRQLTIFNTQAQIAIGGKDKGRLFQGQLSGLYYDGLKVLNMAAENNPNIKINGSVRLVGEVPSILGTTQTTSMPPEMSTTVMETTTTMATTTTRKNRSTASIQPTSDDLVSSAECSSDDEDFVECEPSTANPTEPGIRRVPGASEVIRESSSTT

SEQ ID NO: 1012 - protein, 523 aa, Homo Sapiens
WELTILHTNDVHSRLEQTSEDSSKCVNASRCMGGVARLFTKVQQIRRAEPNVLLLDAGDQYQGTIWFTVYKGAEVAHFMNALRYDAMALGNHEFDNGVEGLIEPLLKEAKFPILSANIKAKGPLASQISGLYLPYKVLPVGDEVVGIVGYTSKETPFLSNPGTNLVFEDEITALQPEVDKLKTLNVNKIIALGHSGFEMDKLIAQKVRGVDVVVGGHSNTFLYTGNPPSKEVPAGKYPFIVTSDDGRKVPVVQAYAFGKYLGYLKIEFDERGNVISSHGNPILLNSSIPEDPSIKADINKWRIKLDNYSTQELGKTIVYLDGSSQSCRFRECNMGNLICDAMINNNLRHADETFWNHVSMCILNGGGIRSPIDERNNGTITWENLAAVLPFGGTFDLVQLKGSTLKKAFEHSVHRYGQSTGEFLQVGGIHVVYDLSRKPGDRVVKLDVLCTKCRVPSYDPLKMDEVYKVILPNFLANGGDGFQMIKDELLRHDSGDQDINVVSTYISKMKVIYPAVEGRIKFS

SEQ ID NO: 1013 - protein, 119 aa, Homo Sapiens [sequence omitted]

SEQ ID NO: 1014 - protein, 130 aa, Homo Sapiens
GVSETAPASRRGELAVCDAVSGWVTDRRTAVDLRGREVEVLGEVPAAGGSPLRQYFFETRCKADNAEEGGPGAGGGGCRGVDRRHWVSECKAKQSYVRALTADAQGRVGWRWIRIDTACVCTLLSRTGRA

SEQ ID NO: 1015 - protein, 283 aa, Homo Sapiens
GDATFPKAMDNVTVRQGESATLRCTIDNRVTRVAWLNRSTILYAGNDKWCLDPRVVLLSNTQTQYSIEIQNVDVYDEGPYTCSVQTDNHPKTSRVHLIVQVSPKIVEISSDISINEGNNISLTCIATGRPEPTVTWRHISPKAVGFVSEDEYLEIQGITREQSGDYECSASNDVAAPVVRRVKVTVNYPPYISEAKGTGVPVGQKGTLQCEASAVPSAEFQWYKDDKRLIEGKKGVKVENRPFLSKLIFFNVSEHDYGNYTCVASNKLGHTNASIMLFGETVL

SEQ ID NO: 1016 - protein, 580 aa, Homo Sapiens
GPGLSMFAGQAAQPDPCSDENGHPRRCIPDFVNAAFGKDVRVSSTCGRPPARYCVVSERGEERLRSCHLCNASDPKKAHPPAFLTDLNNPHNLTCWQSENYLQFPHNVTLTLSLGKKFEVTYVSLQFCSPRPESMAIYKSMDYGRTWVPFQFYSTQCRKMYNRPHRAPITKQNEQEAVCTDSHTDMRPLSGGLIAFSTLDGRPSAHDFDNSPVLQDWVTATDIRVAFSRLHTFGDENEDDSELARDSYFYAVSDLQVGGRCKCNGHAARCVRDRDDSLVCDCRHNTAGPECDRCKPFHYDRPWQRATAREANECVACNCNLHARRCRFNMELYKLSGRKSGGVCLNCRHNTAGRHCHYCKEGYYRDMGKPITHRKACKACDCHPVGAAGKTCNQTTGQCPCKDGVTGITCNRCAKGYQQSRSPIAPCIKIPVAPPTTAASSVEEPEDCDSYCKASKGKLKINMKKYCKKDYAVQIHILKADKAGDWWKFTVNIISVYKQGTSRIRRGDQSLWIRSRDIACKCPKIKPLKKYLLLGNAEDSPDQSGIVADKSSLVIQWRDTWARRLRKFQQREKKGKCKKA

SEQ ID NO: 1017 - protein, 553 aa, Homo Sapiens
DPCHDEGGAPRGCVPGLVNAALGREVLASSTCGRPATRACDASDPRRAHSPALLTSPGGTASPLCWRSESLPRAPLNVTLTVPLGKAFELVFVSLRFCSAPPASVALLKSQDHGRSWAPLGFFSSHCDLDYGRLPAPANGPAGPGPEALCFPAPLAQPDGSGLLAFSMQDSSPPGLDLDSSPVLQDWVTATDVRVVLTRPSTAGDPRDMEAVVPYSYAATDLQVGGRCKCNGHASRCLLDTQGHLICDCRHGTEGPDCGRCKPFYCDRPWQRATARESHACLACSCNGHARRCRFNMELYRLSGRRSGGVCLNCRHNTAGRHCHYCREGFYRDPGRALSDRRACRACDCHPVGAAGKTCNQTTGQCPCKDGVTGLTCNRCAPGFQQSRSPVAPCVKTPIPGPTEDSSPVQPQDCDSHCKPARGSYRISLKKFCKKDYAVQVAVGARGEARGAWTRFPVAVLAVFRSGEERARRGSSALWVPAGDAACGCPRLLPGRRYLLLGGGPGAAAGGAGGRGPGLIAARGSLVLPWRDAWTRRLRRLQRRERRGRCSAA

SEQ ID NO: 1018 - protein, 610 aa, Homo Sapiens
GLSGVAGVSSRCEKACNPRMGNLALGRKLWADTTCGQNATELYCFYSENTDLTCRQPKCDKCNAAYPHLAHLPSAMADSSFRFPRTWWQSAEDVHREKIQLDLEAEFYFTHLIVMFKSPRPAAMVLDRSQDFGKTWKPYKYFATNCSATFGLEDDVVKKGAICTSKYSSPFPCTGGEVIFKALSPPYDTENPYSAKVQEQLKITNLRVQLLKRQSCPCQRNDLNEEPQHFTHYAIYDFIVKGSCFCNGHADQCIPVHGFRPVKAPGTFHMVHGKCMCKHNTAGSHCQHCAPLYNDRPWEAADGKTGAPNECRTCKCNGHADTCHFDVNVWEASGNRSGGVCDDCQHNTEGQYCQRCKPGFYRDLRRPFSAPDACKPCSCHPVGSAVLPANSVTFCDPSNGDCPCKPGVAGRRCDRCMVGYWGFGDYGCRPCDCAGSCDPITGDCISSHTDIDWYHEVPDFRPVHNKSEPAWEWEDAQGFSALLHSGKCECKEQTLGNAKAFCGMKYSYVLKIKILSAHDKGTHVEVNVKIKKVLKSTKLKIFRGKRTLYPESWTDRGCTCPILNPGLEYLVAGHEDIRTGKLIVNMKSFVQHWKPSLGRKVMDILKRECK

SEQ ID NO: 1019 - protein, 473 aa, Homo Sapiens
DPCYDPQGRPQFCLPPVTQLAAVAASCPQACALSPGNHLGARETCNGSLTLALGGPFLLTSVSLRFCTPGPPALILSAAWASGGPWRLLWHRPAWPGALGGPERVTFHSTPGPKATVAASHLRVEFGGQAGLAAAGLRGRCQCHGHAARCAARARPPRCHCRHHTTGPGCESCRPSHRDWPWRPATPRHPHPCLPCSCNQHARRCRFNSELFRLSGGRSGGVCERCRHHTAGRHCHYCQPGFWRDPSQPIFSRRACRACQCHPIGATGGTCNQTSGQCTCKLGVTGLTCNRCGPGYQQSRSPRMPCQRIPEATTTLATTPGAYSSDPQCQNYCNMSDTRVHMSLRRYCQQDHVLRAQVLASEAAGPAWQRLAVRVLAVYKQRAQPVRRGDQDAWVPRADLTCGCLRLQPGTDYLLLGSAVGDPDPTRLILDRHGLALPWRPRWARPLKRLQQEERAGGCRGVRAPTPSPRPEH

SEQ ID NO: 1020 - protein, 381 aa, Homo Sapiens
HYDLCKTQIYTEEGKVWDYMACQPESTDMTKYLKVKLDPPDITCGDPPETFCAMGNPYMCNNECDASTPELAHPPELMFDFEGRHPSTFWQSATWKEYPKPLQVNITLSWSKTIELTDNIVITFESGRPDQMILEKSLDYGRTWQPYQYYATDCLDAFHMDPKSVKDLSQHTVLEIICTEEYSTGYTTNSKIIHFEIKDRFAFFAGPRLRNMASLYGQLDTTKKLRDFFTVTDLRIRLLRPAVGEIFVDELHLARYFYAISDIKVRGRCKCNLHATVCVYDNSKLTCECEHNTTGPDCGKCKKNYQGRPWSPGSYLPIPKGTANTCIPSISSIGTNVCDNELLHCQNGGTCHNNVRCLCPAAYTGILCEKLRCEEAGSCGS

SEQ ID NO: 1021 - protein, 490 aa, Homo Sapiens
DYDICKSWVTTDEGPTWEFYACQPKVMRLKDYVKVKVEPSGITCGDPPERFCSHENPYLCSNECDASNPDLAHPPRLMFDKEEEGLATYWQSITWSRYPSPLEANITLSWNKTVELTDDVVMTFEYGRPTVMVLEKSLDNGRTWQPYQFYAEDCMEAFGMSARRARDMSSSSAHRVLCTEEYSRWAGSKKEKHVRFEVRDRFAIFAGPDLRNMDNLYTRLESAKGLKEFFTLTDLRMRLLRPALGGTYVQRENLYKYFYAISNIEVIGRCKCNLHANLCSMREGSLQCECEHNTTGPDCGKCKKNFRTRSWRAGSYLPLPHGSPNACAAAGSFGNCECYGHSNRCSYIDFLNVVTCVSCKHNTRGQHCQHCRLGYYRNGSAELDDENVCIECNCNQIGSVHDRCNETGFCECREGAAGPKCDDCLPTHYWRQGCYPNVCDDDQLLCQNGGTCLQNQRCACPRGYTGVRCEQPRCDPADDDGGLDCDRAPG

SEQ ID NO: 1022 - protein, 391 aa, Homo Sapiens
AAPCPDACCPHGSSGLRCTRDGALDSLHHLPGAENLTELYIENQQHLQHLELRDLRGLGELRNLTIVKSGLRFVAPDAFHFTPRLSRLNLSFNALESLSWKTVQGLSLQELVLSGNPLHCSCALRWLQRWEEEGLGGVPEQKLQCHGQGPLAHMPNASCGVPTLKVQVPNASVDVGDDVLLRCQVEGRGLEQAGWILTELEQSATVMKSGGLPSLGLTLANVTSDLNRKNVTCWAENDVGRAEVSVQVNVSFPASVQLHTAVEMHHWCIPFSVDGQPAPSLRWLFNGSVLNETSFIFTEFLEPAANETVRHGCLRLNQPTHVNNGNYTLLAANPFGQASASIMAAFMDNPFEFNPEDPIPVSFSPVDTNSTSGDPVEKKDETPFGVSVAVG

SEQ ID NO: 1023 - protein, 399 aa, Homo Sapiens
CPTSCKCSASRIWCSDPSPGIVAFPRLEPNSVDPENITEIFIANQKRLEIINEDDVEAYVGLRNLTIVDSGLKFVAHKAFLKNSNLQHINFTRNKLTSLSRKHFRHLDLSELILVGNPFTCSCDIMWIKTLQEAKSSPDTQDLYCLNESSKNIPLANLQIPNCGLPSANLAAPNLTVEEGKSITLSCSVAGDPVPNMYWDVGNLVSKHMNETSHTQGSLRITNISSDDSGKQISCVAENLVGEDQDSVNLTVHFAPTITFLESPTSDHHWCIPFTVKGNPKPALQWFYNGAILNESKYICTKIHVTNHTEYHGCLQLDNPTHMNNGDYTLIAKNEYGKDEKQISAHFMGWPGIDDGANPNYPDVIYEDYGTAANDIGDTTNRSNEIPSTDVTDKTGREH

SEQ ID NO: 1024 - protein, 398 aa, Homo Sapiens
CPANCVCSKTEINCRRPDDGNLFPLLEGQDSGNSNGNASINITDISRNITSIHIENWRSLHTLNAVDMELYTGLQKLTIKNSGLRSIQPRAFAKNPHLRYINLSSNRLTTLSWQLFQTLSLRELQLEQNFFNCSCDIRWMQLWQEQGEAKLNSQNLYCINADGSQLPLFRMNISQCDLPEISVSHVNLTVREGDNAVITCNGSGSPLPDVDWIVTGLQSINTHQTNLNWTNVHAINLTLVNVTSEDNGFTLTCIAENVVGMSNASVALTVYYPPRVVSLEEPELRLEHCIEFVVRGNPPPTLHWLHNGQPLRESKIIHVEYYQEGEISEGCLLFNKPTHYNNGNYTLIAKNPLGTANQTINGHFLKEPFPESTDNFILFDEVSPTPPITVTHKPEEDT

SEQ ID NO: 1025 - protein, 405 aa, Homo Sapiens
MSSPALTAGASGKVMDFNNGTYLVSFTLFWEGQVSLSLLLIHPSEGASALWRARNQGYDKIIFKGKFVNGTSHVFTECGLTLNSNAELCEYLDDRDQEAFYCMKPQHMPCEALTYMTTRNREVSYLTDKENSLFHRSKVGVEMMKDRKHIDVTNCNKREKIEETCQVGMKPPVPGGYTLQGKWITTFCNQVQLDTIKINGCLKGKLIYLLGDSTLRQWIYYFPKVVKTLKFFDLHETGIFKKHLLLDAERHTQIQWKKHSYPFVTFQLYSLIDHDYIPREIDRLSGDKNTAIVITFGQHFRPFPIDIFIRRAIGVQKAIERLFLRSPATKVIIKTENIREMHIETERFVDFHGYIHYLIMKDIFKDLNVGIIDAWDMTIAYGTDTIHPPDHVIGNQINMFLNYIC

SEQ ID NO: 1026 - protein, 529 aa, Homo Sapiens
EYLDHETVSATFIDSSGQFVSSQVTGISRNPYCGYDQQTLSSQERMEEDSLLAALHRQVPDVGPVPFVKSTDPSSSYFVILNSAAFFKVGSQLEVLVHVQDFQRKPKKYGGDYLQARIHSLKLQAGAVGRVVDYQNGFYKVFFTLLWPGKVKVSVSLVHPSEGIRVLQRLQEDKPDRVYFKSLFRSGRISETTECNVCLPGNLPLCNFTDLYTGEPWFCFKPKKLPCSSRITHFKGGYLKGLLTAAESAFFQSGVNIKMPVNSSGPDWVTVIPRRIKETNSLELSQGSGTFPSGYYYKDQWRPRKFKMRQFNDPDNITECLQRKVVHLFGDSTIRQWFEYLTTFVPDLVEFNLGSPKNVGPFLAVDQKHNILLKYRCHGPPIRFTTVFSNELHYVANELNGIVGGKNTVVAIAVWSHFSTFPLEVYIRRLRNIRRAVVRLLDRSPKTVVVIRTANAQELGPEVSLFNSDWYNFQLDTILRRMFSGVGVYLVDAWEMTLAHYLPHKLHPDEVIVKNQLDMFLSFVCPLET

SEQ ID NO: 1027 - protein, 517 aa, Homo Sapiens
QNSTKVWSALNLSISLHYWNNSTKSLFPKTPLISLKPLTETELRIKEIIEKLDQQIPPRPFTHVNTTTSATHSTATILNPRDTYCRGDQLHILLEVRDHLGRRKQYGGDFLRARMSSPALMAGASGKVTDFNNGTYLVSFTLFWEGQVSLSLLLIHPSEGVSALWSARNQGYDRVIFTGQFVNGTSQVHSECGLILNTNAELCQYLDNRDQEGFYCVRPQHMPCAALTHMYSKNKKVSYLSKQEKSLFERSNVGVEIMEKFNTISVSKCNKETVAMKEKCKFGMTSTIPSGHVWRNTWNPVSCSLATVKMKECLRGKLIYLMGDSTIRQWMEYFKASINTLKSVDLHESGKLQHQLAVDLDRNINIQWQKYCYPLIGSMTYSVKEMEYLTRAIDRTGGEKNTVIVISLGQHFRPFPIDVFIRRALNVHKAIQHLLLRSPDTMVIIKTENIREMYNDAERFSDFHGYIQYLIIKDIFQDLSVSIIDAWDITIAYGTNNVHPPQHVVGNQINILLNYIC

SEQ ID NO: 1028 - protein, 458 aa, Homo Sapiens
VGACARACPAACACSTVERGCSVRCDRAGLLRVPAELPCEAVSIDLDRNGLRFLGERAFGTLPSLRRLSLRHNNLSFITPGAFKGLPRLAELRLAHNGDLRYLHARTFAALSRLRRLDLAACRLFSVPERLLAELPALRELAAFDNLFRRVPGALRGLANLTHAHLERGRIEAVASSSLQGLRRLRSLSLQANRVRAVHAGAFGDCGVLEHLLLNDNLLAELPADAFRGLRRLRTLNLGGNALDRVARAWFADLAELELLYLDRNSIAFVEEGAFQNLSGLLALHLNGNRLTVLAWVAFQPGFFLGRLFLFRNPWCCDCRLEWLRDWMEGSGRVTDVPCASPGSVAGLDLSQVTFGRSSDGLCVDPEELNLTTSSPGPSPEPAATTVSRFSSLLSKLLAPRVPVEEAANTTGGLANASLSDSLSSRGVGGAGRQPWFLLASCLLPSVAQHVVFGLQMD

SEQ ID NO: 1029 - protein, 278 aa, Homo Sapiens
PPTQQDSRIIYDYGTDNFEESIFSQDYEDKYLDGKNIKEKETVIIPNEKSLQLQKDEAITPLPPKKENDEMPTCLLCVCLSGSVYCEEVDIDAVPPLPKESAYLYARFNKIKKLTAKDFADIPNLRRLDFTGNLIEDIEDGTFSKLSLLEELSLAENQLLKLPVLPPKLTLFNAKYNKIKSRGIKANAFKKLNNLTFLYLDHNALESVPLNLPESLRVIHLQFNNIASITDDTFCKANDTSYIRDRIEEIRLEGNPIVLGKHPNSFICLKRLPIGSYF

SEQ ID NO: 1030 - protein, 523 aa, Homo Sapiens
DPCSAYISLNEPWRNTDHQLDESQGPPLCDNHVNGEWYHFTGMAGDAMPTFCIPENHCGTHAPVWLNGSHPLEGDGIVQRQACASFNGNCCLWNTTVEVKACPGGYYVYRLTKPSVCFHVYCGHFYDICDEDCHGSCSDTSECTCAPGTVLGPDRQTCFDENECEQNNGGCSEICVNLKNSYRCECGVGRVLRSDGKTCEDVEGCHNNNGGCSHSCLGSEKGYQCECPRGLVLSEDNHTCQVPVLCKSNAIEVNIPRELVGGLELFLTNTSCRGVSNGTHVNILFSLKTCGTVVDVVNDKIVASNLVTGLPKQTPGSSGDFIIRTSKLLIPVTCEFPRLYTISEGYVPNLRNSPLEIMSRNHGIFPFTLEIFKDNEFEEPYREALPTLKLRDSLYFGIEPVVHVSGLESLVESCFATPTSKIDEVLKYYLIRDGCVSDDSVKQYTSRDHLAKHFQVPVFKFVGKDHKEVFLHCRVLVCGVLDERSRCAQGCHRRMRRGAGGEDSAGLQGQTLTGGPIRIDWED

SEQ ID NO: 1031 - protein, 216 aa, Homo Sapiens [sequence omitted]

SEQ ID NO: 1032 - protein, 401 aa, Homo Sapiens
QYETYQWDEDYDQEPDDDYQTGFPFRQNVDYGVPFHQYTLGCVSECFCPTNFPSSMYCDNRKLKTIPNIPMHIQQLYLQFNEIEAVTANSFINATHLKEINLSHNKIKSQKIDYGVFAKLPNLLQLHLEHNNLEEFPFPLPKSLERLLLGYNEISKLQTNAMDGLVNLTMLDLCYNYLHDSLLKDKIFAKMEKLMQLNLCSNRLESMPPGLPSSLMYLSLENNSISSIPEKYFDKLPKLHTLRMSHNKLQDIPYNIFNLPNIVELSVGHNKLKQAFYIPRNLEHLYLQNNEIEKMNLTVMCPSIDPLHYHHLTYIRVDQNKLKEPISSYIFFCFPHIHTIYYGEQRSTNGQTIQLKTQVFRRFPDDDDESEDHDDPDNAHESPEQEGAEGHFDLHYYENQE

SEQ ID NO: 1033 - protein, 393 aa, Homo Sapiens
ICPLQCICTERHRHVDCSGRNLSTLPSGLQENIIHLNLSYNHFTDLHNQLTQYTNLRTLDISNNRLESLPAHLPRSLWNMSAANNNIKLLDKSDTAYQWNLKYLDVSKNMLEKVVLIKNTLRSLEVLNLSSNKLWTVPTNMPSKLHIVDLSNNSLTQILPGTLINLTNLTHLYLHNNKFTFIPDQSFDQLFQLQEITLYNNRWSCDHKQNITYLLKWMMETKAHVIGTPCSTQISSLKEHNMYPTPSGFTSSLFTVSGMQTVDTINSLSVVTQPKVTKIPKQYRTKETTFGATLSKDTTFTSTDKAFVPYPEDTSTETINSHEAAAATLTIHLQDGMVTNTSLTSSTKSSPTPMTLSITSGMPNNFSEMPQQSTTLNLWREETTTNVKTPLPS

SEQ ID NO: 1034 - protein, 295 aa, Homo Sapiens
GVPVRSGDATFPKAMDNVTVRQGESATLRCTIDDRVTRVAWLNRSTILYAGNDKWSIDPRVIILVNTPTQYSIMIQNVDVYDEGPYTCSVQTDNHPKTSRVHLIVQVPPQIMNISSDITVNEGSSVTLLCLAIGRPEPTVTWRHLSVKEGQGFVSEDEYLEISDIKRDQSGEYECSALNDVAAPDVRKVKITVNYPPYISKAKNTGVSVGQKGILSCEASAVPMAEFQWFKEETRLATGLDGMRIENKGRMSTLTFFNVSEKDYGNYTCVATNKLGNTNASITLYGPGAVIDGVN

SEQ ID NO: 1035 - protein, 313 aa, Homo Sapiens
ASLPRKERKRREEQMPREGDSFEVLPLRNDVLNPDNYGEVIDLSNYEELTDYGDQLPEVKVTSLAPATSISPAKSTTAPGTPSSNPTMTRPTTAGLLLSSQPNHGLPTCLVCVCLGSSVYCDDIDLEDIPPLPRRTAYLYARFNRISRIRAEDFKGLTKLKRIDLSNNLISSIDNDAFRLLHALQDLILPENQLEALPVLPSGIEFLDVRLNRLQSSGIQPAAFRAMEKLQFLYLSDNLLDSIPGPLPLSLRSVHLQNNLIETMQRDVFCDPEEHKHTRRQLEDIRLDGNPINLSLFPSAYFCLPRLPIGRFT

SEQ ID NO: 1036 - protein, 264 aa, Homo Sapiens
DITPSVPPASYHPKPWLGAQPATVVTPGVNVTLRCRAPQPAWRFGLFKPGEIAPLLFRDVSSELAEFFLEEVTPAQGGSYRCCYRRPDWGPGVWSQPSDVLELLVTEELPRPSLVALPGPVVGPGANVSLRCAGRLRNMSFVLYREGVAAPLQYRHSAQPWADFTLLGARAPGTYSCYYHTPSAPYVLSQRSEVLVISWEGEGPEARPASSAPGMQAPGPPPSDPGAQAPSLSSFRPRGLVLQPLLPQTQDSWDPAPPPSDPGV

SEQ ID NO: 1037 - protein, 713 aa, Homo Sapiens
ERLPLTPVSLKVSTNSTRQSLHLQWTVHNLPYHQELKMVFQIQISRIETSNVIWVGNYSTTVKWNQVLHWSWESELPLECATHFVRIKSLVDDAKFPEPNFWSNWSSWEEVSVQDSTGQDILFVFPKDKLVEEGTNVTICYVSRNIQNNVSCYLEGKQIHGEQLDPHVTAFNLNSVPFIRNKGTNIYCEASQGNVSEGMKGIVLFVSKVLEEPKDFSCETEDFKTLHCTWDPGTDTALGWSKQPSQSYTLFESFSGEKKLCTHKNWCNWQITQDSQETYNFTLIAENYLRKRSVNILFNLTHRVYLMNPFSVNFENVNATNAIMTWKVHSIRNNFTYLCQIELHGEGKMMQYNVSIKVNGEYFLSELEPATEYMARVRCADASHFWKWSEWSGQNFTTLEAAPSEAPDVWRIVSLEPGNHTVTLFWKPLSKLHANGKILFYNVVVENLDKPSSSELHSIPAPANSTKLILDRCSYQICVIANNSVGASPASVIVISADPENKEVEEERIAGTEGGFSLSWKPQPGDVIGYVVDWCDHTQDVLGDFQWKNVGPNTTSTVISTDAFRPGVRYDFRIYGLSTKRIACLLEKKTGYSQELAPSDNPHVLVDTLTSHSFTLSWKDYSTESQPGFIQGYHVYLKSKARQCHPRFEKAVLSDGSECCKYKIDNPEEKALIVDNLKPESFYEFFITPFTSAGEGPSATFTKVTTPDEHSSM

SEQ ID NO: 1038 - protein, 716 aa, Homo Sapiens
LPREYTVINEACPGAEWNIMCRECCEYDQIECVCPGKREVVGYTIPCCRNEENECDSCLIHPGCTIFENCKSCRNGSWGGTLDDFYVKGFYCAECRAGWYGGDCMRCGQVLRAPKGQILLESYPLNAHCEWTIHAKPGFVIQLRFVMLSLEFDYMCQYDYVEVRDGDNRDGQIIKRVCGNERPAPIQSIGSSLHVLFHSDGSKNFDGFHAIYEEITACSSSPCFHDGTCVLDKAGSYKCACLAGYTGQRCENLLEAGKSKIKASEDSLSVLEERNCSDPGGPVNGYQKITGGPGLINGRHAKIGTVVSFFCNNSYVLSGNEKRTCQQNGEWSGKQPICIKACREPKISDLVRRRVLPMQVQSRETPLHQLYSAAFSKQKLQSAPTKKPALPFGDLPMGYQHLHTQLQYECISPFYRRLGSSRRTCLRTGKWSGRAPSCIPICGKIENITAPKTQGLRWPWQAAIYRRTSGVHDGSLHKGAWFLVCSGALVNERTVVVAAHCVTDLGKVTMIKTADLKVVLGKFYRDDDRDEKTIQSLQISAIILHPNYDPILLDADIAILKLLDKARISTRVQPICLAASRDLSTSFQESHITVAGWNVLADVRSPGFKNDTLRSGVVSVVDSLLCEEQHEDHGIPVSVTDNMFCASWEPTAPSDICTAETGGIAAVSFPGRASPEPRWHLMGLVSWSYDKTCSHRLSTAFTKVLPFKDWIERNMK

SEQ ID NO: 1039 - protein, 138 aa, Homo Sapiens
IRCPKGSKAYGSHCYALFLSPKSWTDADLACQKRPSGNLVSVLSGAEGSFVSSLVKSIGNSYSYVWIGLHDPTQGTEPNGEGWEWSSSDVMNYFAWERNPSTISSPGHCASLSRSTAFLRWKDYNCNVRLPYVCKFTD

SEQ ID NO: 1040 - protein, 111 aa, Homo Sapiens
APKVRRQSDTWGPWSQWSPCSRTCGGGVSFRERPCYSQRRDGGSSCVGPARSHRSCRTESCPDGARDFRAEQCAEFDGAEFQGRRYRWLPYYSAPNKCELNCIPKVLGLQA

SEQ ID NO: 1041 - protein, 1547 aa, Homo Sapiens
REARGATEEPSPPSRALYFSGRGEQLRLRADLELPRDAFTLQVWLRAEGGQRSPAVITGLYDKCSYISRDRGWVVGIHTISDQDNKDPRYFFSLKTDRARQVTTINAHRSYLPGQWVYLAATYDGQFMKLYVNGAQVATSGEQVGGIFSPLTQKCKVLMLGGSALNHNYRGYIEHFSLWKVARTQREILSDMETHGAHTALPQLLLQENWDNVKHAWSPMKDGSSPKVEFSNAHGFLLDTSLEPPLCGQTLCDNTEVIASYNQLSSFRQPKVVRYRVVNLYEDDHKNPTVTREQVDFQHHQLAEAFKQYNISWELDVLEVSNSSLRRRLILANCDISKIGDENCDPECNHTLTGHDGGDCRHLRHPAFVKKQHNGVCDMDCNYERFNFDGGECCDPEITNVTQTCFDPDSPHRAYLDVNELKNILKLDGSTHLNIFFAKSSEEELAGVATWPWDKEALMHLGGIVLNPSFYGMPGHTHTMIHEIGHSLGLYHVFRGISEIQSCSDPCMETEPSFETGDLCNDTNPAPKHKSCGDPGPGNDTCGFHSFFNTPYNNFMSYADDDCTDSFTPNQVARMHCYLDLVYQGWQPSRKPAPVALAPQVLGHTTDSVTLEWFPPIDGHFFERELGSACHLCLEGRILVQYASNASSPMPCSPSGHWSPREAEGHPDVEQPCKSSVRTWSPNSAVNPHTVPPACPEPQGCYLELEFLYPLVPESLTIWVTFVSTDWDSSGAVNDIKLLAVSGKNISLGPQNVFCDVPLTIRLWDVGEEVYGIQIYTLDEHLEIDAAMLTSTADTPLCLQCKPLKYKVVRDPPLQMDVASILHLNRKFVDMDLNLGSVYQYWVITISGTEESEPSPAVTYIHGSGYCGDGIIQKDQGEQCDDMNKINGDGCSLFCRQEVSFNCIDEPSRCYFHDGDGVCEEFEQKTSIKDCGVYTPQGFLDQWASNASVSHQDQQCPGWVIIGQPAASQVCRTKVIDLSEGISQHAWYPCTISYPYSQLAQTTFWLRAYFSQPMVAAAVIVHLVTDGTYYGDQKQETISVQLLDTKDQSHDLGLHVLSCRNNPLIIPVVHDLSQPFYHSQAVRVSFSSPLVAISGVALRSFDNFDPVTLSSCQRGETYSPAEQSCVHFACEKTDCPELAVENAYLNCSSSDRYHGAQCTVSCRTGYVLQIRRDDELIKSQTGPSVTVTCTEGKWNKQVACEPVDCSIPDHHQVYAASFSCPEGTTFGSQCSFQCRHPAQLKGNNSLLTCMEDGLWSFPEALCELMCLAPPPVPNADLQTARCRENKHKVGSFCKYKCKPGYHVPGSSRKSKKRAFKTQCTQDGSWQEGACVPVTCDPPPPKFHGLYQCTNGFQFNSECRIKCEDSDASQGLGSNVIHCRKDGTWNGSFHVCQEMQGQCSVPNELNSNLKLQCPDGYAIGSECATSCLDHNSESIILPMNVTVRDIPHWLNPTRVERVVCTAGLKWYPHPALIHCVKGCEPFMGDNYCDAINNRAFCNYDGGDCCTSTVKTKKVTPFPMSCDLQGDCACRDPQAQEHSRKDLQGYSHG

SEQ ID NO: 1042 - protein, 105 aa, Homo Sapiens
SLSMRNDAVNEIVAVKNNFPVIEIVQCRMCHLQFPGEKCSRGRGICTATTEEACMVGRMFKRDGNPWLTFMGCLKNCADVKGIRWSVYLVNFRCCRSHDLCNEDL

SEQ ID NO: 1043 - protein, 87 aa, Homo Sapiens
TEIMCYECKKYHLGLCYGVMTSCSLKHKQSCAVENFYILTRKGQSMYHYSKLSCMTSCEDINFLGFTKRVELICCDHSNYCNLPEGV

SEQ ID NO: 1044 - protein, 78 aa, Homo Sapiens
LQCITCHLRTRTDRCRRGFGVCTAQKGEACMLLRIYQRNTLQISYMVCQKFCRDMTFDLRNRTYVHTCCNYNYCNFKL

SEQ ID NO: 1045 - protein, 76 aa, Homo Sapiens
LKCNTCIYTEGWKCMAGRGTCIAKENELCSTTAYFRGDKHMYSTHMCKYKCREEESSKRGLLRVTLCCDRNFCNVF

SEQ ID NO: 1046 - protein, 697 aa, Homo Sapiens
QLHYTVQEEQEHGTFVGNIAEDLGLDITKLSARGFQTVPNSRTPYLDLNLETGVLYVNEKIDREQICKQSPSCVLHLEVFLENPLELFQVEIEVLDINDNPPSFPEPDLTVEISESATPGTRFPLESAFDPDVGTNSLRDYEITPNSYFSLDVQTQGDGNRFAELVLEKPLDREQQAVHRYVLTAVDGGGGGGVGEGGGGGGGAGLPPQQQRTGTALLTIRVLDSNDNVPAFDQPVYTVSLPENSPPGTLVIQLNATDPDEGQNGEVVYSFSSHISPRARELFGLSPRTGRLEVSGELDYEESPVYQVYVQAKDLGPNAVPAHCKVLVRVLDANDNAPEISFSTVKEAVSEGAAPGTVVALFSVTDRDSEENGQVQCELLGDVPFRPKSSFKNYYTIVTEAPLDREAGDSYTLTVVARDRGEPALSTSKSIQVQVSDVNDNAPRFSQPVYDVYVTENNVPGAYIYAVSATDRDEGANAQLAYSILECQIQGMSVFTYVSINSENGYLYALRSFDYEQLKDFSFQVEARDAGSPQALAGNATVNILIVDQNDNAPAIVAPLPGRNGTPAREVLPRSAEPGYLLTRVAAVDADDGENARLTYSIVRGNEMNLFRMDWRTGELRTARRVPAKRDPQRPYELVIEVRDHGQPPLSSTATLVVQLVDGAVEPQGGGGSGGGGSGEHQRPSRSGGGETSLDLT

SEQ ID NO: 1047 - protein, 694 aa, Homo Sapiens
QEVTTLTVKYQVSEEVPSGTVIGKLSQELGREERRRQAGAAFQVLQLPQALPIQVDSEEGLLSTGRRLDREQLCRQWDPCLVSFDVLATGDLALIHVEIQVLDINDHQPRFPKGEQELEISESASLRTRIPLDRALDPDTGPNTLHTYTLSPSEHFALDVIVGPDETKHAELIVVKELDREIHSFFDLVLTAYDNGNPPKSGTSLVKVNVLDSNDNSPAFAESSLALEIQEDAAPGTLLIKLTATDPDQGPNGEVEFFLSKHMPPEVLDTFSIDAKTGQVILRRPLDYEKNPAYEVDVQARDLGPNPIPAHCKVLIKVLDVNDNIPSIHVTWASQPSLVSEALPKDSFIALVMADDLDSGNNGLVHCWLSQELGHFRLKRTNGNTYMLLTNATLDREQWPKYTLTLLAQDQGLQPLSAKKQLSIQISDINDNAPVFEKSRYEVSTRENNLPSLHLITIKAHDADLGINGKVSYRIQDSPVAHLVAIDSNTGEVTAQRSLNYEEMAGFEFQVIAEDSGQPMLASSVSVWVSLLDANDNAPEVVQPVLSDGKASLSVLVNASTGHLLVPIETPNGLGPAGTDTPPLATHSSRPFLLTTIVARDADSGANGEPLYSIRSGNEAHLFILNPHTGQLFVNVTNASSLIGSEWELEIVVEDQGSPPLQTRALLRVMFVTSVDHLRDSARKPGALSMSMLT

SEQ ID NO: 1048 - protein, 830 aa, Homo Sapiens
SYSRATELLYSLNEGLPAGVLIGSLAEDLRLLPRSAGRPDPQSQLPERTGAEWNPPLSFSLASRGLSGQYVTLDNRSGELHTSAQEIDREALCVEGGGGTAWSGSVSISSSPSDSCLLLLDVLVLPQEYFRFVKVKIAIRDINDNAPQFPVSQISVWVPENAPVNTRLAIEHPAVDPDVGINGVQTYRLLDYHGMFTLDVEENENGERTPYLIVMGALDRETQDQYVSIIIAEDGGSPPLLGSATLTIGISDINDNCPLFTDSQINVTVYGNATVGTPIAAVQAVDKDLGTNAQITYSYSQKVPQASKDLFHLDENTGVIKLFSKIGGSVLESHKLTILANGPGCIPAVITALVSIIKVIFRPPEIVPRYIANEIDGVVYLKELEPVNTPIAFFTIRDPEGKYKVNCYLDGEGPFRLSPYKPYNNEYLLETTKPMDYELQQFYEVAVVAWNSEGFHVKRVIKVQLLDDNDNAPIFLQPLIELTIEENNSPNAFLTKLYATDADSEERGQVSYFLGPDAPSYFSLDSVTGILTVSTQLDREEKEKYRYTVRAVDCGKPPRESVATVALTVLDKNDNSPRFINKDFSFFVPENFPGYGEIGVISVTDADAGRNGWVALSVVNQSDIFVIDTGKGMLRAKVSLDREQQSSYTLWVEAVDGGEPALSSTAKITILLLDINDNPPLVLFPQSNMSYLLVLPSTLPGSPVTEVYAVDKDTGMNAVIAYSIIGRRGPRPESFRIDPKTGNITLEEALLQTDYGLHRLLVKVSDHGYPEPLHSTVMVNLFVNDTVSNESYIESLLRKEPEINIEEKEPQISIEPTHRKVESVSCMPTL

SEQ ID NO: 1049 - protein, 791 aa, Homo Sapiens
QELIYTIREELPENVPIGNIPKDLNISHINAATGTSASLVYRLVSKAGDAPLVKVSSSTGEIFTTSNRIDREKLCAGASYAEENECFFELEVVILPNDFFRLIKIKIIVKDTNDNAPMFPSPVINISIPENTLINSRFPIPSATDPDTGFNGVQHYELLNGQSVFGLDIVETPEGEKWPQLIVQQNLDREQKDTYVMKIKVEDGGTPQKSSTAILQVTVSDVNDNRPVFKEGQVEVHIPENAPVGTSVIQLHATDADIGSNAEIRYIFGAQVAPATKRLFALNNTTGLITVQRSLDREETAIHKVTVLASDGSSTPARATVTINVTDVNDNPPNIDLRYIISPINGTVYLSEKDPVNTKIALITVSDKDTDVNGKVICFIEREVPFHLKAVYDNQYLLETSSLLDYEGTKEFSFKIVASDSGKPSLNQTALVRVKLEDENDNPPIFNQPVIELSVSENNRRGLYLTTISATDEDSGKNADIVYQLGPNASFFDLDRKTGVLTASRVFDREEQERFIFTVTARDNGTPPLQSQAAVIVTVLDENDNSPKFTHNHFQFFVSENLPKYSTVGVITVTDADAGENKAVTLSILNDNDNFVLDPYSGVIKSNVSFDREQQSSYTFDVKATDGGQPPRSSTAKVTINVMDVNDNSPVVISPPSNTSFKLVPLSAIPGSVVAEVFAVDVDTGMNAELKYTIVSGNNKGLFRIDPVTGNITLEEKPAPTDVGLHRLVVNISDLGYPKSLHTLVLVFLYVNDTAGNASYIYDLIRRTMETPLDRNIGDSSQPYQNEDYLT

SEQ ID NO: 1050 - protein, 668 aa, Homo Sapiens
QLHYSVPEEAEHGTFVGRIAQDLGLELAELVPRLFQLDSKGRGDLLEVNLQNGILFVNSRIDREELCGRSAECSIHLEVIVDRPLQVFHVDVEVKDINDNPPVFPATQKNLFIAESRPLDSRFPLEGASDADIGENALLTYRLSPNEYFFLDVPTSNQQVKPLGLVLRKLLDREETPELHLLLTATDGGKPELTGTVQLLITVLDNNDNAPVFDRTLYTVKLPENVSIGTLVIHPNASDLDEGLNGDIIYSFSSDVSPDIKSKFHMDPLSGAITVIGHMDFEESRAHKIPVEAVDKGFPPLAGHCTLLVEVVDVNDNAPQLTIKTLSVPVKEDAQLGTVIALISVIDLDADANGQVTCSLTPHVPFKLVSTYKNYYSLVLDRALDRESVSAYELVVTARDGGSPSLWATARVSVEVADVNDNAPAFAQSEYTVFVKENNPPGCHIFTVSARDADAQENALVSYSLVERRLGERSLSSYVSVHAESGKVYALQPLDHEELELLQFQVSARDAGVPPLGSNVTLQVFVLDENDNAPALLTPRMRGTDGAVSEMVLRSVGAGVVVGKVRAVDADSGYNAWLSYELQPETASASIPFRVGLYTGEISTTRALDETDAPRQRLLVLVKDHGEPALTATATVLVSLVESGQAPKSSSRASVGATGPEVTLVDVN

SEQ ID NO: 1051 - protein, 663 aa, Homo Sapiens
TTIRYSVAEEMESGSFVANVAKDLGLEVGKLAARGARLVSEGNKMHFRLHRKTGDLFVKEKLDRESLCGKADPCVLHFEVVLVEPLQSFRAEVRVFDINDNAPVFLNKEPLLKIPESTPLGSRFPLQSAQDLDVGLNGLQNYTLSANGYFHLHTRFCSHGPKYAELVLNKPLDREEQPEVNLTITAVDGGSPPKSGTAHIHVVVLDVNDHVPQFSRLVYRAQVSENSPNGSLVATVTAVDLDEGTNKAITYSLAQNPEAILKTFQIDPQNGEVRLRGPLDFEAIETYDIDIQATDGGGLSAHSKVLVEVVDVNDNPPEVMVSSVSSPLPEDSPPQTVVALFTIRDRDIRVGGKVTCFLREDLPFVIKPTFGNSYSLVTDRSLDREEVSGYNITIVAMDTGPPSLSAETMIEVLISDVNDNPPIFREDSYILTVRENNSPAVFIGKVHAEDLDLGENAQITYSLLPPKNGDLSVFAYISINSGNGKLYALRTMDYEAIQDFQFVVKATDGGFLSLSSQVTVRVVVLDDNDNRPMILYPLQNGTLPCNDLVPRSAEAGYLVTKVVAVDGDSGQNSWLSYHLLKATDLGLFSVQRQNGEIHTLRQISERDPMMQKLIILVQDHGQPALSTTVSLNILLVDGFSEPYLQFQDPTKHSRKVNPSTKYL

SEQ ID NO: 1052 - protein, 664 aa, Homo Sapiens
GSETWSFSVAEEMQSGSFVGNLAKDLGLKVRELSSRGARVVSNDKKQRLQLDINTGDLLLSETLDREELCGSIEPCVLHLQVLMQNPTQFLQIELQVRDINDHSPIFSEKQMLLEIPENSPVGAVFLLESAKDLDVGINAVKSYTISPNSHFHIKMRVIPDNRKYPELVLDKALDYEELPELSFILSALDGGSPPRSGTALVRVVVVDINDNSPEFEQAFYEVKIRENSILGSLILIVSAWDLDSGTNGEICYTFSHASEDIRKTFEINQKSGEITLRAPLDFETIESYSIIIQATDGGGLFGKSTVIIHVIDVNDNAPEITVSSITSPIPENTPETVVMVFSIQDIDSGDNGRIVCSIPEDLPFVLKSSVENYYTLETERPLDRESTAEYNITITVTDLGIPRLKTEHNTTVLVSDVNDNAPTFTQTSYTLFVRENNSPALHIGSVSATDRDSGTNAQVNYSLLPPQDLHLPLASLVSINTDNGHLFALRSLDYEALQAFDFRVGATDRGSPALSSEALVRVLVLDANDNSPFVLYPLQNGSAPCTELVPRAAEPGYLVTKVVAVDGDSGQNAWLSYQLLKATEPGLFGVWAHNGEVRTARLLSERDAAKHRLVVLVKDNGEPPRSATATLQVLLVDGFSQPYLPLPEAAPAQAQADSLTVYL

SEQ ID NO: 1053 - protein, 661 aa, Homo Sapiens
EPRSYSVVEETEGSSFVTNLAKDLGLEQREFSRRGVRVVSRGNKLHLQLNQETADLLLNEKLDREDLCGHTEPCVLRFQVLLESPFEFFQAELQVIDINDHSPVFLDKQMLVKVSESSPPGTTFPLKNAEDLDVGQNNIENYIISPNSYFRVLTRKRSDGRKYPELVLDKALDREEEAELRLTLTALDGGSPPRSGTAQVYIEVLDVNDNAPEFEQPFYRVQISEDSPVGFLVVKVSATDVDTGVNGEISYSLFQASEEIGKTFKINPLTGEIELKKQLDFEKLQSYEVNIEARDAGTFSGKCTVLIQVIDVNDHAPEVTMSAFTSPIPENAPETVVALFSVSDLDSGENGKISCSIQEDLPFLLKSAENFYTLLTERPLDRESRAEYNITITVTDLGTPMLITQLNMTVLIADVNDNAPAFTQTSYTLFVRENNSPALHIRSVSATDRDSGTNAQVTYSLLPPQDPHLPLTSLVSINADNGHLFALRSLDYEALQGFQFRVGASDHGSPALSSEALVRVVVLDANDNSPFVLYPLQNGSAPCTELVPRAAEPGYLVTKVVAVDGDSGQNAWLSYQLLKATELGLFGVWAHNGEVRTARLLSERDAAKHRLVVLVKDNGEPPRSATATLHVLLVDGFSQPYLPLPEAAPTQAQADLLTVYL

SEQ ID NO: 1054 - protein, 664 aa, Homo Sapiens
GWEPRRYSVMEETERGSFVANLANDLGLGVGELAERGARVVSEDNEQGLQLDLQTGQLILNEKLDREKLCGPTEPCIMHFQVLLKKPLEVFRAELLVTDINDHSPEFPEREMTLKIPETSSLGTVFPLKKARDLDVGSNNVQNYNISPNSHFHVSTRTRGDGRKYPELVLDTELDREEQAELRLTLTAVDGGSPPRSGTVQILILVLDANDNAPEFVQALYEVQVPENSPVGSLVVKVSARDLDTGTNGEISYSLYYSSQEIDKPFELSSLSGEIRLIKKLDFETMSSYDLDIEASDGGGLSGKCSVSVKVLDVNDNFPELSISSLTSPIPENSPETEVALFRIRDRDSGENGKMICSIQDDVPFKLKPSVENFYRLVTEGALDRETRAEYNITITITDLGTPRLKTEQSITVLVSDVNDNAPAFTQTSYTLFVRENNSPALHIGSVRATDRDSGTNAQVTYSLLPPQDPHLPLTSLVSINTDNGHLFALQSLDYEALQAFEFRVGATDRGFPALSSEALVRVLVLDANDNSPFVLYPLQNGSAPCTELVPRAAEPGYLVTKVVAVDGDSGQNAWLSYQLLKATEPGLFGVWAHNGEVRTARLLSERDVAKHRLVVLVKDNGEPPRSATATLQVLLVDGFSQPYLPLPEAAPAQAQADSLTVYL

SEQ ID NO: 1055 - protein, 662 aa, Homo Sapiens
ELGSYSVVEETERGSFVANLGKDLGLGLTEMSTRKARIISQGNKQHLQLKAQTGDLLINEKLDREELCGPTEPCILHFQVLMENPLEIFQAELRVIDINDHSPMFTEKEMILKIPENSPLGTEFPLNHALDLDVGSNNVQNYKISPSSHFRVLIHEFRDGRKYPELVLDKELDREEEPQLRLTLTALDGGSPPRSGTAQVRIEVVDINDNAPEFEQPIYKVQIPENSPLGSLVATVSARDLDGGANGKISYTLFQPSEDISKTLEVNPMTGEVRLRKQVDFEMVTSYEVRIKATDGGGLSGKCTLLLQVVDVNDNPPQVTMSALTSPIAENSPEIVVAVFSVSDPDSGNNGKTISSIQEDLPFLLKPSVKNFYTLVTERALDREARAEYNITLTVTDMGTPRLKTEHNITVQISDVNDNAPTFTQTSYTLFVRENNSPALHIGSVSATDRDSGTNAQVTYSLLPPQDPHLPLASLVSINADNGHLFALRSLDYEALQAFEFRVGATDRGSPALSREALVRVLVLDANDNSPLVLYPLQNGSAPCTELVPRAAEPGYLVTKVVAVDGDSGQNAWLSYQLLKATEPGLFGVWAHNGEVRTARLLSERDAAKQRLVVLVKDNGEPPRSATATLHVLLVDGFSQPFLPLPEAAPGQTQANSLTVYL

SEQ ID NO: 1056 - protein, 664 aa, Homo Sapiens
GSESRRYSVAEEKERGFLIANLAKDLGLRVEELAARGAQVVSKGNKQHFQLSHQTGDLLLNEKLDREELCGPTEPCILHFQILLQNPLQFVTNELRIIDVNDHSPVFFENEMHLKILESTLPGTVIPLGNAEDLDVGRNSLQNYTITPNSHFHVLTRSRRDGRKYPELVLDKALDREEQPELSLTLTALDGGSPPRSGTAQINIQVLDINDNAPEFAQPLYEVAVLENTPVNSVIVTVSASDLDTGSFGTISYAFFHASEEIRKTFQLNPITGDMQLVKYLNFEAINSYEVDIEAKDGGGLSGKSTVIVQVVDVNDNPPELTLSSVNSPIPENSGETVLAVFSVSDLDSGDNGRVMCSIENNLPFFLKPSVENFYTLVSEGALDRETRSEYNITITITDLGTPRLKTKYNITVLVSDVNDNAPAFTQTSYTLFVRENNSPALHIGSVSATDRDSGTNAQVTYSLLPPQDPHLPLSSLVSINADNGHLFALRSLDYEALQAFEFRVGAADRGSPALSSEALVRVLVLDANDNSPFVLYPLQNGSAPCTELVPRAAEPGYLVTKVVAVDSDSGQNAWLSYQLLKATEPGLFGVWAHNGEVRTARLLSERDAAKHRLVVLVKDNGEPPRSATATLHVLLVDGFSQPYLPLPEAAPAQAQADLLTVYL

SEQ ID NO: 1057 - protein, 659 aa, Homo Sapiens
VRYSIPEETESGYSVANLAKDLGLGVGELATRGARMHYKGNKELLQLDIKTGNLLLYEKLDREVMCGATEPCILHFQLLLENPVQFFQTDLQLTDINDHAPEFPEKEMLLKIPESTQPGTVFPLKIAQDFDIGSNTVQNYTISPNSHFHVATHNRGDGRKYPELVLDKALDREERPELSLTLTALDGGAPPRSGTTTIRIVVLDNNDNAPEFLQSFYEVQVPENSPLNSLVVVVSARDLDAGAYGSVAYALFQGDEVTQPFVIDEKTAEIRLKRALDFEATPYYNVEIVATDGGGLSGKCTVAIEVVDVNDNAPELTMSTLSSPTPENAPETVVAVFSVSDPDSGDNGRMICSIQNDLPFLLKPTLKNFYTLVTQRTLDRESQAEYNITITVTDMGTPRLKTEHNITVLVSDVNDNAPAFTQTSYTLFVRENNSPALHIGSVSATDRDSGTNAQVTYSLLPPQNPHLRLASLVSINADNGHLFALRSLDYEALQAFEFRVGATDRGSPALSSEALVRVLVLDANDNSPFVLYPLQNGSAPCTELVPRAAEPGYLVTKVVAVDGDSGQNAWLSYQLLKATEPGLFSMWAHNGEVRTARLLSERDAAKHRLVVLVKDNGEPPRSATATLHVLLVDGFSQPYLPLPEAAPAQAQADSLTVYL

SEQ ID NO: 1058 - protein, 661 aa, Homo Sapiens
ESIQYSVLEETESGTFVANLTKDLGLRVGELASRGARVVFKGNRQHLQFDPQTHDLLLNEKLDREELCGSTEPCVLPFQVLLENPLQFFQASLRVRDINDHAPEFPAREMLLKISEITMPGKIFPLKMAHDLDTGSNGLQRYTISSNPHFHVLTRNRSEGRKFPELVLDKPLDREEQPQLRLTLIALDGGSPPRSGTSEIQIQVLDINDNVPEFAQELYEAQVPENNPLGSLVITVSARDLDAGSFGKVSYALFQVDDVNQPFEINAITGEIRLRKALDFEEIQSYDVDVEATDGGGLSGKCSLVVRVLDVNDNAPELTMSFFISLIPENLPEITVAVFSVSDADSGHNQQVICSIENNLPFLLRPSVENFYTLVTEGALDRESRAEYNITITVTDLGTPRLKTQQSITVQVSDVNDNVPAFTQTSYTLFVRENNSPALHIGSVSATDRDSGINAQVTYSLLPPQDPHLPLSSLVSINADNGHLFALRSLDYEALQSFEFRVGATDRGSPALSSEALVRLLVLDANDNSPFVLYPLQNGSAPCTELVPRAAEPGYLVTKVVAVDGDSGQNAWLSYQLLKATELGLFGVWAHNGEVRTARLLSERDAAKHRLVVLVKDNGEPPRSATATLHVLLVDGFSQPYLPLPEAAPAQAQADSLTVYL

SEQ ID NO: 1059 - protein, 662 aa, Homo Sapiens
GAEPLRYFVAEETERGTFLTNLAKDLGLGVGELRARGTRIVSDQNMQILLLSSLTGDLLLNEKLDREELCGPREPCVLPFQLLLEKPFQIFRAELWVRDINDHAPVFLDREISLKILESTTPGAAFLLESAQDSDVGTNSLSNYTISPNAYFHINVHDSGEGNIYPELVLNQVLDREEIPEFSLTLTALDGGSPPRSGTALVRILVLDVNDNAPDFVRSLYKVQVPENSPVGSMVVSVSARDLDTGSNGEIAYAFSYATERILKTFQINPTSGSLHLKAQLDYEAIQTYTLTIQAKDGGGLSGKCTVVVDVTDINDNRPELLLSSLTSPIAENSPETVVAVFRIRDRDSGNNGKTVCSIQDDLPFILKPSVENFYTLVTEKPLDRERNTEYNITITVTDLGTPRLKTEHNITVLVSDVNDNAPAFTQTSYTLFVRENNSPALPIGSVSATDRDSGTNAQVIYSLLPSQDPHLPLASLVSINADNGHLFALRSLDYEALQAFEFRVGATDRGSPALSSEALVRVLVLDANDNSPFVLYPLQNSSAPCTEPLPRAAEPGYLVTKVVAVDGDSGQNAWLSYQLLKATEPGLFGVWAHNGEVRTARLLSERDAAKQRLVVLVKDNGEPPRSATATLHVLLVDGFSQPYLRLPEAAPDQANSLTVYL

SEQ ID NO: 1060 - protein, 664 aa, Homo Sapiens
GSGFGRYSVTEETEKGSFVVNLAKDLGLAEGELAARGTRVVSDDNKQYLLLDSHTGNLLTNEKLDREKLCGPKEPCMLYFQILMDDPFQIYRAELRVRDINDHSPVFRHKEMVLKISENTAEGTAFRLERAQDPDEGHNSIQNYTISSNSFFHIKISGSDEGMIYPELVLDKALDREEQEELSLTLTALDGGSPSRSGTSTIRIVVLDVNDNAPQFAQALYETQAPENSPVGSLIVKVSAGDADSGVNAEVSYSFFDASEDILTTFQINPFSGEIFLRELLDYELVNSYKINIQAMDGGGLSARCTVLIKVLDSNDNPPELIISSLSNSVAENSPGIVLAVFKIKDRDSGENGKTICYVQDNLPFFLKPSVDNFYILMTEGALDRESKAEYNITITVTDLGTPRLKTEHSITLQVSDVNDNAPAFTQTSYTLFVRENNSPALHIGSVSATDRDSGTNAQVTYSLLPPQDPHLPLASLVSINADNGHLFALRSLDYEALQAFDFRVGASDRGSPALSSEALVRVLVLDANDNSPFVLYPLQNGSAPCTELVPRAAEPGYLVTKVVAVDGDSGQNAWLSYQLLKATEPGLFGVWAHNGEVRTARLLSERDAAKHRLVVLVKDNGEPPRSATATLHVLLVDGFSQPYLPLPEAAPAQAQADLLTVYL

SEQ ID NO: 1061 - protein, 664 aa, Homo Sapiens
EQILYSVFEEQEEGSVVGNIAKDLGLAPRELAERGVRIVSRGRTQLFALNPRSGTLVTAGRIDREELCDRSPNCVTNLEILLEDTVKILRVEVEIIDVNDNPPSFGTEQREIKVAENENPGARFPLPEAFDPDVGVNSLQGYQLNSNGYFSLDVQSGADGIKYPELVLERALDREEEAVHHLVLTAFDGGDPVRSGTARILIILVDTNDNAPVFTQPEYHVSVRENVPVGTRLLTVKATDPDEGANGDVTYSFRKVRDKISQLFQLNSLSGDITILGGLDYEDSGFYDIDVEAHDGPGLRARSKVLVTVLDENDNAPEVTVTSLTSSVQESSSPGTVIALFNVHDSDSGGNGLVTCSIPDNLPFTLEKTYGNYYRLLTHRTLDREEVSEYNITVTATDQGTPPLSTETHISLQVMDINDNPPTFPHASYSAYIPENNPRGASILSMTAQDPDSGDNARITYSLAEDTFQGAPLSSYVSINSNTGILYALCSFDYEQFRDLQLLMTASDSGDPPLSSNVSLSLFVLDQNDNVPEILYPTFPTDGSTGVELAPRSADSGYLVTKVVAVDRDSGQNAWLSYSLLKSSEPGLFAVGLHTGEVRTARALLDRDALKQRLVVVVQDHGQPPLSATVTLTVAVADSIPDVLADLGSLKPSADPDDSGLTLY

SEQ ID NO: 1062 - protein, 661 aa, Homo Sapiens
EPIRYAIPEELDRGSLVGNLAKDLGFGVGDLPTRNLRVIAEKKFFTVSPENGNLLVSDRIDREEICGKKSTCVLEFEMVAEKPLNFFHVTVLIQDINDNPPTFSQNITELEISELALTGATFALESAQDPDVGVNSLQQYYLSPDPHFSLIQKENLDGSRYPELVLKAPLDREEQPHHHLVLTAVDGGEPSRSCTTQIRVIVADANDNPPVFTQDMYRVNVAENLPAGSSVLKVMAIDMDEGINAEIIYAFINIGKEVRQLFKLDSKTGELTTIGELDFEERDSYTIGVEAKDGGHHTAYCKVQIDISDENDNAPEITLASESQHIQEDAELGTAVALIKTHDLDSGFNGEILCQLKGNFPFKIVQDTKNTYRLVTDGALDREQIPEYNVTITATDKGNPPLSSSKTITLHILDVNDNVPVFHQASYTVHVAENNPPGASIAHVRASDPDLGPNGLVSYYIVASDLEPRELSSYVSVSARSGVVFAQRAFDHEQLRAFELTLQARDQGSPTLSANVSLRVLVDDRNDNAPLVLYPALGPEGSALFDMVPRSAEPGYLVTKVVAVDADSGYNAWLSYHIVQASEPGLFSLGLRTGEVRTARTLGDREAARQRLLVTVRDGGQQPLSATVMLHLIFADSLQEIQPDLSDRPTPSDPQAELQFH

SEQ ID NO: 1063 - protein, 661 aa, Homo Sapiens
EPIRYSIPEELAKGSVVGNLAKDLGLSVLDVSARKLRVSAEKLHFSVDAESGDLLVKNRIDREQICKERRRCELQLEAVVENPLNIFHVIVVIEDVNDHAPQFDKKEIHLEIFESASAGTRLSLDPATDPDININSIKDYKINSNPYFSLMVRVNSDGGKYPELSLEKLLDREEQRSHSLILTALDGGDPPRSATAHIEISVKDTNDNPPVFSRDEYRISLSENLPPGSPVLQVTATDQDEGVNAEINYYFRSTAQSTKHMFSLDEKTGMIKNNQSFDFEDVERYTMEVEAKDGGGLSTQCKVIIEILDENDNSPEIIITSLSDQILENSPPGMVVALFKTRDLDFGGNGEVRCNIETDIPFKIYSSSNNYYKLVTDGALDREQTPEYNVTIVATDRGKPPLSSSRSITLYVADINDNAPVFDQTSYVVHVAENNPPGASIAQVSASDPDLGLNGHISYSIVASDLEPLAVSSYVSVSAQSGVVFAQRAFDHEQLRAFALTLQARDHGSPTLSANVSLRVLVGDRNDNAPRVLYPALGPDGSAFFDMVPRSAEPGYLVTKVVAVDADSGHNAWLSYHVLQASEPGLFSLGLRTGEVRTARALGDRDAARQRLLVAVRDGGQPPLSATATLHLVFADNLQEILPDLSDRPVLSDPQAELQFY

SEQ ID NO: 1064 - protein, 662 aa, Homo Sapiens
VIHYEIPEEREKGFAVGNVVANLGLDLGSLSARRFRVVSGASRRFFEVNRETGEMFVNDRLDREELCGTLPSCTVTLELVVENPLELFSVEVVIQDINDNNPAFPTQEMKLEISEAVAPGTRFPLESAHDPDVGSNSLQTYELSRNEYFALRVQTREDSTKYAELVLERALDREREPSLQLVLTALDGGTPALSASLPIHIKVLDANDNAPVFNQSLYRARVLEDAPSGTRVVQVLATDLDEGPNGEIIYSFGSHNRAGVRQLFALDLVTGMLTIKGRLDFEDTKLHEIYIQAKDKGANPEGAHCKVLVEVVDVNDNAPEITVTSVYSPVPEDAPLGTVIALLSVTDLDAGENGLVTCEVPPGLPFSLTSSLKNYFTLKTSADLDRETVPEYNLSITARDAGTPSLSALTIVRVQVSDINDNPPQSSQSSYDVYIEENNLPGAPILNLSVWDPDAPQNARLSFFLLEQGAETGLVGRYFTINRDNGIVSSLVPLDYEDRREFELTAHISDGGTPVLATNISVNIFVTDRNDNAPQVLYPRPGGSSVEMLPRGTSAGHLVSRVVGWDADAGHNAWLSYSLLGSPNQSLFAIGLHTGQISTARPVQDTDSPRQTLTVLIKDNGEPSLSTTATLTVSVTEDSPEARAEFPSGSAPREQKKNLTFY

SEQ ID NO: 1065 - protein, 227 aa, Homo Sapiens
ARPVKEPRGLSAASPPLAETGAPRRFRRSVPRGEAAGAVQELARALAHLLEAERQERARAEAQEAEDQQARVLAQLLRVWGAPRNSDPALGLDDDPDAPAAQLARALLRARLDPAALAAQLVPAPVPAAALRPRPPVYDDGPAGPDAEEAGDETPDVDPELLRYLLGRILAGSADSEGVAAPRRLRRAADHDVGSELPPEGVLGALLRVKRLETPAPQVPARRLLPP

SEQ ID NO: 1066 - protein, 243 aa, Homo Sapiens
GAGWQLFCRTVWSAHSGPTRMATAIARCAPDEELLSCSSFSRSGKRRGERMEAQGGKLVCRAHNAFGGEGVYAIARCCLLPQANCSVHTAPPAEASMGTRVHCHQQGHVLTGCSSHWEVEDLGTHKPPVLRPRGQPNQCVGHREASIHASCCHAPGLECKVKEHGIPAPQEQVTVACEEGWTLTGCSALPGTSHVLGAYAVDNTCVVRSRDVSTTGSTSEEAVTAVAICCRSRHLAQASQELQ

SEQ ID NO: 1067 - protein, 150 aa, Homo Sapiens [sequence omitted]

SEQ ID NO: 1068 - protein, 201 aa, Homo Sapiens
LFTVTVPKELYIIEHGSNVTLECNFDTGSHVNLGAITASLQKVENDTSPHRERATLLEEQLPLGKASFHIPQVQVRDEGQYQCIIIYGVAWDYKYLTLKVKASYRKINTHILKVPETDEVELTCQATGYPLAEVSWPNVSVPANTSHSRTPEGLYQVTSVLRLKPPPGRNFSCVFWNTHVRELTLASIDLQSQMEPRTHPT

SEQ ID NO: 1069 - protein, 110 aa, Homo Sapiens
SIEEAVPAVCKTRTVIYEIPRSQVDPTSANFLIWPPCVEVKRCTGCCNTSSVKCQPSRVHHRSVKVAKVEYVRKKPKLKEVQVRLEEHLECACATTSLNPDYREEDTDVR

SEQ ID NO: 1070 - protein, 109 aa, Homo Sapiens
SLGSLTIAEPAMIAECKTRTEVFEISRRLIDRTNANFLVWPPCVEVQRCSGCCNNRNVQCRPTQVQLRPVQVRKIEIVRKKPIFKKATVTLEDHLACKCETVAAARPVT

SEQ ID NO: 1071 - protein, 323 aa, Homo Sapiens
ESNLSSKFQFSSNKEQNGVQDPQHERIITVSTNGSIHSPRFPHTYPRNTVLVWRLVAVEENVWIQLTFDERFGLEDPEDDICKYDFVEVEEPSDGTILGRWCGSGTVPGKQISKGNQIRIRFVSDEYFPSEPGFCIHYNIVMPQFTEAVSPSVLPPSALPLDLLNNAITAFSTLEDLIRYLEPERWQLDLEDLYRPTWQLLGKAFVFGRKSRVVDLNLLTEEVRLYSCTPRNFSVSIREELKRTDTIFWPGCLLVKRCGGNCACCLHNCNECQCVPSKVTKKYHEVLQLRPKTGVRGLHKSLTDVALEHHEECDCVCRGSTGG

SEQ ID NO: 1072 - protein, 121 aa, Homo Sapiens
SYHDRKSKVDLDRLNDDAKRYSCTPRNYSVNIREELKLANVVFFPRCLLVQRCGGNCGCGTVNWRSCTCNSGKTVKKYHEVLQFEPGHIKRRGRAKTMALVDIQLDHHERCDCICSSRPPR

SEQ ID NO: 1073 - protein, 505 aa, Homo Sapiens
QLSLPSILPNENEKVVQLNSSFSLRCFGESEVSWQYPMSEEESSDVEIRNEENNSGLFVTVLEVSSASAAHTGLYTCYYNHTQTEENELEGRHIYIYVPDPDVAFVPLGMTDYLVIVEDDDSAIIPCRTTDPETPVTLHNSEGVVPASYDSRQGFNGTFTVGPYICEATVKGKKFQTIPFNVYALKATSELDLEMEALKTVYKSGETIVVTCAVFNNEVVDLQWTYPGEVKGKGITMLEEIKVPSIKLVYTLTVPEATVKDSGDYECAARQATREVKEMKKVTISVHEKGFIEIKPTFSQLEAVNLHEVKHFVVEVRAYPPPRISWLKNNLTLIENLTEITTDVEKIQEIRYRSKLKLIRAKEEDSGHYTIVAQNEDAVKSYTFELLTQVPSSILDLVDDHHGSTGGQTVRCTAEGTPLPDIEWMICKDIKKCNNETSWTILANNVSNIITEIHSRDRSTVEGRVTFAKVEETIAVRCLAKNLLGAENRELKLVAPTLRSELTVA

SEQ ID NO: 1074 - protein, 500 aa, Homo Sapiens
LVVTPPGPELVLNVSSTFVLTCSGSAPVVWERMSQEPPQEMAKAQDGTFSSVLTLTNLTGLDTGEYFCTHNDSRGLETDERKRLYIFVPDPTVGFLPNDAEELFIFLTEITEITIPCRVTDPQLVVTLHEKKGDVALPVPYDHQRGFFGIFEDRSYICKTTIGDREVDSDAYYVYRLQVSSINVSVNAVQTVVRQGENITLMCIVIGNEVVNFEWTYPRKESGRLVEPVTDFLLDMPYHIRSILHIPSAELEDSGTYTCNVTESVNDHQDEKAINITVVESGYVRLLGEVGTLQFAELHRSRTLQVVFEAYPPPTVLWFKDNRTLGDSSAGEIALSTRNVSETRYVSELTLVRVKVAEAGHYTMRAFHEDAEVQLSFQLQINVPVRVLELSESHPDSGEQTVRCRGRGMPQPNIIWSACRDLKRCPRELPPTLLGNSSEEESQLETNVTYWEEEQEFEVVSTLRLQHVDRPLSVRCTLRNAVGQDTQEVIVVPHSLPFKV

SEQ ID NO: 1075 - protein, 354 aa, Homo Sapiens
QHLPKNKRPKEPGENRIKPTNKKVKPKIPKMKDRDSANSAPKTQSIMMQVLDKGRFQKPAATLSLLAGQTVELRCKGSRIGWSYPAYLDTFKDSRLSVKQNERYGQLTLVNSTSADTGEFSCWVQLCSGYICRKDEAKTGSTYIFFTEKGELFVPSPSYFDVVYLNPDRQAVVPCRVTVLSAKVTLHREFPAKEIPANGTDIVYDMKRGFVYLQPHSEHQGVVYCRAEAGGRSQISVKYQLLYVAVPSGPPSTTILASSNKVKSGDDISVLCTVLGEPDVEVEFTWIFPGQKDERPVTIQDTWRLIHRGLGHTTRISQSVITVEDFETIDAGYYICTAQNLQGQTTVATTVEFS

SEQ ID NO: 1076 - protein, 574 aa, Homo Sapiens
QENSFTINSVDMKSLPDWTVQNGKNLTLQCFADVSTTSHVKPQHQMLFYKDDVLFYNISSMKSTESYFIPEVRIYDSGTYKCTVIVNNKEKTTAEYQVLVEGVPSPRVTLDKKEAIQGGIVRVNCSVPEEKAPIHFTIEKLELNEKMVKLKREKNSRDQNFVILEFPVEEQDRVLSFRCQARIISGIHMQTSESTKSELVTVTESFSTPKFHISPTGMIMEGAQLHIKCTIQVTHLAQEFPEIIIQKDKAIVAHNRHGNKAVYSVMAMVEHSGNYTCKVESSRISKVSSIVVNITELFSKPELESSFTHLDQGERLNLSCSIPGAPPANFTIQKEDTIVSQTQDFTKIASKSDSGTYICTAGIDKVVKKSNTVQIVVCEMLSQPRISYDAQFEVIKGQTIEVRCESISGTLPISYQLLKTSKVLENSTKNSNDPAVFKDNPTEDVEYQCVADNCHSHAKMLSEVLRVKVIAPVDEVQISILSSKVVESGEDIVLQCAVNEGSGPITYKFYREKEGKPFYQMTSNATQAFWTKQKANKEQEGEYYCTAFNRANHASSVPRSKILTVRVILAPWKK

SEQ ID NO: 1077 - protein, 70 aa, Homo Sapiens
EAEEDGDLQCLCVKTTSQVRPRHITSLEVIKAGPHCPTAQLIATLKNGRKICLDLQAPLYKKIIKKLLES

SEQ ID NO: 1078 - protein, 152 aa, Homo Sapiens
LPAVPPQQWALSAGNGSSEVEVVPFQEVWGRSYCRALERLVDVVSEYPSEVEHMFSPSCVSLLRCTGCCGDENLHCVPVETANVTMQLLKIRSGDRPSYVELTFSQHVRCECRPLREKMKPERRRPKGRGKRRREKQRPTDCHLCGDAVPRR

SEQ ID NO: 1079 - protein, 175 aa, Homo Sapiens
QETEDPACCSPIVPRNEWKALASECAQHLSLPLRYVVVSHTAGSSCNTPASCQQQARNVQHYHMKTLGWCDVGYNFLIGEDGLVYEGRGWNFTGAHSGHLWNPMSIGISFMGNYMDRVPTPQAIRAAQGLLACGVAQGALRSNYVLKGHRDVQRTLSPGNQLYHLIQNWPHYRSP

SEQ ID NO: 1080 - protein, 620 aa, Homo Sapiens
KSPIFGPEEVNSVEGNSVSITCYYPPTSVNRHTRKYWCRQGARGGCITLISSEGYVSSKYAGRANLTNFPENGTFVVNIAQLSQDDSGRYKCGLGINSRGLSFDVSLEVSQGPGLLNDTKVYTVDLGRTVTINCPFKTENAQKRKSLYKQIGLYPVLVIDSSGYVNPNYTGRIRLDIQGTGQLLFSVVINQLRLSDAGQYLCQAGDDSNSNKKNADLQVLKPEPELVYEDLRGSVTFHCALGPEVANVAKFLCRQSSGENCDVVVNTLGKRAPAFEGRILLNPQDKDGSFSVVITGLRKEDAGRYLCGAHSDGQLQEGSPIQAWQLFVNEESTIPRSPTVVKGVAGGSVAVLCPYNRKESKSIKYWCLWEGAQNGRCPLLVDSEGWVKAQYEGRLSLLEEPGNGTFTVILNQLTSRDAGFYWCLTNGDTLWRTTVEIKIIEGEPNLKVPGNVTAVLGETLKVPCHFPCKFSSYEKYWCKWNNTGCQALPSQDEGPSKAFVNCDENSRLVSLTLNLVTRADEGWYWCGVKQGHFYGETAAVYVAVEERKAAGSRDVSLAKADAAPDEKVLDSGFREIENKAIQDPRLFAEEKAVADTRDQADGSRASVDSGSSEEQGGSSR

SEQ ID NO: 1081 - protein, 147 aa, Homo Sapiens
SGGCFWDNGHLYREDQTSPAPGLRCLNWLDAQSGLASAPVSGAGNHSYCRNPDEDPRGPWCYVSGEAGVPEKRPCEDLRCPETTSQALPAFTTEIQEASEGPGADEVQVFAPANALPARSEAAAVQPVIGISQRVRMNSKEKKDLGT

SEQ ID NO: 1082 - protein, 226 aa, Homo Sapiens [sequence omitted]

SEQ ID NO: 1083 - protein, 172 aa, Homo Sapiens
QPGGSTGSGPSYLYGVTQPKHLSASMGGSVEIPFSFYYPWELAIVPNVRISWRRGHFHGQSFYSTRPPSIHKDYVNRLFLNWTEGQESGFLRISNLRKEDQSVYFCRVELDTRRSGRQQLQSIKGTKLTITQAVTTTTTWRPSSTTTIAGLRVTESKGHSESWHLSLDTAIR

SEQ ID NO: 1084 - protein, 178 aa, Homo Sapiens
LHCEICTAAGSRCHGQMKTCSSDKDTCVLLVGKATSKGKELVHTYKGCIRSQDCYSGVISTTMGPKDHMVTSSFCCQSDGCNSAFLSVPLTNLTENGLMCPACTASFRDKCMGPMTHCTGKENHCVSLSGHVQAGIFKPRFAMRGCATESMCFTKPGAEVPTGTNVLFLHHIECTHSP

SEQ ID NO: 1085 - protein, 118 aa, Homo Sapiens
QDNTRKIIIKNFDIPKSVRPNDEVTAVLAVQTELKECMVVKTYLISSIPLQGAFNYKYTACLCDDNPKTFYWDFYTNRTVQIAAVVDVIRELGICPDDAAVIPIKNNRFYTIEILKVE

SEQ ID NO: 1086 - protein, 356 aa, Homo Sapiens
VSGAQYMGSGYTKAVYRVRLPGGAAVALKAVDFSGHDLGSCVREFGVRRGCYRLAAHKLLKEMVLLERLRHPNVLQLYGYCYQDSEDIPDTLTTITELGAPVEMIQLLQTSWEDRFRICLSLGRLLHHLAHSPLGSVTLLDFRPRQFVLVDGELKVTDLDDARVEETPCAGSTDCILEFPARNFTLPCSAQGWCEGMNEKRNLYNAYRFFFTYLLPHSAPPSLRPLLDSIVNATGELAWGVDETLAQLEKVLHLYRSGQYLQNSTASSSTEYQCIPDSTIPQEDYRCWPSYHHGSCLLSVFNLAEAVDVCESHAQCRAFVVTNQTTWTGRQLVFFKTGWSQVVPDPNKTTYVKASG

SEQ ID NO: 1087 - protein, 527 aa, Homo Sapiens
SYQVICRDEKTQMIYQQHQSWLRPVLRSNRVEYCWCNSGRAQCHSVPVKSCSEPRCFNGGTCQQALYFSDFVCQCPEGFAGKCCEIDTRATCYEDQGISYRGTWSTAESGAECTNWNSSALAQKPYSGRRPDAIRLGLGNHNYCRNPDRDSKPWCYVFKAGKYSSEFCSTPACSEGNSDCYFGNGSAYRGTHSLTESGASCLPWNSMILIGKVYTAQNPSAQALGLGKHNYCRNPDGDAKPWCHVLKNRRLTWEYCDVPSCSTCGLRQYSQPQFRIKGGLFADIASHPWQAAIFAKHRRSPGERFLCGGILISSCWILSAAHCFQERFPPHHLTVILGRTYRVVPGEEEQKFEVEKYIVHKEFDDDTYDNDIALLQLKSDSSRCAQESSVVRTVCLPPADLQLPDWTECELSGYGKHEALSPFYSERLKEAHVRLYPSSRCTSQHLLNRTVTDNMLCAGDTRSGGPQANLHDACQGDSGGPLVCLNDGRMTLVGIISWGLGCGQKDVPGVYTKVTNYLDWIRDNMRP

SEQ ID NO: 1088 - protein, 411 aa, Homo Sapiens
SNELHQVPSNCDCLNGGTCVSNKYFSNIHWCNCPKKFGGQHCEIDKSKTCYEGNGHFYRGKASTDTMGRPCLPWNSATVLQQTYHAHRSDALQLGLGKHNYCRNPDNRRRPWCYVQVGLKPLVQECMVHDCADGKKPSSPPEELKFQCGQKTLRPRFKIIGGEFTTIENQPWFAAIYRRHRGGSVTYVCGGSLISPCWVISATHCFIDYPKKEDYIVYLGRSRLNSNTQGEMKFEVENLILHKDYSADTLAHHNDIALLKIRSKEGRCAQPSRTIQTICLPSMYNDPQFGTSCEITGFGKENSTDYLYPEQLKMTVVKLISHRECQQPHYYGSEVTTKMLCAADPQWKTDSCQGDSGGPLVCSLQGRMTLTGIVSWGRGCALKDKPGVYTRVSHFLPWIRSHTKEENGLAL

SEQ ID NO: 1089 - protein, 283 aa, Homo Sapiens
LRCMQCKTNGDCRVEECALGQDLCRTTIVRLWEEGEELELVEKSCTHSEKTNRTLSYRTGLKITSLTEVVCGLDLCNQGNSGRAVTYSRSRYLECISCGSSDMSCERGRHQSLQCRSPEEQCLDVVTHWIQEGEEGRPKDDRHLRGCGYLPGCPGSNGFHNNDTFHFLKCCNTTKCNEGPILELENLPQNGRQCYSCKGNSTHGCSSEETFLIDCRGPMNQCLVATGTHEPKNQSYMVRGCATASMCQHAHLGDAFSMNHIDVSCCTKSGCNHPDLDVQYRSG

SEQ ID NO: 1090 - protein, 499 aa, Homo Sapiens
TLLTRQPAPLSQKQRSFVTFRGEPAEGFNHLVVDERTGHIYLGAVNRIYKLSSDLKVLVTHETGPDEDNPKCYPPRIVQTCNEPLTTTNNVNKMLLIDYKENRLIACGSLYQGICKLLRLEDLFKLGEPYHKKEHYLSGVNESGSVFGVIVSYSNLDDKLFIATAVDGKPEYFPTISSRKLTKNSEADGMFAYVFHDEFVASMIKIPSDTFTIIPDFDIYYVYGFSSGNFVYFLTLQPEMVSPPGSTTKEQVYTSKLVRLCKEDTAFNSYVEVPIGCERSGVEYRLLQAAYLSKAGAVLGRTLGVHPDDDLLFTVFSKGQKRKMKSLDESALCIFILKQINDRIKERLQSCYRGEGTLDLAWLKVKDIPCSSALLTIDDNFCGLDMNAPLGVSDMVRGIPVFTEDRDRMTSVIAYVYKNHSLAFVGTKSGKLKKSFGTGPQGGITQEWIGVAGDPPGANIASQEQMLCVYLQCSSHKAISDQRVQPLLCCFLNVPGNSS

SEQ ID NO: 1091 - protein, 594 aa, Homo Sapiens
GPVLAVRAPGFGRSGGHSLSPEENEFAEEEPVLVLSPEEPGPGPAAVSCPRDCACSQEGVVDCGGIDLREFPGDLPEHTNHLSLQNNQLEKIYPEELSRLHRLETLNLQNNRLTSRGLPEKAFEHLTNLNYLYLANNKLTLAPRFLPNALISVDFAANYLTKIYGLTFGQKPNLRSVYLHNNKLADAGLPDNMFNGSSNVEVLILSSNFLRHVPKHLPPALYKLHLKNNKLEKIPPGAFSELSSLRELYLQNNYLTDEGLDNETFWKLSSLEYLDLSSNNLSRVPAGLPRSLVLLHLEKNAIRSVDANVLTPIRSLEYLLLHSNQLREQGIHPLAFQGLKRLHTVHLYNNALERVPSGLPRRVRTLMILHNQITGIGREDFATTYFLEELNLSYNRITSPQVHRDAFRKLRLLRSLDLSGNRLHTLPPGLPRNVHVLKVKRNELAALARGALAGMAQLRELYLTSNRLRSRALGPRAWVDLAHLQLLDIAGNQLTEIPEGLPESLEYLYLQNNKISAVPANAFDSTPNLKGIFLRFNKLAVGSVVDSAFRRLKHLQVLDIEGNLEFGDISKDRGRLGKEKEEEEEEEEEEEETR

SEQ ID NO: 1092 - protein, 486 aa, Homo Sapiens
LEDAAFPHLGESLQPLLRACPLRCSCPRVDTVDCDGLDLRVFPDNITRAAQHLSLQNNQLQELPYNELSRLSGLRTLNLHNNLISSEGLPDEAFESLTQLQHLCVAHNKLSVAPQFLPRSLRVADLAANQVMEIFPLTFGEKPALRSVYLHNNQLSNAGLPPDAFRGSEAIATLSLSNNQLSYLPPSLPPSLERLHLQNNLISKVPRGALSRQTQLRELYLQHNQLTDSGLDATTFSKLHSLEYLDLSHNQLTTVPAGLPRTLAILHLGRNRIRQVEAARLHGARGLRYLLLQHNQLGSSGLPAGALRPLRGLHTLHLYGNGLDRVPPALPRRLRALVLPHNHVAALGARDLVATPGLTELNLAYNRLASARVHHRAFRRLRALRSLDLAGNQLTRLPMGLPTGLRTLQLQRNQLRMLEPEPLAGLDQLRELSLAHNRLRVGDIGPGTWHELQALQVRHRLVSHTVPRAPPSPCLPCHVPNILVSW

SEQ ID NO: 1093 - protein, 70 aa, Homo Sapiens
AELRCMCIKTTSGIHPKNIQSLEVIGKGTHCNQVEVIATLKDGRKICLDPDAPRIKKIVQKKLAGDESAD

SEQ ID NO: 1094 - protein, 268 aa, Homo Sapiens
AKGGSLRESQGVCSKQTLVVPLHYNESYSQPVYKPYLTLCAGRRICSTYRTMYRVMWREVRREVQQTHAVCCQGWKKRHPGALTCEAICAKPCLNGGVCVRPDQCECAPGWGGKHCHVDVDECRTSITLCSHHCFNTAGSFTCGCPHDLVLGVDGRTCMEGSPEPPTSASILSVAVREAEKDERALKQEIHELRGRLERLEQWAGQAGAWVRAVLPVPPEELQPEQVAELWGRGDRIESLSDQVLLLEERLGACSCEDNSLGLGVNHR

SEQ ID NO: 1095 - protein, 362 aa, Homo Sapiens
QPTRRPRPGTGPGRRPRPRPRPTPSFPQPDEPAEPTDLPPPLPPGPPSIFPDCPRECYCPPDFPSALYCDSRNLRKVPVIPPRIHYLYLQNNFITELPVESFQNATGLRWINLDNNRIRKIDQRVLEKLPGLVFLYMEKNQLEEVPSALPRNLEQLRLSQNHISRIPPGVFSKLENLLLLDLQHNRLSDGVFKPDTFHGLKNLMQLNLAHNILRKMPPRVPTAIHQLYLDSNKIETIPNGYFKSFPNLAFIRLNYNKLTDRGLPKNSFNISNLLVLHLSHNRISSVPAINNRLEHLYLNNNSIEKINGTQICPNDLVAFHDFSSDLENVPHLRYLRLDGNYLKPPIPLDLMMCFRLLQSVVI

SEQ ID NO: 1096 - protein, 534 aa, Homo Sapiens
PCHTAARSECKRSHKFVPGAWLAGEGVDVTSLRRSGSFPVDTQRFLRPDGTCTLCENALQEGTLQRLPLALTNWRAQGSGCQRHVTRAKVSSTEAVARDAARSIRNDWKVGLDVTPKPTSNVHVSVAGSHSQAANFAAQKTHQDQYSFSTDTVECRFYSFHVVHTPPLHPDFKRALGDLPHHFNASTQPAYLRLISNYGTHFIRAVELGGRISALTALRTCELALEGLTDNEVEDCLTVEAQVNIGIHGSISAEAKACEEKKKKHKMTASFHQTYRERHSEVVGGHHTSINDLLFGIQAGPEQYSAWVNSLPGSPGLVDYTLEPLHVLLDSQDPRREALRRALSQYLTDRARWRDCSRPCPPGRQKSPRDPCQCVCHGSAVTTQDCCPRQRGLAQLEVTFIQAWGLWGDWFTATDAYVKLFFGGQELRTSTVWDNNNPIWSVRLDFGDVLLATGGPLRLQVWDQDSGRDDDLLGTCDQAPKSGSHEVRCNLNHGHLKFRYHARCLPHLGGGTCLDYVPQMLLGEPPGNRSGAVW

SEQ ID NO: 1097 - protein, 117 aa, Homo Sapiens
TCRYLLVRSLQTFSQAWFTCRRCYRGNLVSIHNFNINYRIQCSVSALNQGQVWIGGRITGSGRCRRFQWVDGSRWNFAYWAAHQPWSRGGHCVALCTRGGYWRRAHCLRRLPFICSY

SEQ ID NO: 1098 - protein, 208 aa, Homo Sapiens
LHLENDAPHLESLETQADLGQDLDSSKEQERDLALTEEVIQAEGEEVKASACQDNFEDEEAMESDPAALDKDFQCPREEDIVEVQGSPRCKTCRYLLVRTPKTFAEAQNVCSRCYGGNLVSIHDFNFNYRIQCCTSTVNQAQVWIGGNLRGWFLWKRFCWTDGSHWNFAYWSPGQPGNGQGSCVALCTKGGYWRRAQCDKQLPFVCSF

SEQ ID NO: 1099 - protein, 210 aa, Homo Sapiens
QLPPGKPEIFKCRSPNKETFTCWWRPGTDGGLPTNYSLTYHREGETLMHECPDYITGGPNSCHFGKQYTSMWRTYIMMVNATNQMGSSFSDELYVDVTYIVQPDPPLELAVEVKQPEDRKPYLWIKWSPPTLIDLKTGWFTLLYEIRLKPEKAAEWEIHFAGQQTEFKILSLHPGQKYLVQVRCKPDHGYWSAWSPATFIQIPSDFTMND

SEQ ID NO: 1100 - protein, 419 aa, Homo Sapiens
ANSFLEELRHSSLERECIEEICDFEEAKEIFQNVDDTLAFWSKHVDGDQCLVLPLEHPCASLCCGHGTCIDGIGSFSCDCRSGWEGRFCQREVSFLNCSLDNGGCTHYCLEEVGWRRCSCAPGYKLGDDLLQCHPAVKFPCGRPWKRMEKKRSHLKRDTEDQEDQVDPRLIDGKMTRRGDSPWQVVLLDSKKKLACGAVLIHPSWVLTAAHCMDESKKLLVRLGEYDLRRWEKWELDLDIKEVFVHPNYSKSTTDNDIALLHLAQPATLSQTIVPICLPDSGLAERELNQAGQETLVTGWGYHSSREKEAKRNRTFVLNFIKIPVVPHNECSEVMSNMVSENMLCAGILGDRQDACEGDSGGPMVASFHGTWFLVGLVSWGEGCGLLHNYGVYTKVSRYLDWIHGHIRDKEAPQKSWAP

SEQ ID NO: 1101 - protein, 193 aa, Homo Sapiens
SQDASDGLQRLHMLQISYFRDPYHVWYQGNASLGGHLTHVLEGPDTNTTIIQLQPLQEPESWARTQSGLQSYLLQFHGLVRLVHQERTLAFPLTIRCFLGCELPPEGSRAHVFFEVAVNGSSFVSFRPERALWQADTQVTSGVVTFTLQQLNAYNRTRYELREFLEDTCVQYVQKHISAENTKGSQTSRSYTS

SEQ ID NO: 1102 - protein, 635 aa, Homo Sapiens
ANSLLEETKQGNLERECIEELCNKEEAREVFENDPETDYFYPKYLVCLRSFQTGLFTAARQSTNAYPDLRSCVNAIPDQCSPLPCNEDGYMSCKDGKASFTCTCKPGWQGEKCEFDINECKDPSNINGGCSQICDNTPGSYHCSCKNGFVMLSNKKDCKDVDECSLKPSICGTAVCKNIPGDFECECPEGYRYNLKSKSCEDIDECSENMCAQLCVNYPGGYTCYCDGKKGFKLAQDQKSCEVVSVCLPLNLDTKYELLYLAEQFAGVVLYLKFRLPEISRFSAEFDFRTYDSEGVILYAESIDHSAWLLIALRGGKIEVQLKNEHTSKITTGGDVINNGLWNMVSVEELEHSISIKIAKEAVMDINKPGPLFKPENGLLETKVYFAGFPRKVESELIKPINPRLDGCIRSWNLMKQGASGIKEIIQEKQNKHCLVTVEKGSYYPGSGIAQFHIDYNNVSSAEGWHVNVTLNIRPSTGTGVMLALVSGNNTVPFAVSLVDSTSEKSQDILLSVENTVIYRIQALSLCSDQQSHLEFRVNRNNLELSTPLKIETISHEDLQRQLAVLDKAMKAKVATYLGGLPDVPFSATPVNAFYNGCMEVNINGVQLDLDEAISKHNDIRAHSCPSVWKKTKNS

SEQ ID NO: 1103 - protein, 360 aa, Homo Sapiens
AGSYLLEELFEGNLEKECYEEICVYEEAREVFENEVVTDEFWRRYKGGSPCISQPCLHNGSCQDSIWGYTCTCSPGYEGSNCELAKNECHPERTDGCQHFCLPGQESYTCSCAQGYRLGEDHKQCVPHDQCACGVLTSEKRAPDLQDLPWQVKLTNSEGKDFCGGVIIRENFVLTTAKCSLLHRNITVKTYFNRTSQDPLMIKITHVHVHMRYDADAGENDLSLLELEWPIQCPGAGLPVCTPEKDFAEHLLIPRTRGLLSGWARNGTDLGNSLTTRPVTLVEGEECGQVLNVTVTTRTYCERSSVAAMHWMDGSVVTREHRGSWFLTGVLGSQPVGGQAHMVLVTKVSRYSLWFKQIMN

SEQ ID NO: 1104 - protein, 914 aa, Homo Sapiens
FSELSFVKEPQDVTVTRKDPVVLDCQAHGEVPIKVTWLKNGAKMSENKRIEVLSNGSLYISEVEGRRGEQSDEGFYQCLAMNKYGAILSQKAHLALSTISAFEVQPISTEVHEGGVARFACKISSHPPAVITWEFNRTTLPMTMDRITALPTGVLQIYDVSQRDSGNYRCIAATVAHRRKSMEASLTVIPAKESKSFHTPTIIAGPQNITTSLHQTVVLECMATGNPKPIISWSRLDHKSIDVFNTRVLGNGNLMISDVRLQHAGVYVCRATTPGTRNFTVAMATLTVLAPPSFVEWPESLTRPRAGTARFVCQAEGIPSPKMSWLKNGRKIHSNGRIKMYNSKLVINQIIPEDDAIYQCMAENSQGSILSRARLTVVMSEDRPSAPYNVHAETMSSSAILLAWERPLYNSDKVIAYSVHYMKAEGLNNEEYQVVIGNDTTHYIIDDLEPASNYTFYIVAYMPMGASQMSDHVTQNTLEDVPLRPPEISLTSRSPTDILISWLPIPAKYRRGQVVLYRLSFRLSTENSIQVLELPGTTHEYLLEGLKPDSVYLVRITAATRVGLGESSVWTSHRTPKATSVKAPKSPELHLEPLNCTTISVRWQQDVEDTAAIQGYKLYYKEEGQQENGPIFLDTKDLLYTLSGLDPRRKYHVRLLAYNNIDDGYQADQTVSTPGCVSVRDRMVPPPPPPHHLYAKANTSSSIFLHWRRPAFTAAQIINYTIRCNPVGLQNASLVLYLQTSETHMLVQGLEPNTKYEFAVRLHVDQLSSPWSPVVYHSTLPEAPAGPPVGVKVTLIEDDTALVSWKPPDGPETVVTRYTILYASRKAWIAGEWQVLHREGAITMALLENLVAGNVYIVKISASNEVGEGPFSNSVELAVLPKETSESNQRPKRLDSADAKVYSGYYHLDQKSMT

SEQ ID NO: 1105 - protein, 387 aa, Homo Sapiens
LLCQFGTVQHVWKVSDLPRQWTPKNTSCDSGLGCQDTLMLIESGPQVSLVLSKGCTEAKDQEPRVTEHRMGPGLSLISYTFVCRQEDFCNNLVNSLPLWAPQPPADPGSLRCPVCLSMEGCLEGTTEEICPKGTTHCYDGLLRLRGGGIFSNLRVQGCMPQPGCNLLNGTQEIGPVGMTENCNRKDFLTCHRGTTIMTHGNLAQEPTDWTTSNTEMCEVGQVCQETLLLIDVGLTSTLVGTKGCSTVGAQNSQKTTIHSAPPGVLVASYTHFCSSDLCNSASSSSVLLNSLPPQAAPVPGDRQCPTCVQPLGTCSSGSPRMTCPRGATHCYDGYIHLSGGGLSTKMSIQGCVAQPSSFLLNHTRQIGIFSAREKRDVQPPASQHEGG

SEQ ID NO: 1106 - protein, 75 aa, Homo Sapiens
LLCYSCKAQVSNEDCLQVENCTQLGEQCWTARIRAVGLLTVISKGCSLNCVDDSQDYYVGKKNITCCDTDLCNAS

SEQ ID NO: 1107 - protein, 385 aa, Homo Sapiens
QVTIEAEPTKVSEGKDVLLLVHNLPQNLTGYIWYKGQMRDLYHYITSYVVDGEIIIYGPAYSGRETAYSNASLLIQNVTREDAGSYTLHIIKGDDGTRGVTGRFTFTLHLETPKPSISSSNLNPRETMEAVSLTCDPETPDASYLWWMNGQSLPMTHSLKLSETNRTLFLLGVTKYTAGPYECEIRNPVSASRSDPVTLNLLPKLPKPYITINNLNPRENKDVLNFTCEPKSENYTYIWWLNGQSLPVSPRVKRPIENRILILPSVTRNETGPYQCEIRDRYGGIRSDPVTLNVLYGPDLPRIYPSFTYYRSGEVLYLSCSADSNPPAQYSWTINEKFQLPGQKLFIRHITTKHSGLYVCSVRNSATGKESSKSMTVEVSDWTVP

SEQ ID NO: 1108 - protein, 392 aa, Homo Sapiens
QVTIEAEPTKVSEGKDVLLLVHNLPQNLTGYIWYKGQMRDLYHYITSYVVDGEIIIYGPAYSGRETAYSNASLLIQNVTREDAGSYTLHIIKGDDGTRGVTGRFTFTLHLETPKPSISSSNLNPRETMEAVSLTCDPETPDASYLWWMNGQSLPMTHSLKLSETNRTLFLLGVTKYTAGPYECEIRNPVSASRSDPVTLNLLPKLPKPYITINNLNPRENKDVLNFTCEPKSENYTYIWWLNGQSLPVSPRVKRPIENRILILPSVTRNETGPYQCEIRDRYGGIRSDPVTLNVLYGPDLPRIYPSFTYYRSGEVLYLSCSADSNPPAQYSWTINEKFQLPGQKLFIRHITTKHSGLYVCSVRNSATGKESSKSMTVEVSGKWIPASLAIGF

SEQ ID NO: 1109 - protein, 309 aa, Homo Sapiens
QVTIEAQPPKVSEGKDVLLLVHNLPQNLTGYIWYKGQIRDLYHYITSYVVDGQIIIYGPAYSGRETAYSNASLLIQNVTREDAGSYTLHIIKRGDGTRGVTGYFTFTLYLETPKPSISSSNLNPREAMETVILTCDPETPDTSYQWWMNGQSLPMTHRFQLSETNRTLFLFGVTKYTAGPYECEIRNSGSASRSDPVTLNLLHGPDLPRIHPSYTNYRSGDNLYLSCFANSNPPAQYSWTINGKFQQSGQNLFIPQITTKHSGLYVCSVRNSATGEESSTSLTVKVSASTRIGLLPLLNPTWIHPAFLY

SEQ ID NO: 1110 - protein, 301 aa, Homo Sapiens
QVTIEAQPPKVSEGKDVLLLVHNLPQNLTGYIWYKGQIRDLYHYITSYVVDGQIIIYGPAYSGRETAYSNASLLIQNVTREDAGSYTLHIIKRGDGTRGVTGYFTFTLYLETPKPSISSSNLNPREAMETVILTCDPETPDTSYQWWMNGQSLPMTHRFQLSETNRTLFLFGVTKYTAGPYECEIRNSGSASRSDPVTLNLLHGPDLPRIHPSYTNYRSGDNLYLSCFANSNPPAQYSWTINGKFQQSGQNLFIPQITTKHSGLYVCSVRNSATGEESSTSLTVKVSASTRIGLLPLLNPT

SEQ ID NO: 1111 - protein, 385 aa, Homo Sapiens
QVTIEAEPTKVSEGKDVLLLVHNLPQNLTGYIWYKGQMRDLYHYITSYVVDGEIIIYGPAYGGRETAYSNASLLIQNVTREDAGSYTLHIIKGDDGTRGVTGRFTFTLHLETPKPSISSSNLNPRETMEAVSLTCDPETPDASYLWWMNGQSLPMTHSLKLSETNRTLFLLGVTKYTAGPYECEIRNPVSASRSDPVTLNLLPKLSKPYITINNLNPRENKDVLTFTCEPKSENYTYIWWLNGQSLPVSPRVKRPIENRILILPNVTRNETGPYQCEIRDRYGGIRSDPVTLNVLYGPDLPSIYPSFTYYRSGENLYLSCFAESNPRAQYSWTINGKFQLSGQKLSIPQITTKHSGLYACSVRNSATGKESSKSITVKVSDWILP

SEQ ID NO: 1112 - protein, 385 aa, Homo Sapiens; identical to SEQ ID NO: 1111

SEQ ID NO: 1113 - protein, 301 aa, Homo Sapiens
QVTIEALPPKVSEGKDVLLLVHNLPQNLAGYIWYKGQLMDLYHYITSYVVDGQINIYGPAYTGRETVYSNASLLIQNVTREDAGSYTLHIIKRGDRTRGVTGYFTFNLYLKLPKPYITINNSKPRENKDVLAFTCEPKSENYTYIWWLNGQSLPVSPRVKQPIENRILILPSVTRNETGPYECEIRDRDGGMHSDPVTLNVLYGPDLPSIYPSFTYYRSGENLYLSCFAESNPPAEYFWTINGKFQQSGQKLSIPQITTKHRGLYTCSVRNSATGKESSKSMTVEVSAPSGIGRLPLLNPI

SEQ ID NO: 1114 - protein, 390 aa, Homo Sapiens
QVIIEAKPPKVSEGKDVLLLVHNLPQNLTGYIWYKGQMTDLYHYITSYVVHGQIIYGPAYSGRETVYSNASLLIQNVTQEDAGSYTLHIIKRGDGTGGVTGYFTVTLYSETPKPSISSSNLNPREVMEAVRLICDPETPDASYLWLLNGQNLPMTHRLQLSKTNRTLYLFGVTKYIAGPYECEIRNPVSASRSDPVTLNLLPKLPMPYITINNLNPREKKDVLAFTCEPKSRNYTYIWWLNGQSLPVSPRVKRPIENRILILPSVTRNETGPYQCEIRDRYGGIRSNPVTLNVLYGPDLPRIYPSFTYYRSGENLDLSCFADSNPPAEYSWTINGKFQLSGQKLFIPQITTNHSGLYACSVRNSATGKEISKSMIVKVSGPCHGNQTESH

SEQ ID NO: 1115 - protein, 392 aa, Homo Sapiens
QVTIEAQPTKVSEGKDVLLLVHNLPQNLTGYIWYKGQIRDLYHYITSYVVDGQIIIYGPAYSGRETIYSNASLLIQNVTQEDAGSYTLHIIMGGDENRGVTGHFTFTLYLETPKPSISSSKLNPREAMEAVSLTCDPETPDASYLWWMNGQSLPMSHRLQLSETNRTLFLLGVTKYTAGPYECEIRNPVSASRSDPFTLNLLPKLPKPYITINNLKPRENKDVLNFTCEPKSENYTYIWWLNGQSLPVSPRVKRPIENRILILPSVTRNETGPYQCEIRDQYGGIRSYPVTLNVLYGPDLPRIYPSFTYYRSGEVLYLSCSADSNPPAQYSWTINGKFQLSGQKLFIPQITTKHSGLYACSVRNSATGKESSKSMTVKVSGKRIPVSLAIGI

SEQ ID NO: 1116 - protein, 392 aa, Homo Sapiens
EVTIEAQPPKVSEGKDVLLLVHNLPQNLPGYFWYKGEMTDLYHYIISYIVDGKIIIYGPAYSGRETVYSNASLLIQNVTRKDAGTYTLHIIKRGDETREEIRHFTFTLYLETPKPYISSSNLNPREAMEAVRLICDPETLDASYLWWMNGQSLPVTHRLQLSKTNRTLYLFGVTKYIAGPYECEIRNPVSASRSDPVTLNLLPKLPIPYITINNLNPRENKDVLAFTCEPKSENYTYIWWLNGQSLPVSPGVKRPIENRILILPSVTRNETGPYQCEIQDRYGGLRSNPVILNVLYGPDLPRIYPSFTYYRSGENLDLSCFTESNPPAEYFWTINGKFQQSGQKLFIPQITRNHSGLYACSVHNSATGKEISKSMTVKVSGPCHGDLTESQS

SEQ ID NO: 1117 - protein, 135 aa, Homo Sapiens
WGPDARGVPVADGEFSSEQVAKAGGTWLGTHRPLARLRRALSGPCQLWSLTLSVAELGLGYASEEKVIFRYCAGSCPRGARTQHGLALARLQGQGRAHGGPCCRPTRYTDVAFLDDRHRWQRLPQLSAAACGCGG

SEQ ID NO: 1118 - protein, 576 aa, Homo Sapiens
ADPGAPTPVNPCCYYPCQHQGICVRFGLDRYQCDCTRTGYSGPNCTIPGLWTWLRNSLRPSPSFTHFLLTHGRWFWEFVNATFIREMLMRLVLTVRSNLIPSPPTYNSAHDYISWESFSNVSYYTRILPSVPKDCPTPMGTKGKKQLPDAQLLARRFLLRRKFIPDPQGTNLMFAFFAQHFTHQFFKTSGKMGPGFTKALGHGVDLGHIYGDNLERQYQLRLFKDGKLKYQVLDGEMYPPSVEEAPVLMHYPRGIPPQSQMAVGQEVFGLLPGLMLYATLWLREHNRVCDLLKAEHPTWGDEQLFQTTRLILIGETIKIVIEEYVQQLSGYFLQLKFDPELLFGVQFQYRNRIAMEFNHLYHWHPLMPDSFKVGSQEYSYEQFLFNTSMLVDYGVEALVDAFSRQIAGRIGGGRNMDHHILHVAVDVIRESREMRLQPFNEYRKRFGMKPYTSFQELVGEKEMAAELEELYGDIDALEFYPGLLLEKCHPNSIFGESMIEIGAPFSLKGLLGNPICSPEYWKPSTFGGEVGFNIVKTATLKKLVCLNTKTCPYVSFRVPDASQDDGPAVERPSTEL

SEQ ID NO: 1119 - protein, 587 aa, Homo Sapiens
ANPCCSHPCQNRGVCMSVGFDQYKCDCTRTGFYGENCSTPEFLTRIKLFLKPTPNTVHYILTHFKGFWNVVNNIPFLRNAIMSYVLTSRSHLIDSPPTYNADYGYKSWEAFSNLSYYTRALPPVPDDCPTPLGVKGKKQLPDSNEIVEKLLLRRKFIPDPQGSNMMFAFFAQHFTHQFFKTDHKRGPAFTNGLGHGVDLNHIYGETLARQRKLRLFKDGKMKYQIIDGEMYPPTVKDTQAEMIYPPQVPEHLRFAVGQEVFGLVPGLMMYATIWLREHNRVCDVLKQEHPEWGDEQLFQTSRLILIGETIKIVIEDYVQHLSGYHFKLKFDPELLFNKQFQYQNRIAAEFNTLYHWHPLLPDTFQIHDQKYNYQQFIYNNSILLEHGITQFVESFTRQIAGRVAGGRNVPPAVQKVSQASIDQSRQMKYQSFNEYRKRFMLKPYESFEELTGEKEMSAELEALYGDIDAVELYPALLVEKPRPDAIFGETMVEVGAPFSLKGLMGNVICSPAYWKPSTFGGEVGFQIINTASIQSLICNNVKGCPFTSFSVPDPELIKTVTINASSSRSGLDDINPTVLLKERSTEL

SEQ ID NO: 1120 - protein, 674 aa, Homo Sapiens
AIVFIKQPSSQDALQGRRALLRCEVEAPGPVHVYWLLDGAPVQDTERRFAQGSSLSFAAVDRLQDSGTFQCVARDDVTGEEARSANASFNIKWIEAGPVVLKHPASEAEIQPQTQVTLRCHIDGHPRPTYQWFRDGTPLSDGQSNHTVSSKERNLTLRPAGPEHSGLYSCCAHSAFGQACSSQNFTLSIADESFARVVLAPQDVVVARYEEAMFHCQFSAQPPPSLQWLFEDETPITNRSRPPHLRRATVFANGSLLLTQVRPRNAGIYRCIGQGQRGPPIILEATLHLAEIEDMPLFEPRVFTAGSEERVTCLPPKGLPEPSVWWEHAGVRLPTHGRVYQKGHELVLANIAESDAGVYTCHAANLAGQRRQDVNITVATVPSWLKKPQDSQLEEGKPGYLDCLTQATPKPTVVWYRNQMLISEDSRFEVFKNGTLRINSVEVYDGTWYRCMSSTPAGSIEAQARVQVLEKLKFTPPPQPQQCMEFDKEATVPCSATGREKPTIKWERADGSSLPEWVTDNAGTLHFARVTRDDAGNYTCIASNGPQGQIRAHVQLTVAVFITFKVEPERTTVYQGHTALLQCEAQGDPKPLIQWKGKDRILDPTKLGPRMHIFQNGSLVIHDVAPEDSGRYTCIAGNSCNIKHTEAPLYVVDKPVPEESEGPGSPPPYKMIQT

SEQ ID NO: 1121 - protein, 168 aa, Homo Sapiens
FHVQQTEMSQTVSTGESIILSCSVPDTLPNGPVLWFKGTGPNRKLIYNFKQGNFPRVKEIGDTTKPGNTDFSTRIREISLADAGTYYCVKFIKGRAIKEYQSGRGTQVFVTEQNPRPPKNRPAGRAGSRAHHDAHTCLSALPERNSTNYFVQPCCCLRLLGLTGLLSK

SEQ ID NO: 1122 - protein, 1599 aa, Homo Sapiens
EPERCNFTLAESKASSHSVSIQWRILGSPCNFSLIYSSDTLGAALCPTFRIDNTTYGCNLQDLQAGTIYNFRIISLDEERTVVLQTDPLPPARFGVSKEKTTSTSLHVWWTPSSGKVTSYEVQLFDENNQKIQGVQIQESTSWNEYTFFNLTAGSKYNIAITAVSGGKRSFSVYTNGSTVPSPVKDIGISTKANSLLISWSHGSGNVERYRLMLMDKGILVHGGVVDKHATSYAFHGLTPGYLYNLTVMTEAAGLQNYRWKLVRTAPMEVSNLKVTNDGSLTSLKVKWQRPPGNVDSYNITLSHKGTIKESRVLAPWITETHFKELVPGRLYQVTVSCVSGELSAQKMAVGRTFPDKVANLEANNNGRMRSLVVSWSPPAGDWEQYRILLFNDSVVLLNITVGKEETQYVMDDTGLVPGRQYEVEVIVESGNLKNSERCQGRTVPLAVLQLRVKHANETSLSIMWQTPVAEWEKYIISLADRDLLLIHKSLSKDAKEFTFTDLVPGRKYMATVTSISGDLKNSSSVKGRTVPAQVTDLHVANQGMTSSLFTNWTQAQGDVEFYQVLLIHENVVIKNESISSETSRYSFHSLKSGSLYSVVVTTVSGGISSRQVVVEGRTVPSSVSGVTVNNSGRNDYLSVSWLLAPGDVDNYEVTLSHDGKVVQSLVIAKSVRECSFSSLTPGRLYTVTITTRSGKYENHSFSQERTVPDKVQGVSVSNSARSDYLRVSWVHATGDFDHYEVTIKNKNNFIQTKSIPKSENECVFVQLVPGRLYSVTVTTKSGQYEANEQGNGRTIPEPVKDLTLRNRSTEDLHVTWSGANGDVDQYEIQLLFNDMKVFPPFHLVNTATEYRFTSLTPGRQYKILVLTISGDVQQSAFIEGFTVPSAVKNIHISPNGATDSLTVNWTPGGGDVDSYTVSAFRHSQKVDSQTIPKHVFEHTFHRLEAGEQYQIMIASVSGSLKNQINVVGRTVPASVQGVIADNAYSSYSLIVSWQKAAGVAERYDILLLTENGILLRNTSEPATTKQHKFEDLTPGKKYKIQILTVSGGLFSKEAQTEGRTVPAAVTDLRITENSTRHLSFRWTASEGELSWYNIFLYNPDGNLQERAQVDPLVQSFSFQNLLQGRMYKMVIVTHSGELSNESFIFGRTVPASVSHLRGSNRNTTDSLWFNWSPASGDFDFYELILYNPNGTKKENWKDKDLTEWRFQGLVPGRKYVLWVVTHSGDLSNKVTAESRTAPSPPSLMSFADIANTSLAITWKGPPDWTDYNDFELQWLPRDALTVFNPYNNRKSEGRIVYGLRPGRSYQFNVKTVSGDSWKTYSKPIFGSVRTKPDKIQNLHCRPQNSTAIACSWIPPDSDFDGYSIECRKMDTQEVEFSRKLEKEKSLLNIMMLVPHKRYLVSIKVQSAGMTSEVVEDSTITMIDRPPPPPPHIRVNEKDVLISKSSINFTVNCSWFSDTNGAVKYFTVVVREADGSDELKPEQQHPLPSYLEYRHNASIRVYQTNYFASKCAENPNSNSKSFNIKLGAEMESLGGKCDPTQQKFCDGPLKPHTAYRISIRAFTQLFDEDLKEFTKPLYSDTFFSLPITTESEPLFGAIE

SEQ ID NO: 1123 - protein, 552 aa, Homo Sapiens
QSPTPSPTGLTTAKMPSVPLSSDPLPTHTTAFSPASTFERENDFSETTTSLSPDNTSTQVSPDSLDNASAFNTTGVSSVQTPHLPTHADSQTPSAGTDTQTFSGSAANAKLNPTPGSNAISDVPGERSTASTFPTDPVSPLTTTLSLAHHSSAALPARTSNTTITANTSDAYLNASETTTLSPSGSAVISTTTIATTPSKPTCDEKYANITVDYLYNKETKLFTAKLNVNENVECGNNTCTNNEVHNLTECKNASVSISHNSCTAPDKTLILDVPPGVEKFQLHDCTQVEKADTTICLKWKNIETFTCDTQNITYRFQCGNMIFDNKEIKLENLEPEHEYKCDSEILYNNHKFTNASKIIKTDFGSPGEPQIIFCRSEAAHQGVITWNPPQRSFHNFTLCYIKETEKDCLNLDKNLIKYDLQNLKPYTKYVLSLHAYIIAKVQRNGSAAMCHFTTKSAPPSQVWNMTVSMTSDNSMHVKCRPPRDRNGPHERYHLEVEAGNTLVRNESHKNCDFRVKDLQYSTDYTFKAYFHNGDYPGEPFILHHSTSYNSK

SEQ ID NO: 1124 - protein, 834 aa, Homo Sapiens
ETPPRFTRTPVDQTGVSGGVASFICQATGDPRPKIVWNKKGKKVSNQRFEVIEFDDGSGSVLRIQPLRTPRDEAIYECVASNNVGEISVSTRLTVLREDQIPRGFPTIDMGPQLKVVERTRTATMLCAASGNPDPEITWFKDFLPVDTSNNNGRIKQLRSESIGGTPIRGALQIEQSEESDQGKYECVATNSAGTRYSAPANLYVRELREVRRVPPRFSIPPTNHEIMPGGSVNITCVAVGSPMPYVKWMLGAEDLTPEDDMPIGRNVLELNDVRQSANYTCVAMSTLGVIEAIAQITVKALPKPPGTPVVTESTATSITLTWDSGNPEPVSYYIIQHKPKNSEELYKEIDGVATTRYSVAGLSPYSDYEFRVVAVNNIGRGPPSEPVLTQTSEQAPSSAPRDVQARMLSSTTILVQWKEPEEPNGQIQGYRVYYTMDPTQHVNNWMKHNVADSQITTIGNLVPQKTYSVKVLAFTSIGDGPLSSDIQVITQTGVPGQPLNFKAEPESETSILLSWTPPRSDTIANYELVYKDGEHGEEQRITIEPGTSYRLQGLKPNSLYYFRLAARSPQGLGASTAEISARTMQSMFAKNFHVKAVMKTSVLLSWEIPENYNSAMPFKILYDDGKMVEEVDGRATQKLIVNLKPEKSYSFVLTNRGNSAGGLQHRVTAKTAPDVLRTKPAFIGKTNLDGMITVQLPEVPANENIKGYYIIIVPLKKSRGKFIKPWESPDEMELDELLKEISRKRRSIRYGREVELKPYIAAHFDVLPTEFTLGDDKHYGGFTNKQLQSGQEYVFFVLAVMEHAESKMYATSPYSDPVVSMDLDPQPITDEEE

SEQ ID NO: 1125 - protein, 1225 aa, Homo Sapiens
DSKPVFIKVPEDQTGLSGGVASFVCQATGEPKPRITWMKKGKKVSSQRFEVIEFDDGAGSVLRIQPLRVQRDEAIYECTATNSLGEINTSAKLSVLEEEQLPPGFPSIDMGPQLKVVEKARTATMLCAAGGNPDPEISWFKDFLPVDPATSNGRIKQLRSGALQIESSEESDQGKYECVATNSAGTRYSAPANLYVRVRRVAPRFSIPPSSQEVMPGGSVNLTCVAVGAPMPYVKWMMGAEELTKEDEMPVGRNVLELSNVVRSANYTCVAISSLGMIEATAQVTVKALPKPPIDLVVTETTATSVTLTWDSGNSEPVTYYGIQYRAAGTEGPFQEVDGVATTRYSIGGLSPFSEYAFRVLAVNSIGRGPPSEAVRARTGEQAPSSPPRRVQARMLSASTMLVQWEPPEEPNGLVRGYRVYYTPDSRRPPNAWHKHNTDAGLLTTVGSLLPGITYSLRVLAFTAVGDGPPSPTIQVKTQQGVPAQPADFQAEVESDTRIQLSWLLPPQERIIMYELVYWAAEDEDQQHKVTFDPTSSYTLEDLKPDTLYRFQLAARSDMGVGVFTPTIEARTAQSTPSAPPQKVMCVSMGSTTVRVSWVPPPADSRNGVITQYSVAYEAVDGEDRGRHVVDGISREHSSWDLVGLEKWTEYRVWVRAHTDVGPGPESSPVLVRTDEDVPSGPPRKVEVEPLNSTAVHVYWKLPVPSKQHGQIRGYQVTYVRLENGEPRGLPIIQDVMLAEAQETTISGLTPETTYSVTVAAYTTKGDGARSKPKIVTTTGAVPGRPTMMISTTAMNTALLQWHPPKELPGELLGYRLQYCRADEARPNTIDFGKDDQHFTVTGLHKGTTYIFRLAAKNRAGLGEEFEKEIRTPEDLPSGFPQNLHVTGLTTSTTELAWDPPVLAERNGRIISYTVVFRDINSQQELQNITTDTRFTLTGLKPDTTYDIKVRAWTSKGSGPLSPSIQSRTMPVEQVFAKNFRVAAAMKTSVLLSWEVPDSYKSAVPFKILYNGQSVEVDGHSMRKLIADLQPNTEYSFVLMNRGSSAGGLQHLVSIRTAPDLLPHKPLPASAYIEDGRFDLSMPHVQDPSLVRWFYIVVVPIDRVGGSMLTPRWSTPEELELDELLEAIEQGGEEQRRRRRQAERLKPYVAAQLDVLPETFTLGDKKNYRGFYNRPLSPDLSYQCFVLASLKEPMDQKRYASSPYSDEIVVQVTPAQQQEEPEMLW

SEQ ID NO: 1126 - protein, 717 aa, Homo Sapiens
VLHYVVCFPALTEGYVGALHENRHGSAVQIRRRKASGDPYWAYSGAYGPEHWVTSSVSCGGRHQSPIDILDQHARVGEEYQELQLDGFDNESSNKTWMKNTGKTVAILLKDDYFVSGAGLPGRFKAEKVEFHWGHSNGSAGSEHSINGRRFPVEMQIFFYNPDDFDSFQTAISENRIIGAMAIFFQVSPRDNSALDPIIHGLKGVVHHEKETFLDPFVLRDLLPASLGSYYRYTGSLTTPPCSEIVEWIVFRRPVPISYHQLEAFYSIFTTEQQDHVKSVEYLRNNFRPQQRLHDRVVSKSAVRDSWNHDMTDFLENPLGTEASKVCSSPPIHMKVQPLNQTALQVSWSQPETIYHPPIMNYMISYSWTKNEDEKEKTFTKDSDKDLKATISHVSPDSLYLFRVQAVCRNDMRSDFSQTMLFQANTTRIFQGTRIVKTGVPTASPASSADMAPISSGSSTWTSSGIPFSFVSMATGMGPSSSGSQATVASVVTSTLLAGLGFGGGGISSFPSTVWPTRLPTAASASKQAARPVLATTEALASPGPDGDSSPTKDGEGTEEGEKDEKSESEDGEREHEEDGEKDSEKKEKSGVTHAAEERNQTEPSPTPSSPNRTAEGGHQTIPGHEQDHTAVPTDQTGGRRDAGPGLDPDMVTSTQVPPTATEEQYAGSDPKRPEMPSKKPMSRGDRFSEDSRFITVNPAEKNTSGMISRPAPGRME

SEQ ID NO: 1127 - protein, 727 aa, Homo Sapiens
PAPNPGRNLTVETQTTSSISLSWEVPDGLDSQNSNYWVQCTGDGGTTETRNTTATNVTVDGLGPGSLYTCSVWVEKDGVNSSVGTVTTATAPNPVRNLRVEAQTNSSIALTWEVPDGPDPQNSTYGVEYTGDGGRAGTRSTAHTNITVDGLEPGCLYAFSMWVGKNGINSSRETRNATTAHNPVRNLRVEAQTTSSISLSWEVPDGTDPQNSTYCVQCTGDGGRTETRNTTDTRVTVDGLGPGSLYTCSVWVEKDGVNSSVEIVTSATAPNPVRNLTVEAQTNSSIALTWEVPDGPDPQNSTYGVEYTGDGGRAGTRSTAYTNITVDRLEPGCLYVFSVWVGKNGINSSRETRNATTAPNPVRNLHMETQTNSSIALCWEVPDGPYPQDYTYWVEYTGDGGGTETRNTTNTSVTAERLEPGTLYTFSVWAEKNGARGSRQNVSISTVPNAVTSLSKQDWTNSTIALRWTAPQGPGQSSYSYWVSWVREGMTDPRTQSTSGTDITLKELEAGSLYHLTVWAERNEVRGYNSTLTAATAPNEVTDLQNETQTKNSVMLWWKAPGDPHSQLYVYWVQWASKGHPRRGQDPQANWVNQTSRTNETWYKVEALEPGTLYNFTVWAERNDVASSTQSLCASTYPDTVTITSCVSTSAGYGVNLIWSCPQGGYEAFELEVGGQRGSQDRSSCGEAVSVLGLGPARSYPATITTIWDGMKVVSHSVVCHTESAGV

SEQ ID NO: 1128 - protein, 504 aa, Homo Sapiens
AGGTPSPIPDPSVATVATGENGITQISSTAESFHKQNGTGTPQVETNTSEDGESSGANDSLRTPEQGSNGTDGASQKTPSSTGPSPVFDIKAVSISPTNVILTWKSNDTAASEYKYVVKHKMENEKTITVVHQPWCNITGLRPATSYVFSITPGIGNETWGDPRVIKVITEPIPVSDLRVALTGVRKAALSWSNGNGTASCRVLLESIGSHEELTQDSRLQVNISGLKPGVQYNINPYLLQSNKTKGDPLGTEGGLDASNTERSRAGSPTAPVHDESLVGPVDPSSGQQSRDTEVLLVGLEPGTRYNATVYSQAANGTEGQPQAIEFRTNAIQVFDVTAVNISATSLTLIWKVSDNESSSNYTYKIHVAGETDSSNLNVSEPRAVIPGLRSSTFYNITVCPVLGDIEGTPGFLQVHTPPVPVSDFRVTVVSTTEIGLAWSSHDAESFQMHITQEGAGNSRVEITTNQSIIIGGLFPGTKYCFEIVPKGPNGTEGASRTVCNRTG

SEQ ID NO: 1129 - protein, 727 aa, Homo Sapiens
AQGQFSAGGCTFDDGPGACDYHQDLYDDFEWVHVSAQEPHYLPPEMPQGSYMIVDSSDHDPGEKARLQLPTMKENDTHCIDFSYLLYSQKGLNPGTLNILVRVNKGPLANPIWNVTGFTGRDWLRAELAVSTFWPNEYQVIFEAEVSGGRSGYIAIDDIQVLSYPCDKSPHFLRLGDVEVNAGQNATFQCIATGRDAVHNKLWLQRRNGEDIPVAQTKNINHRRFAASFRLQEVTKTDQDLYRCVTQSERGSGVSNFAQLIVREPPRPIAPPQLLGVGPTYLLIQLNANSIIGDGPIILKEVEYRMTSGSWTETHAVNAPTYKLWHLDPDTEYEIRVLLTRPGEGGTGLPGPPLITRTKCAEPMRTPKTLKIAEIQARRIAVDWESLGYNITRCHTFNVTICYHYFRGHNESKADCLDMDPKAPQHVVNHLPPYTNVSLKMILTNPEGRKESEETIIQTDEDVPGPVPVKSLQGTSFENKIFLNWKEPLDPNGIITQYEISYSSIRSFDPAVPVAGPPQTVSNLWNSTHHVFMHLHPGTTYQFFIRASTVKGFGPATAINVTTNISAPTLPDYEGVDASLNETATTITVLLRPAQAKGAPISAYQIVVEELHPHRTKREAGAMECYQVPVTYQNAMSGGAPYYFAAELPPGNLPEPAPFTVGDNRTYQGFWNPPLAPRKGYNIYFQAMSSVEKETKTQCVRIATKAAATEEPEVIPDPAKQTDRVVK

SEQ ID NO: 1130 - protein, 512 aa, Homo Sapiens
VSAHGCLFDRRLCSHLEVCIQDGLFGQCQVGVGQARPLLQVTSPVLQRLQGVLRQLMSQGLSWHDDLTQYVISQEMERIPRLRPPEPRPRDRSGLAPKRPGPAGELLLQDIPTGSAPAAQHRLPQPPVGKGGAGASSSLSPLQAELLPPLLEHLLLPPQPPHPSLSYEPALLQPYLFHQFGSRDGSRVSEGSPGMVSVGPLPKAEAPALFSRTASKGIFGDHPGHSYGDLPGPSPAQLFQDSGLLYLAQELPAPSRARVPRLPEQGSSSRAEDSPEGYEKEGLGDRGEKPASPAVQPDAALQRLAAVLAGYGVELRQLTPEQLSTLLTLLQLLPKGAGRNPGGVVNVGADIKKTMEGPVEGRDTAELPARTSPMPGHPTASPTSSEVQQVPSPVSSEPPKAARPPVTPVLLEKKSPLGQSQPTVAGQPSARPAAEEYGYIVTDQNVVGPALTFRIRHNEQNLSLADVTQQAGLVKSELEAQTGLQILQTGVGQREEAAAVLPQTAHSTSPMR

SEQ ID NO: 1131 - protein, 793 aa, Homo Sapiens
FHVTVQDDNNIVVSLEASDVISPASVYVVKITGESKNYFFEFEEFNSTLPPPVIFKASYHGLYYIITLVVVNGNVVTKPSRSITVLTKPLPVTSVSIYDYKPSPETGVLFEIHYPEKYNVFTRVNISYWEGKDFRTMLYKDFFKGKTVFNHWLPGMCYSNITFQLVSEATFNKSTLVEYSGVSHEPKQHRTAPYPPQNISVRIVNLNKNNWEEQSGNFPEESFMRSQDTIGKEKLFHFTEETPEIPSGNISSGWPDFNSSDYETTSQPYWWDSASAAPESEDEFVSVLPMEYENNSTLSETEKSTSGSFSFFPVQMILTWLPPKPPTAFDGFHIHIEREENFTEYLMVDEEAHEFVAELKEPGKYKLSVTTFSSSGSCETRKSQSAKSLSFYISPSGEWIEELTEKPQHVSVHVLSSTTALMSWTSSQENYNSTIVSVVSLTCQKQKESQRLEKQYCTQVNSSKPIIENLVPGAQYQVVIYLRKGPLIGPPSDPVTFAIVPTGIKDLMLYPLGPTAVVLSWTRPYLGVFRKYVVEMFYFNPATMTSEWTTYYEIAATVSLTASVRIANLLPAWYYNFRVTMVTWGDPELSCCDSSTISFITAPVAPEITSVEYFNSLLYISWTYGDDTTDLSHSRMLHWMVVAEGKKKIKKSVTRNVMTAILSLPPGDIYNLSVTACTERGSNTSMLRLVKLEPAPPKSLFAVNKTQTSVTLLWVEEGVADFFEVFCQQVGSSQKTKLQEPVAVSSHVVTISSLLPATAYNCSVTSFSHDSPSVPTFIAVSTMVTEMNPNVVV

SEQ ID NO: 1132 - protein, 206 aa, Homo Sapiens
FSGNNDHFLAINQKKSGKPVFIYKHSQDIEKSLDIAPQKIYRHSYHSSSEAQVSKRHQIVNSAFPRPAYDPSLNLLAMDGQDLEVENLPIPAANVIVVTLQMDVNKLNITLLRIFRQGVAAALGLLPQQVHINRLIGKKNSIELFVSPINRKTGISDALPSEEVLRSLNINVLHQSLSQFGITEVSPEKNVLQGQHEADKIWSKEG

SEQ ID NO: 1133 - protein, 822 aa, Homo Sapiens
EEPPRFIKEPKDQIGVSGGVASFVCQATGDPKPRVTWNKKGKKVNSQRFETIEFDESAGAVLRIQPLRTPRDENVYECVAQNSVGEITVHAKLTVLREDQLPSGFPNIDMGPQLKVVERTRTATMLCAASGNPDPEITWFKDFLPVDPSASNGRIKQLRSGALQIESSEETDQGKYECVATNSAGVRYSSPANLYVRVRRVAPRFSILPMSHEIMPGGNVNITCVAVGSPMPYVKWMQGAEDLTPEDDMPVGRNVLELTDVKDSANYTCVAMSSLGVIEAVAQITVKSLPKAPGTPMVTENTATSITITWDSGNPDPVSYYVIEYKSKSQDGPYQIKEDITTTRYSIGGLSPNSEYEIWVSAVNSIGQGPPSESVVTRTGEQAPASAPRNVQARMLSATTMIVQWEEPVEPNGLIRGYRVYYTMEPEHPVGNWQKHNVDDSLLTTVGSLLEDETYTVRVLAFTSVGDGPLSDPIQVKTQQGVPGQPMNLRAEARSETSITLSWSPPRQESIIKYELLFREGDHGREVGRTFDPTTSYVVEDLKPNTEYAFRLAARSPQGLGAFTPVVRQRTLQSISPKNFKVKMIMKTSVLLSWEFPDNYNSPTPYKIQYNGLTLDVDGRTTKKLITHLKPHTFYNFVLTNRGSSLGGLQQTVTAWTAFNLLNGKPSVAPKPDADGFIMVYLPDGQSPVPVQSYFIVMVPLRKSRGGQFLTPLGSPEDMDLEELIQDISRLQRRSLRHSRQLEVPRPYIAARFSVLPPTFHPGDQKQYGGFDNRGLEPGHRYVLFVLAVLQKSEPTFAASPFSDPFQLDNPDPQPIVDGEEG

SEQ ID NO: 1134 - protein, 364 aa, Homo Sapiens
ENSDDYDLMYVNLDNEIDNGLHPTEDPTPCDCGQEHSEWDKLFIMLENSQMRERMLLQATDDVLRGELQRLREELGRLAESLARPCAPGAPAEARLTSALDELLQATRDAGRRLARMEGAEAQRPEEAGRALAAVLEELRQTRADLHAVQGWAARSWLPAGCETAILFPMRSKKIFGSVHPVRPMRLESFSACIWVKATDVLNKTILFSYGTKRNPYEIQLYLSYQSIVFVVGGEENKLVAEAMVSLGRWTHLCGTWNSEEGLTSLWVNGELAATTVEMATGHIVPEGGILQIGQEKNGCCVGGGFDETLAFSGRLTGFNIWDSVLSNEEIRETGGAESCHIRGNIVGWGVTEIQPHGGAQYVS

SEQ ID NO: 1135 - protein, 323 aa, Homo Sapiens
WPPPGTGDVVVQAPTQVPGFLGDSVTLPCYLQVPNMEVTHVSQLTWARHGESGSMAVFHQTQGPSYSESKRLEFVAARLGAELRNASLRMFGLRVEDEGNYTCLFVTFPQGSRSVDIWLRVLAKPQNTAEVQKVQLTGEPVPMARCVSTGGRPPAQITWHSDLGGMPNTSQVPGFLSGTVTVTSLWILVPSSQVDGKNVTCKVEHESFEKPQLLTVNLTVYYPPEVSISGYDNNWYLGQNEATLTCDARSNPEPTGYNWSTTMGPLPPFAVAQGAQLLIRPVDKPINTTLICNVTNALGARQAELTVQVKEGPPSEHSGMSRN

SEQ ID NO: 1136 - protein, 325 aa, Homo Sapiens
QVVQVNDSMYGFIGTDVVLHCSFANPLPSVKITQVTWQKSTNGSKQNVAIYNPSMGVSVLAPYRERVEFLRPSFTDGTIRLSRLELEDEGVYICEFATFPTGNRESQLNLTVMAKPTNWIEGTQAVLRAKKGQDDKVLVATCTSANGKPPSVVSWETRLKGEAEYQEIRNPNGTVTVISRYRLVPSREAHQQSLACIVNYHMDRFKESLTLNVQYEPEVTIEGFDGNWYLQRMDVKLTCKADANPPATEYHWTTLNGSLPKGVEAQNRTLFFKGPINYSLAGTYICEATNPIGTRSGQVEVNITEFPYTPSPPEHGRRAGPVPTA

SEQ ID NO: 1137 - protein, 329 aa, Homo Sapiens
QDVRVQVLPEVRGQLGGTVELPCHLLPPVPGLYISLVTWQRPDAPANHQNVAAFHPKMGPSFPSPKPGSERLSFVSAKQSTGQDTEAELQDATLALHGLTVEDEGNYTCEFATFPKGSVRGMTWLRVIAKPKNQAEAQKVTFSQDPTTVALCISKEGRPPARISWLSSLDWEAKETQVSGTLAGTVTVTSRFTLVPSGRADGVTVTCKVEHESFEEPALIPVTLSVRYPPEVSISGYDDNWYLGRTDATLSCDVRSNPEPTGYDWSTTSGTFPTSAVAQGSQLVIHAVDSLFNTTFVCTVTNAVGMGRAEQVIFVRETPRASPRDVGPL

SEQ ID NO: 1138 - protein, 309 aa, Homo Sapiens
GPIIVEPHVTAVWGKNVSLKCLIEVNETITQISWEKIHGKSSQTVAVHHPQYGFSVQGEYQGRVLFKNYSLNDATITLHNIGFSDSGKYICKAVTFPLGNAQSSTTVTVLVEPTVSLIKGPDSLIDGGNETVAAICIAATGKPVAHIDWEGDLGEMESTTTSFPNETATIISQYKLFPTRFARGRRITCVVKHQALEKDIRYSFILDIQYAPEVSVTGYDGNWFVGRKGVNLKCNADANPPPFKSVWSRLDGQWPDGLLASDNTLHFVHPLTFNYSGVYICKVTNSLGQRSDQKVIYISAYNSVASLNC

SEQ ID NO: 1139 - protein, 318 aa, Homo Sapiens
GELETSDVVTVVLGQDAKLPCFYRGDSGEQVGQVAWARVDAGEGAQELALLHSKYGLHVSPAYEGRVEQPPPPRNPLDGSVLLRNAVQADEGEYECRVSTFPAGSFQARLRLRVLVPPLPSLNPGPALEEGQGLTLAASCTAEGSPAPSVTWDTEVKGTTSSRSFKHSRSAAVTSEFHLVPSRSMNGQPLTCVVSHPGLLQDQRITHILHVSFLAEASVRGLEDQNLWHIGREGAMLKCLSEGQPPPSYNWTRLDGPLPSGVRVDGDTLGFPPLTTEHSGIYVCHVSNEFSSRDSQVTVDVLDPQEDSGKQVDLVSAS

SEQ ID NO: 1140 - protein, 1268 aa, Homo Sapiens
MSESYRRTTFPVRFRVVSVDENFRPRNELIPLIYLENPRRNRIAQWQSLKLEAGINQLSFPLSSEPIQGSYRVVVQTESGGRIQHPFTVEEFVLPKFEVKVQVPKIISIMDEKVNITVCGEYTYGKPVPGLATVSLCRKLSRVLNCDKQEVCEEFSQQLNSNGCITQQVHTKMLQITNTGFEMKLRVEARIREEGTDLEVTANRISEITNIVSKLKFVKVDSHFRQGIPFFAQVLLVDGKGVPIPNKLFFISVNDANYYSNATTNEQGLAQFSINTTSISVNKLFVRVFTVHPNLCFHYSWVAEDHQGAQHTANRVFSLSGSYIHLEPVAGTLPCGHTETITAHYTLNRQAMGELSELSFHYLIMAKGVIVRSGTHTLPVESGDMKGSFALSFPVESDVAPIARMFIFAILPDGEVVGDSEKFEIENCLANKVDLSFSPAQSPPASHAHLQVAAAPQSLCALRAVDQSVLLMKPEAELSVSSVYNLLTVKDLTNFPDNVDQQEEEQGHCPRPFFIHNGAIYVPLSSNEADIYSFLKGMGLKVFTNSKIRKPKSCSVIPSVSAGAVGQGYYGAGLGVVERPYVPQLGTYNVIPLNNEQSSGPVPETVRSYFPETWIWELVAVNSSGVAEVGVTVPDTITEWKAGAFCLSEDAGLGISSTASLRAFQPFFVELTMPYSVIRGEVFTLKATVLNYLPKCIRAEGIEQEKTFSSMTCASGANVSEQLSLKLPSNVVKESARASFSVLGDILGSAMQNIQNLLQMPYGCGEQNMVLFAPNIYVLNYLNETQQLTQEIKAKAVGYLITGYQRQLNYKHQDGSYSTFGERYGRNQGNTWLTAFVLKTFAQARSYIFIDEAHITQSLTWLSQMQKDNGCFRSSGSLLNNAIKGGVEDEATLSAYVTIALLEIPLPVTNPIVRNALFCLESAWNVAKEGTHGSHVYTKALLAYAFSLLGKQNQNREILNSLDKEAVKEDNLVHWERPQRPKAPVGHLYQPQAPSAEVEMTSYVLLAYLTAQPAPTSGDLTSATNIVKWIMKQQNAQGGFSSTQDTVVALHALSRYGAATFTRTEKTAQVTVQDSQTFSTNFQVDNNNLLLLQQISLPELPGEYVITVTGERCVYLQTSMKYNILPEKEDSPFALKVQTVPQTCDGHKAHTSFQISLTISYTGNRPASNMVIVDVKMVSGFIPLKPTVKMLERSSSVSRTEVSNNHVLIYVEQVTNQTLSFSFMVLQDIPVGDLKPAIVKVYDYYETDESVVAEYIAPCSTDTEHGNV

SEQ ID NO: 1141 - protein, 144 aa, Homo Sapiens
QEAQTELPQARISCPEGTNAYRSYCYYFNEDRETWVDADLYCQNMNSGNLVSVLTQAEGAFVASLIKESGTDDFNVWIGLHDPKKNRRWHWSSGSLVSYKSWGIGAPSSVNPGYCVSLTSSTGFQKWKDVPCEDKFSFVCKFKN

SEQ ID NO: 1142 - protein, 144 aa, Homo Sapiens
QESQTELPNPRISCPEGTNAYRSYCYYFNEDPETWVDADLYCQNMNSGNLVSVLTQAEGAFVASLIKESSTDDSNVWIGLHDPKKNRRWHWSSGSLVSYKSWDTGSPSSANAGYCASLTSCSGFKKWKDESCEKKFSFVCKFKN

SEQ ID NO: 1143 - protein, 138 aa, Homo Sapiens
ISCPKGSKAYGSPCYALFLSPKSWMDADLACQKRPSGKLVSVLSGAEGSFVSSLVRSISNSYSYIWIGLHDPTQGSEPDGDGWEWSSTDVMNYFAWEKNPSTILNPGHCGSLSRSTGFLKWKDYNCDAKLPYVCKFKD

SEQ ID NO: 1144 - protein, 136 aa, Homo Sapiens
DIIMRPSCAPGWFYHKSNCYGYFRKLRNWSDAELECQSYGNGAHLASILSLKEASTIAEYISGYQRSQPIWIGLHDPQKRQQWQWIDGAMYLYRSWSGKSMGGNKHCAEMSSNNNFLTWSSNECNKRQHFLCKYRP

SEQ ID NO: 1145 - protein, 718 aa, Homo Sapiens
SRLRQEDFPPRIVEHPSDVIVSKGEPTTLNCKAEGRPTPTIEWYKDGERVETDKDDPRSHRMLLPSGSLFFLRIVHGRRSKPDEGSYVCVARNYLGEAVSRNASLEVALLRDDFRQNPTDVVVAAGEPAILECQPPRGHPEPTIYWKKDKVRIDDKEERISIRGGKLMISNTRKSDAGMYTCVGTNMVGERDSDPAELTVFERPTFLRRPINQVVLEEEAVEFRCQVQGDPQPTVRWKKDDADLPRGRYDIKDDYTLRIKKTMSTDEGTYMCIAENRVGKMEASATLTVRARPVAPPQFVVRPRDQIVAQGRTVTFPCETKGNPQPAVFWQKEGSQNLLFPNQPQQPNSRCSVSPTGDLTITNIQRSDAGYYICQALTVAGSILAKAQLEVTDVLTDRPPPIILQGPANQTLAVDGTALLKCKATGDPLPVISWLKEGFTFPGRDPRATIQEQGTLQIKNLRISDTGTYTCVATSSSGETSWSAVLDVTESGATISKNYDLSDLPGPPSKPQVTDVTKNSVTLSWQPGTPGTLPASAYIIEAFSQSVSNSWQTVANHVKTTLYTVRGLRPNTIYLFMVRAINPQGLSDPSPMSDPVRTQDISPPAQGVDHRQVQKELGDVLVRLHNPVVLTPTTVQVTWTVDRQPQFIQGYRVMYRQTSGLQATSSWQNLDAKVPTERSAVLVNLKKGVTYEIKVRPYFNEFQGMDSESKTVRTTEEA

SEQ ID NO: 1146 - protein, 441 aa, Homo Sapiens
QDSPPQILVHPQDQLFQGPGPARMSCQASGQPPPTIRWLLNGQPLSMVPPDPHHLLPDGTLLLLQPPARGHAHDGQALSTDLGVYTCEASNRLGTAVSRGARLSVAVLREDFQIQPRDMVAVVGEQFTLECGPPWGHPEPTVSWWKDGKPLALQPGRHTVSGGSLLMARAEKSDEGTYMCVATNSAGHRESRAARVSIQEPQDYTEPVELLAVRIQLENVTLLNPDPAEGPKPRPAVWLSWKVSGPAAPAQSYTALFRTQTAPGGQGAPWAEELLAGWQSAELGGLHWGQDYEFKVRPSSGRARGPDSNVLLLRLPEKVPSAPPQEVTLKPGNGTVFVSWVPPPAENHNGIIRGYQVWSLGNTSLPPANWTVVGEQTQLEIATHMPGSYCVQVAAVTGAGAGEPSRPVCLLLEQAMERATQEPSEHGPWTLEQLRATLKRP

SEQ ID NO: 1147 - protein, 364 aa, Homo Sapiens
QETELSVSAELVPTSSWNISSELNKDSYLTLDEPMNNITTSLGQTAELHCKVSGNPPPTIRWFKNDAPVVQEPRRLSFRSTIYGSRLRIRNLDTTDTGYFQCVATNGKEVVSSTGVLFVKFGPPPTASPGYSDEYEEDGFCQPYRGIACARFIGNRTVYMESLHMQGEIENQITAAFTMIGTSSHLSDKCSQFAIPSLCHYAFPYCDETSSVPKPRDLCRDECEILENVLCQTEYIFARSNPMILMRLKLPNCEDLPQPESPEAANCIRIGIPMADPINKNHKCYNSTGVDYRGTVSVTKSGRQCQPWNSQYPHTHTFTALRFPELNGGHSYCRNPGNQKEAPWCFTLDENFKSDLCDIPACGK

SEQ ID NO: 1148 - protein, 370 aa, Homo Sapiens
EVEVLDPNDPLGPLDGQDGPIPTLKGYFLNFLEPVNNITIVQGQTAILHCKVAGNPPPNVRWLKNDAPVVQEPRRIIIRKTEYGSRLRIQDLDTTDTGYYQCVATNGMKTITATGVLFVRLGPTHSPNHNFQDDYHEDGFCQPYRGIACARFIGNRTIYVDSLQMQGEIENRITAAFTMIGTSTHLSDQCSQFAIPSFCHFVFPLCDARSRAPKPRELCRDECEVLESDLCRQEYTIARSNPLILMRLQLPKCEALPMPESPDAANCMRIGIPAERLGRYHQCYNGSGMDYRGTASTTKSGHQCQPWALQHPHSHHLSSTDFPELGGGHAYCRNPGGQMEGPWCFTQNKNVRMELCDVPSCSPRDSSKMG

SEQ ID NO: 1149 - protein, 258 aa, Homo Sapiens
TVLNSCLKSCVTNLGQQLDLGTPHNLSEPCIQGCHFWNSVDQKNCALKCRESCEVGCSSAEGAYEEEVLENADLPTAPFASSIGSHNMTLRWKSANFSGVKYIIQWKYAQLLGSWTYTKTVSRPSYVVKPLHPFTEYIFRVVWIFTAQLQLYSPPSPSYRTHPHGVPETAPLIRNIESSSPDTVEVSWDPPQFPGGPILGYNLRLISKNQKLDAGTQRTSFQFYSTLPNTIYRFSIAAVNEVGEGPEAESSITTSSSA

SEQ ID NO: 1150 - protein, 421 aa, Homo Sapiens
CPGACVCYNEPKVTTSCPQQGLQAVPVGIPAASQRIFLHGNRISHVPAASFRACRNLTILWLHSNVLARIDAAAFTGLALLEQLDLSDNAQLRSVDPATFHGLGRLHTLHLDRCGLQELGPGLFRGLAALQYLYLQDNALQALPDDTFRDLGNLTHLFLHGNRISSVPERAFRGLHSLDRLLLHQNRVAHVHPHAFRDLGRLMTLYLFANNLSALPTEALAPLRALQYLRLNDNPWVCDCRARPLWAWLQKFRGSSSEVPCSLPQRLAGRDLKRLAANDLQGCAVATGPYHPIWTGRATDEEPLGLPKCCQPDAADKASVLEPGRPASAGNALKGRVPPGDSPPGNGSGPRHINDSPFGTLPGSAEPPLTAVRPEGSEPPGFPTSGPRRRPGCSRKNRTRSHCRLGQAGSGGGGTGDSEGS

SEQ ID NO: 1151 - protein, 396 aa, Homo Sapiens
CPRDCVCYPAPMTVSCQAHNFAAIPEGIPVDSERVFLQNNRIGLLQPGHFSPAMVTLWIYSNNITYIHPSTFEGFVHLEELDLGDNRQLRTLAPETFQGLVKLHALYLYKCGLSALPAGVFGGLHSLQYLYLQDNHIEYLQDDIFVDLVNLSHLFLHGNKLWSLGPGTFRGLVNLDRLLLHENQLQWVHHKAFHDLRRLTTLFLFNNSLSELQGECLAPLGALEFLRLNGNPWDCGCRARSLWEWLQRFRGSSSAVPCVSPGLRHGQDLKLLRAEDFRNCTGPASPHQIKSHTLTTTDRAARKEHHSPHGPTRSKGHPHGPRPGHRKPGKNCTNPRNRNQISKAGAGKQAPELPDYAPDYQHKFSFDIMPTARPKRKGKCARRTPIRAPSGVQQAS

SEQ ID NO: 1152 - protein, 344 aa, Homo Sapiens
QANNFSSVPLSLPPSTQRLFLQNNLIRTLRPGTFGSNLLTLWLFSNNLSTIYPGTFRHLQALEELDLGDNRHLRSLEPDTFQGLERLQSLHLYRCQLSSLPGNIFRGLVSLQYLYLQENSLLHLQDDLFADLANLSHLFLHGNRLRLLTEHVFRGLGSLDRLLLHGNRLQGVHRAAFRGLSRLTILYLFNNSLASLPGEALADLPSLEFLRLNANPWACDCRARPLWAWFQRARVSSSDVTCATPPERQGRDLRALREADFQACPPAAPTRPGSRARGNSSSNHLYGVAEAGAPPADPSTLYRDLPAEDSRGRQGGDAPTEDDYWGGYGGEDQRGEQMCPGAAC

SEQ ID NO: 1153 - protein, 409 aa, Homo Sapiens
MTSGSVFFYILIFGKYFSHGGGQDVKCSLGYFPCGNITKCLPQLLHCNGVDDCGNQADEDNCGDNNGWSLQFDKYFASYYKMTSQYPFEAETPECLVGSVPVQCLCQGLELDCDETNLRAVPSVSSNVTAMSLQWNLIRKLPPDCFKNYHDLQKLYLQNNKITSISIYAFRGLNSLTKLYLSHNRITFLKPGVFEDLHRLEWLIIEDNHLSRISPPTFYGLNSLILLVLMNNVLTRLPDKPLCQHMPRLHWLDLEGNHIHNLRNLTFISCSNLTVLVMRKNKINHLNENTFAPLQKLDELDLGSNKIENLPPLIFKDLKELSQLNLSYNPIQKIQANQFDYLVKLKSLSLEGIEISNIQQRMFRPLMNLSHIYFKKFQYCGYAPHVRSCKPNTDGISSLENLLASIIQR

SEQ ID NO: 1154 - protein, 389 aa, Homo Sapiens
RKVDSLSEDISLTQSIYDKKLVLMQKNLQGLDPKALNNCSFCHEAGQLGPEIRKLQEELEGIQKLLLAQEVQLDQTLQAQEVLSTTSRQISQEMGSCSFSIHQVNQSLGLFLAQVRGWQATTAGLDLSLKDLTQECYDVKAAVHQINFTVGQTSEWIHGIQRKTDEETLTLQKIVTDWQNYTRLFSGLRTTSTKTGEAVKNIQATLGASSQRISQNSESMHDLVLQVMGLQLQLDNISSFLDDHEENMHDLQYHTHYAQNRTVERFESLEGRMASHEIEIGTIFTNINATDNHVHSMLKYLDDVRLSCTLGFHTHAEELYYLNKSVSIMLGTTDLLRERFSLLSARLDLNVRNLSMIVEEMKAVDTQHGEILRNVTILRGHTLFSHNRI

SEQ ID NO: 1155 - protein, 402 aa, Homo Sapiens
SELDPKGQHVCVASSPSAELQCCAGWRQKDQECTIPICEGPDACQKDEVCVKPGLCRCKPGFFGAHCSSRCPGQYWGPDCRESCPCHPHGQCEPATGACQCQADRWGARCEFPCACGPHGRCDPATGVCHCEPGWWSSTCRRPCQCNTAAARCEQATGACVCKPGWWGRRCSFRCNCHGSPCEQDSGRCACRPGWWGPECQQQCECVRGRCSAASGECTCPPGFRGARCELPCPAGSHGVQCAHSCGRCKHNEPCSPDTGSCESCEPGWNGTQCQQPCLPGTFGESCEQQCPHCRHGEACEPDTGHCQRCDPGWLGPRCEDPCPTGTFGEDCGSTCPTCVQGSCDTVTGDCVCSAGYWGPSCNASCPAGFHGNNCSVPCECPEGLCHPVSGSCQPGSGSRDT

SEQ ID NO: 1156 - protein, 398 aa, Homo Sapiens
QELNPRGRNVCRAPGSQVPTCCAGWRQQGDECGIAVCEGNSTCSENEVCVRPGECRCRHGYFGANCDTKCPRQFWGPDCKELCSCHPHGQCEDVTGQCTCHARRWGARCEHACQCQHGTCHPRSGACRCEPGWWGAQCASACYCSATSRCDPQTGACLCHAGWWGRSCNNQCACNSSPCEQQSGRCQCRERTFGARCDRYCQCFRGRCHPVDGTCACEPGYRGKYCREPCPAGFYGLGCRRRCGQCKGQQPCTVAEGRCLTCEPGWNGTKCDQPCATGFYGEGCSHRCPPCRDGHACNHVTGKCTRCNAGWIGDRCETKCSNGTYGEDCAFVCADCGSGHCDFQSGRCLCSPGVHGPHCNVTCPPGLHGADCAQACSCHEDTCDPVTGACHLETNQRK

SEQ ID NO: 1157 - protein, 142 aa, Homo Sapiens
GGCVEVDSETEAVYGMTFKILCISCKRRSETNAETFTEWTFRQKGTEEFVKILRYENEVLQLEEDERFEGRVVWNGSRGTKDLQDLSIFITNVTYNHSGDYECHVYRLLFFENYEHNTSVVKKIHIEVVDKANRDMASIVSE

SEQ ID NO: 1158 - protein, 130 aa, Homo Sapiens
MEVTVPATLNVLNGSDARLPCTFNSCYTVNHKQFSLNWTYQECNNCSEEMFLQFRMKIINLKLERFQDRVEFSGNPSKYDVSVMLRNVQPEDEGIYNCYIMNPPDRHRGHGKIHLQVLMEEPPERDSTVA

SEQ ID NO: 1159 - protein, 137 aa, Homo Sapiens
FPVCVEVPSETEAVQGNPMKLRCISCMKREEVEATTVVEWFYRPEGGKDFLIYEYRNGHQEVESPFQGRLQWNGSKDLQDVSITVLNVTLNDSGLYTCNVSREFEFEAHRPFVKTTRLIPLRVTEEAGEDFTSVVSE

SEQ ID NO: 1160 - protein, 132 aa, Homo Sapiens
LEVSVGKATDIYAVNGTEILLPCTFSSCFGFEDLHFRWTYNSSDAFKILIEGTVKNEKSDPKVTLKDDDRITLVGSTKEKMNNISIVLRDLEFSDTGKYTCHVKNPKENNLQHHATIFLQVVDRLEEVDNTV

SEQ ID NO: 1161 - protein, 965 aa, Homo Sapiens
GGSGLPGSVDVDECSEGTDDCHIDAICQNTPKSYKCLCKPGYKGEGKQCEDIDECENDYYNGGCVHECINIPGNYRCTCFDGFMLAHDGHNCLDVDECQDNNGGCQQICVNAMGSYECQCHSGFFLSDNQHTCIHRSNEGMNCMNKDHGCAHICRETPKGGVACDCRPGFDLAQNQKDCTLTCNYGNGGCQHSCEDTDTGPTCGCHQKYALHSDGRTCIETCAVNNGGCDRTCKDTATGVRCSCPVGFTLQPDGKTCKDINECLVNNGGCDHFCRNTVGSFECGCRKGYKLLTDERTCQDIDECSFERTCDHICINSPGSFQCLCHRGYILYGTTHCGDVDECSMSNGSCDQGCVNTKGSYECVCPPGRRLHWNGKDCVETGKCLSRAKTSPRAQLSCSKAGGVESCFLSCPAHTLFVPDSENSYVLSCGVPGPQGKALQKRNGTSSGLGPSCSDAPTTPIKQKARFKIRDAKCHLRPHSQARAKETARQPLLDHCHVTFVTLKCDSSKKRRRGRKSPSKEVSHITAEFEIETKMEEASDTCEADCLRKRAEQSLQAAIKTLRKSIGRQQFYVQVSGTEYEVAQRPAKALEGQGACGAGQVLQDSKCVACGPGTHFGGELGQCVSCMPGTYQDMEGQLSCTPCPSSDGLGLPGARNVSECGGQCSPGFFSADGFKPCQACPVGTYQPEPGRTGCFPCGGGLLTKHEGTTSFQDCEAKVHCSPGHHYNTTTHRCIRCPVGTYQPEFGQNHCITCPGNTSTDFDGSTNVTHCKNQHCGGELGDYTGYIESPNYPGDYPANAECVWHIAPPPKRRILIVVPEIFLPIEDECGDVLVMRKSASPTSITTYETCQTYERPIAFTSRSRKLWIQFKSNEGNSGKGFQVPYVTYDEDYQQLIEDIVRDGRLYASENHQEILKDKKLIKALFDVLAHPQNYFKYTAQESKEMFPRSFIKLLRSKVSRFLRPYK

SEQ ID NO: 1162 - protein, 776 aa, Homo Sapiens
VPPGRGRAAGPQEDVDECAQGLDDCHADALCQNTPTSYKCSCKPGYQGEGRQCEDIDECGNELNGGCVHDCLNIPGNYRCTCFDGFMLAHDGHNCLDVDECLENNGGCQHTCVNVMGSYECCCKEGFFLSDNQHTCIHRSEEGLSCMNKDHGCSHICKEAPRGSVACECRPGFELAKNQRDCILTCNHGNGGCQHSCDDTADGPECSCHPQYKMHTDGRSCLEREDTVLEVTESNTTSVVDGDKRVKRRLLMETCAVNNGGCDRTCKDTSTGVHCSCPVGFTLQLDGKTCKDIDECQTRNGGCDHFCKNIVGSFDCGCKKGFKLLTDEKSCQDVDECSLDRTCDHSCINHPGTFACACNRGYTLYGFTHCGDTNECSINNGGCQQVCVNTVGSYECQCHPGYKLHWNKKDCVASCDLSCIVKRTEKRLRKAIRTLRKAVHREQFHLQLSGMNLDVAKKPPRTSERQAESCGVGQGHAENQCVSCRAGTYYDGARERCILCPNGTFQNEEGQMTCEPCPRPGNSGALKTPEAWNMSECGGLCQPGEYSADGFAPCQLCALGTFQPEAGRTSCFPCGGGLATKHQGATSFQDCETRVQCSPGHFYNTTTHRCIRCPVGTYQPEFGKNNCVSCPGNTTTDFDGSTNITQCKTSSNSVTTYETCQTYERPIAFTSRSKKLWIQFKSNEGNSARGFQVPYVTYDEDYQELIEDIVRDGRLYASENHQEILKDKKLIKALFDVLAHPQNYFKYTAQESREMFPRSFIRLLRSKVSRFLRPYK

SEQ ID NO: 1163 - protein, 972 aa, Homo Sapiens
AQYSKAAQDVDECVEGTDNCHIDAICQNTPRSYKCICKSGYTGDGKHCKDVDECEREDNAGCVHDCVNIPGNYRCTCYDGFHLAHDGHNCLDVDECAEGNGGCQQSCVNMMGSYECHCREGFFLSDNQHTCIQRPEGMNCMNKNHGCAHICRETPKGGIACECRPGFELTKNQRDCKLTCNYGNGGCQHTCDDTEQGPRCGCHIKFVLHTDGKTCIETCAVNNGGCDSKCHDAAIGVHCTCPVGFMLQPDRKTCKDIDECRLNNGGCDHICRNTVGSFECSCKKGYKLLINERNCQDIDECSFDRTCDHICVNTPGSFQCLCHRGYLLYGITHCGDVDECSINRGGCRFGCINTPGSYQCTCPAGQGRLHWNGKDCTEPLKCQGSPGASKAMLSCNRSGKKDTCALTCPSRARFLPESENGFTVSCGTPSPRAAPARAGHNGNSTNSNHCHEAAVLSIKQRASFKIKDAKCRLHLRNKGKTEEAGRITGPGGAPCSECQVTFIHLKCDSSRKGKGRRARTPPGKEVTRLTLELEAEVRAEETTASCGLPCLRQRMERRLKGSLKMLRKSINQDRFLLRLAGLDYELAHKPGLVAGERAEPMESCRPGQHRAGTKCVSCPQGTYYHGQTEQCVPCPAGTFQEREGQLSCDLCPGSDAHGPLGATNVTTCAGQCPPGQHSVDGFKPCQPCPRGTYQPEAGRTLCFPCGGGLTTKHEGAISFQDCDTKVQCSPGHYYNTSIHRCIRCAMGSYQPDFRQNFCSRCPGNTSTDFDGSTSVAQCKNRQCGGELGEFTGYIESPNYPGNYPAGVECIWNINPPPKRKILIVVPEIFLPSEDECGDVLVMRKNSSPSSITTYETCQTYERPIAFTARSRKLWINFKTSEANSARGFQIPYVTYDEDYEQLVEDIVRDGRLYASENHQEILKDKKLIKAFFEVLAHPQNYFKYTEKHKEMLPKSFIKLLRSKVSSFLRPYK

SEQ ID NO: 1164 - protein, 220 aa, Homo Sapiens
QIVATNLPPEDQDGSGDDSDNFSGSGAGALQDITLSQQTPSTWKDTQLLTAIPTSPEPTGLEATAASTSTLPAGEGPKEGEAVVLPEVEPGLTAREQEATPRPRETTQLPTTHQASTTTATTAQEPATSHPHRDMQPGHHETSTPAGPSQADLHTPHTEDGGPSATERAAEDGASSQLPAAEGSGEQDFTFETSGENTAVVAVEPDRRNQSPVDQGATGA

SEQ ID NO: 1165 - protein, 126 aa, Homo Sapiens
ESRAELTSDKDMYLDNSSIEEASGVYPIDDDDYASASGSGADEDVESPELTTTRPLPKILLTSAAPKVETTTLNIQNKIPAQTKSPEETDKEKVHLSDSERKMDPAEEDTNVYTEKHSDSLFKRTE

SEQ ID NO: 1166 - protein, 127 aa, Homo Sapiens
ESIRETEVIDPQDLLEGRYFSGALPDDEDVVGPGQESDDFELSGSGDLDDLEDSMIGPEVVHPLVPLDNHIPERAGSGSQVPTEPKKLEENEVIPKRISPVEESEDVSNKVSMSSTVQGSNIFERTE

SEQ ID NO: 1167 - protein, 1531 aa, Homo Sapiens
PNITRGPLDSTVIDGMSVVLACETSGAPRPAITWQKGERILASGSVQLPRFTPLESGSLLISPTHISDAGTYTCLATNSRGVDEASADLVVWARTRITKPPQDQSVIKGTQASMVCGVTHDPRVTIRYIWEKDGATLGTESHPRIRLDRNGSLHISQTWSGDIGTYTCRVISAGGNDSRSAHLRVRQLPHAPEHPVATLSTVERRAINLTWTKPFDGNSPLIRYILEMSENNAPWTVLLASVDPKATSVTVKGLVPARSYQFRLCAVNDVGKGQFSKDTERVSLPEEPPTAPPQNVIASGRTNQSIMIQWQPPPESHQNGILKGYIIRYCLAGLPVGYQFKNITDADVNNLLLEDLIIWTNYEIEVAAYNSAGLGVYSSKVTEWTLQGVPTVPPGNVHAEATNSTTIRFTWNAPSPQFINGINQGYKLIAWEPEQEEEVTMVTARPNFQDSIHVGFVSGLKKFTEYFTSVLCFTTPGDGPRSTPQLVRTHEDVPGPVGHLSFSEILDTSLKVSWQEPGEKNGILTGYRISWEEYNRTNTRVTHYLPNVTLEYRVTGLTALTTYTIEVAAMTSKGQGQVSASTISSGVPPELPGPPTNLGISNIGPRSVTLQFRPGYDGKTSISRWLVEAQVGVVGEGEEWLLIHQLSNEPDARSMEVPDLNPFTCYSFRMRQVNIVGTSPPSQPSRKIQTLQAPPDMAPANVSLRTASETSLWLRWMPLPEMEYNGNPESVGYKIKYSRSDGHGKTLSHVVQDRVERDYTIEDLEEWTEYRVQVQAFNAIGSGPWSQTVVGRTRESVPSSGPTNVSALATTSSSMLVRWSEVPEADRNGLVLGYKVMYKEKDSDTQPRFWLVEGNSSRSAQLTGLGKYVLYEVQVLAFTRIGDGSPSHPPILERTLDDVPGPPMGILFPEVRTTSVRLIWQPPAAPNGIILAYQITHRLNTTTANTATVEVLAPSARQYTATGLKPESVYLFRITAQTRKGWGEAAEALVVTTEKRDRPQPPSRPMVQQEDVRARSVLLSWEPGSDGLSPVRYYTIQTRELPSGRWALHSASVSHNASSFIVDRLKPFTSYKFRVKATNDIGDSEFSEESESLTTLQAAPDEAPTILSVTPHTTTSVLIRWQPPAEDKINGILLGFRIRYRELLYEGLRGFMLRGINNPGATWAELTSMYSMRNLSRPSLTQYELDNLNKHRRYEIRMSVYNAVGEGPSSPPQEVFVGEAVPTAAPRNVVVHGATATQLDVTWEPPPLDSQNGDIQGYKIYFWEAQRGNLTERVKTLFLAENSVKLKNLTGYTAYMVSVAAFNAAGDGPRSTPTQGQTQQAAPSAPSSVKFSELTTTSVNVSWEAPQFPNGILEGYRLVYEPCSPVDGVSKIVTVDVKGNSPLWLKVKDLAEGVTYRFRIRAKTFTYGPEIEANVTTGPGEGAPGPPGVPIIVRYSSAIAIHWSSGDPGKGPITRYVIEARPSDEGLWDILIKDIPKEVSSYTFSMDILKPGVSYDFRVIAVNDYGFGTPSSPSQSVPAQKANPFYEEWWF

SEQ ID NO: 1168 - protein, 117 aa, Homo Sapiens
QNEGWDSPICTEGVVSVSWGENTVMSCNISNAFSHVNIKLRAHGQESAIFNEVAPGYFSRDGWQLQVQGGVAQLVIKGARDSHAGLYMWHLVGHQRNNRQVTLEVSGAEPQSAPDTG

SEQ ID NO: 1169 - protein, 535 aa, Homo Sapiens
WSYNTSTEAMTYDEASAYCQQRYTHLVAIQNKEEIEYLNSILSYSPSYYWIGIRKVNNVWVWVGTQKPLTEEAKNWAPGEPNNRQKDEDCVEIYIKREKDVGMWNDERCSKKKLALCYTAACTNTSCSGHGECVETINNYTCKCDPGFSGLKCEQIVNCTALESPEHGSLVCSHPLGNFSYNSSCSISCDRGYLPSSMETMQCMSSGEWSAPIPACNVVECDAVTNPANGFVECFQNPGSFPWNTTCTFDCEEGFELMGAQSLQCTSSGNWDNEKPTCKAVTCRAVRQPQNGSVRCSHSPAGEFTFKSSCNFTCEEGFMLQGPAQVECTTQGQWTQQIPVCEAFQCTALSNPERGYMNCLPSASGSFRYGSSCEFSCEQGFVLKGSKRLQCGPTGEWDNEKPTCEAVRCDAVHQPPKGLVRCAHSPIGEFTYKSSCAFSCEEGFELHGSTQLECTSQGQWTEEVPSCQVVKCSSLAVPGKINMSCSGEPVFGTVCKFACPEGWTLNGSAARTCGATGHWSGLLPTCEAPTESNIP

SEQ ID NO: 1170 - protein, 294 aa, Homo Sapiens
WTYHYSEKPMNWQRARRFCRDNYTDLVAIQNKAEIEYLEKTLPFSRSYYWIGIRKIGGIWTWVGTNKSLTEEAENWGDGEPNNKKNKEDCVEIYIKRNKDAGKWNDDACHKLKAALCYTASCQPWSCSGHGECVEIINNYTCNCDVGYYGPQCQFVIQCEPLEAPELGTMDCTHPLGNFSFSSQCAFSCSEGTNLTGIEETTCGPFGNWSSPEPTCQVIQCEPLSAPDLGIMNCSHPLASFSFTSACTFICSEGTELIGKKKTICESSGIWSNPSPICQKLDKSFSMIKEGDYN

SEQ ID NO: 1171 - protein, 729 aa, Homo Sapiens
WTYHYSTKAYSWNISRKYCQNRYTDLVAIQNKNEIDYLNKVLPYYSSYYWIGIRKNNKTWTWVGTKKALTNEAENWADNEPNNKRNNEDCVEIYIKSPSAPGKWNDEHCLKKKHALCYTASCQDMSCSKQGECLETIGNYTCSCYPGFYGPECEYVRECGELELPQHVLMNCSHPLGNFSFNSQCSFHCTDGYQVNGPSKLECLASGIWTNKPPQCLAAQCPPLKIPERGNMTCLHSAKAFQHQSSCSFSCEEGFALVGPEVVQCTASGVWTAPAPVCKAVQCQHLEAPSEGTMDCVHPLTAFAYGSSCKFECQPGYRVRGLDMLRCIDSGHWSAPLPTCEAISCEPLESPVHGSMDCSPSLRAFQYDTNCSFRCAEGFMLRGADIVRCDNLGQWTAPAPVCQALQCQDLPVPNEARVNCSHPFGAFRYQSVCSFTCNEGLLLVGASVLQCLATGNWNSVPPECQAIPCTPLLSPQNGTMTCVRPLGSSSYKSTCQFICDEGYSLSGPERLDCTRSGRWTDSPPMCEAIKCPELFAPEQGSLDCSDTRGEFNVGSTCHFSCNNGFKLEGPNNVECTTSGRWSATPPTCKGIASLPTPGVQCPALTTPGQGTMYCRHHPGTFGFNTTCYFGCNAGFTLIGDSTLSCRPSGQWTAVTPACRAVKCSELHVNKPIAMNCSNLWGNFSYGSICSFHCLEGQLLNGSAQTACQENGHWSTTVPTCQGPLTIQEA

SEQ ID NO: 1172 - protein, 751 aa, Homo Sapiens
NYQNGKNNVPRLKLSYKEMLESNNVITFNGLANSSSYHTFLLDEERSRLYVGAKDHIFSFDLVNIKDFQKIVWPVSYTRRDECKWAGKDILKECANFIKVLKAYNQTHLYACGTGAFHPICTYIEIGHHPEDNIFKLENSHFENGRGKSPYDPKLLTASLLIDGELYSGTAADFMGRDFAIFRTLGHHHPIRTEQHDSRWLNDPKFISAHLISESDNPEDDKVYFFFRENAIDGEHSGKATHARIGQICKNDFGGHRSLVNKWTTFLKARLICSVPGPNGIDTHFDELQDVFLMNFKDPKNPVVYGVFTTSSNIFKGSAVCMYSMSDVRRVFLGPYAHRDGPNYQWVPYQGRVPYPRPGTCPSKTFGGFDSTKDLPDDVITFARSHPAMYNPVFPMNNRPIVIKTDVNYQFTQIVVDRVDAEDGQYDVMFIGTDVGTVLKVVSIPKETWYDLEEVLLEEMTVFREPTAISAMELSTKQQQLYIGSTAGVAQLPLHRCDIYGKACAECCLARDPYCAWDGSACSRYFPTAKRRTRRQDIRNGDPLTHCSDLHHDNHHGHSPEERIIYGVENSSTFLECSPKSQRALVYWQFQRRNEERKEEIRVDDHIIRTDQGLLLRSLQQKDSGNYLCHAVEHGFIQTLLKVTLEVIDTEHLEELLHKDDDGDGSKTKEMSNSMTPSQKVWYRDFMQLINHPNLNTMDEFCEQVWKRDRKQRRQRPGHTPGNSNKWKHLQENKKGRNRRTHEFERAPRSV

SEQ ID NO: 1173 - protein, 724 aa, Homo Sapiens
APSPPRLRLSFQELQAWHGLQTFSLERTCCYQALLVDEERGRLFVGAENHVASLNLDNISKRAKKLAWPAPVEWREECNWAGKDIGTECMNFVKLLHAYNRTHLLACGTGAFHPTCAFVEVGHRAEEPVLRLDPGRIEDGKGKSPYDPRHRAASVLVGEELYSGVAADLMGRDFTIFRSLGQRPSLRTEPHDSRWLNEPKFVKVFWIPESENPDDDKIYFFFRETAVEAAPALGRLSVSRVGQICRNDVGGQRSLVNKWTTFLKARLVCSVPGVEGDTHFDQLQDVFLLSSRDHRTPLLYAVFSTSSIFQGSAVCVYSMNDVRRAFLGPFAHKEGPMHQWVSYQGRVPYPRPGMCPSKTFGTFSSTKDFPDDVIQFARNHPLMYNSVLPTGGRPLFLQVGANYTFTQIAADRVAAADGHYDVLFIGTDVGTVLKVISVPKGSRPSAEGLLLEELHVFEDSAAVTSMQISSKRHQLYVASRSAVAQIALHRCAAHGRVCTECCLARDPYCAWDGVACTRFQPSAKRRFRRQDVRNGDPSTLCSGDSSRPALLEHKVFGVEGSSAFLECEPRSLQARVEWTFQRAGVTAHTQVLAEERTERTARGLLLRRLRRRDSGVYLCAAVEQGFTQPLRRLSLHVLSATQAERLARAEEAAPAAPPGPKLWYRDFLQLVEPGGGGSANSLRMCRPQPALQSLPLESRRKGRNRRTHAPEPRAERGPRSATHW

SEQ ID NO: 1174 - protein, 731 aa, Homo Sapiens
GSSQPQARVYLTFDELRETKTSEYFSLSHHPLDYRILLMDEDQDRIYVGSKDHILSLNINNISQEALSVFWPASTIKVEECKMAGKDPTHGCGNFVRVIQTFNRTHLYVCGSGAFSPVCTYLNRGRRSEDQVFMIDSKCESGKGRCSFNPNVNTVSVMINEELFSGMYIDFMGTDAAIFRSLTKRNAVRTDQHNSKWLSEPMFVDAHVIPDGTDPNDAKVYFFFKEKLTDNNRSTKQIHSMIARICPNDTGGLRSLVNKWTTFLKARLVCSVTDEDGPETHFDELEDVFLLETDNPRTTLVYGIFTTSSSVFKGSAVCVYHLSDIQTVFNGPFAHKEGPNHQLISYQGRIPYPRPGTCPGGAFTPNMRTTKEFPDDVVTFIRNHPLMYNSIYPIHKRPLIVRIGTDYKYTKIAVDRVNAADGRYHVLFLGTDRGTVQKVVVLPTNNSVSGELILEELEVFKNHAPITTMKISSKKQQLYVSSNEGVSQVSLHRCHIYGTACADCCLARDPYCAWDGHSCSRFYPTGKRRSRRQDVRHGNPLTQCRGFNLKAYRNAAEIVQYGVKNNTTFLECAPKSPQASIKWLLQKDKDRRKEVKLNERIIATSQGLLIRSVQGSDQGLYHCIATENSFKQTIAKINFKVLDSEMVAVVTDKWSPWTWASSVRALPFHPKDIMGAFSHSEMQMINQYCKDTRQQHQQGDESQKMRGDYGKLKALINSRKSRNRRNQLPES

SEQ ID NO: 1175 - protein, 245 aa, Homo Sapiens
RCDTYGKACADCCLARDPYCAWDGNACSRYAPTSKRRARRQDVKYGDPITQCWDIEDSISHETADEKVIFGIEFNSTFLECIPKSQQATIKWYIQRSGDEHREELKPDERIIKTEYGLLIRSLQKKDSGMYYCKAQEHTFIHTIVKLTLNVIENEQMENTQRAEHEEGKVKDLLAESRLRYKDYIQILSSPNFSLDQYCEQMWHREKRRQRNKGGPKWKHMQEMKKKRNRRHHRDLDELPRAVAT

SEQ ID NO: 1176 - protein, 750 aa, Homo Sapiens
ADTTHPRLRLSHKELLNLNRTSIFHSPFGFLDLHTMLLDEYQERLFVGGRDLVYSLSLERISDGYKEIHWPSTALKMEECIMKGKDAGECANYVRVLHHYNRTHLLTCGTGAFDPVCAFIRVGYHLEDPLFHLESPRSERGRGRCPFDPSSSFISTLIGSELFAGLYSDYWSRDAAIFRSMGRLAHIRTEHDDERLLKEPKFVGSYMIPDNEDRDDNKVYFFFTEKALEAENNAHAIYTRVGRLCVNDVGGQRILVNKWSTFLKARLVCSVPGMNGIDTYFDELEDVFLLPTRDHKNPVIFGLFNTTSNIFRGHAICVYHMSSIRAAFNGPYAHKEGPEYHWSVYEGKVPYPRPGSCASKVNGGRYGTTKDYPDDAIRFARSHPLMYQAIKPAHKKPILVKTDGKYNLKQIAVDRVEAEDGQYDVLFIGTDNGIVLKVITIYNQEMESMEEVILEELQIFKDPVPIISMEISSKRQQLYIGSASAVAQVRFHHCDMYGSACADCCLARDPYCAWDGISCSRYYPTGTHAKRRFRRQDVRHGNAAQQCFGQQFVGDALDKTEEHLAYGIENNSTLLECTPRSLQAKVIWFVQKGRETRKEEVKTDDRVVKMDLGLLFLRLHKSDAGTYFCQTVEHSFVHTVRKITLEVVEEEKVEDMFNKDDEEDRHHRMPCPAQSSISQGAKPWYKEFLQLIGYSNFQRVEEYCEKVWCTDRKRKKLKMSPSKWKYANPQEKKLRSKPEHYRLPRHTLDS

SEQ ID NO: 1177 - protein, 767 aa, Homo Sapiens
SFPTQDHLPATPRVRLSFKELKATGTAHFFNFLLNTTDYRILLKDEDHDRMYVGSKDYVLSLDLHDINREPLIIHWAASPQRIEECVLSGKDVNGECGNFVRLIQPWNRTHLYVCGTGAYNPMCTYVNRGRRAQATPWTQTQAVRGRGSRATDGALRPMPTAPRQDYIFYLEPERLESGKGKCPYDPKLDTASALINEELYAGVYIDFMGTDAAIFRTLGKQTAMRTDQYNSRWLNDPSFIHAELIPDSAERNDDKLYFFFRERSAEAPQSPAVYARIGRICLNDDGGHCCLVNKWSTFLKARLVCSVPGEDGIETHFDELQDVFVQQTQDVRNPVIYAVFTSSGSVFRGSAVCVYSMADIRMVFNGPFAHKEGPNYQWMPFSGKMPYPRPGTCPGGTFTPSMKSTKDYPDEVINFMRSHPLMYQAVYPLQRRPLVVRTGAPYRLTTIAVDQVDAADGRYEVLFLGTDRGTVQKVIVLPKDDQEMEELMLEEVEVFKDPAPVKTMTISSKRQQLYVASAVGVTHLSLHRCQAYGAACADCCLARDPYCAWDGQACSRYTASSKRRSRRQDVRHGNPIRQCRGFNSNANKNAVESVQYGVAGSAAFLECQPRSPQATVKWLFQRDPGDRRREIRAEDRFLRTEQGLLLRALQLSDRGLYSCTATENNFKHVVTRVQLHVLGRDAVHAALFPPLSMSAPPPPGAGPPTPPYQELAQLLAQPEVGLIHQYCQGYWRHVPPSPREAPGAPRSPEPQDQKKPRNRRHHPPDT

SEQ ID NO: 1178 - protein, 760 aa, Homo Sapiens
GPSPGPSVPRLRLSYRDLLSANRSAIFLGPQGSLNLQAMYLDEYRDRLFLGGLDALYSLRLDQAWPDPREVLWPPQPGQREECVRKGRDPLTECANFVRVLQPHNRTHLLACGTGAFQPTCALITVGHRGEHVLHLEPGSVESGRGRCPHEPSRPFASTFIDGELYTGLTADFLGREAMIFRSGGPRPALRSDSDQSLLHDPRFVMAARIPENSDQDNDKVYFFFSETVPSPDGGSNHVTVSRVGRVCVNDAGGQRVLVNKWSTFLKARLVCSVPGPGGAETHFDQLEDVFLLWPKAGKSLEVYALFSTVSAVFQGFAVCVYHMADIWEVFNGPFAHRDGPQHQWGPYGGKVPFPRPGVCPSKMTAQPGRPFGSTKDYPDEVLQFARAHPLMFWPVRPRHGRPVLVKTHLAQQLHQIVVDRVEAEDGTYDVIFLGTDSGSVLKVIALQAGGSAEPEEVVLEELQVFKVPTPITEMEISVKRQMLYVGSRLGVAQLRLHQCETYGTACAECCLARDPYCAWDGASCTHYRPSLGKRRFRRQDIRHGNPALQCLGQSQEEEAVGLVAATMVYGTEHNSTFLECLPKSPQAAVRWLLQRPGDEGPDQVKTDERVLHTERGLLFRRLSRFDAGTYTCTTLEHGFSQTVVRLALVVIVASQLDNLFPPEPKPEEPPARGGLASTPPKAWYKDILQLIGFANLPRVDEYCERVWCRGTTECSGCFRSRSRGKQARGKSWAGLELGKKMKSRVHAEHNRTPREVEAT

SEQ ID NO: 1179 - protein, 651 aa, Homo Sapiens [sequence omitted]

SEQ ID NO: 1180 - protein, 674 aa, Homo Sapiens
LSPRISLPLGSEERPFLRFEAEHISNYTALLLSRDGRTLYVGAREALFALSSNLSFLPGGEYQELLWGADAEKKQQCSFKGKDPQRDCQNYIKILLPLSGSHLFTCGTAAFSPMCTYINMENFTLARDEKGNVLLEDGKGRCPFDPNFKSTALVVDGELYTGTVSSFQGNDPAISRSQSLRPTKTESSLNWLQDPAFVASAYIPESLGSLQGDDDKIYFFFSETGQEFEFFENTIVSRIARICKGDEGGERVLQQRWTSFLKAQLLCSRPDDGFPFNVLQDVFTLSPSPQDWRDTLFYGVFTSQWHRGTTEGSAVCVFTMKDVQRVFSGLYKEVNRETQQWYTVTHPVPTPRPGACITNSARERKINSSLQLPDRVLNFLKDHFLMDGQVRSRMLLLQPQARYQRVAVHRVPGLHHTYDVLFLGTGDGRLHKAVSVGPRVHIIEELQIFSSGQPVQNLLLDTHRGLLYAASHSGVVQVPMANCSLYRSCGDCLLARDPYCAWSGSSCKHVSLYQPQLATRPWIQDIEGASAKDLCSASSVVSPSFVPTGEKPCEQVQFQPNTVNTLACPLLSNLATRLWLRNGAPVNASASCHVLPTGDLLLVGTQQLGEFQCWSLEEGFQQLVASYCPEVVEDGVADQTDEGGSVPVIISTSRVSAPAGGKASWGADRSYWKE

SEQ ID NO: 1181 - protein, 643 aa, Homo Sapiens
AEVWWNLVPRKTVSSGELATVVRRFSQTGIQDFLTLTLTEPTGLLYVGAREALFAFSMEALELQGAISWEAPVEKKTECIQKGKNNQTECFNFIRFLQPYNASHLYVCGTYAFQPKCTYVNMLTFTLEHGEFEDGKGKCPYDPAKGHAGLLVDGELYSATLNNFLGTEPIILRNMGPHHSMKTEYLAFWLNEPHFVGSAYVPESVGSFTGDDDKVYFFFRERAVESDCYAEQVVARVARVCKGDMGGARTLQRKWTTFLKARLACSAPNWQLYFNQLQAMHTLQDTSWHNTTFFGVFQAQWGDMYLSAICEYQLEEIQRVFEGPYKEYHEEAQKWDRYTDPVPSPRPGSCINNWHRRHGYTSSLELPDNILNFVKKHPLMEEQVGPRWSRPLLVKKGTNFTHLVADRVTGLDGATYTVLFIGTGDGWLLKAVSLGPWVHLIEELQLFDQEPMRSLVLSQSKKLLFAGSRSQLVQLPVADCMKYRSCADCVLARDPYCAWSVNTSRCVAVGGHSGSLLIQHVMTSDTSGICNLRGSKKVRPTPKNITVVAGTDLVLPCHLSSNLAHARWTFGGRDLPAEQPGSFLYDARLQALVVMAAQPRHAGAYHCFSEEQGARLAAEGYLVAVVAGPSVTLEARAPLENLG

SEQ ID NO: 1182 - protein, 713 aa, Homo Sapiens
MAFAPIPRITWEHREVHLVQFHEPDIYNYSALLLSEDKDTLYIGAREAVFAVNALNISEKQHEVYWKVSEDKKAKCAEKGKSKQTECLNYIRVLQPLSATSLYVCGTNAFQPACDHLNLTSFKFLGKNEDGKGRCPFDPAHSYTSVMVDGELYSGTSYNFLGSEPIISRNSSHSPLRTEYAIPWLNEPSFVFADVIRKSPDSPDGEDDRVYFFFTEVSVEYEFVFRVLIPRIARVCKGDQGGLRTLQKKWTSFLKARLICSRPDSGLVFNVLRDVFVLRSPGLKVPVFYALFTPQLNNVGLSAVCAYNLSTAEEVFSHGKYMQSTTVEQSHTKWVRYNGPVPKPRPGACIDSEARAANYTSSLNLPDKTLQFVKDHPLMDDSVTPIDNRPRLIKKDVNYTQIVVDRTQALDGTVYDVMFVSTDRGALHKAISLEHAVHIIEETQLFQDFEPVQTLLLSSKKGNRFVYAGSNSGVVQAPLAFCGKHGTCEDCVLARDPYCAWSPPTATCVALHQTESPSRGLIQEMSGDASVCPDKSKGSYRQHFFKHGGTAELKCSQKSNLARVFWKFQNDVLKAESPKYGLMGRKNLLIFNLSEGDSGVYQCLSEERVKNKTVFQVVAKHVLEVKVVPKPVVAPTLSVVQTEGSRIATKVLVASTQGSSPPTPAVQATSSGAITLPPKPAPTGTSCEPKIVINTVPQLHSEKTMYLKSSDNR

SEQ ID NO: 1183 - protein, 625 aa, Homo Sapiens
RVPRSVPRTSLPISEADSCLTRFAVPHTYNYSVLLVDPASHTLYVGARDTIFALSLPFSGERPRRIDWMVPEAHRQNCRKKGKKEDECHNFVQILAIANASHLLTCGTFAFDPKCGVIDVSRFQQVERLESGRGKCPFEPAQRSAAVMAGGVLYAATVKNYLGTEPIITRAVGRAEDWIRTDTLPSWLNAPAFVAAVALSPAEWGDEDGDDEIYFFFTETSRAFDSYERIKVPRVARVCAGDLGGRKTLQQRWTTFLKADLLCPGPEHGRASSVLQDVAVLRPELGAGTPIFYGIFSSQWEGATISAVCAFRPQDIRTVLNGPFRELKHDCNRGLPVVDNDVPQPRPGECITNNMKLRHFGSSLSLPDRVLTFIRDHPLMDRPVFPADGHPLLVTTDTAYLRVVAHRVTSLSGKEYDVLYLGTEDGHLHRAVRIGAQLSVLEDLALFPEPQPVENMKLYHSWLLVGSRTEVTQVNTTNCGRLQSCSECILAQDPVCAWSFRLDECVAHAGEHRGLVQDIESADVSSLCPKEPGERPVVFEVPVATAAHVVLPCSPSSAWASCVWHQPSGVTALTPRRDGLEVVVTPGAMGAYACECQEGGAAHVVAAYSLVWGSQRDAPSRAHTV

SEQ ID NO: 1184 - protein, 663 aa, Homo Sapiens
VPGPSLRRPSRELDATPRMTIPYEELSGTRHFKGQAQNYSTLLLEEASARLLVGARGALFSLSANDIGDGAHKEIHWEASPEMQSKCHQKGKNNQTECFNHVRFLQRLNSTHLYACGTHAFQPLCAAIDAEAFTLPTSFEEGKEKCPYDPARGFTGLIIDGGLYTATRYEFRSIPDIRRSRHPHSLRTEETPMHWLNDAEFVFSVLVRESKASAVGDDDKVYYFFTERATEEGSGSFTQSRSSHRVARVARVCKGDLGGKKILQKKWTSFLKARLICHIPLYETLRGVCSLDAETSSRTHFYAAFTLSTQWKTLEASAICRYDLAEIQAVFAGPYMEYQDGSRRWGRYEGGVPEPRPGSCITDSLRSQGYNSSQDLPSLVLDFVKLHPLMARPVVPTRGRPLLLKRNIRYTHLTGTPVTTPAGPTYDLLFLGTADGWIHKAVVLGSGMHIIEETQVFRESQSVENLVISLLQHSLYVGAPSGVIQLPLSSCSRYRSCYDCILARDPYCGWDPGTHACAAATTIANRSQGSRTALIQDIERGNRGCESSRDTGPPPPLKTRSVLRGDDVLLPCDQPSNLARALWLLNGSMGLSDGQGGYRVGVDGLLVTDAQPEHSGNYGCYAEENGLRTLLASYSLTVRPATPAPAPKAPATPGAQLAPDVRL

SEQ ID NO: 1185 - protein, 1036 aa, Homo Sapiens
MPCGFSPSPVAHHLVPGPPDTPAQQLRCGWTVGGWLLSLVRGLLPCLPPGARTAEGPIMVLAGPLAVSLLLPSLTLLVSHLSSSQDVSSEPSSEQQLCALSKHPTVAFEDLQPWVSNFTYPGARDFSQLALDPSGNQLIVGARNYLFRLSLANVSLLQATEWASSEDTRRSCQSKGKTEEECQNYVRVLIVAGRKVFMCGTNAFSPMCTSRQVGNLSRTIEKINGVARCPYDPRHNSTAVISSQGELYAATVIDFSGRDPAIYRSLGSGPPLRTAQYNSKWLNEPNFVAAYDIGLFAYFFLRENAVEHDCGRTVYSRVARVCKNDVGGRFLLEDTWTTFMKARLNCSRPGEVPFYYNELQSAFHLPEQDLIYGVFTTNVNSIAASAVCAFNLSAISQAFNGPFRYQENPRAAWLPIANPIPNFQCGTLPETGPNENLTERSLQDAQRLFLMSEAVQPVTPEPCVTQDSVRFSHLVVDLVQAKDTLYHVLYIGTESGTILKALSTASRSLHGCYLEELHVLPPGRREPLRSLRILHSARALFVGLRDGVLRVPLERCAAYRSQGACLGARDPYCGWDGKQQRCSTLEDSSNMSLWTQNITACPVRNVTRDGGFGPWSPWQPCEHLDGDNSGSCLCRARSCDSPRPRCGGLDCLGPAIHIANCSRNGAWTPWSSWALCSTSCGIGFQVRQRSCSNPAPRHGGRICVGKSREERFCNENTPCPVPIFWASWGSWSKCSSNCGGGMQSRRRACENGNSCLGCGVEFKTCNPEGCPEVRRNTPWTPWLPVNVTQGGARQEQRFRFTCRAPLADPHGLQFGRRRTETRTCPADGSGSCDTDALVEDLLRSGSTSPHTVSGGWAAWGPWSSCSRDCELGFRVRKRTCTNPEPRNGGLPCVGDAAEYQDCNPQACPVRGAWSCWTSWSPCSASCGGGHYQRTRSCTSPAPSPGEDICLGLHTEEALCATQACPEGWSPWSEWSKCTDDGAQSRSRHCEELLPGSSACAGNSSQSRPCPYSEIPVILPASSMEEATGCAGFNLIH

SEQ ID NO: 1186 - protein, 631 aa, Homo Sapiens
GFPEDSEPISISHGNYTKQYPVFVGHKPGRNTTQRHRLDIQMIMIMNGTLYIAARDHIYTVDIDTSHTEEIYCSKKLTWKSRQADVDTCRMKGKHKDECHNFIKVLLKKNDDALFVCGTNAFNPSCRNYKMDTLEPFGDEFSGMARCPYDAKHANVALFADGKLYSATVTDFLAIDAVIYRSLGESPTLRTVKHDSKWLKEPYFVQAVDYGDYIYFFFREIAVEYNTMGKVVFPRVAQVCKNDMGGSQRVLEKQWTSFLKARLNCSVPGDSHFYFNILQAVTDVIRINGRDVVLATFSTPYNSIPGSAVCAYDMLDIASVFTGRFKEQKSPDSTWTPVPDERVPKPRPGCCAGSSSLERYATSNEFPDDTLNFIKTHPLMDEAVPSIFNRPWFLRTMVRYRLTKIAVDTAAGPYQNHTVVFLGSEKGIILKFLARIGNSGFLNDSLFLEEMSVYNSEKCSYDGVEDKRIMGMQLDRASSSLYVAFSTCVIKVPLGRCERHGKCKKTCIASRDPYCGWIKEGGACSHLSPNSRLTFEQDIERGNTDGLGDCHNSFVALNGHSSSLLPSTTTSDSTAQEGYESRGGMLDWKHLLDSPDSTDPLGAVSSHNHQDKKGVIRESYLKGHDQLVPVT

SEQ ID NO: 1187 - protein, 578 aa, Homo Sapiens
LFPEEPPPLSVAPRDYLNHYPVFVGSGPGRLTPAEGADDLNIQRVLRVNRTLFIGDRDNLYRVELEPPTSTELRYQRKLTWRSNPSDINVCRMKGKQEGECRNFVKVLLLRDESTLFVCGSNAFNPVCANYSIDTLQPVGDNISGMARCPYDPKHANVALFSDGMLFTATVTDFLAIDAVIYRSLGDRPTLRTVKHDSKWFKEPYFVHAVEWGSHVYFFFREIAMEFNYLEKVVVSRVARVCKNDVGGSPRVLEKQWTSFLKARLNCSVPGDSHFYFNVLQAVTGVVSLGGRPVVLAVFSTPSNSIPGSAVCAFDLTQVAAVFEGRFREQKSPESIWTPVPEDQVPRPRPGCCAAPGMQYNASSALPDDILNFVKTHPLMDEAVPSLGHAPWILRTLMRHQLTRVAVDVGAGPWGNQTVVFLGSEAGTVLKFLVRPNASTSGTSGLSVFLEEFETYRPDRCGRPGGGETGQRLLSLELDAASGGLLAAFPRCVVRVPVARCQQYSGCMKNCIGSQDPYCGWAPDGSCIFLSPGTRAAFEQDVSGASTSGLGDCTGLLRASLSEDRAGLVSVNLLVTSS

SEQ ID NO: 1188 - protein, 513 aa, Homo Sapiens
AFPQDPLPLLISDLQGTSPLSWFRGLEDDAVAAELGLDFQRFLTLNRTLLVAARDHVFSFDLQAEEEGEGLVPNKYLTWRSQDVENCAVRGKLTDECYNYIRVLVPWDSQTLLACGTNSFSPVCRSYGITSLQQEGEELSGQARCPFDATQSNVAIFAEGSLYSATAADFQASDAVVYRSLGPQPPLRSAKYDSKWLREPHFVQALEHGDHVYFFFREVSVEDARLGRVQFSRVARVCKRDMGGSPRALDRHWTSFLKLRLNCSVPGDSTFYFDVLQALTGPVNLHGRSALFGVFTTQTNSIPGSAVCAFYLDEIERGFEGKFKEQRSLDGAWTPVSEDRVPSPRPGSCPAHSSPLGRSLQVLRGSREAPPVPGPARGLPGPRPEKGGRREAPVVPEASPRRALLPPGRPERRPFQLLKGAVHGLQRGERPSPLGHELDALQDVSPPPRPAPPAFPTRRVSRGPFSPRVYLLTVFPPVLDRRVGGEKPVSSVSQHFRGSWRTPTPRSLPAKLP

SEQ ID NO: 1189 - protein, 604 aa, Homo Sapiens
QGHLRSGPRIFAVWKGHVGQDRVDFGQTEPHTVLFHEPGSSSVWVGGRGKVYLFDFPEGKNASVRTVNIGSTKGSCLDKRDCENYITLLERRSEGLLACGTNARHPSCWNLVNGTVVPLGEMRGYAPFSPDENSLVLFEGDEVYSTIRKQEYNGKIPRFRRIRGESELYTSDTVMQNPQFIKATIVHQDQAYDDKIYYFFREDNPDKNPEAPLNVSRVAQLCRGDQGGESSLSVSKWNTFLKAMLVCSDAATNKNFNRLQDVFLLPDPSGQWRDTRVYGVFSNPWNYSAVCVYSLGDIDKVFRTSSLKGYHSSLPNPRPGKCLPDQQPIPTETFQVADRHPEVAQRVEPMGPLKTPLFHSKYHYQKVAVHRMQASHGETFHVLYLTTDRGTIHKVVEPGEQEHSFAFNIMEIQPFRRAAAIQTMSLDAERRKLYVSSQWEVSQVPLDLCEVYGGGCHGCLMSRDPYCGWDQGRCISIYSSERSVLQSINPAEPHKECPNPKPDKAPLQKVSLAPNSRYYLSCPMESRHATYSWRHKENVEQSCEPGHQSPNCILFIENLTAQQYGHYFCEAQEGSYFREAQHWQLLPEDGIMAEHLLGHACALA

SEQ ID NO: 1190 - protein, 117 aa, Homo Sapiens
MTVGEKVFSSNGQSITFDAIQEACARAGGRIAVPRNPEENEAIASFVKKYNTYAYVGLTEGPSPGDFRYSDGTPVNYTNWYRGEPAGRGKEQCVEMYTDGQWNDRNCLYSRLTICEF

SEQ ID NO: 1191 - protein, 228 aa, Homo Sapiens
EVKDVCVGSPGIPGTPGSHGLPGRDGRDGVKGDPGPPGPMGPPGETPCPPGNNGLPGAPGVPGERGEKGEAGERGPPGLPAHLDEELQATLHDFRHQILQTRGALSLQGSIMTVGEKVFSSNGQSITFDAIQEACARAGGRIAVPRNPEENEAIASFVKKYNTYAYVGLTEGPSPGDFRYSDGTPVNYTNWYRGEPAGRGKEQCVEMYTDGQWNDRNCLYSRLTICEF

SEQ ID NO: 1192 - protein, 355 aa, Homo Sapiens
AGMKTYSHRTMPSACTLVMCSSVESGLPGRDGRDGREGPRGEKGDPGLPGAAGQAGMPGQAGPVGPKGDNGSVGEPGPKGDTGPSGPPGPPGVPGPAGREGPLGKQGNIGPQGKPGPKGEAGPKGEVGAPGMQGSAGARGLAGPKGERGVPGERGVPGNTGAAGSAGAMGPQGSPGARGPPGLKGDKGIPGDKGAKGESGLPDVASLRQQVEALQGQVQHLQAAFSQYKKVELFPNGQSVGEKIFKTAGFVKPFTEAQLLCTQAGGQLASPRSAAENAALQQLVVAKNEAAFLSMTDSKTEGKFTYPTGESLVYSNWAPGKPNDDGGSEDCVEIFTNGKWNDRACGEKRLVVCEF

SEQ ID NO: 1193 - protein, 118 aa, Homo Sapiens
MPGVCDRAPDFLSPSEDQVLRPALGSSVALNCTAWVVSGPHCSLPSVQWLKDGLPLGIGGHYSLHEYSWVKANLSEVLVSSVLGVNVTSTEVYGAFTCSIQNISFSSFTLQRAGPTSH

SEQ ID NO: 1194 - protein, 534 aa, Homo Sapiens
MDGRFWIRVQESVMVPEGLCISVPCSFSYPRQDWTGSTPAYGYWFKAVTETTKGAPVATNHQSREVEMSTRGRFQLTGDPAKGNCSLVIRDAQMQDESQYFFRVERGSYVRYNFMNDGFFLKVTALTQKPDVYIPETLEPGQPVTVICVFNWAFEECPPPSFSWTGAALSSQGTKPTTSHFSVLSFTPRPQDHNTDLTCHVDFSRKGVSVQRTVRLRVAYAPRDLVISISRDNTPALEPQPQGNVPYLEAQKGQFLRLLCAADSQPPATLSWVLQNRVLSSSHPWGPRPLGLELPGVKAGDSGRYTCRAENRLGSQQRALDLSVQYPPENLRVMVSQANRTVLENLGNGTSLPVLEGQSLCLVCVTHSSPPARLSWTQRGQVLSPSQPSDPGVLELPRVQVEHEGEFTCHARHPLGSQHVSLSLSVHYSPKLLGPSCSWEAEGLHCSCSSQASPAPSLRWWLGEELLEGNSSQDSFEVTPSSAGPWANSSLSLHGGLSSGLRLRCEAWNVHGAQSGSILQLPDKKGLISTAFSN

SEQ ID NO: 1195 - protein, 534 aa, Homo Sapiens
LNKDPSYSLQVQRQVPVPEGLCVIVSCNLSYPRDGWDESTAAYGYWFKGRTSPKTGAPVATNNQSREVEMSTRDRFQLTGDPGKGSCSLVIRDAQREDEAWYFFRVERGSRVRHSFLSNAFFLKVTALTKKPDVYIPETLEPGQPVTVICVFNWAFKKCPAPSFSWTGAALSPRRTRPSTSHFSVLSFTPSPQDHDTDLTCHVDFSRKGVSAQRTVRLRVAYAPKDLIISISHDNTSALELQGNVIYLEVQKGQFLRLLCAADSQPPATLSWVLQDRVLSSSHPWGPRTLGLELRGVRAGDSGRYTCRAENRLGSQQQALDLSVQYPPENLRVMVSQANRTVLENLGNGTSLPVLEGQSLRLVCVTHSSPPARLSWTRWGQTVGPSQPSDPGVLELPPIQMEHEGEFTCHAQHPLGSQHVSLSLSVHYPPQLLGPSCSWEAEGLHCSCSSQASPAPSLRWWLGEELLEGNSSQGSFEVTPSSAGPWANSSLSLHGGLSSGLRLRCKAWNVHGAQSGSVFQLLPGKLEHGGGLGL

SEQ ID NO: 1196 - protein, 463 aa, Homo Sapiens
KEQKDYLLTMQKSVTVQEGLCVSVLCSFSYPQNGWTASDPVHGYWFRAGDHVSRNIPVATNNPARAVQEETRDRFHLLGDPQNKDCTLSIRDTRESDAGTYVFCVERGNMKWNYKYDQLSVNVTASQDLLSRYRLEVPESVTVQEGLCVSVPCSVLYPHYNWTASSPVYGSWFKEGADIPWDIPVATNTPSGKVQEDTHGRFLLLGDPQTNNCSLSIRDARKGDSGKYYFQVERGSRKWNYIYDKLSVHVTALTHMPTFSIPGTLESGHPRNLTCSVPWACEQGTPPTITWMGASVSSLDPTITRSSMLSLIPQPQDHGTSLTCQVTLPGAGVTMTRAVRLNISYPPQNLTMTVFQGDGTASTTLRNGSALSVLEGQSLHLVCAVDSNPPARLSWTWGSLTLSPSQSSNLGVLELPRVHVKDEGEFTCRAQNPLGSQHISLSLSLQNEYTGKMRPISGVTLGA

SEQ ID NO: 1197 - protein, 342 aa, Homo Sapiens
EKPVYELQVQKSVTVQEGLCVLVPCSFSYPWRSWYSSPPLYVYWFRDGEIPYYAEVVATNNPDRRVKPETQGRFRLLGDVQKKNCSLSIGDARMEDTGSYFFRVERGRDVKYSYQQNKLNLEVTALIEKPDIHFLEPLESGRPTRLSCSLPGSCEAGPPLTFSWTGNALSPLDPETTRSSELTLTPRPEDHGTNLTCQVKRQGAQVTTERTVQLNVSYAPQNLAISIFFRNGTGTALRILSNGMSVPIQEGQSLFLACTVDSNPPASLSWFREGKALNPSQTSMSGTLELPNIGAREGGEFTCRVQHPLGSQHLSFILSVQRSSSSCICVTEKQQGSWPLVL

SEQ ID NO: 1198 - protein, 244 aa, Homo Sapiens
FVRTKIDTTENLLNTEVHSSPAQRWSMQVPPEVSAEAGDAAVLPCTFTHPHRHYDGPLTAIWRAGEPYAGPQVFRCAAARGSELCQTALSLHGRFRLLGNPRRNDLSLRVERLALADDRRYFCRVEFAGDVHDRYESRHGVRLHVTAAPRIVNISVLPSPAHAFRALCTAEGEPPPALAWSGPALGNSLAAVRSPREGHGHLVTAELPALTHDGRYTCTAANSLGRSEASVYLFRFHGASGAST

SEQ ID NO: 1199 - protein, 418 aa, Homo Sapiens
NKDPSYSLQVQRQVPVPEGLCVIVSCNLSYPRDGWDESTAAYGYWFKGRTSPKTGAPVATNNQSREVAMSTRDRFQLTGDPGKGSCSLVIRDAQREDEAWYFFRVERGSRVRHSFLSNAFFLKVTALTQKPDVYIPETLEPGQPVTVICVFNWAFKKCPAPSFSWTGAALSPRRTRPSTSHFSVLSFTPSPQDHDTDLTCHVDFSRKGVSAQRTVRLRVASLELQGNVIYLEVQKGQFLRLLCAADSQPPATLSWVLQDRVLSSSHPWGPRTLGLELPGVKAGDSGRYTCRAENRLGSQQRALDLSVQYPPENLRVMVSQANRTVLENLRNGTSLRVLEGQSLRLVCVTHSSPPARLSWTWGEQTVGPSQPSDPGVLQLPRVQMEHEGEFTCHARHPLGSQRVSLSFSVHCKSGPMTG

SEQ ID NO: 1200 - protein, 425 aa, Homo Sapiens
EKPVYELQVQKSVTVQEGLCVLVPCSFSYPWRSWYSSPPLYVYWFRDGEIPYYAEVVATNNPDRRVKPETQGRFRLLGDVQKKNCSLSIGDARMEDTGSYFFRVERGRDVKYSYQQNKLNLEVTALIEKPDIHFLEPLESGRPTRLSCSLPGSCEAGPPLTFSWTGNALSPLDPETTRSSELTLTPRPEDHGTNLTCQMKRQGAQVTTERTVQLNVSYAPQTITIFRNGIALEILQNTSYLPVLEGQALRLLCDAPSNPPAHLSWFQGSPALNATPISNTGILELRRVRSAEEGGFTCRAQHPLGFLQIFLNLSVYSLPQLLGPSCSWEAEGLHCRCSFRARPAPSLCWRLEEKPLEGNSSQGSFKVNSSSAGPWANSSLILHGGLSSDLKVSCKAWNIYGSQSGSVLLLQGRSNLGTGVVPAAL

SEQ ID NO: 1201 - protein, 305 aa, Homo Sapiens
QERRFQLEGPESLTVQEGLCVLVPCRLPTTLPASYYGYGYWFLEGADVPVATNDPDEEVQEETRGRFHLLWDPRRKNCSLSIRDARRRDNAAYFFRLKSKWMKYGYTSSKLSVRVMALTHRPNISIPGTLESGHPSNLTCSVPWVCEQGTPPIFSWMSAAPTSLGPRTTQSSVLTITPRPQDHSTNLTCQVTFPGAGVTMERTIQLNVSSFKILQNTSSLPVLEGQALRLLCDADGNPPAHLSWFQGFPALNATPISNTGVLELPQVGSAEEGDFTCRAQHPLGSLQISLSLFVHWKPEGRAGGV

SEQ ID NO: 1202 - protein, 335 aa, Homo Sapiens
QKSNRKDYSLTMQSSVTVQEGMCVHVRCSFSYPVDSQTDSDPVHGYWFRAGNDISWKAPVATNNPAWAVQEETRDRFHLLGDPQTKNCTLSIRDARMSDAGRYFFRMEKGNIKWNYKYDQLSVNVTALTHRPNILIPGTLESGCFQNLTCSVPWACEQGTPPMISWMGTSVSPLHPSTTRSSVLTLIPQPQHHGTSLTCQVTLPGAGVTTNRTIQLNVSYPPQNLTVTVFQGEGTASTALGNSSSLSVLEGQSLRLVCAVDSNPPARLSWTWRSLTLYPSQPSNPLVLELQVHLGDEGEFTCRAQNSLGSQHVSLNLSLQQEYTGKMRPVSGVLL

SEQ ID NO: 1203 - protein, 347 aa, Homo Sapiens
MEGDRQYGDGYLLQVQELVTVQEGLCVHVPCSFSYPQDGWTDSDPVHGYWFRAGDRPYQDAPVATNNPDREVQAETQGRFQLLGDIWSNDCSLSIRDARKRDKGSYFFRLERGSMKWSYKSQLNYKTKQLSVFVTALTHRPDILILGTLESGHPRNLTCSVPWACKQGTPPMISWIGASVSSPGPTTARSSVLTLTPKPQDHGTSLTCQVTLPGTGVTTTSTVRLDVSYPPWNLTMTVFQGDATASTALGNGSSLSVLEGQSLRLVCAVNSNPPARLSWTRGSLTLCPSRSSNPGLLELPRVHVRDEGEFTCRAQNAQGSQHISLSLSLQNEGTGTSRPVSQVTLAA

SEQ ID NO: 1204 - protein, 331 aa, Homo Sapiens
QTSKLLTMQSSVTVQEGLCVHVPCSFSYPSHGWIYPGPVVHGYWFREGANTDQDAPVATNNPARAVWEETRDRFHLLGDPHTENCTLSIRDARRSDAGRYFFRMEKGSIKWNYKHHRLSVNVTALTHRPNILIPGTLESGCPQNLTCSVPWACEQGTPPMISWIGTSVSPLDPSTTRSSVLTLIPQPQDHGTSLTCQVTFPGASVTTNKTVHLNVSYPPQNLTMTVFQGDGTVSTVLGNGSSLSLPEGQSLRLVCAVDAVDSNPPARLSLSWRGLTLCPSQPSNPGVLELPWVHLRDEAEFTCRAQNPLGSQQVYLNVSLQSKATSGVTQG

SEQ ID NO: 1205 - protein, 342 aa, Homo Sapiens
EEELQVIQPDKSVSVAAGESAILHCTVTSLIPVGPIQWFRGAGPARELIYNQKEGHFPRVTTVSESTKRENMDFSISISNITPADAGTYYCVKFRKGSPDTEFKSGAGTELSVRAKPSAPVVSGPAARATPQHTVSFTCESHGFSPRDITLKWFKNGNELSDFQTNVDPVGESVSYSIHSTAKVVLTREDVHSQVICEVAHVTLQGDPLRGTANLSETIRVPPTLEVTQQPVRAENQVNVTCQVRKFYPQRLQLTWLENGNVSRTETASTVTENKDGTYNWMSWLLVNVSAHRDDVKLTCQVEHDGQPAVSKSHDLKVSAHPKEQGSNTAAENTGSNERNIY

SEQ ID NO: 1206 - protein, 342 aa, Homo Sapiens
EDELQVIQPEKSVSVAAGESATLRCAMTSLIPVGPIMWFRGAGAGRELIYNQKEGHFPRVTTVSELTKRNNLDFSISISNITPADAGTYYCVKFRKGSPDDVEFKSGAGTELSVRAKPSAPVVSGPAVRATPEHTVSFTCESHGFSPRDITLKWFKNGNELSDFQTNVDPAGDSVSYSIHSTARVVLTRGDVHSQVICEIAHITLQGDPLRGTANLSEAIRVPPTLEVTQQPMRAENQANVTCQVSNFYPRGLQLTWLENGNVSRTETASTLIENKDGTYNWMSWLLVNTCAHRDDVVLTCQVEHDGQQAVSKSYALEISAHQKEHGSDITHEAALAPTAPL

SEQ ID NO: 1207 - protein, 255 aa, Homo Sapiens
QSSRNDWQVLQPEGPMLVAEGETLLLRCMVVGSCTDGMIKWVKVSTQDQQEIYNFKRGSFPGVMPMIQRTSEPLNCDYSIYIHNVTREHTGTYHCVRFDGLSEHSEMKSDEGTSVLVKGAGDPEPDLWIIQPQELVLGTTGDTVFLNCTVLGDGPPGPIRWFQGAGLSREAIYNFGGISHPKETAVQASNNDFSILLQNVSSEDAGTYYCVKFQRKPNRQYLSGQGTSLKVKAKSTSSKEAEFTSEPATEMSPTG

SEQ ID NO: 1208 - protein, 332 aa, Homo Sapiens
EEELQMIQPEKLLLVTVGKTATLHCTVTSLLPVGPVLWFRGVGPGRELIYNQKEGHFPRVTTVSDLTKRNNMDFSIRISSITPADVGTYYCVKFRKGSPENVEFKSGPGTEMALGAKPSAPVVLGPAARTTPEHTVSFTCESHGFSPRDITLKWFKNGNELSDFQTNVDPTGQSVAYSIRSTARVVLDPWDVRSQVICEVAHVTLQGDPLRGTANLSEAIRVPPTLEVTQQPMRVGNQVNVTCQVRKFYPQSLQLTWSENGNVCQRETASTLTENKDGTYNWTSWFLVNISDQRDDVVLTCQVKHDGQLAVSKRLALEVTVHQKDQSSDATP

SEQ ID NO: 1209 - protein, 217 aa, Homo Sapiens
ASYGTGGRMMNCPKILRQLGSKVLLPLTYERINKSMNKSIHIVVTMAKSLENSVENKIVSLDPSEAGPPRYLGDRYKFYLENLTLGIRESRKEDEGWYLMTLEKNVSVQRFCLQLRLYEQVSTPEIKVLNKTQENGTCTLILGCTVEKGDHVAYSWSEKAGTHPLNPANSSHLLSLTLGPQHADNIYICTVSNPISNNSQTFSPWPGCRTDPSETKP

SEQ ID NO: 1210 - protein, 205 aa, Homo Sapiens
QSSLTPLMVNGILGESVTLPLEFPAGEKVNFITWLFNETSLAFIVPHETKSPEIHVTNPKQGKRLNFTQSYSLQLSNLKMEDTGSYRAQISTKTSAKLSSYTLRILRQLRNIQVTNHSQLFQNMTCELHLTCSVEDADDNVSFRWEALGNTLSSQPNLTVSWDPRISSEQDYTCIAENAVSNLSFSVSAQKLCEDVKIQYTDTKM

SEQ ID NO: 1211 - protein, 204 aa, Homo Sapiens
SGPVKELVGSVGGAVTFPLKSKVKQVDSIVWTFNTTPLVTIQPEGGTIIVTQNRNRERVDFPDGGYSLKLSKLKKNDSGIYYVGIYSSSLQQPSTQEYVLHVYEHLSKPKVTMGLQSNKNGTCVTNLTCCMEHGEEDVIYTWKALGQAANESHNGSILPISWRWGESDMTFICVARNPVSRNFSSPILARKLCEGAADDPDSSM

SEQ ID NO: 1212 - protein, 211 aa, Homo Sapiens
AQVLSKVGGSVLLVAARPPGFQVREAIWRSLWPSEELLATFFRGSLETLYHSRFLGRAQLHSNLSLELGPLESGDSGNFSVLMVDTRGQPWTQTLQLKVYDAVPRPVVQVFIAVERDAQPSKTCQVFLSCWAPNISEITYSWRRETTMDFGMEPHSLFTDGQVLSISLGPGDRDVAYSCIVSNPVSWDLATVTPWDSCHHEAAPGKASYKD

SEQ ID NO: 1213 - protein, 218 aa, Homo Sapiens
RRLWRWCGSEEVVAVLQESISLPLEIPPDEEVENIIWSSHKSLATVVPGKEGHPATIMVTNPHYQGQVSFLDPSYSLHISNLSWEDSGLYQAQVNLRTSQISTMQQYNLCVYRWLSEPQITVNFESSGEGACSMSLVCSVEKAGMDMTYSWLSRGDSTYTFHEGPVLSTSWRPGDSALSYTCRANNPISNVSSCPIPDGPFYADPNYASEKPSTAFCL

SEQ ID NO: 1214 - protein, 1499 aa, Homo Sapiens
QCSCSGSTVDCHGLALRSVPRNIPRNTERLDLNGNNITRITKTDFAGLRHLRVLQLMENKISTIERGAFQDLKELERLRLNRNHLQLFPELLFLGTAKLYRLDLSENQIQAIPRKAFRGAVDIKNLQLDYNQISCIEDGAFRALRDLEVLTLNNNNITRLSVASFNHMPKLRTFRLHSNNLYCDCHLAWLSDWLRQRPRVGLYTQCMGPSHLRGHNVAEVQKREFVCSGHQSFMAPSCSVLHCPAACTCSNNIVDCRGKGLTEIPTNLPETITEIRLEQNTIKVIPPGAFSPYKKLRRIDLSNNQISELAPDAFQGLRSLNSLVLYGNKITELPKSLFEGLFSLQLLLLNANKINCLRVDAFQDLHNLNLLSLYDNKLQTIAKGTFSPLRAIQTMHLAQNPFICDCHLKWLADYLHTNPIETSGARCTSPRRLANKRIGQIKSKKFRCSAKEQYFIPGTEDYRSKLSGDCFADLACPEKCRCEGTTVDCSNQKLNKIPEHIPQYTAELRLNNNEFTVLEATGIFKKLPQLRKINFSNNKITDIEEGAFEGASGVNEILLTSNRLENVQHKMFKGLESLKTLMLRSNRITCVGNDSFIGLSSVRLLSLYDNQITTVAPGAFDTLHSLSTLNLLANPFNCNCYLAWLGEWLRKKRIVTGNPRCQKPYFLKEIPIQDVAIQDFTCDDGNDDNSCSPLSRCPTECTCLDTVVRCSNKGLKVLPKGIPRDVTELYLDGNQFTLVPKELSNYKHLTLIDLSNNRISTLSNQSFSNMTQLLTLILSYNRLRCIPPRTFDGLKSLRLLSLHGNDISVVPEGAFNDLSALSHLAIGANPLYCDCNMQWLSDWVKSEYKEPGIARCAGPGEMADKLLLTTPSKKFTCQGPVDVNILAKCNPCLSNPCKNDGTCNSDPVDFYRCTCPYGFKGQDCDVPIHACISNPCKHGGTCHLKEGEEDGFWCICADGFEGENCEVNVDDCEDNDCENNSTCVDGINNYTCLCPPEYTGELCEEKLDFCAQDLNPCQHDSKCILTPKGFKCDCTPGYVGEHCDIDFDDCQDNKCKNGAHCTDAVNGYTCICPEGYSGLFCEFSPPMVLPRTSPCDNFDCQNGAQCIVRINEPICQCLPGYQGEKCEKLVSVNFINKESYLQIPSAKVRPQTNITLQIATDEDSGILLYKGDKDHIAVELYRGRVRASYDTGSHPASAIYSVETINDGNFHIVELLALDQSLSLSVDGGNPKIITNLSKQSTLNFDSPLYVGGMPGKSNVASLRQAPGQNGTSFHGCIRNLYINSELQDFQKVPMQTGILPGCEPCHKKVCAHGTCQPSSQAGFTCECQEGWMGPLCDQRTNDPCLGNKCVHGTCLPINAFSYSCKCLEGHGGVLCDEEEDLFNPCQAIKCKHGKCRLSGLGQPYCECSSGYTGDSCDREISCRGERIRDYYQKQQGYAACQTTKKVSRLECRGGCAGGQCCGPLRSKRRKYSFECTDGSSFVDEVEKVVKCGCTRCVS

SEQ ID NO: 1215 - protein, 528 aa, Homo Sapiens
NPDDCEDNDCENNATCVDGINNYVCICPPNYTGELCDEVIDHCVPELNLCQHEAKCIPLDKGFSCECVPGYSGKLCETDNDDCVAHKCRHGAQCVDTINGYTCTCPQGFSGPFCEHPPPMVLLQTSPCDQYECQNGAQCIVVQQEPTCRCPPGFAGPRCEKLITVNFVGKDSYVELASAKVRPQANISLQVATDKDNGILLYKGDNDPLALELYQGHVRLVYDSLSSPPTTVYSVETVNDGQFHSVELVTLNQTLNLVVDKGTPKSLGKLQKQPAVGINSPLYLGGIPTSTGLSALRQGTDRPLGGFHGCIHEVRINNELQDFKALPPQSLGVSPGCKSCTVCKHGLCRSVEKDSVVCECRPGWTGPLCDQEARDPCLGHRCHHGKCVATGTSYMCKCAEGYGGDLCDNKNDSANACSAFKCHHGQCHISDQGEPYCLCQPGFSGEHCQQENPCLGQVVREVIRRQKGYASCATASKVPIMECRGGCGPQCCQPTRSKRRKYVFQCTDGSSFVEEVERHLECGCLACS

SEQ ID NO: 1216 - protein, 605 aa, Homo Sapiens
NVTGDVCKEKICSCNEIEGDLHVDCEKKGFTSLQRFTAPTSQFYHLFLHGNSLTRLFPNEFANFYNAVSLHMENNGLHEIVPGAFLGLQLVKRLHINNNKIKSFRKQTFLGLDDLEYLQADFNLLRDIDPGAFQDLNKLEVLILNDNLISTLPANVFQYVPITHLDLRGNRLKTLPYEEVLEQIPGIAEILLEDNPWDCTCDLLSLKEWLENIPKNALIGRVVCEAPTRLQGKDLNETTEQDLCPLKNRVDSSLPAPPAQEETFAPGPLPTPFKTNGQEDHATPGSAPNGGTKIPGNWQIKIRPTAAIATGSSRNKPLANSLPCPGGCSCDHIPGSGLKMNCNNRNVSSLADLKPKLSNVQELFLRDNKIHSIRKSHFVDYKNLILLDLGNNNIATVENNSFKNLLDLRWLYMDSNYLDTLSREKFAGLQNLEYLNVEYNAIQLILPGTFNAMPKLRILILNNNLLRSLPVDVFAGVSLSKLSLHNNYFMYLPVAGVLDQLTSIIQIDLHGNPWECSCTIVPFKQWAERLGSEVLMSDLKCETPVNFFRKDFMLLSNDEICPQLYARISPTLTSHSKNSTGLAETGTHSNSYLDTSRVSISVLVP

SEQ ID NO: 1217 - protein, 600 aa, Homo Sapiens
RKTAKDICKIRCLCEEKENVLNINCENKGFTTVSLLQPPQYRIYQLFLNGNLLTRLYPNEFVNYSNAVTLHLGNNGLQEIRTGAFSGLKTLKRLHLNNNKLEILREDTFLGLESLEYLQADYNYISAIEAGAFSKLNKLKVLILNDNLLLSLPSNVFRFVLLTHLDLRGNRLKVMPFAGVLEHIGGIMEIQLEENPWNCTCDLLPLKAWLDTITVFVGEIVCETPFRLHGKDVTQLTRQDLCPRKSASDSSQRGSHADTHVQRLSPTMNPALNPTRAPKASRPPKMRNRPTPRVTVSKDRQSFGPIMVYQTKSPVPLTCPSSCVCTSQSSDNGLNVNCQERKFTNISDLQPKPTSPKKLYLTGNYLQTVYKNDLLEYSSLDLLHLGNNRIAVIQEGAFTNLTSLRRLYLNGNYLEVLYPSMFDGLQSLQYLYLEYNVIKEIKPLTFDALINLQLLFLNNNLLRSLPDNIFGGTALTRLNLRNNHFSHLPVKGVLDQLPAFIQIDLQENPWDCTCDIMGLKDWTEHANSPVIINEVTCESPAKHAGEILKFLGREAICPDSPNLSDGTVLSMNHNTDTPRSLSVSPSSYPELHTEVPLSVL

SEQ ID NO: 1218 - protein, 626 aa, Homo Sapiens
TPIPLIEDSEEIDEPCFDPCYCEVKESLFHIHCDSKGFTNISQITEFWSRPFKLYLQRNSMRKLYTNSFLHLNNAVSINLGNNALQDIQTGAFNGLKILKRLYLHENKLDVFRNDTFLGLESLEYLQADYNVIKRIESGAFRNLSKLRVLILNDNLIPMLPTNLFKAVSLTHLDLRGNRLKVLFYRGMLDHIGRSLMELQLEENPWNCTCEIVQLKSWLERIPYTALVGDITCETPFHFHGKDLREIRKTELCPLLSDSEVEASLGIPHSSSSKENAWPTKPSSMLSSVHFTASSVEYKSSNKQPKPTKQPRTPRPPSTSQALYPGPNQPPIAPYQTRPPIPIICPTGCTCNLHINDLGLTVNCKERGFNNISELLPRPLNAKKLYLSSNLIQKIYRSDFWNFSSLDLLHLGNNRISYVQDGAFINLPNLKSLFLNGNDIEKLTPGMFRGLQSLHYLYFEFNVIREIQPAAFSLMPNLKLLFLNNNLLRTLPTDAFAGTSLARLNLRKNYFLYLPVAGVLEHLNAIVQIDLNENPWDCTCDLVPFKQWIETISSVSVVGDVLCRSPENLTHRDVRTIELEVLCPEMLHVAPAGESPAQPGDSHLIGAPTSASPYEFSPPGGPVPLS

SEQ ID NO: 1219 - protein, 600 aa, Homo Sapiens
DSDISVEICNVCSCVSVENVLYVNCEKVSVYRPNQLKPPWSNFYHLNFQNNFLNILYPNTFLNFSHAVSLHLGNNKLQNIEGGAFLGLSALKQLHLNNNELKILRADTFLGIENLEYLQADYNLIKYIERGAFNKLHKLKVLILNDNLISFLPDNIFRFASLTHLDIRGNRIQKLPYIGVLEHIGRVVELQLEDNPWNCSCDLLPLKAWLENMPYNIYIGEAICETPSDLYGRLLKETNKQELCPMGTGSDFDVRILPPSQLENGYTTPNGHTTQTSLHRLVTKPPKTTNPSKISGIVAGKALSNRNLSQIVSYQTRVPPLTPCPAPCFCKTHPSDLGLSVNCQEKNIQSMSELIPKPLNAKKLHVNGNSIKDVDVSDFTDFEGLDLLHLGSNQITVIKGDVFHNLTNLRRLYLNGNQIERLYPEIFSGLHNLQYLYLEYNLIKEISAGTFDSMPNLQLLYLNNNLLKSLPVYIFSGAPLARLNLRNNKFMYLPVSGVLDQLQSLTQIDLEGNPWDCTCDLVALKLWVEKLSDGIVVKELKCETPVQFANIELKSLKNEILCPKLLNKPSAPFTSPAPAITFTTPLGPIRSPPGGPVPLS

SEQ ID NO: 1220 - protein, 624 aa, Homo Sapiens
IDYYGEICDNACPCEEKDGILTVSCENRGIISLSEISPPRFPIYHLLLSGNLLNRLYPNEFVNYTGASILHLGSNVIQDIETGAFHGLRGLRRLHLNNNKLELLRDDTFLGLENLEYLQVDYNYISVIEPNAFGKLHLLQVLILNDNLLSSLPNNLFRFVPLTHLDLRGNRLKLLPYVGLLQHMDKVVELQLEENPWNCSCELISLKDWLDSISYSALVGDVVCETPFRLHGRDLDEVSKQELCPRRLISDYEMRPQTPLSTTGYLHTTPASVNSVATSSSAVYKPPLKPPKGTRQPNKPRVRPTSRQPSKDLGYSNYGPSIAYQTKSPVPLECPTACSCNLQISDLGLNVNCQERKIESIAELQPKPYNPKKMYLTENYIAVVRRTDFLEATGLDLLHLGNNRISMIQDRAFGDLTNLRRLYLNGNRIERLSPELFYGLQSLQYLFLQYNLIREIQSGTFDPVPNLQLLFLNNNLLQAMPSGVFSGLTLLRLNLRSNHFTSLPVSGVLDQLKSLIQIDLHDNPWDCTCDIVGMKLWVEQLKVGVLVDEVICKAPKKFAETDMRSIKSELLCPDYSDVVVSTPTPSSIQVPARTSAVTPAVRLNSTGAPASLGAGGGASSVPLS

SEQ ID NO: 1221 - protein, 582 aa, Homo Sapiens
SRGSCDSLCNCEEKDGTMLINCEAKGIKMVSEISVPPSRPFQLSLLNNGLTMLHTNDFSGLTNAISIHLGFNNIADIEIGAFNGLGLLKQLHINHNSLEILKEDTFHGLENLEFLQADNNFITVIEPSAFSKLNRLKVLILNDNAIESLPPNIFRFVPLTHLDLRGNQLQTLPYVGFLEHIGRILDLQLEDNKWACNCDLLQLKTWLENMPPQSIIGDVVCNSPPFFKGSILSRLKKESICPTPPVYEEHEDPSGSLHLAATSSINDSRMSTKTTSILKLPTKAPGLIPYITKPSTQLPGPYCPIPCNCKVLSPSGLLIHCQERNIESLSDLRPPPQNPRKLILAGNIIHSLMKSDLVEYFTLEMLHLGNNRIEVLEEGSFMNLTRLQKLYLNGNHLTKLSKGMFLGLHNLEYLYLEYNAIKEILPGTFNPMPKLKVLYLNNNLLQVLPPHIFSGVPLTKVNLKTNQFTHLPVSNILDDLDLLTQIDLEDNPWDCSCDLVGLQQWIQKLSKNTVTDDILCTSPGHLDKKELKALNSEILCPGLVNNPSMPTQTSYLMVTTPATTTNTADTILRSLTDAVPLS

SEQ ID NO: 1222 - protein, 81 aa, Homo Sapiens
LKCYTCKEPMTSASCRTITRCKPEDTACMTTLVTVEAEYPFNQSPVVTRSCSSSCVATDPDSIGAAHLIFCCFRDLCNSEL

SEQ ID NO: 1223 - protein, 600 aa, Homo Sapiens [sequence omitted]

SEQ ID NO: 1224 - protein, 78 aa, Homo Sapiens
VKDCVFCELTDSMQCPGTYMHCGDDEDCFTGHGVAPGTGPVINKGCLRATSCGLEEPVSYRGVTYSLTTNCCTGRLCN

SEQ ID NO: 1225 - protein, 185 aa, Homo Sapiens
CLLCFTTYSERLRICQMFVGMRSPKLEECEEAFTAAFQGLSDTEISEETIHTSSVSWGRCRGRAGEAQRVRLRDRQRETVRGERLKDHENNRDLGTERHRQGKTAGQRLREGRMESQRGEDGDSERGRMETQRERKMETRKDGDSGVWRVREGRMDTREDGESGGWRLIERGGWRVRRGWRLERE

SEQ ID NO: 1226 - protein, 478 aa, Homo Sapiens
GPPPAPPGLPAGADCLNSFTAGVPGFVLDTNASVSNGATFLESPTVRRGWDCVRACCTTQNCNLALVELQPDRGEDAIAACFLINCLYEQNFVCKFAPREGFINYLTREVYRSYRQLRTQGFGGSGIPKAWAGIDLKVQPQEPLVLKDVENTDWRLLRGDTDVRVERKDPNQVELWGLKEGTYLFQLTVTSSDHPEDTANVTVTVLSTKQTEDYCLASNKVGRCRGSFPRWYYDPTEQICKSFVYGGCLGNKNNYLREEECILACRGVQGPSMERRHPVCSGTCQPTQFRCSNGCCIDSFLECDDTPNCPDASDEAACEKYTSGFDELQRIHFPSDKGHCVDLPDTGLCKESIPRWYYNPFSEHCARFTYGGCYGNKNNFEEEQQCLESCRGISKKDVFGLRREIPIPSTGSVEMAVAVFLVICIVVVVAILGYCFFKNQRKDFHGHHHHPPPTPASSTVSTTEDTEHLVYNHTTRPL

SEQ ID NO: 1227 - protein, 434 aa, Homo Sapiens
FPGSGDSPLEDDEVGYSHPRYKDTPWCSPIKVKYGDVYCRAPQGGYYKTALGTRCDIRCQKGYELHGSSLLICQSNKRWSDKVICKQKRCPTLAMPANGGFKCVDGAYFNSRCEYYCSPGYTLKGERTVTCMDNKAWSGRPASCVDMEPPRIKCPSVKERIAEPNKLTVRVSWETPEGRDTADGILTDVILKGLPPGSNFPEGDHKIQYTVYDRAENKGTCKFRVKVRVKRCGKLNAPENGYMKCSSDGDNYGATCEFSCIGGYELQGSPARVCQSNLAWSGTEPTCAAMNVNVGVRTAAALLDQFYEKRRLLIVSTPTARNLLYRLQLGMLQQAQCGLDLRHITVVELVGVFPTLIGRIGAKIMPPALALQLRLLLRIPLYSFSMVLVDKHGMDKERYVSLVMPVALFNLIDTFPLRKEEMVLQAEMSQTCNT

SEQ ID NO: 1228 - protein, 442 aa, Homo Sapiens
TWYAGSGYYPDESYNEVYAEEVPQAPALDYRVPRWCYTLNIQDGEATCYSPKGGNYHSSLGTRCELSCDRGFRLIGRRSVQCLPSRRWSGTAYCRQMRCHALPFITSGTYTCTNGVLLDSRCDYSCSSGYHLEGDRSRICMEDGRWSGGEPVCVDIDPPKIRCPHSREKMAEPEKLTARVYWDPPLVKDSADGTITRVTLRGPEPGSHFPEGEHVIRYTAYDRAYNRASCKFIVKVQVRRCPTLKPPQHGYLTCTSAGDNYGATCEYHCDGGYDRQGTPSRVCQSSRQWSGSPPICAPMKINVNVNSAAGLLDQFYEKQRLLIISAPDPSNRYYKMQISMLQQSTCGLDLRHVTIIELVGQPPQEVGRIREQQLSANIIEELRQFQRLTRSYFNMVLIDKQGIDRDRYMEPVTPEEIFTFIDDYLLSNQELTQRREQRDICE

SEQ ID NO: 1229 - protein, 190 aa, Homo Sapiens
MTGTLRTRAWPAAKRAAGLRWALRDEARLSDCFHLGWGQHNCGHHEDAGALCAGEADSEGPEELGLQVQQDGSETTRVPTPRPRDGHLRLVNGAHRCEGRVELYLGQRWGTVCDDAWDLRAAGVLCRQLGCGQALAAPGEAHFGPGRGPILLDNVKCRGEESALLLCSHIRWDAHNCDHSEDASVLCQPS

SEQ ID NO: 1230 - protein, 191 aa, Homo Sapiens
LSHSHSEKATGTSSGANSEESTAAEFCRIDKPLCHSEDEKLSFEAVRNIHKLMDDDANGDVDVEESDEFLREDLNYHDPTVKHSTFHGEDKLISVEDLWKAWKSSEVYNWTVDEVVQWLITYVELPQYEETFRKLQLSGHAMPRLAVTNTTMTGTVLKMTDRSHRQKLQLKALDTVLFGPPLLTRHNHLKD

SEQ ID NO: 1231 - protein, 204 aa, Homo Sapiens
CELVPRHLRGRRATGSAATAASSPAAAAGDSPALMTDPCMSLSPPCFTEEDRFSLEALQTIHKQMDDDKDGGIEVEESDEFIREDMKYKDATNKHSHLHREDKHITIEDLWKRWKTSEVHNWTLEDTLQWLIEFVELPQYEKNFRDNNVKGTTLPRIAVHEPSFMISQLKISDRSHRQKLQLKALDVVLFGPLTRPPHNWMKDF

SEQ ID NO: 1232 - protein, 728 aa, Homo Sapiens
APGPDGLDVCATCHEHATCQQREGKKICICNYGFVGNGRTQCVDKNECQFGATLVCGNHTSCHNTPGGFYCICLEGYRATNNNKTFIPNDGTFCTDIDECEVSGLCRHGGRCVNTHGSFECYCMDGYLPRNGPEPFHPTTDATSCTEIDCGTPPEVPDGYIIGNYTSSLGSQVRYACREGFFSVPEDTVSSCTGLGTWESPKLHCQEINCGNPPEMRHAILVGNHSSRLGGVARYVCQEGFESPGGKITSVCTEKGTWRESTLTCTEILTKINDVSLFNDTCVRWQINSRRINPKISYVISIKGQRLDPMESVREETVNLTTDSRTPEVCLALYPGTNYTVNISTAPPRRSMPAVIGFQTAEVDLLEDDGSFNISIFNETCLKLNRRSRKVGSEHMYQFTVLGQRWYLANFSHATSFNFTTREQVPVVCLDLYPTTDYTVNVTLLRSPKRHSVQITIATPPAVKQTISNISGFNETCLRWRSIKTADMEEMYLFQIWGQRWYQKEFAQEMTFNISSSSRDPEVCLDLRPGTNYNVSLRALSSELPVVISLTTQITEPPLPEVEFFTVHRGPLPRLRLRKAKEKNGPISSYQVLVLPLALQSTFSCDSEGASSFFSNASDADGYVAAELLAKDVPDDAMEIPIGDRLYYGEYYNAPLKRGSDYCIILRITSEWNKVRRHSCAVWAQVKEIPCNCNFLRLHIHRANSGDTQIRHSCCCRWRVLDWVPWLL

SEQ ID NO: 1233 - protein, 758 aa, Homo Sapiens
QESCSMRCGALDGPCSCHPTCSGLGTCCLDFRDFCLEILPYSGSMMGGKDFVVRHFKMSSPTDASVICRFKDSIQTLGHVDSSGQVHCVSPLLYESGRIPFTVSLDNGHSFPRAGTWLAVHPNKVSMMEKSELVNETRWQYYGTANTSGNLSLTWHVKSLPTQTITIELWGYEETGMPYSQEWTAKWSYLYPLATHIPNSGSFTFTPKPAPPSYQRWRVGALRIIDSKNYAGQKDVQALWTNDHALAWHLSDDFREDPVAWARTQCQAWEELEDQLPNFLEELPDCPCTLTQARADSGRFFTDYGCDMEQGSVCTYHPGAVHCVRSVQASLRYGSGQQCCYTADGTQLLTADSSGGSTPDRGHDWGAPPFRTPPRVPSMSHWLYDVLSFYYCCLWAPDCPRYMQRRPSNDCRNYRPPRLASAFGDPHFVTFDGTNFTFNGRGEYVLLEAALTDLRVQARAQPGTMSNGTETRGTGLTAVAVQEGNSDVVEVRLANRTGGLEVLLNQEVLSFTEQSWMDLKGMFLSVAAGDRVSIMLASGAGLEVSVQGPFLSVSVLLPEKFLTHTHGLLGTLNNDPTDDFTLHSGRVLPPGTSPQELFLFGANWTVHNASSLLTYDSWFLVHNFLYQPKHDPTFEPLFPSETTLNPSLAQEAAKLCGDDHFCNFDVAATGSLSTGTATRVAHQLHQRRMQSLQPVVSCGWLAPPPNGQKEGNRYLAGSTIYFHCDNGYSLAGAETSTCQADGTWSSPTPKCQPGRSYA

SEQ ID NO: 1234 - protein, 249 aa, Homo Sapiens
FGPAQLTGGFDDLQVCADPGIPENGFRTPSGGVFFEGSVARFHCQDGFKLKGATKRLCLKHFNGTLGWIPSDNSICVQEDCRIPQIEDAEIHNKTYRHGEKLIITCHEGFKIRYPDLHNMVSLCRDDGTWNNLPICQGCLRPLASSNGYVNISELQTSFPVGTVISYRCFPGFKLDGSAYLECLQNLIWSSSPPRCLALEGGRPEHLFPVLYFPHIRLAAAVLYFCPVLKSSPTPAPTCSSTSTTTSLF

SEQ ID NO: 1235 - protein, 41 aa, Homo Sapiens
DGGEEQTLSTEAETWEGAGPSIQLQLQEVKTGKASQFFGLM

SEQ ID NO: 1236 - protein, 220 aa, Homo Sapiens
QGDTRGDGSLPKPSLSAWPSSVVPANSNVTLRCWTPARGVSFVLRKGGIILESPKPLDSTEGAAEFHLNNLKVRNAGEYTCEYYRKASPHILSQRSDVLLLLVTGHLSKPFLRTYQRGTVTAGGRVTLQCQKRDQLFVPIMFALLKAGTPSPIQLQSPAGKEIDFSLVDVTAGDAGNYSCMYYQTKSPFWASEPSDQLEILVTVPPGTTSSNYSLGNFVR

SEQ ID NO: 1237 - protein, 120 aa, Homo Sapiens
LGHQEFARPSRGYLAFRDDSIWPQEEPAIRPRSSQRVPPMGIQHSKELNRTCCLNGGTCMLGSFCACPPSFYGRNCEHDVRKENCGSVPHDTWLPKKCSLCKCWHGQLRCFPQAFLPGCD

SEQ ID NO: 1238 - protein, 725 aa, Homo Sapiens
MDLILINSLPLVSDAETSLTCIASGWRPHEPITIGRDFEALMNQHQDPLEVTQDVTREWAKKVVWKREKASKINGAYFCEGRVRGEAIRIRTMKMRQQASFLPATLTMTVDKGDNVNISFKKVLIKEEDAVIYKNGSFIHSVPRHEVPDILEVHLPHAQPQDAGVYSARYIGGNLFTSAFTRLIVRRCEAQKWGPECNHLCTACMNNGVCHEDTGECICPPGFMGRTCEKACELHTFGRTCKERCSGQEGCKSYVFCLPDPYGCSCATGWKGLQCNEACHPGFYGPDCKLRCSCNNGEMCDRFQGCLCSPGWQGLQCEREGIPRMTPKIVDLPDHIEVNSGKFNPICKASGWPLPTNEEMTLVKPDGTVLHPKDFNHTDHFSVAIFTIHRILPPDSGVWVCSVNTVAGMVEKPFNISVKVLPKPLNAPNVIDTGHNFAVINISSEPYFGDGPIKSKKLLYKPVNHYEAWQHIQVTNEIVTLNYLEPRTEYELCVQLVRRGEGGEGHPGPVRRFTTASIGLPPPRGLNLLPKSQTTLNLTWQPIFPSSEDDFYVEVERRSVQKSDQQNIKVPGNLTSVLLNNLHPREQYVVRARVNTKAQGEWSEDLTAWTLSDILPPQPENIKISNITHSSAVISWTILDGYSISSITIRYKVQGKNEDQHVDVKIKNATITQYQLKGLEPETAYQVDIFAENNIGSSNPAFSHELVTLPESQAPADLGGGKMLL

SEQ ID NO: 1239 - protein, 130 aa, Homo Sapiens
ILENGVNVTVSQMTSVLNGRTRRFADIQLQHGALCFNIRYGTTVEEEKNHVLEIARQRAVAQAWTKEQRRLQEGEEGIRAWTEGEKQQLLSTGRVQGYDGYFVLSVEQYLELSDSANNIHFMRQSEIGRR

SEQ ID NO: 1240 - protein, 197 aa, Homo Sapiens
LYCQKGLSMTVEADPANMFNWTTEEVETCDKGALCQETILIIKAGTETAILATKGCIPEGEEAITIVQHSSPPGLIVTSYSNYCEDSFCNDKDSLSQFWEFSETTASTVSTTLHCPTCVALGTCFSAPSLPCPNGTTRCYQGKLEITGGGIESSVEVKGCTAMIGCRLMSGILAVGPMFVREACPHQLLTQPRKTEN

SEQ ID NO: 1241 - protein, 679 aa, Homo Sapiens
VPDKTVRWCAVSEHEATKCQSFRDHMKSVIPSDGPSVACVKKASYLDCIRAIAANEADAVTLDAGLVYDAYLAPNNLKPVVAEFYGSKEDPQTFYYAVAVVKKDSGFQMNQLRGKKSCHTGLGRSAGWNIPIGLLYCDLPEPRKPLEKAVANFFSGSCAPCADGTDFPQLCQLCPGCGCSTLNQYFGYSGAFKCLKNGAGDVAFVKHSTIFENLANKADRDQYELLCLDNTRKPVDEYKDCHLAQVPSHTVVARSMGGKEDLIWELLNQAQEHFGKDKSKEFQLFSSPHGKDLLFKDSAHGFLKVPPRMDAKMYLGYEYVTAIRNLREGTCQEAPTDECKPVKWCALSHHERLKCDEWSVNSVGKIECVSAETTEDCIAKIMNGEADAMSLDGGFVYIAGKCGLVPVLAENYNKSDNCEDTPEAGYFAVAVVKKSASDLTWDNLKGKKSCHTAVGRTAGWNIPMGLLYNKINHCRFDEFFSEGCAPGSKKDSSLCKLCMGSGLNLCEPNNKEGYYGYTGAFRCLVEKGDVAFVKHQTVPQNTGGKNPDPWAKNLNEKDYELLCLDGTRKPVEEYANCHLARAPNHAVVTRKDKEACVHKILRQQQHLFGSNVTDCSGNFCLFRSETKDLLFRDDTVCLAKLHDRNTYEKYLGEEYVKAVGNLRKCSTSSLLEACTFRRP

SEQ ID NO: 1242 - protein, 697 aa, Homo Sapiens
RGSCQACGDSVLVVSEDVNYEPDLDFHQGRLYWSDLQAMFLQFLGEGRLEDTIRQTSLRERVAGSAGMAALTQDIRAALSRQKLDHVWTDTHYVGLQFPDPAHPNTLHWVDEAGKVGEQLPLEDPDVYCPYSAIGNVTGELVYAHYGRPEDLQDLRARGVDPVGRLLLVRVGVISFAQKVTNAQDFGAQGVLIYPEPADFSQDPPKPSLSSQQAVYGHVHLGTGDPYTPGFPSFNQTQFPPVASSGLPSIPAQPISADIASRLLRKLKGPVAPQEWQGSLLGSPYHLGPGPRLRLVVNNHRTSTPINNIFGCIEGRSEPDHYVVIGAQRDAWGPGAAKSAVGTAILLELVRTFSSMVSNGFRPRRSLLFISWDGGDFGSVGSTEWLEGYLSVLHLKAVVYVSLDNAVLGDDKFHAKTSPLLTSLIESVLKQVDSPNHSGQTLYEQVVFTNPSWDAEVIRPLPMDSSAYSFTAFVGVPAVEFSFMEDDQAYPFLHTKEDTYENLHKVLQGRLPAVAQAVAQLAGQLLIRLSHDRLLPLDFGRYGDVVLRHIGNLNEFSGDLKARGLTLQWVYSARGDYIRAAEKLRQEIYSSEERDERLTRMYNVRIMRVEFYFLSQYVSPADSPFRHIFMGRGDHTLGALLDHLRLLRSNSSGTPGATSSTGFQESRFRRQLALLTWTLQGAANALSGDVWNIDNNF

SEQ ID NO: 1243 - protein, 672 aa, Homo Sapiens
CKGVEPKTECERLAGTESPVREEPGEDFPAARRLYWDDLKRKLSEKLDSTDFTGTIKLLNENSYVPREAGSQKDENLALYVENQFREFKLSKVWRDQHFVKIQVKDSAQNSVIIVDKNGRLVYLVENPGGYVAYSKAATVTGKLVHANFGTKKDFEDLYTPVNGSIVIVRAGKITFAEKVANAESLNAIGVLIYMDQTKFPIVNAELSFFGHAHLGTGDPYTPGFPSFNHTQFPPSRSSGLPNIPVQTISRAAAEKLFGNMEGDCPSDWKTDSTCRMVTSESKNVKLTVSNVLKEIKILNIFGVIKGFVEPDHYVVVGAQRDAWGPGAAKSGVGTALLLKLAQMFSDMVLKDGFQPSRSIIFASWSAGDFGSVGATEWLEGYLSSLHLKAFTYINLDKAVLGTSNFKVSASPLLYTLIEKTMQNVKHPVTGQFLYQDSNWASKVEKLTLDNAAFPFLAYSGIPAVSFCFCEDTDYPYLGTTMDTYKELIERIPELNKVARAAAEVAGQFVIKLTHDVELNLDYERYNSQLLSFVRDLNQYRADIKEMGLSLQWLYSARGDFFRATSRLTTDFGNAEKTDRFVMKKLNDRVMRVEYHFLSPYVSPKESPFRHVFWGSGSHTLPALLENLKLRKQNNGAFNETLFRNQLALATWTIQGAANALSGDVWDIDNEF

SEQ ID NO: 1244 - protein, 50 aa, Homo Sapiens
VVSHFNDCPDSHTQFCFHGTCRFLVQEDKPACVCHSGYVGARCEHADLLA

SEQ ID NO: 1245 - protein, 112 aa, Homo Sapiens
ALDTNYCFSSTEKNCCVRQLYIDFRKDLGWKWIHEPKGYHANFCLGPCPYIWSLDTQYSKVLALYNQHNPGASAAPCCVPQALEPLPIVYYVGRKPKVEQLSNMIVRSCKCS

SEQ ID NO: 1246 - protein, 112 aa, Homo Sapiens
ALDAAYCFRNVQDNCCLRPLYIDFKRDLGWKWIHEPKGYNANFCAGACPYLWSSDTQHSRVLSLYNTINPEASASPCCVSQDLEPLTILYYIGKTPKIEQLSNMIVKSCKCS

SEQ ID NO: 1247 - protein, 277 aa, Homo Sapiens
LSTCTTLDFGHIKKKRVEAIRGQILSKLRLTSPPEPTVMTHVPYQVLALYNSTRELLEEMHGEREEGCTQENTESEYYAKEIHKFDMIQGLAEHNELAVCPKGITSKVFRFNVSSVEKNRTNLFRAEFRVLRVPNPSSKRNEQRIELFQILRPDEHIAKQRYIGGKNLPTRGTAEWLSFDVTDTVREWLLRRESNLGLEISIHCPCHTFQPNGDILENIHEVMEIKFKGVDNEDDHGRGDLGRLKKQKDHHNPHLILMMIPPHRLDNPGQGGQRKKR

SEQ ID NO: 1248 - protein, 660 aa, Homo Sapiens
GPAKSPYQLVLQHSRLRGRQHGPNVCAVQKVIGTNRKYFTNCKQWYQRKICGKSTVISYECCPGYEKVPGEKGCPAALPLSNLYETLGVVGSTTTQLYTDRTEKLRPEMEGPGSFTIFAPSNEAWASLPAEVLDSLVSNVNIELLNALRYHMVGRRVLTDELKHGMTLTSMYQNSNIQIHHYPNGIVTVNCARLLKADHHATNGVVHLIDKVISTITNNIQQIIEIEDTFETLRAAVAASGLNTMLEGNGQYTLLAPTNEAFEKIPSETLNRILGDPEALRDLLNNHILKSAMCAEAIVAGLSVETLEGTTLEVGCSGDMLTINGKAIISNKDILATNGVIHYIDELLIPDSAKTLFELAAESDVSTAIDLFRQAGLGNHLSGSERLTLLAPLNSVFKDGTPPIDAHTRNLLRNHIIKDQLASKYLYHGQTLETLGGKKLRVFVYRNSLCIENSCIAAHDKRGRYGTLFTMDRVLTPPMGTVMDVLKGDNRFSMLVAAIQSAGLTETLNREGVYTVFAPTNEAFRALPPRERSRLLGDAKELANILKYHIGDEILVSGGIGALVRLKSLQGDKLEVSLKNNVVSVNKEPVAEPDIMATNGVVHVITNVLQPPANRPQERGDELADSALEIFKQASAFSRASQRSVRLAPVYQKLLERMKH

SEQ ID NO: 1249 - protein, 93 aa, Homo Sapiens
LQCFCHLCTKDNFTCVTDGLCFVSVTETTDKVIHNSMCIAEIDLIPRDRPFVCAPSSKTGSVTTTYCCNQDHCNKIELPTTVKSSPGLGPVEL

SEQ ID NO: 1250 - protein, 169 aa, Homo Sapiens
TIPPHVQKSDVEMEAQKDEIICPSCNRTAHPLRHINNDMIVTDNNGAVKFPQLCKFCDVRFSTCDNQKSCMSNCSITSICEKPQEVCVAVWRKNDENITLETVCHDPKLPYHDFILEDAASPKCIMKEKKKPGETFFMCSCSSDECNDNIIFSEEYNTSNPDLLLVIFQ

SEQ ID NO: 1251 - protein, 767 aa, Homo Sapiens
GPEPGALCELSPVSASHPVQALMESFTVLSGCASRGTTGLPQEVHVLNLRTAGQGPGQLQREVTLHLNPISSVHIHHKSVVFLLNSPHPLVWHLKTERLATGVSRLFLVSEGSVVQFSSANFSLTAETEERNFPHGNEHLLNWARKEYGAVTSFTELKIARNIYIKVGEDQVFPPKCNIGKNFLSLNYLAEYLQPKAAEGCVMSSQPQNEEVHIIELITPNSNPYSAFQVDITIDIRPSQEDLEVVKNLILILKCKKSVNWVIKSFDVKGSLKIIAPNSIGFGKESERSMTMTKSIRDDIPSTQGNLVKWALDNGYSPITSYTMAPVANRFHLRLENNAEEMGDEEVHTIPPELRILLDPGALPALQNPPIRGGEGQNGGLPFPFPDISRRVWNEEGEDGLPRPKDPVIPSIQLFPGLREPEEVQGSVDIALSVKCDNEKMIVAVEKDSFQASGYSGMDVTLLDPTCKAKMNGTHFVLESPLNGCGTRPRWSALDGVVYYNSIVIQVPALGDSSGWPDGYEDLESGDNGFPGDMDEGDASLFTRPEIVVFNCSLQQVRNPSSFQEQPHGNITFNMELYNTDLFLVPSQGVFSVPENGHVYVEVSVTKAEQELGFAIQTCFISPYSNPDRMSHYTIIENICPKDESVKFYSPKRVHFPIPQADMDKKRFSFVFKPVFNTSLLFLQCELTLCTKMEKHPQKLPKCVPPDEACTSLDASIIWAMMQNKKTFTKPLAVIHHEAESKEKGPSMKEPNPISPPIFHGLDTLTV

SEQ ID NO: 1252 - protein, 497 aa, Homo Sapiens
APAEPQPGGSQCVEHDCFALYPGPATFLNASQICDGLRGHLMTVRSSVAADVISLLLNGDGGVGRRRLWIGLQLPPGCGDPKRLGPLRGFQWVTGDNNTSYSRWARLDLNGAPLCGPLCVAVSAAEATVPSEPIWEEQQCEVKADGFLCEFHFPATCRPLAVEPGAAAAAVSITYGTPFAARGADFQALPVGSSAAVAPLGLQLMCTAPPGAVQGHWAREAPGAWDCSVENGGCEHACNAIPGAPRCQCPAGAALQADGRSCTASATQSCNDLCEHFCVPNPDQPGSYSCMCETGYRLAADQHRCEDVDDCILEPSPCPQRCVNTQGGFECHCYPNYDLVDGECVEPVDPCFRANCEYQCQPLNQTSYLCVCAEGFAPIPHEPHRCQMFCNQTACPADCDPNTQASCECPEGYILDDGFICTDIDECENGGFCSGVCHNLPGTFECICGPDSALARHIGTDCDSGKVDGGDSGSGEPPPSPTPGSTLTPPAVGLVHS

SEQ ID NO: 1253 - protein, 1152 aa, Homo Sapiens
NRIPESGGDNSVFDIFELTGAARKGSGRRLVKGPDPSSPAFRIEDANLIPPVPDDKFQDLVDAVRAEKGFLLLASLRQMKKTRGTLLALERKDHSGQVFSVVSNGKAGTLDLSLTVQGKQHVVSVEEALLATGQWKSITLFVQEDRAQLYIDCEKMENAELDVPIQSVFTRDLASIARLRIAKGGVNDNFQGVLQNVRFVFGTTPEDILRNKGCSSSTSVLLTLDNNVVNGSSPAIRTNYIGHKTKDLQAICGISCDELSSMVLELRGLRTIVTTLQDSIRKVTEENKELANELRRPPLCYHNGVQYRNNEEWTVDSCTECHCQNSVTICKKVSCPIMPCSNATVPDGECCPRCWPSDSADDGWSPWSEWTSCSTSCGNGIQQRGRSCDSLNNRCEGSSVQTRTCHIQECDKRFKQDGGWSHWSPWSSCSVTCGDGVITRIRLCNSPSPQMNGKPCEGEARETKACKKDACPINGGWGPWSPWDICSVTCGGGVQKRSRLCNNPTPQFGGKDCVGDVTENQICNKQDCPIDGCLSNPCFAGVKCTSYPDGSWKCGACPPGYSGNGIQCTDVDECKEVPDACFNHNGEHRCENTDPGYNCLPCPPRFTGSQPFGQGVEHATANKQVCKPRNPCTDGTHDCNKNAKCNYLGHYSDPMYRCECKPGYAGNGIICGEDTDLDGWPNENLVCVANATYHCKKDNCPNLPNSGQEDYDKDGIGDACDDDDDNDKIPDDRDNCPFHYNPAQYDYDRDDVGDRCDNCPYNHNPDQADTDNNGEGDACAADIDGDGILNERDNCQYVYNVDQRDTDMDGVGDQCDNCPLEHNPDQLDSDSDRIGDTCDNNQDIDEDGHQNNLDNCPYVPNANQADHDKDGKGDACDHDDDNDGIPDDKDNCRLVPNPDQKDSDGDGRGDACKDDFDHDSVPDIDDICPENVDISETDFRRFQMIPLDPKGTSQNDPNWVVRHQGKELVQTVNCDPGLAVGYDEFNAVDFSGTFFINTERDDDYAGFVFGYQSSSRFYVVMWKQVTQSYWDTNPTRAQGYSGLSVKVVNSTTGPGEHLRNALWHTGNTPGQVRTLWHDPRHIGWKDFTAYRWRLSHRPKTGFIRVVMYEGKKIMADSGPIYDKTYAGGRLGLFVFSQEMVFFSDLKYECRDP

SEQ ID NO: 1254 - protein, 1154 aa, Homo Sapiens
GHQDKDTTFDLFSISNINRKTIGAKQFRGPDPGVPAYRFVRFDYIPPVNADDLSKITKIMRQKEGFFLTAQLKQDGKSRGTLLALEGPGLSQRQFEIVSNGPADTLDLTYWIDGTRHVVSLEDVGLADSQWKNVTVQVAGETYSLHVGCDLIDSFALDEPFYEHLQAEKSRMYVAKGSARESHFRGLLQNVHLVFENSVEDILSKKGCQQGQGAEINAISENTETLRLGPHVTTEYVGPSSERRPEVCERSCEELGNMVQELSGLHVLVNQLSENLKRVSNDNQFLWELIGGPPKTRNMSACWQDGRFFAENETWVVDSCTTCTCKKFKTICHQITCPPATCASPSFVEGECCPSCLHSVDGEEGWSPWAEWTQCSVTCGSGTQQRGRSCDVTSNTCLGPSIQTRACSLSKCDTRIRQDGGWSHWSPWSSCSVTCGVGNITRIRLCNSPVPQMGGKNCKGSGRETKACQGAPCPIDGRWSPWSPWSACTVTCAGGIRERTRVCNSPEPQYGGKACVGDVQERQMCNKRSCPVDGCLSNPCFPGAQCSSFPDGSWSCGSCPVGFLGNGTHCEDLDECALVPDICFSTSKVPRCVNTQPGFHCLPCPPRYRGNQPVGVGLEAAKTEKQVCEPENPCKDKTHNCHKHAECIYLGHFSDPMYKCECQTGYAGDGLICGEDSDLDGWPNLNLVCATNATYHCIKDNCPHLPNSGQEDFDKDGIGDACDDDDDNDGVTDEKDNCQLLFNPRQADYDKDEVGDRCDNCPYVHNPAQIDTDNNGEGDACSVDIDGDDVFNERDNCPYVYNTDQRDTDGDGVGDHCDNCPLVHNPDQTDVDNDLVGDQCDNNEDIDDDGHQNNQDNCPYISNANQADHDRDGQGDACDPDDDNDGVPDDRDNCRLVFNPDQEDLDGDGRGDICKDDFDNDNIPDIDDVCPENNAISETDFRNFQMVPLDPKGTTQIDPNWVIRHQGKELVQTANSDPGIAVGFDEFGSVDFSGTFYVNTDRDDDYAGFVFGYQSSSRFYVVMWKQVTQTYWEDQPTRAYGYSGVSLKVVNSTTGTGEHLRNALWHTGNTPGQVRTLWHDPRNIGWKDYTAYRWHLTHRPKTGYIRVLVHEGKQVMADSGPIYDQTYAGGRLGLFVFSQEMVYFSDLKYECRDI

SEQ ID NO: 1255 - protein, 500 aa, Homo Sapiens
TDTDIDGYPDQALPCMDNNKHCKQDNCLLTPNSGQEDADNDGVGDQCDDDADGDGIKNVEDNCRLFPNKDQQNSDTDSFGDACDNCPNVPNNDQKDTDGNGEGDACDNDVDGDGIPNGLDNCPKVPNPLQTDRDEDGVGDACDSCPEMSNPTQTDADSDLVGDVCDTNEDSDGDGHQDTKDNCPQLPNSSQLDSDNDGLGDECDGDDDNDGIPDYVPPGPDNCRLVPNPNQKDSDGNGVGDVCEDDFDNDAVVDPLDVCPESAEVTLTDFRAYQTVVLDPEGDAQIDPNWVVLNQGMEIVQTMNSDPGLAVGYTAFNGVDFEGTFHVNTVTDDDYAGFLFSYQDSGRFYVVMWKQTEQTYWQATPFRAVAQPGLQLKAVTSVSGPGEHLRNALWHTGHTPDQVRLLWTDPRNVGWRDKTSYRWQLLHRPQVGYIRVKLYEGPQLVADSGVIIDTSMRGGRLGVFCFSQENIIWSNLQYRCNDTVPEDFEPFRRQLLQGRV

SEQ ID NO: 1256 - protein, 935 aa, Homo Sapiens
TPQVFDLLPSSSQRLNPGALLPVLTDPALNDLYVISTFKLQTKSSATIFGLYSSTDNSKYFEFTVMGRLNKAILRYLKNDGKVHLVVFNNLQLADGRRHRILLRLSNLQRGAGSLELYLDCIQVDSVHNLPRAFAGPSQKPETIELRTFQRKPQDFLEELKLVVRGSLFQVASLQDCFLQQSEPLAATGTGDFNRQFLGQMTQLNQLLGEVKDLLRQQVKETSFLRNTIAECQACGPLKFQSPTPSTVVPPAPPAPPTRPPRRCDSNPCFRGVQCTDSRDGFQCGPCPEGYTGNGITCIDVDECKYHPCYPGVHCINLSPGFRCDACPVGFTGPMVQGVGISFAKSNKQVCTDIDECRNGACVPNSICVNTLGSYRCGPCKPGYTGDQIRGCKAERNCRNPELNPCSVNAQCIEERQGDVTCVCGVGWAGDGYICGKDVDIDSYPDEELPCSARNCKKDNCKYVPNSGQEDADRDGIGDACDEDADGDGILNEQDNCVLIHNVDQRNSDKDIFGDACDNCLSVLNNDQKDTDGDGRGDACDDDMDGDGIKNILDNCPKFPNRDQRDKDGDGVGDACDSCPDVSNPNQSDVDNDLVGDSCDTNQDSDGDGHQDSTDNCPTVINSAQLDTDKDGIGDECDDDDDNDGIPDLVPPGPDNCRLVPNPAQEDSNSDGVGDICESDFDQDQVIDRIDVCPENAEVTLTDFRAYQTVVLDPEGDAQIDPNWVVLNQGMEIVQTMNSDPGLAVGYTAFNGVDFEGTFHVNTQTDDDYAGFIFGYQDSSSFYVVMWKQTEQTYWQATPFRAVAEPGIQLKAVKSKTGPGEHLRNSLWHTGDTSDQVRLLWKDSRNVGWKDKVSYRWFLQHRPQVGYIRVRFYEGSELVADSGVTIDTTMRGGRLGVFCFSQENIIWSNLKYRCNDTIPEDFQEFQTQNFDRFDN

SEQ ID NO: 1257 - protein, 111 aa, Homo Sapiens
QKVTSLTACLVDQSLRLDCRHENTSSSPIQYEFSLTRETKKHVLFGTVGVPEHTYRSRTNFTSKYNMKVLYLSAFTSKDEGTYTCALHHSGHSPPISSQNVTVLRDKLVKC

SEQ ID NO: 1258 - protein, 738 aa, Homo Sapiens
AVDLTLLANLRLTDPQRFFLTCVSGEAGAGRGSDAWGPPLLLEKDDRIVRTPPGPPLRLARNGSHQVTLRGFSKPSDLVGVFSCVGGAGARRTRVIYVHNSPGAHLLPDKVTHTVNKGDTAVLSARVHKEKQTDVIWKSNGSYFYTLDWHEAQDGRFLLQLPNVQPPSSGIYSATYLEASPLGSAFFRLIVRGCGAGRWGPGCTKECPGCLHGGVCHDHDGECVCPPGFTGTRCEQACREGRFGQSCQEQCPGISGCRGLTFCLPDPYGCSCGSGWRGSQCQEACAPGHFGADCRLQCQCQNGGTCDRFSGCVCPSGWHGVHCEKSDRIPQILNMASELEFNLETMPRINCAAAGNPFPVRGSIELRKPDGTVLLSTKAIVEPEKTTAEFEVPRLVLADSGFWECRVSTSGGQDSRRFKVNVKVPPVPLAAPRLLTKQSRQLVVSPLVSFSGDGPISTVRLHYRPQDSTMDWSTIVVDPSENVTLMNLRPKTGYSVRVQLSRPGEGGEGAWGPPTLMTTDCPEPLLQPWLEGWHVEGTDRLRVSWSLPLVPGPLVGDGFLLRLWDGTRGQERRENVSSPQARTALLTGLTPGTHYQLDVQLYHCTLLGPASPPAHVLLPPSGPPAPRHLHAQALSDSEIQLTWKHPEALPGPISKYVVEVQVAGGAGDPLWIDVDRPEETSTIIRGLNASTRYLFRMRASIQGLGDWSNTVEESTLGNGLQAEGPVQESRAAEEGLDQ

SEQ ID NO: 1259 - protein, 120 aa, Homo Sapiens
MMTGTIETTGNISAEKGGSIILQCHLSSTTAQVTQVNWEQQDQLLAICNADLGWHISPSFKDRVAPGPGLGLTLQSLTVNDTGEYFCIYHTYPDGTYTGRIFLEVLESSVAEHGARFQIP

SEQ ID NO: 1260 - protein, 290 aa, Homo Sapiens
ETVVTEVLGHRVTLPCLYSSWSHNSNSMCWGKDQCPYSGCKEALIRTDGMRVTSRKSAKYRLQGTIPRGDVSLTILNPSESDSGVYCCRIEVPGWFNDVKINVRLNLQRASTTTHRTATTTTRRTTTTSPTTTRQMTTTPAALPTTVVTTPDLTTGTPLQMTTIAVFTTANTCLSLTPSTLPEEATGLLTPEPSKEGPILTAESETVLPSDSWSSAESTSADTVLLTSKESKVWDLPSTSHVSMWKTSDSVSSPQPGASDTAVPEQNKTTKTGQMDGIPMSMKNEMPISQ

SEQ ID NO: 1261 - protein, 866 aa, Homo Sapiens
AATSRTERIWPGGVIPYVIGGNFTGSQRAMFKQAMRHWEKHTCVTFIERSDEESYIVFTYRPCGCCSYVGRRGNGPQAISIGKNCDKFGIVVHELGHVIGFWHEHTRPDRDNHVTIIRENIQPGQEYNFLKMEPGEVNSLGERYDFDSIMHYARNTFSRGMFLDTILPSRDDNGIRPAIGQRTRLSKGDIAQARKLYRCPACGETLQESNGNLSSPGFPNGYPSYTHCIWRVSVTPGEKIVLNFTTMDLYKSSLCWYDYIEVRDGYWRKSPLLGRFCGDKLPEVLTSTDSRMWIEFRSSSNWVGKGFAAVYEAICGGEIRKNEGQIQSPNYPDDYRPMKECVWKITVSESYHVGLTFQSFEIERHDNCAYDYLEVRDGTSENSPLIGRFCGYDKPEDIRSTSNTLWMKFVSDGTVNKAGFAANFFKEEDECAKPDRGGCEQRCLNTLGSYQCACEPGYELGPDRRSCEAACGGLLTKLNGTITTPGWPKEYPPNKNCVWQVVAPTQYRISVKFEFFELEGNEVCKYDYVEIWSGLSSESKLHGKFCGAEVPEVITSQFNNMRIEFKSDNTVSKKGFKAHFFSDKDECSKDNGGCQHECVNTMGSYMCQCRNGFVLHDNKHDCKEAECEQKIHSPSGLITSPNWPDKYPSRKECTWEISATPGHRIKLAFSEFEIEQHQECAYDHLEVFDGETEKSPILGRLCGNKIPDPLVATGNKMFVRFVSDASVQRKGFQATHSTECGGRLKAESKPRDLYSHAQFGDNNYPGQVDCEWLLVSERGSRLELSFQTFEVEEEADCGYDYVELFDGLDSTAVGLGRFCGSGPPEEIYSIGDSVLIHFHTDDTINKKGFHIRYKSIRYPDTTHTKK

SEQ ID NO: 1262 - protein, 866 aa, Homo Sapiens
ATTSRTERIWPGGVIPYVIGGNFTGSQRAIFKQAMRHWEKHTCVTFIERTDEESFIVFSYRTCGCCSYVGRRGGGPQAISIGKNCDKFGIVAHELGHVVGFWHEHTRPDRDQHVTIIRENIQPGQEYNFLKMEAGEVSSLGETYDFDSIMHYARNTFSRGVFLDTILPRQDDNGVRPTIGQRVRLSQGDIAQARKLYKCPACGETLQDTTGNFSAPGFPNGYPSYSHCVWRISVTPGEKIVLNFTSMDLFKSRLCWYDYVEVRDGYWRKAPLLGRFCGDKIPEPLVSTDSRLWVEFRSSSNILGKGFFAAYEATCGGDMNKDAGQIQSPNYPDDYRPSKECVWRITVSEGFHVGLTFQAFEIERHDSCAYDYLEVRDGPTEESALIGHFCGYEKPEDVKSSSNRLWMKFVSDGSINKAGFAANFFKEVDECSWPDHGGCEHRCVNTLGSYKCACDPGYELAADKKMCEVACGGFITKLNGTITSPGWPKEYPTNKNCVWQVVAPAQYRISLQFEVFELEGNDVCKYDFVEVRSGLSPDAKLHGRFCGSETPEVITSQSNNMRVEFKSDNTVSKRGFRAHFFSDKDECAKDNGGCQHECVNTFGSYLCRCRNGYWLHENGHDCKEAGCAHKISSVEGTLASPNWPDKYPSRRECTWNISSTAGHRVKLTFNEFEIEQHQECAYDHLEMYDGPDSLAPILGRFCGSKKPDPTVASGSSMFLRFYSDASVQRKGFQAVHSTECGGRLKAEVQTKELYSHAQFGDNNYPSEARCDWVIVAEDGYGVELTFRTFEVEEEADCGYDYMEAYDGYDSSAPRLGRFCGSGPLEEIYSAGDSLMIRFRTDDTINKKGFHARYTSTKFQDALHMKK

SEQ ID NO: 1263 - protein, 556 aa, Homo Sapiens
SEFLVDRSKNGLIHVPKDLSQKTTILNISQNYISELWTSDILSLSKLRILIISHNRIQYLDISVFKFNQELEYLDLSHNKLVKISCHPTVNLKHLDLSFNAFDALPICKEFGNMSQLKFLGLSTTHLEKSSVLPIAHLNISKVLLVLGETYGEKEDPEGLQDFNTESLHIVFPTNKEFHFILDVSVKTVANLELSNIKCVLEDNKCSYFLSILAKLQTNPKLSNLTLNNIETTWNSFIRILQLVWHTTVWYFSISNVKLQGQLDFRDFDYSGTSLKALSIHQVVSDVFGFPQSYIYEIFSNMNIKNFTVSGTRMVHMLCPSKISPFLHLDFSNNLLTDTVFENCGHLTELETLILQMNQLKELSKIAEMTTQMKSLQQLDISQNSVSYDEKKGDCSWTKSLLSLNMSSNILTDTIFRCLPPRIKVLDLHSNKIKSIPKQVVKLEALQELNVAFNSLTDLPGCGSFSSLSVLIIDHNSVSHPSADFFQSCQKMRSIKAGDNPFQCTCELGEFVKNIDQVSSEVLEGWPDSYKCDYPESYRGTLLKDFHMSELSCNIT

SEQ ID NO: 1264 - protein, 557 aa, Homo Sapiens
DAPELPEERELMTNCSNMSLRKVPADLTPATTTLDLSYNLLFQLQSSDFHSVSKLRVLILCHNRIQQLDLKTFEFNKELRYLDLSNNRLKSVTWYLLAGLRYLDLSFNDFDTMPICEEAGNMSHLEILGLSGAKIQKSDFQKIAHLHLNTVFLGFRTLPHYEEGSLPILNTTKLHIVLPMDTNFWVLLRDGIKTSKILEMTNIDGKSQFVSYEMQRNLSLENAKTSVLLLNKVDLLWDDLFLILQFVWHTSVEHFQIRNVTFGGKAYLDHNSFDYSNTVMRTIKLEHVHFRVFYIQQDKIYLLLTKMDIENLTISNAQMPHMLFPNYPTKFQYLNFANNILTDELFKRTIQLPHLKTLILNGNKLETLSLVSCFANNTPLEHLDLSQNLLQHKNDENCSWPETVVNMNLSYNKLSDSVFRCLPKSIQILDLNNNQIQTVPKETIHLMALRELNIAFNFLTDLPGCSHFSRLSVLNIEMNFILSPSLDFVQSCQEVKTLNAGRNPFRCTCELKNFIQLETYSEVMMVGWSDSYTCEYPLNLRGTRLKDVHLHELSCNT

SEQ ID NO: 1265 - protein, 568 aa, Homo Sapiens
ESSNQASLSCDRNGICKGSSGSLNSIPSGLTEAVKSLDLSNNRITYISNSDLQRCVNLQALVLTSNGINTIEEDSFSSLGSLEHLDLSYNYLSNLSSSWFKPLSSLTFLNLLGNPYKTLGETSLFSHLTKLQILRVGNMDTFTKIQRKDFAGLTFLEELEIDASDLQSYEPKSLKSIQNVSHLILHMKQHILLLEIFVDVTSSVECLELRDTDLDTFHFSELSTGETNSLIKKFTFRNVKITDESLFQVMKLLNQISGLLELEFDDCTLNGVGNFRASDNDRVIDPGKVETLTIRRLHIPRFYLFYDLSTLYSLTERVKRITVENSKVFLVPCLLSQHLKSLEYLDLSENLMVEEYLKNSACEDAWPSLQTLILRQNHLASLEKTGETLLTLKNLTNIDISKNSFHSMPETCQWPEKMKYLNLSSTRIHSVTGCIPKTLEILDVSNNNLNLFSLNLPQLKELYISRNKLMTLPDASLLPMLLVLKISRNAITTFSKEQLDSFHTLKTLEAGGNNFICSCEFLSFTQEQQALAKVLIDWPANYLCDSPSHVRGQQVQDVRLSVSECHRT

SEQ ID NO: 1266 - protein, 681 aa, Homo Sapiens
STTKCTVSHEVADCSHLKLTQVPDDLPTNITVLNLTHNQLRRLPAANFTRYSQLTSLDVGFNTISKLEPELCQKLPMLKVLNLQHNELSQLSDKTFAFCTNLTELHLMSNSIQKIKNNPFVKQKNLITLDLSHNGLSSTKLGTQVQLENLQELLLSNNKIQALKSEELDIFANSSLKKLELSSNQIKEFSPGCFHAIGRLFGLFLNNVQLGPSLTEKLCLELANTSIRNLSLSNSQLSTTSNTTFLGLKWTNLTMLDLSYNNLNVVGNDSFAWLPQLEYFFLEYNNIQHLFSHSLHGLFNVRYLNLKRSFTKQSISLASLPKIDDFSFQWLKCLEHLNMEDNDIPGIKSNMFTGLINLKYLSLSNSFTSLRTLTNETFVSLAHSPLHILNLTKNKISKIESDAFSWLGHLEVLDLGLNEIGQELTGQEWRGLENIFEIYLSYNKYLQLTRNSFALVPSLQRLMLRRVALKNVDSSPSPFQPLRNLTILDLSNNNIANINDDMLEGLEKLEILDLQHNNLARLWKHANPGGPIYFLKGLSHLHILNLESNGFDEIPVEVFKDLFELKIIDLGLNNLNTLPASVFNNQVSLKSLNLQKNLITSVEKKVFGPAFRNLTELDMRFNPFDCTCESIAWFVNWINETHTNIPELSSHYLCNTPPHYHGFPVRLFDTSSCKDSAPFEL

SEQ ID NO: 1267 - protein, 608 aa, Homo Sapiens
ESWEPCVEVVPNITYQCMELNFYKIPDNLPFSTKNLDLSFNPLRHLGSYSFFSFPELQVLDLSRCEIQTIEDGAYQSLSHLSTLILTGNPIQSLALGAFSGLSSLQKLVAVETNLASLENFPIGHLKTLKELNVAHNLIQSFKLPEYFSNLTNLEHLDLSSNKIQSIYCTDLRVLHQMPLLNLSLDLSLNPMNFIQPGAFKEIRLHKLTLRNNFDSLNVMKTCIQGLAGLEVHRLVLGEFRNEGNLEKFDKSALEGLCNLTIEEFRLAYLDYYLDDIIDLFNCLTNVSSFSLVSVTIERVKDFSYNFGWQHLELVNCKFGQFPTLKLKSLKRLTFTSNKGGNAFSEVDLPSLEFLDLSRNGLSFKGCCSQSDFGTTSLKYLDLSFNGVITMSSNFLGLEQLEHLDFQHSNLKQMSEFSVFLSLRNLIYLDISHTHTRVAFNGIFNGLSSLEVLKMAGNSFQENFLPDIFTELRNLTFLDLSQCQLEQLSPTAFNSLSSLQVLNMSHNNFFSLDTFPYKCLNSLQVLDYSLNHIMTSKKQELQHFPSSLAFLNLTQNDFACTCEHQSFLQWIKDQRQLLVEVERMECATPSDKQGMPVLSLNITCQMNK

SEQ ID NO: 1268 - protein, 619 aa, Homo Sapiens
IPSCSFDGRIAFYRFCNLTQVPQVLNTTERLLLSFNYIRTVTASSFPFLEQLQLLELGSQYTPLTIDKEAFRNLPNLRILDLGSSKIYFLHPDAFQGLFHLFELRLYFCGLSDAVLKDGYFRNLKALTRLDLSKNQIRSLYLHPSFGKLNSLKSIDFSSNQIFLVCEHELEPLQGKTLSFFSLAANSLYSRVSVDWGKCMNPFRNMVLEILDVSGNGWTVDITGNFSNAISKSQAFSLILAHHIMGAGFGFHNIKDPDQNTFAGLARSSVRHLDLSHGFVFSLNSRVFETLKDLKVLNLAYNKINKIADEAFYGLDNLQVLNLSYNLLGELYSSNFYGLPKVAYIDLQKNHIAIIQDQTFKFLEKLQTLDLRDNALTTIHFIPSIPDIFLSGNKLVTLPKINLTANLIHLSENRLENLDILYFLLRVPHLQILILNQNRFSSCSGDQTPSENPSLEQLFLGENMLQLAWETELCWDVFEGLSHLQVLYLNHNYLNSLPPGVFSHLTALRGLSLNSNRLTVLSHNDLPANLEILDISRNQLLAPNPDVFVSLSVLDITHNKFICECELSTFINWLNHTNVTIAGPPADIYCVYPDSFSGVSLFSLSTEGCDEEEVLKSLK

SEQ ID NO: 1269 - protein, 449 aa, Homo Sapiens
NEFAVDKSKRGLIHVPKDLPLKTKVLDMSQNYIAELQVSDMSFLSELTVLRLSHNRIQLLDLSVFKFNQDLEYLDLSHNQLQKISCHPIVSFRHLDLSFNDFKALPICKEFGNLSQLNFLGLSAMKLQKLDLLPIAHLHLSYILLDLRNYYIKENETESLQILNAKTLHLVFHPTSLFAIQVNISVNTLGCLQLTNIKLNDDNCQVFIKFLSELTRGPTLLNFTLNHIETTWKCLVRVFQFLWPKPVEYLNIYNLTIIESIREEDFTYSKTTLKALTIEHITNQVFLFSQTALYTVFSEMNIMMLTISDTPFIHMLCPHAPSTFKFLNFTQNVFTDSIFEKCSTLVKLETLIFVLSPNFVQSEWCHYELYFAHHNLFHEGSNNLILILLEPIPQNSIPNKYHKLKALMTQRTYLQWPKEKSKRGLFWANIRAAFNMKLTLVTENNDVKS

SEQ ID NO: 1270 - protein, 813 aa, Homo Sapiens
ARWFPKTLPCDVTLDVPKNHVIVDCTDKHLTEIPGGIPTNTTNLTLTINHIPDISPASFHRLDHLVEIDFRCNCVPIPLGSKNNMCIKRLQIKPRSFSGLTYLKSLYLDGNQLLEIPQGLPPSLQLLSLEANNIFSIRKENLTELANIEILYLGQNCYYRNPCYVSYSIEKDAFLNLTKLKVLSLKDNNVTAVPTVLPSTLTELYLYNNMIAKIQEDDFNNLNQLQILDLSGNCPRCYNAPFPCAPCKNNSPLQIPVNAFDALTELKVLRLHSNSLQHVPPRWFKNINKLQELDLSQNFLAKEIGDAKFLHFLPSLIQLDLSFNFELQVYRASMNLSQAFSSLKSLKILRIRGYVFKELKSFNLSPLHNLQNLEVLDLGTNFIKIANLSMFKQFKRLKVIDLSVNKISPSGDSSEVGFCSNARTSVESYEPQVLEQLHYFRYDKYARSCRFKNKEASFMSVNESCYKYGQTLDLSKNSIFFVKSSDFQHLSFLKCLNLSGNLISQTLNGSEFQPLAELRYLDFSNNRLDLLHSTAFEELHKLEVLDISSNSHYFQSEGITHMLNFTKNLKVLQKLMMNDNDISSSTSRTMESESLRTLEFRGNHLDVLWREGDNRYLQLFKNLLKLEELDISKNSLSFLPSGVFDGMPPNLKNLSLAKNGLKSFSWKKLQCLKNLETLDLSHNQLTTVPERLSNCSRSLKNLILKNNQIRSLTKYFLQDAFQLRYLDLSSNKIQMIQKTSFPENVLNNLKMLLLHHNRFLCTCDAVWFVWWVNHTEVTIPYLATDVTCVGPGAHKGQSVISLDLYTCELDLTN

SEQ ID NO: 1271 - protein, 801 aa, Homo Sapiens
EENFSRSYPCDEKKQNDSVIAECSNRRLQEVPQTVGKYVTELDLSDNFITHITNESFQGLQNLTKINLNHNPNVQHQNGNPGIQSNGLNITDGAFLNLKNLRELLLEDNQLPQIPSGLPESLTELSLIQNNIYNITKEGISRLINLKNLYLAWNCYFNKVCEKTNIEDGVFETLTNLELLSLSFNSLSHVPPKLPSSLRKLFLSNTQIKYISEEDFKGLINLTLLDLSGNCPRCFNAPFPCVPCDGGASINIDRFAFQNLTQLRYLNLSSTSLRKINAAWFKNMPHLKVLDLEFNYLVGEIASGAFLTMLPRLEILDLSFNYIKGSYPQHINISRNFSKLLSLRALHLRGYVFQELREDDFQPLMQLPNLSTINLGINFIKQIDFKLFQNFSNLEIIYLSENRISPLVKDTRQSYANSSSFQRHIRKRRSTDFEFDPHSNFYHFTRPLIKPQCAAYGKALDLSLNSIFFIGPNQFENLPDIACLNLSANSNAQVLSGTEFSAIPHVKYLDLTNNRLDFDNASALTELSDLEVLDLSYNSHYFRIAGVTHHLEFIQNFTNLKVLNLSHNNIYTLTDKYNLESKSLVELVFSGNRLDILWNDDDNRYISIFKGLKNLTRLDLSLNRLKHIPNEAFLNLPASLTELHINDNMLKFFNWTLLQQFPRLELLDLRGNKLLFLTDSLSDFTSSLRTLLLSHNRISHLPSGFLSEVSSLKHLDLSSNLLKTINKSALETKTTTKLSMLELHGNPFECTCDIGDFRRWMDEHLNVKIPRLVDVICASPGDQRGKSIVSLELTTCVSDVT

SEQ ID NO: 1272 - protein, 793 aa, Homo Sapiens
LGTLPAFLPCELQPHGLVNCNWLFLKSVPHFSMAAPRGNVTSLSLSSNRIHHLHDSDFAHLPSLRHLNLKWNCPPVGLSPMHFPCHMTIEPSTFLAVPTLEELNLSYNNIMTVPALPKSLISLSLSHTNILMLDSASLAGLHALRFLFMDGNCYYKNPCRQALEVAPGALLGLGNLTHLSLKYNNLTVVPRNLPSSLEYLLLSYNRIVKLAPEDLANLTALRVLDVGGNCRRCDHAPNPCMECPRHFPQLHPDTFSHLSRLEGLVLKDSSLSWLNASWFRGLGNLRVLDLSENFLYKCITKTKAFQGLTQLRKLNLSFNYQKRVSFAHLSLAPSFGSLVALKELDMHGIFFRSLDETTLRPLARLPMLQTLRLQMNFINQAQLGIFRAFPGLRYVDLSDNRISGASELTATMGEADGGEKVWLQPGDLAPAPVDTPSSEDFRPNCSTLNFTLDLSRNNLVTVQPEMFAQLSHLQCLRLSHNCISQAVNGSQFLPLTGLQVLDLSHNKLDLYHEHSFTELPRLEALDLSYNSQPFGMQGVGHNFSFVAHLRTLRHLSLAHNNIHSQVSQQLCSTSLRALDFSGNALGHMWAEGDLYLHFFQGLSGLIWLDLSQNRLHTLLPQTLRNLPKSLQVLRLRDNYLAFFKWWSLHFLPKLEVLDLAGNQLKALTNGSLPAGTRLRRLDVSCNSISFVAPGFFSKAKELRELNLSANALKTVDHSWFGPLASALQILDVSANPLHCACGAAFMDFLLEVQAAVPGLPSRVKCGSPGQLQGLSIFAQDLRLCLDEALSWDC

SEQ ID NO: 1273 - protein, 94 aa, Homo Sapiens
RHEIKNSFKNNYEKALKQYNSTGDYRSHAVDKIQNTLHCCGVTDYRDWTDTNYYSEKGFPKSCCKLEDCTPQRDADKVNNEGCFIKVMTIIESE

SEQ ID NO: 1274 - protein, 291 aa, Homo Sapiens
SNQPPGGGGGSGGDCPGGKGKSINCSELNVRESDVRVCDESSCKYGGVCKEDGDGLKCACQFQCHTNYIPVCGSNGDTYQNECFLRRAACKHQKEITVIARGPCYSDNGSGSGEGEEEGSGAEVHRKHSKCGPCKYKAECDEDAENVGCVCNIDCSGYSFNPVCASDGSSYNNPCFVREASCIKQEQIDIRHLGHCTDTDDTSLLGKKDDGLQYRPDVKDASDQREDVYIGNHMPCPENLNGYCIHGKCEFIYSTQKASCRCESGYTGQHCEKTDFSILYVVPSRQKLTHV

SEQ ID NO: 1275 - protein, 280 aa, Homo Sapiens
FPTSLSDCQTPTGWNCSGYDDRENDLFLCDTNTCKFDGECLRIGDTVTCVCQFKCNNDYVPVCGSNGESYQNECYLRQAACKQQSEILVVSEGSCATDAGSGSGDGVHEGSGETSQKETSTCDICQFGAECDEDAEDVWCVCNIDCSQTNFNPLCASDGKSYDNACQIKEASCQKQEKIEVMSLGRCQDNTTTTTKSEDGHYARTDYAENANKLEESAREHHIPCPEHYNGFCMHGKCEHSINMQEPSCRCDAGYTGQHCEKKDYSVLYVVPGPVRFQYV

SEQ ID NO: 1276 - protein, 315 aa, Homo Sapiens
GVAAGLYELNLTTDSPATTGAVVTISASLVAKDNGSLALPADAHLYRFHWIHTPLVLTGKMEKGLSSTIRVVGHVPGEFPVSVWVTAADCWMCQPVARGFVVLPITEFLVGDLVVTQNTSLPWPSSYLTKTVLKVSFLLHDPSNFLKTALFLYSWDFGDGTQMVTEDSVVYYNYSIIGTFTVKLKVVAEWEEVEPDATRAVKQKTGDFSASLKLQETLRGIQVLGPTLIQTFQKMTVTLNFLGSPPLTVCWRLKPECLPLEEGECHPVSVASTAYNLTHTFRDPGDYCFSIRAENIISKTHQYHKIQVWPSRIQP

SEQ ID NO: 1277 - protein, 141 aa, Homo Sapiens
SQYCGRLEYWNPDNKCCSSCLQRFGPPPCPDYEFRENCGLNDHGDFVTPPFRKCSSGQCNPDGAELCSPCGGGAVTPTPAAGGGRTPWRCRERPVPAKGHCPLTPGNPGAPSSQERSSPASSIAWRTPEPVPQQAWPNFLP

SEQ ID NO: 1278 - protein, 206 aa, Homo Sapiens
ELEPQIDGQTWAERALRENERHAFTCRVAGGPGTPRLAWYLDGQLQEASTSRLLSVGGEAFSGGTSTFTVTAHRAQHELNCSLQDPRSGRSANASVILNVQFKPEIAQVGAKYQEAQGPGLLVVLFALVRANPPANVTWIDQDGPVTVNTSDFLVLDAQNYPWLTNHTVQLQLRSLAHNLSVVATNDVGVTSASLPAPGLLATRVE

SEQ ID NO: 1279 - protein, 511 aa, Homo Sapiens
GYSGKSEVGLVSEHFSQAPQRLSFYSWYGSARLFRFRVPPDAVLLRWLLQVSRESGAACTDAEITVHFRSGAPPVINPLGTSFPDDTAVQPSFQVGVPLSTAPRSNASVNVSHPAPGDWFVAAHLPPSSQKIELKGLAPTCAYVFQPELLVTRVVEISIMEPDVPLPQTLLSHPSYLKVFVPDYTRELLLELRDCVSNGSLGCPVRLTVGPVTLPSNFQKVLTCTGAPWPCRLLLPSPPWDRWLQVTAESLVGPLGTVAFSAVAALTACRPRSVTVQPLLQSSQNQSFNASSGLLSPSPDHQDLGRSGRVDRSPFCLTNYPVTREDMDVVSVHFQPLDRVSVRVCSDTPSVMRLRLNTGMDSGGSLTISLRANKTEMRNETVVVACVNAASPFLGFNTSLNCTTAFFQGYPLSLSAWSRRANLIIPYPETDNWYLSLQLMCPENAEDCEQAVVHVETTLYLVPCLNDCGPYGQCLLLRRHSYLYASCSCKAGWRGWSCTDNSTAQTVAQQR

SEQ ID NO: 1280 - protein, 196 aa, Homo Sapiens
IPEKLQEAVGKVIINATTCTVTCGLGYKEETVCEVGPDGVRRKCQTRRLECLTNWICGMLHFTILIGKEFELSCLSSDILEFGQEAFRFTWRLARGVISTDDEVFKPFQANSHFVKFKYAQEYDSGTYRCDVQLVKNLRLVKRLYFGLRVLPPNLVNLNFHQSLTEDQKLIDEGLEVNLDSYSKPHHPKWKKKVAS

SEQ ID NO: 1281 - protein, 233 aa, Homo Sapiens
MNMPQSLGNQPLPPEPPSLGTPAEGPGTTSPPEHCWPVRPTLRNELDTFSVHFYIFFGPSVALPPERPAVFAMRLLPVLDSGGVLSLELQLNASSVRQENVTVFGCLTHEVPLSLGDAAVTCSKESLAGFLLSVSATTRVARLRIPFPQTGTWFLALRSLCGVGPRFVRCRNATAEVWMRTFLSPCVDDCGPYGQCKLLRTHNYLYAACECKAGWRGWGCTDSADALTYGFQL

SEQ ID NO: 1282 - protein, 191 aa, Homo Sapiens
VLTVNGKTENYILDTTPGSQASLICAVQNHTREEELLWYREEGRVDLKSGNKINSSSVCVSSISENDNGISFTCRLGRDQSVSVSVVLNVTFPPLLSGNDFQTVEEGSNVKLVCNVKANPQAQMMWYKNSSLLDLEKSRHQIQQTSESFQLSITKVEKPDNGTYSCIAKSSLKTESLDFHLIVKDKTVGVP

SEQ ID NO: 1283 - protein, 128 aa, Homo Sapiens
LSVQQGPNLLQVRQGSQATLVCQVDQATAWERLRVKWTKDGAILCQPYITNGSLSLGVCGPQGRLSWQAPSHLTLQLDPVSLNHSGAYVCWAAVEIPELEEAEGNITRLFVDPDDPTQNRNRIASFPG

SEQ ID NO: 1284 - protein, 181 aa, Homo Sapiens
EPPTQKPKKIVNAKKDVVNTKMFEELKSRLDTLAQEVALLKEQQALQTVCLKGTKVHMKCFLAFTQTKTFHEASEDCISRGGTLSTPQTGSENDALYEYLRQSVGNEAEIWLGLNDMAAEGTWVDMTGARIAYKNWETEITAQPDGGKTENCAVLSGAANGKWFDKRCRDQLPYICQFGIV

SEQ ID NO: 1285 - protein, 157 aa, Homo Sapiens [sequence omitted]

SEQ ID NO: 1286 - protein, 216 aa, Homo Sapiens
ASGTEAAAATPSKVWGSSAGRIEPRGGGRGALPTSMGQHGPSARARAGRAPGPRPAREASPRLRVHKTFKFVVVGVLLQVVPSSAATIKLHDQSIGTQQWEHSPLGELCPPGSHRSEHPGACNRCTEGVGYTNASNNLFACLPCTACKSDEEERSPCTTTRNTACQCKPGTFRNDNSAEMCRKCSRGCPRGMVKVKDCTPWSDIECVHKESGNGHN

SEQ ID NO: 1287 - protein, 155 aa, Homo Sapiens
ITQQDLAPQQRAAPQQKRSSPSEGLCPPGHHISEDGRDCISCKYGQDYSTHWNDLLFCLRCTRCDSGEVELSPCTTTRNTVCQCEEGTFREEDSPEMCRKCRTGCPRGMVKVGDCTPWSDIECVHKESGTKHSGEAPAVEETVTSSPGTPASPCS

SEQ ID NO: 1288 - protein, 151 aa, Homo Sapiens
ATTARQEEVPQQTVAPQQQRHSFKGEECPAGSHRSEHTGACNPCTEGVDYTNASNNEPSCFPCTVCKSDQKHKSSCTMTRDTVCQCKEGTFRNENSPEMCRKCSRCPSGEVQVSNCTSWDDIQCVEEFGANATVETPAAEETMNTSPGTPA

SEQ ID NO: 1289 - protein, 156 aa, Homo Sapiens
ATIPRQDEVPQQTVAPQQQRRSLKEEECPAGSHRSEYTGACNPCTEGVDYTIASNNLPSCLLCTVCKSGQTNKSSCTTTRDTVCQCEKGSFQDKNSPEMCRTCRTGCPRGMVKVSNCTPRSDIKCKNESAASSTGKTPAAEETVTTILGMLASPYH

SEQ ID NO: 1290 - protein, 183 aa, Homo Sapiens
IAPPCTSEKHYEHLGRCCNKCEPGKYMSSKCTTTSDSVCLPCGPDEYLDSWNEEDKCLLHKVCDTGKALVAVVAGNSTTPRRCACTAGYHWSQDCECCRRNTECAPGLGAQHPLQLNKDTVCKPCLAGYFSDAFSSTDKCRPWTNCTFLGKRVEHHGTEKSDAVCSSSLPARKPPNEPHVYLP

SEQ ID NO: 1291 - protein, 380 aa, Homo Sapiens
ETFPPKYLHYDEETSHQLLCDKCPPGTYLKQHCTAKWKTVCAPCPDHYYTDSWHTSDECLYCSPVCKELQYVKQECNRTHNRVCECKEGRYLEIEFCLKHRSCPPGFGVVQAGTPERNTVCKRCPDGFFSNETSSKAPCRKHTNCSVFGLLLTQKGNATHDNICSGNSESTQKCGIDVTLCEEAFFRFAVPTKFTPNWLSVLVDNLPGTKVNAESVERIKRQHSSQEQTFQLLKLWKHQNKDQDIVKKIIQDIDLCENSVQRHIGHANLTFEQLRSLMESLPGKKVGAEDIEKTIKACKPSDQILKLLSLWRIKNGDQDTLKGLMHALKHSKTYHFPKTVTQSLKKTIRFLHSFTMYKLYQKLFLEMIGNQVQSVKISCL

SEQ ID NO: 1292 - protein, 53 aa, Homo Sapiens
EQAPGTAPCSRGSSWSADLDKCMDCASCRARPHSDFCLGCAAAPPAPFRLLWP

SEQ ID NO: 1293 - protein, 119 aa, Homo Sapiens
MSGLGRSRRGGRSRVDQEERWSLSCRKEQGKFYDHLLRDCISCASICGQHPKQCAYFCENKLRSPVNLPPELRRQRSGEVENNSDNSGRYQGLEHRGSEASPALPGLKLSADQVALVYS

SEQ ID NO: 1294 - protein, 78 aa, Homo Sapiens
MRRGPRSLRGRDAPAPTPCVPAECFDLLVRHCVACGLLRTPRPKPAGASSPAPRTALQPQESVGAGAGEAALPLPGLL

SEQ ID NO: 1295 - protein, 164 aa, Homo Sapiens
LPSCKEDEYPVGSECCPKCSPGYRVKEACGELTGTVCEPCPPGTYIAHLNGLSKCLQCQMCDPAMGLRASRNCSRTENAVCGCSPGHFCIVQDGDHCAACRAYATSSPGQRVQKGGTESQDTLCQNCPPGTLSPNGTLEECQHQTKCSWLVTKAGAGTSSSHWV

SEQ ID NO: 1296 - protein, 54 aa, Homo Sapiens
MLQMAGQCSQNEYFDSLLHACIPCQLRCSSNTPPLTCQRYCNASVTNSVKGTNA

SEQ ID NO: 1297 - protein, 141 aa, Homo Sapiens
ESGDCRQQEFRDRSGNCVPCNQCGPGMELSKECGFGYGEDAQCVTCRLHRFKEDWGFQKCKPCLDCAVVNRFQKANCSATSDAICGDCLPGFYRKTKLVGFQDMECVPCGDPPPPYEPHCASKVNLVKIASTASSPRDTAL

SEQ ID NO: 1298 - protein, 137 aa, Homo Sapiens
STTLWQCPPGEEPDLDPGQGTLCRPCPPGTFSAAWGSSPCQPHARCSLWRRLEAQVGMATRDTLCGDCWPGWFGPWGVPRVPCQPCSWAPLGTHGCDEWGRRARRGVEVAAGASSGGETRQPGNGTRAGGPEETAAQ

SEQ ID NO: 1299 - protein, 161 aa, Homo Sapiens
DSVCPQGKYIHPQNNSICCTKCHKGTYLYNDCPGPGQDTDCRECESGSFTASENHLRHCLSCSKCRKEMGQVEISSCTVDRDTVCGCRKNQYRHYWSENLFQCFNCSLCLNGTVHLSCQEKQNTVCTCHAGFFLRENECVSCSNCKKSLECTKLCLPQIEN

SEQ ID NO: 1300 - protein, 235 aa, Homo Sapiens
LPAQVAFTPYAPEPGSTCRLREYYDQTAQMCCSKCSPGQHAKVFCTKTSDTVCDSCEDSTYTQLWNWVPECLSCGSRCSSDQVETQACTREQNRICTCRPGWYCALSKQEGCRLCAPLRKCRPGFGVARPGTETSDVVCKPCAPGTFSNTTSSTDICRPHQICNVVAIPGNASMDAVCTSTSPTRSMAPGAVHLPQPVSTRSQHTQPTPEPSTAPSTSFLLPMGPSPPAEGSTGD

SEQ ID NO: 1301 - protein, 308 aa, Homo Sapiens
QPEQKASNLIGTYRHVDRATGQVLTCDKCPAGTYVSEHCTNTSLRVCSSCPVGTFTRHENGIEKCHDCSQPCPWPMIEKLPCAALTDRECTCPPGMFQSNATCAPHTVCPVGWGVRKKGTETEDVRCKQCARGTFSDVPSSVMKCKAYTDCLSQNLVVIKPGTKETDNVCGTLPSFSSSTSPSPGTAIFPRPEHMETHEVPSSTYVPKGMNSTESNSSASVRPKVLSSIQEGTVPDNTSSARGKEDVNKTLPNLQVVNHQQGPHHRHILKLLPSMEATGGEKSSTPIKGPKRGHPRQNLHKHFDINEH

SEQ ID NO: 1302 - protein, 175 aa, Homo Sapiens
QGGTRSPRCDCAGDFHKKIGLFCCRGCPAGHYLKAPCTEPCGNSTCLVCPQDTFLAWENHHNSECARCQACDEQASQVALENCSAVADTRCGCKPGWFVECQVSQCVSSSPFYCQPCLDCGALHRHTRLLCSRRDTDCGTCLPGFYEHGDGCVSCPTSTLGSCPERCAAVCGWRQ

SEQ ID NO: 1303 - protein, 186 aa, Homo Sapiens [sequence omitted]

SEQ ID NO: 1304 - protein, 173 aa, Homo Sapiens
EPPTACREKQYLINSQCCSLCQPGQKLVSDCTEFTETECLPCGESEFLDTWNRETHCHQHKYCDPNLGLRVQQKGTSETDTICTCEEGWHCTSEACESCVLHRSCSPGFGVKQIATGVSDTICEPCPVGFFSNVSSAFEKCHPWTSCETKDLVVQQAGTNKTDVVCGPQDRLR

SEQ ID NO: 1305 - protein, 148 aa, Homo Sapiens
QVTDINSKGLELRKTVTTVETQNLEGLHHDGQFCHKPCPPGERKARDCTVNGDEPDCVPCQEGKEYTDKAHFSSKCRRCRLCDEGHGLEVEINCTRTQNTKCRCKPNFFCNSTVCEHCDPCTKCEHGIIKECTLTSNTKCKEEGSRSN

SEQ ID NO: 1306 - protein, 271 aa, Homo Sapiens
VAETPTYPWRDAETGERLVCAQCPPGTFVQRPCRRDSPTTCGPCPPRHYTQFWNYLERCRYCNVLCGEREEEARACHATHNRACRCRTGFFAHAGFCLEHASCPPGAGVIAPGTPSQNTQCQPCPPGTFSASSSSSEQCQPHRNCTALGLALNVPGSSSHDTLCTSCTGFPLSTRVPGAEECERAVIDFVAFQDISIKRLQRLLQALEAPEGWGPTPRAGRAALQLKLRRRLTELLGAQDGALLVRLLQALRVARMPGLERSVRERFLPVH

SEQ ID NO: 1307 - protein, 172 aa, Homo Sapiens
ATPAPKSCPERHYWAQGKLCCQMCEPGTFLVKDCDQHRKAAQCDPCIPGVSFSPDHHTRPHCESCRHCNSGLLVRNCTITANAECACRNGWQCRDKECTECDPLPNPSLTARSSQALSPHPQPTHLPYVSEMLEARTAGHMQTLADFRQLPARTLSTHWPPQRSLCSSDFIR

SEQ ID NO: 1308 - protein, 361 aa, Homo Sapiens
FPQDRPFEDTCHGNPSHYYDKAVRRCCYRCPMGLFPTQQCPQRPTDCRKQCEPDYYLDEADRCTACVTCSRDDLVEKTPCAWNSSRVCECRPGMFCSTSAVNSCARCFFHSVCPAGMIVKFPGTAQKNTVCEPASPGVSPACASPENCKEPSSGTIPQAKPTPVSPATSSASTMPVRGGTRLAQEAASKLTRAPDSPSSVGRPSSDPGLSPTQPCPEGSGDCRKQCEPDYYLDEAGRCTACVSCSRDDLVEKTPCAWNSSRTCECRPGMICATSATNSCARCVPYPICAAETVTKPQDMAEKDTTFEAPPLGTQPDCNPTPENGEAPASTSPTQSLLVDSQASKTLPIPTSAPVALSSTGK

SEQ ID NO: 1309 - protein, 163 aa, Homo Sapiens
LQDPCSNCPAGTFCDNNRNQICSPCPPNSFSSAGGQRTCDICRQCKGVFRTRKECSSTSNAECDCTPGFHCLGAGCSMCEQDCKQGQELTKKGCKDCCFGTFNDQKRGICRPWTNCSLDGKSVLVNGTKERDVVCGPSPADLSPGASSVTPPAPAREPGHSPQ

SEQ ID NO: 1310 - protein, 243 aa, Homo Sapiens
TNELKQMQDKYSKSGIACFLKEDDSYWDPNDEESMNSPCWQVKWQLRQLVRKMILRTSEETISTVQEKQQNISPLVRERGPQRVAAHITGTRGRSNTLSSPNSKNEKALGRKINSWESSRSGHSFLSNLHLRNGELVIHEKGFYYIYSQTYFRFQEEIKENTKNDKQMVQYIYKYTSYPDPILLMKSARNSCWSKDAEYGLYSIYQGGIFELKENDRIFVSVTNEHLIDMDHEASFFGAFLVG

SEQ ID NO: 1311 - protein, 178 aa, Homo Sapiens
IRAEKAMVDGSWLDLAKRSKLEAQPFAHLTINATDIPSGSHKVSLSSWYHDRGWAKISNMTFSNGKLIVNQDGFYYLYANICFRHHETSGDLATEYLQLMVYVTKTSIKIPSSHTLMKGGSTKYWSGNSEFHFYSINVGGFFKLRSGEEISIEVSNPSLLDPDQDATYFGAFKVRDID

SEQ ID NO: 1312 - protein, 156 aa, Homo Sapiens
SAPKGRKTRARRAIAAHYEVHPRPGQDGAQAGVDGTVSGWEEARINSSSPLRYNRQIGEFIVTRAGLYYLYCQVHFDEGKAVYLKLDLLVDGVLALRCLEEFSATAASSLGPQLRLCQVSGLLALRPGSSLRIRTLPWAHLKAAPFLTYFGLFQVH

SEQ ID NO: 1313 - protein, 146 aa, Homo Sapiens
AVLTQKQKKQHSVLHLVPINATSKDDSDVTEVMWQPALRRGRGLQAQGYGVRIQDAGVYLLYSQVLFQDVTFTMGQVVSREGQGRQETLFRCIRSMPSHPDRAYNSCYSAGVFHLHQGDILSVIIPRARAKLNLSPHGTFLGFVKL

SEQ ID NO: 1314 - protein, 152 aa, Homo Sapiens [sequence omitted]

SEQ ID NO: 1315 - protein, 156 aa, Homo Sapiens
QERRSHEVNPAAHLTGANSSLTGSGGPLLWETQLGLAFLRGLSYHDGALVVTKAGYYYIYSKVQLGGVGCPLGLASTITHGLYKRTPRYPEELELLVSQQSPCGRATSSSRVWWDSSFLGGVVHLEAGEKVVVRVLDERLVRLRDGTRSYFGAFMV

SEQ ID NO: 1316 - protein, 180 aa, Homo Sapiens
LKGQEFAPSHQQVYAPLRADGDKPRAHLTVVRQTPTQHFKNQFPALHWEHELGLAFTKNRMNYTNKFLLIPESGDYFIYSQVTFRGMTSECSEIRQAGRPNKPDSITVVITKVTDSYPEPTQLLMGTKSVCEVGSNWFQPIYLGAMFSLQEGDKLMVNVSDISLVDYTKEDKTFFGAFLL

SEQ ID NO: 1317 - protein, 128 aa, Homo Sapiens
QLETAKEPCMAKFGPLPSKWQMASSEPPCVNKVSDWKLEILQNGLYLIYGQVAPNANYNDVAPFEVRLYKNKDMIQTLTNKSKIQNVGGTYELHVGDTIDLIFNSEHQVLKNNTYWGIILLANPQFIS

SEQ ID NO: 1318 - protein, 133 aa, Homo Sapiens
MVSHRYPRIQSIKVQFTEYKKEKGFILTSQKEDEIMKVQNNSVIINCDGFYLISLKGYFSQEVNISLHYQKDEEPLFQLKKVRSVNSLMVASLTYKDKVYLNVTTDNTSLDDFHVNGGELILIHQNPGEFCVL

SEQ ID NO: 1319 - protein, 152 aa, Homo Sapiens
QIGHPSPPPEKKELRKVAHLTGKSNSRSMPLEWEDTYGIVLLSGVKYKKGGLVINETGLYFVYSKVYFRGQSCNNLPLSHKVYMRNSKYPQDLVMMEGKMMSYCTTGQMWARSSYLGAVFNLTSADHLYVNVSELSLVNFEESQTFFGLYKL

SEQ ID NO: 1320 - protein, 172 aa, Homo Sapiens
QRTDSIPNSPDNVPLKGGNCSEDLLCILKRAPFKKSWAYLQVAKHLNKTKLSWNKDGILHGVRYQDGNLVIQFPGLYFIICQLQFLVQCPNNSVDLKLELLINKHIKKQALVTVCESGMQTKHVYQNLSQFLLDYLQVNTTISVNVDTFQYIDTSTFPLENVLSIFLYSNSD

SEQ ID NO: 1321 - protein, 205 aa, Homo Sapiens
ACPWAVSGARASPGSAASPRLREGPELSPDDPAGLLDLRQGMFAQLVAQNVLLIDGPLSWYSDPGLAGVSLTGGLSYKEDTKELVVAKAGVYYVFFQLELRRVVAGEGSGSVSLALHLQPLRSAAGAAALALTVDLPPASSEARNSAFGFQGRLLHLSAGQRLGVHLHTEARARHAWQLTQGATVLGLFRVTPEIPAGLPSPRSE

SEQ ID NO: 1322 - protein, 1271 aa, Homo Sapiens
EPPGCSNKEQQVTVSHTYKIDVPKSALVQVDADPQPLSDDGASLLALGEAREEQNIIFRHNIRLQTPQKDCELAGSVQDLLARVKKLEEEMVEMKEQCSAQRCCQGVTDLSRHCSGHGTFSLETCSCHCEEGREGPACERLACPGACSGHGRCVDGRCLCHEPYVGADCGYPACPENCSGHGECVRGVCQCHEDFMSEDCSEKRCPGDCSGHGFCDTGECYCEEGFTGLDCAQVVTPQGLQLLKNTEDSLLVSWEPSSQVDHYLLSYYPLGKELSGKQIQVPKEQHSYEILGLLPGTKYIVTLRNVKNEVSSSPQHLLATTDLAVLGTAWVTDETENSLDVEWENPSTEVDYYKLRYGPMTGQEVAEVTVPKSSDPKSRYDITGLHPGTEYKITVVPMRGELEGKPILLNGRTEIDSPTNVVTDRVTEDTATVSWDPVQAVIDKYVVRYTSADGDTKEMAVHKDESSTVLTGLKPGEAYKVYVWAERGNQGSKKADTNALTEIDSPANLVTDRVTENTATISWDPVQATIDKYVVRYTSADDQETREVLVGKEQSSTVLTGLRPGVEYTVHVWAQKGDRESKKADTNAPTDIDSPKNLVTDRVTENMATVSWDPVQAAIDKYVVRYTSAGGETREVPVGKEQSSTVLTGLRPGMEYMVHVWAQKGDQESKKADTKAQTDIDSPQNLVTDRVTENMATVSWDPVRATIDRYVVRYTSAKDGETREVPVGKEQSSTVLTGLRPGVEYTVHVWAQKGAQESKKADTKAQTDIDSPQNLVTDWVTENTATVSWDPVQATIDRYVVHYTSANGETREVPVGKEQSSTVLTGLRPGMEYTVHVWAQKGNQESKKADTKAQTEIDGPKNLVTDWVTENMATVSWDPVQATIDKYMVRYTSADGETREVPVGKEHSSTVLTGLRPGMEYMVHVWAQKGAQESKKADTKAQTELDPPRNLRPSAVTQSGGILTWTPPSAQIHGYILTYQFPDGTVKEMQLGREDQRFALQGLEQGATYPVSLVAFKGGRRSRNVSTTLSTVGARFPHPSDCSQVQQNSNAASGLYTIYLHGDASRPLQVYCDMETDGGGWIVFQRRNTGQLDFFKRWRSYVEGFGDPMKEFWLGLDKLHNLTTGTPARYEVRVDLQTANESAYAIYDFFQVASSKERYKLTVGKYRGTAGDALTYHNGWKFTTFDRDNDIALSNCALTHHGGWWYKNCHLANPNGRYGETKHSEGVNWEPWKGHEFSIPYVELKIRPHGYSREPVLGRKKRTLRGRLRTF

SEQ ID NO: 1323 - protein, 1171 aa, Homo Sapiens
CICNEGWFGKNCSEPYCPLGCSSRGVCVDGQCICDSEYSGDDCSELRCPTDCSSRGLCVDGECVCEEPYTGEDCRELRCPGDCSGKGRCANGTCLCEEGYVGEDCGQRQCLNACSGRGQCEEGLCVCEEGYQGPDCSAVAPPEDLRVAGISDRSIELEWDGPMAVTEYVISYQPTALGGLQLQQRVPGDWSGVTITELEPGLTYNISVYAVISNILSLPITAKVATHLSTPQGLQFKTITETTVEVQWEPFSFSFDGWEISFIPKNNEGGVIAQVPSDVTSFNQTGLKPGEEYIVNVVALKEQARSPPTSASVSTVIDGPTQILVRDVSDTVAFVEWIPPRAKVDFILLKYGLVGGEGGRTTFRLQPPLSQYSVQALRPGSRYEVSVSAVRGTNESDSATTQFTTEIDAPKNLRVGSRTATSLDLEWDNSEAEVQEYKVVYSTLAGEQYHEVLVPRGIGPTTRATLTDLVPGTEYGVGISAVMNSQQSVPATMNARTELDSPRDLMVTASSETSISLIWTKASGPIDHYRITFTPSSGIASEVTVPKDRTSYTLTDLEPGAEYIISVTAERGRQQSLESTVDAFTGFRPISHLHFSHVTSSSVNITWSDPSPPADRLILNYSPRDEEEEMMEVSLDATKRHAVLMGLQPATEYIVNLVAVHGTVTSEPIVGSITTGIDPPKDITISNVTKDSVMVSWSPPVASFDYYRVSYRPTQVGRLDSSVVPNTVTEFTITRLNPATEYEISLNSVRGREESERICTLVHTAMDNPVDLIATNITPTEALLQWKAPVGEVENYVIVLTHFAVAGETILVDGVSEEFRLVDLLPSTHYTATMYATNGPLTSGTISTNFSTLLDPPANLTASEVTRQSALISWQPPRAEIENYVLTYKSTDGSRKELIVDAEDTWIRLEGLLENTDYTVLLQAAQDTTWSSITSTAFTTGGRVFPHPQDCAQHLMNGDTLSGVYPIFLNGELSQKLQVYCDMTTDGGGWIVFQRRQNGQTDFFRKWADYRVGFGNVEDEFWLGLDNIHRITSQGRYELRVDMRDGQEAAFASYDRFSVEDSRNLYKLRIGSYNGTAGDSLSYHQGRPFSTEDRDNDVAVTNCAMSYKGAWWYKNCHRTNLNGKYGESRHSQGINWYHWKGHEFSIPFVEMKMRPYNHRLMAGRKRQSLQF

SEQ ID NO: 1324 - protein, 794 aa, Homo Sapiens
HLGELTVAEETSSSLRLSWTVAQGPFDSFVVQYRDTDGQPRAVPVAADQRTVTVEDLEPGKKYKFLLYGLLGGKRLGPVSALGMTAPEEDTPAPELAPEAPEPPEEPRLGVLTVTDTTPDSMRLSWSVAQGPFDSFVVQYEDTNGQPQALLVDGDQSKILISGLEPSTPYRFLLYGLHEGKRLGPLSAEGTTGLAPAGQTSEESRPRLSQLSVTDVTTSSLRLNWEAPPGAFDSFLLRFGVPSPSTLEPHPRPLLQRELMVPGTRHSAVLRDLRSGTLYSLTLYGLRGPHKADSIQGTARTLSPVLESPRDLQFSEIRETSAKVNWMPPPSRADSFKVSYLLADGGEPQSVQVDGQARTQKLQGLIPGARYEVTVVSVRGFEESEPLTGFLTTVPDGPTQLRALNLTEGFAVLHWKPPQNPVDTYDVQVTAPGAPPLQAETPGSAVDYPLHDLVLHTNYTATVRGLRGPNLTSPASITFTTGLEAPRDLEAKEVTPRTALLTWTEPPVRPAGYLLSFHTPGGQNQEILLPGGITSHQLLGLFPSTSYNARLQAMWGQSLLPPVSTSFTTGGLRIPFPRDCGEEMQNGAGASRTSTIFLNGNRERPLNVFCDMETDGGGWLVFQRRMDGQTDFWRDWEDYAHGFGNISGEFWLGNEALHSLTQAGDYSMRVDLRAGDEAVFAQYDSFHVDSAAEYYRLHLEGYHGTAGDSMSYHSGSVFSARDRDPNSLLISCAVSYRGAWWYRNCHYANLNGLYGSTVDHQGVSWYHWKGFEFSVPFTEMKLRPRNFRSPAGGG

SEQ ID NO: 1325 - protein, 324 aa, Homo Sapiens
SSPTSSASSFSSSAPFLASAVSAQPPLPDQCPALCECSEAARTVKCVNRNLTEVPTDLPAYVRNLFLTGNQLAVLPAGAFARRPPLAELAALNLSGSRLDEVRAGAFEHLPSLRQLDLSHNPLADLSPFAFSGSNASVSAPSPLVELILNHIVPPEDERQNRSFEGMVVAALLAGRALQGLRRLELASNHFLYLPRDVLAQLPSLRHLDLSNNSLVSLTYVSFRNLTHLESLHLEDNALKVLHNGTLAELQGLPHIRVFLDNNPWVCDCHMADMVTWLKETEVVQGKDRLTCAYPEKMRNRVLLELNSADLDCDPILPPSLQTS

SEQ ID NO: 1326 - protein, 281 aa, Homo Sapiens
CPFQCYCFGGPKLLLRCASGAELRQPPRDVPPDARNLTIVGANLTVLRAAAFAGGDGDGDQAAGVRLPLLSALRLTHNHIEVVEDGAFDGLPSLAALDLSHNPLRALGGGAFRGLPALRSLQLNHALVRGGPALLAALDAALAPLAELRLLGLAGNALSRLPPAALRLARLEQLDVRLNALAGLDPDELRALERDGGLPGPRLLLADNPLRCGCAARPLLAWLRNATERVPDSRRLRCAAPRALLDRPLLDLDGARLRCADSGADARGEEAEAAGPELEAS

SEQ ID NO: 1327 - protein, 828 aa, Homo Sapiens
FFPFISRGKELLWGKPEESRVSSVLEESKRLVDTAMYATMQRNLKKRGILSAAQLLSFSKLPEPTSGVIARAAEIMETSIQAMKRKVNLKTQQSQHPTDALSEDLLSIIANMSGCLPYMLPPKCPNTCLANKYRPITGACNNRDHPRWGASNTALARWLPPVYEDGFSQPRGWNPGFLYNGFPLPPVREVTRHVIQVSNEVVTDDDRYSDLLMAWGQYIDHDIAFTPQSTSKAAFGGGADCQMTCENQNPCFPIQLPEEARPAAGTACLPFYRSSAACGTGDQGALFGNLSTANPRQQMNGLTSFLDASTVYGSSPALERQLRNWTSAEGLLRVHARLRDSGRAYLPFVPPRAPAACAPEPGIPGETRGPCFLAGDGRASEVPSLTALHTLWLREHNRLAAALKALNAHWSADAVYQEARKVVGALHQIITLRDYIPRILGPEAFQQYVGPYEGYDSTANPTVSNVFSTAAFRFGHATIHPLVRRLDASFQEHPDLPGLWLHQAFFSPWTLLRGGGLDPLIRGLLARPAKLQVQDQLMNEELTERLFVLSNSSTLDLASINLQRGRDHGLPGYNEWREFCGLPRLETPADLSTAIASRSVADKILDLYKHPDNIDVWLGGLAENFLPRARTGPLFACLIGKQMKALRDGDWFWWENSHVFTDAQRRELEKHSLSRVICDNTGLTRVPMDAFQVGKFPEDFESCDSITGMNLEAWRETFPQDDKCGFPESVENGDFVHCEESGRRVLVYSCRHGYELQGREQLTCTQEGWDFQPPLCKDVNECADGAHPPCHASARCRNTKGGFQCLCADPYELGDDGRTCVDSGRLPR

SEQ ID NO: 1328 - protein, 458 aa, Homo Sapiens
ASRRGAPGTANCELKPQQSELNSFLWTIKRDPPSYFFGTIHVPYTRVWDFIPDNSKEAFLQSSIVYFELDLTDPYTISALTSCQMLPQGENLQDVLPRDIYCRLKRHLEYVKLMMPLWMTPDQRGKGLYADYLFNAIAGNWERKRPVWVMLMVNSLTEVDIKSRGVPVLDLFLAQEAERLRKQTGAVEKVEEQCHPLNGLNFSQVIFALNQTLLQQESLRAGSLQIPYTTEDLIKHYNCGDLSSVILSHDSSQVPNFINATLPPQERITAQEIDSYLRRELIYKRNERIGKRVKALLEEFPDKGFFFAFGAGHFMGNNTVLDVLRREGYEVEHAPAGRPIHKGKSKKTSTRPTLSTIFAPKVPTLEVPAPEAVSSGHSTLPPLVSRPGSADTPSEAEQRFRKKRRRSQRRPRLRQFSDLWVRLEESDIVPQLQVPVLDRHISTELRLPRRGHSHHSQM

SEQ ID NO: 1329 - protein, 185 aa, Homo Sapiens
ATKLTEEKYELKEGQTLDVKCDYTLEKFASSQKAWQIIRDGEMPKTLACTERPSKNSHPVQVGRIILEDYHDHGLLRVRMVNLQVEDSGLYQCVIYQPPKEPHMLFDRIRLVVTKGFSGTPGSNENSTQNVYKIPPTTTKALCPLYTSPRTVTQAPPKSTADVSTPDSEINLTNVTDIIRVPVFN

SEQ ID NO: 1330 - protein, 204 aa, Homo Sapiens
HNTTVFQGVAGQSLQVSCPYDSMKHWGRRKAWCRQLGEKGPCQRVVSTHNLWLLSFLRRWNGSTAITDDTLGGTLTITLRNLQPHDAGLYQCQSLHGSEADTLRKVLVEVLADPLDHRDAGDLWFPGESESFEDAHVEHSISRPSQGSHLPSCLSKEPLGRRNPLPTHFHPSPPGLHLSHQDSSSQRPLGCSLAWTEARDTSTQ

SEQ ID NO: 1331 - protein, 147 aa, Homo Sapiens
QGIVGSLPEVLQAPVGSSILVQCHYRLQDVKAQKVWCRFLPEGCQPLVSSAVDRRAPAGRRTFLTDLGGGLLQVEMVTLQEEDAGEYGCMVDGARGPQILHRVSLNILPPEEEEETHKIGSLAENAFSDPAGSANPLEPSQDEKSIP

SEQ ID NO: 1332 - protein, 250 aa, Homo Sapiens
GPSADSVYTKVRLLEGETLSVQCSYKGYKNRVEGKVWCKIRKKKCEPGFARVWVKGPRYLLQDDAQAKVVNITMVALKLQDSGRYWCMRNTSGILYPLMGFQLDVSPAPQSERNIPFTHLDNILKSGTVTTGQAPTSGPDAPFTTGVMVFTPGLITLPRLLASTRPASKTGYSFTATSTTSQGPRRTMGSQTVTASPSNARDSSAGPESISTKSGDLSTRSPTTGLCLTSRSLLNRLPSMPSIRHQDVYS

SEQ ID NO: 1333 - protein, 150 aa, Homo Sapiens
EELHKHPGQTLLLQCQYSPKRGPYQPKSWCQQTSPSRCTLLVTSSKPWTAVQKSHYTIWDKPNAGFFNITMIQLTQNDSGFYWCGIYNASENIITVLRNISLVVSPAPTTSPMWTLPWLPTSTVLITSPEGTSGHPSINGSETRKSRAPA

SEQ ID NO: 1334 - protein, 671 aa, Homo Sapiens
VCPERCDCQHPQHLLCTNRGLRVVPKTSSLPSPHDVLTYSLGGNFITNITAFDFHRLGQLRRLDLQYNQIRSLHPKTFEKLSRLEELYLGNNLLQALAPGTLAPLRKLRILYANGNEISRLSRGSFEGLESLVKLRLDGNALGALPDAVFAPLGNLLYLHLESNRIRFLGKNAFAQLGKLRFLNLSANELQPSLRHAATFAPLRSLSSLILSANSLQHLGPRIFQHLPRLGLLSLRGNQLTHLAPEAFWGLEALRELRLEGNRLSQLPTALLEPLHSLEALDLSGNELSALHPATFGHLGRLRELSLRNNALSALSGDIFAASPALYRLDLDGNGWTCDCRLRGLKRWMGDWHSQGRLLTVFVQCRHPPALRGKYLDYLDDQQLQNGSCADPSPSASLTADRRRQPLPTAAGEEMTPPAGLAEELPPQPQLQQQGRFLAGVAWDGAARELVGNRSALRLSRRGPGLQQPSPSVAAAAGPAPQSLDLHKKPQRGRPTRADPALAEPTPTASPGSAPSPAGDPWQRATKHRLGTEHQERAAQSDGGAGLPPLVSDPCDFNKFILCNLTVEAVGADSASVRWAVREHRSPRPLGGARFRLLFDRFGQQPKFHRFVYLPESSDSATLRELRGDTPYLVCVEGVLGGRVCPVAPRDHCAGLVTLPEAGSRGGVDYQ

SEQ ID NO: 1335 - protein, 393 aa, Homo Sapiens
GMGCSSPPCECHQEEDFRVTCKDIQRIPSLPPSTQTLKLIETHLRTIPSHAFSNLPNISRIYVSIDVTLQQLESHSFYNLSKVTHIEIRNTRNLTYIDPDALKELPLLKFLGIFNTGLKMFPDLTKVYSTDIFFILEITDNPYMTSIPVNAFQGLCNETLTLKLYNNGFTSVQGYAFNGTKLDAVYLNKNKYLTVIDKDAFGGVYSGPSLLDVSQTSVTALPSKGLEHLKELIARNTWTLKKLPLSLSFLHLTRADLSYPSHCCAFKNQKKIRGILESLMCNESSMQSLRQRKSVNALNSPLHQEYEENLGDSIVGYKEKSKFQDTHNNAHYYVFFEEQEDEIIGFGQELKNPQEETLQAFDSHYDYTICGDSEDMVCTPKSDEFNPCEDIMG

SEQ ID NO: 1336 - protein, 337 aa, Homo Sapiens
TRPCFPGCQCEVETFGLFDSFSLTRVDCSGLGPHIMPVPIPLDTAHLDLSSNRLEMVNESVLAGPGYTTLAGLDLSHNLLTSISPTAFSRLRYLESLDLSHNGLTALPAESFTSSPLSDVNLSHNQLREVSVSAFTTHSQGRALHVDLSHNLIHRLVPHPTRAGLPAPTIQSLNLAWNRLHAVPNLRDLPLRYLSLDGNPLAVIGPGAFAGLGGLTHLSLASLQRLPELAPSGFRELPGLQVLDLSGNPKLNWAGAEVFSGLSSLQELDLSGTNLVPLPEALLLHLPALQSVSVGQDVRCRRLVREGTYPRRPGSSPKVALHCVDTRDSAARGPTIL

SEQ ID NO: 1337 - protein, 131 aa, Homo Sapiens
YDFTNCDFEKIKAAYLSTISKDLITYMSGTKSTEFNNTVSCSNRPHCLTEIQSLTFNPTAGCASLAKEMFAMKTKAALAIWCPGYSETQINATQAMKKRRKRKVTTNKCLEQVSQLQGLWRRFNRPLLKQQ

SEQ ID NO: 1338 - protein, 102 aa, Homo Sapiens
YTTMAEHFLTLLVVPAIKKDYGSQEDFTQVWNTTMKGLKCCGFTNYTDFEDSPYFKENSAFPPFCCNDNVTNTANETCTKQKAHDQKVEGCFNQLLYDIRTN

SEQ ID NO: 1339 - protein, 114 aa, Homo Sapiens
GVWTYEQELMVPVQWSDMVTLKARMTNYGLPRYRWLTHAWNFFQREFKCCGVVYFTDWLEMTEMDWPPDSCCVREFPGCSKQAHQEDLSDLYQEGCGKKMYSFLRGTKQLQVLR

SEQ ID NO: 1340 - protein, 74 aa, Homo Sapiens
CACLALNQEQQGQLLEVGWNNTASARNDIQRNLNCCGFRSVNPNDTCLASCVKSDHSCSPCAPIIGEYAGEVLR

SEQ ID NO: 1341 - protein, 121 aa, Homo Sapiens
TFRNQTIDFLNDNIRRGIENYYDDLDFKNIMDFVQKKFKCCGGEDYRDWSKNQYHDCSAPGPLACGVPYTCCIRNTTEVVNTMCGYKTIDKERFSVQDVIYVRGCTNAVIIWFMDNYTIMA

SEQ ID NO: 1342 - protein, 119 aa, Homo Sapiens
VFKDWIRDQLNLFINNNVKAYRDDIDLQNLIDFAQEYWSCCGARGPNDWNLNIYFNCTDLNPSRERCGVPFSCCVRDPAEDVLNTQCGYDVRLKLELEQQGFIHTKGCVGQFEKWLQDN

SEQ ID NO: 1343 - protein, 119 aa, Homo Sapiens
AFIFRENLTREFFTKELTKHYQGNNDTDVFSATWNSVMITFGCCGVNGPEDFKFASVFRLLTLDSEEVPEACCRREPQSRDGVLLSREECLLGRSLFLNKQGCYTVILNTFETYVYLAG

SEQ ID NO: 1344 - protein, 77 aa, Homo Sapiens
GKGVAIRHVQTMYEEAYNDYLKDRGKGNGTLITFHSTFQCCGKESSEQVQPTCPKELLGHKNCIDEIETIISVKLQL

SEQ ID NO: 1345 - protein, 106 aa, Homo Sapiens
YRAKVENEVDRSIQKVYKTYNGTNPDAASRAIDYVQRQLHCCGIHNYSDWENTDWFKETKNQSVPLSCCRETASNCNGSLAHPSDLYAEGCEALVVKKLQEIMMHV

SEQ ID NO: 1346 - protein, 80 aa, Homo Sapiens
CSCLAINRSKQTDVINASWWVMSNKTRDELERSFDCCGLFNLTTLYQQDYDFCTAICKSQSPTCQMCGEKFLKHSDEALK

SEQ ID NO: 1347 - protein, 118 aa, Homo Sapiens
FSDKARGKVSEIINNAIVHYRDDLDLQNLIDFGQKKFSCCGGISYKDWSQNMYFNCSEDNPSRERCSVPYSCCLPTPDQAVINTMCGQGMQAFDYLEASKVIYTNGCIDKLVNWIHSN

SEQ ID NO: 1348 - protein, 95 aa, Homo Sapiens
YTDKIDRYAQQDLKKGLHLYGTQGNVGLTNAWSIIQTDFRCCGVSNYTDWFEVYNATRVPDSCCLEFSESCGLHAPGTWWKAPCYETVKVWLQEN

SEQ ID NO: 1349 - protein, 119 aa, Homo Sapiens
VFKDWIKDQLYFFINNNIRAYRDDIDLQNLIDFTQEYWQCCGAFGADDWNLNIYFNCTDSNASRERCGVPFSCCTKDPAEDVINTQCGYDARQKPEVDQQIVIYTKGCVPQFEKWLQDN

SEQ ID NO: 1350 - protein, 101 aa, Homo Sapiens
RHEIKDTFLRTYTDTMQTYNGNDERSRAVDHVQRSLSCCGVQNYTNWSTSPYFLEHGIPPSCCMNETDCNPQDLHNLTVAATKVNQKGCYDLVTSFMETNM

SEQ ID NO: 1351 - protein, 96 aa, Homo Sapiens
KSKSDRIVNETLYENTKLLSATGESEKQFQEAIIVFQEEFKCCGLVNGAADWGNNFQHYPELCACLDKQRPCQSYNGKQVYKETCISFIKDFLAKN

SEQ ID NO: 1352 - protein, 97 aa, Homo Sapiens
YMDKVNENAKKDLKEGLLLYHTENNVGLKNAWNIIQAEMRCCGVTDYTDWYPVLGENTVPDRCCMENSQGCGRNATTPLWRTGCYEKVKMWFDDNKH

SEQ ID NO: 1353 - protein, 389 aa, Homo Sapiens
AGLKLMGAPVKLTVSQGQPVKLNCSVEGMEEPDIQWVKDGAVVQNLDQLYIPVSEQHWIGFLSLKSVERSDAGRYWCQVEDGGETEISQPVWLTVEGVPFFTVEPKDLAVPPNAPFQLSCEAVGPPEPVTIVWWRGTTKIGGPAPSPSVLNVTGVTQSTMFSCEAHNLKGLASSRTATVHLQALPAAPFNITVTKLSSSNASVAWMPGADGRALLQSCTVQVTQAPGGWEVLAVVVPVPPFTCLLRDLVPATNYSLRVRCANALGPSPYADWVPFQTKGLAPASAPQNLHAIRTDSGLILEWEEVIPEAPLEGPLGPYKLSWVQDNGTQDELTVEGTRANLTGWDPQKDLIVRVCVSNAVGCGPWSQPLVVSSHDRAGQQGPPHSRTSW

SEQ ID NO: 1354 - protein, 19 aa, Homo Sapiens
LRPVQAQAQSDCSCSTVSP

SEQ ID NO: 1355 - protein, 561 aa, Homo Sapiens
DTSEARWCSECHSNATCTEDEAVTTCTCQEGFTGDGLTCVDLDECAIPGAHNCSANSSCVNTPGSFSCVCPEGFRLSPGLGCTDVDECAEPGLSHCHALATCVNVVGSYLCVCPAGYRGDGWHCECSPGSCGPGLDCVPEGDALVCADPCQAHRTLDEYWRSTEYGEGYACDTDLRGWYRPHPSSDEGIVSRKACAHWSGHCCLWDASVQVKACAGGYYVYNLTAPPECHLAYCTDPSSVEGTCEECSIDEDCKSNNGRWHCQCKQDFNITDISLLEHRLECGANDMKVSLGKCQLKSLGFDKVFMYLSDSRCSGFNDRDNRDWVSVVTPARDGPCGTVLTRNETHATYSNTLYLADEIIIRDLNIKINFACSYPLDMKVSLKTALQPMVSALNIRVGGTGMFTVRMALFQTPSYTQPYQGSSVTLSTEAFLYVGTMLDGGDLSRFALLMTNCYATPSSNATDPLKYFIIQDRCPHTRDSTIQVVENGESSQGRFSVQMFRFAGNYDLVYLHCEVYLCDTMNEKCKPTCSGTRFRSGSVIDQSRVLNLGPITRKGVQATVS

SEQ ID NO: 1356 - protein, 281 aa, Homo Sapiens
QQSATVANPVPGANPDLLPHFLVEPEDVYIVKNKPVLLVCKAVPATQIFFKCNGEWVRQVDHVIERSTDGSSGLPTMEVRINVSRQQVEKVFGLEEYWCQCVAWSSSGTTKSQKAYIRIAYLRKNFEQEPLAKEVSLEQGIVLPCRPPEGIPPAEVEWLRNEDLVDPSLDPNVYITREHSLVVRQARLADTANYTCVAKNIVARRRSASAAVIVYVDGSWSPWSKWSACGLDCTHWRSRECSDPAPRNGGEECQGTDLDTRNCTSDLCVHTASGPEDVALY

SEQ ID NO: 1357 - protein, 351 aa, Homo Sapiens
GTDSGSEVLPDSFPSAPAEPLPYFLQEPQDAYIVKNKPVELRCRAFPATQIYFKCNGEWVSQNDHVTQEGLDEATGLRVREVQIEVSRQQVEELFGLEDYWCQCVAWSSAGTTKSRRAYVRIAYLRKNFDQEPLGKEVPLDHEVLLQCRPPEGVPVAEVEWLKNEDVIDPTQDTNFLLTIDHNLIIRQARLSDTANYTCVAKNIVAKRRSTTATVIVYVNGGWSSWAEWSPCSNRCGRGWQKRTRTCTNPAPLNGGAFCEGQAFQKTACTTICPVDGAWTEWSKWSACSTECAHWRSRECMAPPPQNGGRDCSGTLLDSKNCTDGLCMQNKKTLSDPNSHLLEASGDAALY

SEQ ID NO: 1358 - protein, 359 aa, Homo Sapiens
QDDDFFHELPETFPSDPPEPLPHFLIEPEEAYIVKNKPVNLYCKASPATQIYFKCNSEWVHQKDHIVDERVDETSGLIVREVSIEISRQQVEELFGPEDYWCQCVAWSSAGTTKSRKAYVRIAYLRKTFEQEPLGKEVSLEQEVLLQCRPPEGIPVAEVEWLKNEDIIDPVEDRNFYIIIDHNLIIKQARLSDTANYTCVAKNIVAKRKSTTATVIVYVNGGWSTWTEWSVCNSRCGRGYQKRTRTCTNPAPLNGGAFCEGQSVQKIACTTLCPVDGRWTPWSKWSTCGTECTHWRRRECTAPAPKNGGKDCDGLVLQSKNCTDGLCMQSFIYPISTEQRTQNEYGFSSAPDSDDVALY

SEQ ID NO: 1359 - protein, 347 aa, Homo Sapiens
ARGTDNGEALPESIPSAPGTLPHFIEEPDDAYIIKSNPIALRCKARPAMQIFFKCNGEWVHQNEHVSEETLDESSGLKVREVFINVTRQQVEDFHGPEDYWCQCVAWSHLGTSKSRKASVRIAYLRKNFEQDPQGREVPIEGMIVLHCRPPEGVPAAEVEWLKNEEPIDSEQDENIDTRADHNLIIRQARLSDSGNYTCMAANIVAKRRSLSATVVVYVNGGWSSWTEWSACNVRCGRGWQKRSRTCTNPAPLNGGAFCEGMSVQKITCTSLCPVDGSWEVWSEWSVCSPECEHLRIRECTAPPPRNGGKFCEGLSQESENCTDGLCILDKKPLHEIKPQSIENASD

SEQ ID NO: 1360 - protein, 117 aa, Homo Sapiens
TSYTHRDYMVSNPSLITKQMLTFYSADTDQGQELTRLWDRVMIEQECCGTSGPMDWVNFTSAFRAATPEVVFPWPPLCCRRTGNFIPLNEEGCRLGHMDYLFTKAGVQWHNLSSLQR

SEQ ID NO: 1361 - protein, 122 aa, Homo Sapiens
TAATQRDFFTPNLFLKQMLERYQNNSPPNNDDQWKNNGVTKTWDRLMLQDNCCGVNGPSDWQKYTSAFRTENNDADYPWPRQCCVMNNLKEPLNLEACKLGVPGFYHNQGCYELISGPMNRH

SEQ ID NO: 1362 - protein, 552 aa, Homo Sapiens
CPSGCQCSQPQTVFCTARQGTTVPRDVPPDTVGLYVFENGITMLDAGSFAGLPGLQLLDLSQNQIASLPSGVFQPLANLSNLDLTANRLHEITNETFRGLRRLERLYLGKNRIRHIQPGAFDTLDRLLELKLQDNELRALPPLRLPRLLLLDLSHNSLLALEPGILDTANVEALRLAGLGLQQLDEGLFSRLRNLHDLDVSDNQLERVPPVIRGLRGLTRLRLAGNTRIAQLRPEDLAGLAALQELDVSNLSLQALPGDLSGLFPRLRLLAAARNPFNCVCPLSWFGPWVRESHVTLASPEETRCHFPPKNAGRLLLELDYADFGCPATTTTATVPTTRPVVREPTALSSSLAPTWLSPTAPATEAPSPPSTAPPTVGPVPQPQDCPPSTCLNGGTCHLGTRHHLACLCPEGFTGLYCESQMGQGTRPSPTPVTPRPPRSLTLGIEPVSPTSLRVGLQRYLQGSSVQLRSLRLTYRNLSGPDKRLVTLRLPASLAEYTVTQLRPNATYSVCVMPLGPGRVPEGEEACGEAHTPPAVHSNHAPVTQAREGNLP

SEQ ID NO: 1363 - protein, 674 aa, Homo Sapiens
FKIETTPESRYLAQIGDSVSLTCSTTGCESPFFSWRTQIDSPLNGKVTNEGTTSTLTMNPVSFGNEHSYLCTATCESRKLEKGIQVEIYSFPKDPEIHLSGPLEAGKPITVKCSVADVYPFDRLEIDLLKGDHLMKSQEFLEDADRKSLETKSLEVTFTPVIEDIGKVLVCRAKLHIDEMDSVPTVRQAVKELQVYISPKNTVISVNPSTKLQEGGSVTMTCSSEGLPAPEIFWSKKLDNGNLQHLSGNATLTLIAMRMEDSGIYVCEGVNLIGKNRKEVELIVQEKPFTVEISPGPRIAAQIGDSVMLTCSVMGCESPSFSWRTQIDSPLSGKVRSEGTNSTLTLSPVSFENEHSYLCTVTCGHKKLEKGIQVELYSFPRDPEIEMSGGLVNGSSVTVSCKVPSVYPLDRLEIELLKGETILENIEFLEDTDMKSLENKSLEMTFIPTIEDTGKALVCQAKLHIDDMEFEPKQRQSTQTLYVNVAPRDTTVLVSPSSILEEGSSVNMTCLSQGFPAPKILWSRQLPNGELQPLSENATLTLISTKMEDSGVYLCEGINQAGRSRKEVELIIQVTPKDIKLTAFPSESVKEGDTVIISCTCGNVPETWIILKKKAETGDTVLKSIDGAYTIRKAQLKDAGVYECESKNKVGSQLRSLTLDVQGRENNKDYFSPE

SEQ ID NO: 1364 - protein, 121 aa, Homo Sapiens
APMAEGGGQNHHEVVKFMDVYQRSYCHPIETLVDIFQEYPDEIEYIFKPSCVPLMRCGGCCNDEGLECVPTEESNITMQIMRIKPHQGQHIGEMSFLQHNKCECRPKKDRARQEKCDKPRR

SEQ ID NO: 1365 - protein, 186 aa, Homo Sapiens
PVSQPDAPGHQRKVVSWIDVYTRATCQPREVVVPLTVELMGTVAKQLVPSCVTVQRCGGCCPDDGLECVPTGQHQVRMQILMIRYPSSQLGEMSLEEHSQCECRPKKKDSAVKPDRAATPHHRPQPRSVPGWDSAPGAPSPADITHPTPAPGPSAHAAPSTTSALTPGPAAAAADAAASSVAKGGA

SEQ ID NO: 1366 - protein, 116 aa, Homo Sapiens
AHYNTEILKSIDNEWRKTQCMPREVCIDVGKEFGVATNTFFKPPCVSVYRCGGCCNSEGLQCMNTSTSYLSKTLFEITVPLSQGPKPVTISFANHTSCRCMSKLDVYRQVHSIIRR

SEQ ID NO: 1367 - protein, 742 aa, Homo Sapiens
GRKAKCEPSQFQCTNGRCITLLWKCDGDEDCVDGSDEKNCVKKTCAESDFVCNNGQCVPSRWKCDGDPDCEDGSDESPEQCHMRTCRIHEISCGAHSTQCIPVSWRCDGENDCDSGEDEENCGNITCSPDEFTCSSGRCISRNFVCNGQDDCSDGSDELDCAPPTCGAHEFQCSTSSCIPISWVCDDDADCSDQSDESLEQCGRQPVIHTKCPASEIQCGSGECIHKKWRCDGDPDCKDGSDEVNCPSRTCRPDQFECEDGSCIHGSRQCNGIRDCVDGSDEVNCKNVNQCLGPGKFKCRSGECIDISKVCNQEQDCRDWSDEPLKECHINECLVNNGGCSHICKDLVIGYECDCAAGFELIDRKTCGDIDECQNPGICSQICINLKGGYKCECSRGYQMDLATGVCKAVGKEPSLIFTNRRDIRKIGLERKEYIQLVEQLRNTVALDADIAAQKLFWADLSQKAIFSASIDDKVGRHVKMIDNVYNPAAIAVDWVYKTIYWTDAASKTISVATLDGTKRKFLFNSDLREPASIAVDPLSGFVYWSDWGEPAKIEKAGMNGFDRRPLVTADIQWPNGITLDLIKSRLYWLDSKLHMLSSVDLNGQDRRIVLKSLEFLAHPLALTIFEDRVYWIDGENEAVYGANKFTGSELATLVNNLNDAQDIIVYHELVQPSGKNWCEEDMENGGCEYLCLPAPQINDHSPKYTCSCPSGYNVEENGRDCQRINVTTAVSEVSVPPKGTS

SEQ ID NO: 1368 - protein, 211 aa, Homo Sapiens
VQVTIPDGFVNVTVGSNVTLICIYTTTVASREQLSIQWSFFHKKEMEPISIYFSQGGQAVAIGQFKDRITGSNDPGNASITISHMQPADSGIYICDVNNPPDFLGQNQGILNVSVLVKPSKPLCSVQGRPETGHTISLSCLSALGTPSPVYYWHKLEGRDIVPVKENFNPTTGILVIGNLTNFEQGYYQCTAINRLGNSSCEIDLTSSHPE

SEQ ID NO: 1369 - protein, 383 aa, Homo Sapiens
VVIGEVHENVTLHCGNISGLRGQVTWYRNNSEPVFLLSSNSSLRPAEPRFSLVDATSLHIESLSLGDEGIYTCQEILNVTQWFQVWLQVASGPYQIEVHIVATGTLPNGTLYAARGSQVDFSCNSSSRPPPVVEWWFQALNSSSESFGHNLTVNFFSLLLISPNLQGNYTCLALNQLSKRHRKVTTELLVYYPPPSAPQCWAQMASGSFMLQLTCRWDGGYPDPDFLWIEEPGGVIVGKSKLGVEMLSESQLSDGKKFKCVTSHIVGPESGASCMVQIRGPSLLSEPMKTCFTGGNVTLTCQVSGAYPPAKILWLRNLTQPEVIIQPSSRHLITQDGQNSTLTIHNCSQDLDEGYYICRADSPVGVREMEIWLSVKEPLNIGG

SEQ ID NO: 1370 - protein, 220 aa, Homo Sapiens
VEVKVPTEPLSTPLGKTAELTCTYSTSVGDSFALEWSFVQPGKPISESHPILYFTNGHLYPTGSKSKRVSLLQNPPTVGVATLKLTDVHPSDTGTYLCQVNNPPDFYTNGLGLINLTVLVPPSNPLCSQSGQTSVGGSTALRCSSSEGAPKPVYNWVRLGTFPTPSPGSMVQDEVSGQLILTNLSLTSSGTYRCVATNQMGSASCELTLSVTEPSQGRVA

SEQ ID NO: 1371 - protein, 264 aa, Homo Sapiens
RPILEVPESVTGPWKGDVNLPCTYDPLQGYTQVLVKWLVQRGSDPVTIFLRDSSGDHIQQAKYQGRLHVSHKVPGDVSLQLSTLEMDDRSHYTCEVTWQTPDGNQVVRDKITELRVQKLSVSKPTVTTGSGYGFTVPQGMRISLQCQARGSPPISYIWYKQQTNNQEPIKVATLSTLLFKPAVIADSGSYFCTAKGQVGSEQHSDIVKFVVKDSSKLLKTKTEAPTTMTYPLKATSTVKQSWDWTTDMDGYLGETSAGPGKSLP

SEQ ID NO: 1372 - protein, 242 aa, Homo Sapiens
VRINGDGQEVLYLAEGDNVRLGCPYVLDPEDYGPNGLDIEWMQVNSDPAHHRENVFLSYQDKRINHGSLPHLQQRVRFAASDPSQYDASINLMNLQVSDTATYECRVKKTTMATRKVIVTVQARPAVPMCWTEGHMTYGNDVVLKCYASGGSQPLSYKWAKISGHHYPYRAGSYTSQHSYHSELSYQESFHSSINQGLNNGDLVLKDISRADDGLYQCTVANNVGYSVCVVEVKVSDSRRIG

SEQ ID NO: 1373 - protein, 119 aa, Homo Sapiens
YEDEKKNEKPPKPSLHAWPSSVVEAESNVTLKCQAHSQNVTFVLRKVNDSGYKQEQSSAENEAEFPFTDLKPKDAGRYFCAYKTTASHEWSESSEHLQLVVTDKHDELEAPSMKTDTRT

SEQ ID NO: 1374 - protein, 221 aa, Homo Sapiens
SSQAKFTEFPRNVTATEGQNVEMSCAFQSGSASVYLEIQWWFLRGPEDLDPGAEGAGAQVKLLPDRDPDSDGTKISTVKVQGNDISHKLQISKVRKKDEGLYECRVTDANYGELQEHKAQAYLKVNANSHARRMQAFEASPMWLQDMKPRKNVSAAIPSSIHGSANQRTHSTSSPQVVAKIPKQSPQSGMETHFEPFILPLTNAPQKGQSYRVDRFMNGDF

SEQ ID NO: 1375 - protein, 235 aa, Homo Sapiens
AFTEVPKDVTVREGDDIEMPCAFRASGATSYSLEIQWWYLKEPPRELLHELALSVPGARSKVTNKDATKISTVRVQGNDISHRLRLSAVRLQDEGVYECRVSDYSDDDTQEHKAQAMLRVLSRFAPPNMQAAEAVSHIQSSGPRRHGPASAANANNAGAASRTTSEPGRGDKSPPPGSPPAAIDPAVPEAAAASAAHTPTTTVAAAAAASSASPPSGQAVLLRQRHGSGTGRSYT

SEQ ID NO: 1376 - protein, 180 aa, Homo Sapiens
TRPAGHAPWDNHVSGHALFTETPHDMTARTGEDVEMACSFRGSGSPSYSLEIQWWYVRSHRDWTDKQAWASNQLKASQQEDAGKEATKISVVKVVGSNISHKLRLSRVKPTDEGSYECRVIDFSDGKARHHKVKAYLRVQPGENSVLHLPEAPPAAPAPPPPKPGKELRKRSVDQEACSL

SEQ ID NO: 1377 - protein, 157 aa, Homo Sapiens
LNVTVSPGPVVDYLEGENATLLCHVSQKRRKDSLLAVRWFFAHSSDSQEALMVKMTKLRVVQYYGNFSRSAKRRRLRLLEEQRGALYRLSVLTLQPSDQGHYVCRVQEISRHRNKWTAWSNGSSATEMRVISLKASEESSFEKTKETWAFFEDLYVY

SEQ ID NO: 1378 - protein, 119 aa, Homo Sapiens
LQSQGVSLYIPQATINATVKEDILLSVEYSCHGVPTIEWTYSSNWGTQKIVEWKPGTQANISQSHKDRVCTFDNGSIQLFSVGVRDSGYYVITVTERLGSSQFGTIVLHVSEILYEDLH

SEQ ID NO: 1379 - protein, 235 aa, Homo Sapiens
LIIGFGISGRHSITVTTVASAGNIGEDGILSCTFEPDIKLSDIVIQWLKEGVLGLVHEFKEGKDELSEQDEMFRGRTAVFADQVIVGNASLRLKNVQLTDAGTYKCYIITSKGKGNANLEYKTGAFSMPEVNVDYNASSETLRCEAPRWFPQPTVVWASQVDQGANFSEVSNTSFELNSENVTMKVVSVLYNVTINNTYSCMIENDIAKATGDIKVTESEIKRRSHLQLLNSKAS

SEQ ID NO: 1380 - protein, 423 aa, Homo Sapiens
ERGPPASAPRGDLMFLLDSSASVSHYEFSRVREFVGQLVAPLPLGTGALRASLVHVGSRPYTEFPFGQHSSGEAAQDAVRASAQRMGDTHTGLALVYAKEQLFAEASGARPGVPKVLVWVTDGGSSDPVGPPMQELKDLGVTVFIVSTGRGNFLELSAAASAPAEKHLHFVDVDDLHIIVQELRGSILDAMRPQQLHATEITSSGFRLAWPPLLTADSGYYVLELVPSAQPGAARRQQLPGNATDWIWAGLDPDTDYDVALVPESNVRLLRPQILRVRTRPGEAGPGASGPESGAGPAPTQLAALPAPEEAGPERIVISHARPRSLRVSWAPALGSAAALGYHVQFGPLRGGEAQRVEVPAGRNCTTLQGLAPGTAYLVTVTAAFRSGRESALSAKACTPDGPRPRPRPVPRAPTPGTASREP

SEQ ID NO: 1381 - protein, 421 aa, Homo Sapiens
MEAHVFQKDWTATSASARWPLEGRLTVVALKLSLECRVDLLFLLDSSAGTTLDGFLRAKVFVKRFVRAVLSEDSRARVGVATYSRELLVAVPVGEYQDVPDLVWSLDGIPFRGGPTLTGSALRQAAERGFGSATRTGQDRPRRVVVLLTESHSEDEVAGPARHARARELLLLGVGSEAVRAELEEITGSPKHVMVYSDPQDLFNQIPELQGKLCSRQRPGCRTQALDLVFMLDTSASVGPENFAQMQSFVRSCALQFEVNPDVTQVGLVVYGSQVQTAFGLDTKPTRAAMLRAISQAPYLGGVGSAGTALLHIYDKVMTVQRGARPGVPKAVVVLTGGRGAEDAAVPAQKLRNNGISVLVVGVGPVLSEGLRRLAGPRDSLIHVAAYADLRYHQDVLIEWLCGGEWGNPHPQGCPHGRPSA

SEQ ID NO: 1382 - protein, 934 aa, Homo Sapiens
RGYTGRKPPGHFAAERRRLGPHVCLSGFGSGCCPGWAPSMGGGHCTLPLCSFGCGSGICIAPNVCSCQDGEQGATCPETHGPCGEYGCDLTCNHGGCQEVARVCPVGFSMTETAVGIRCTDIDECVTSSCEGHCVNTEGGFVCECGPGMQLSADRHSCQDTDECLGTPCQQRCKNSIGSYKCSCRTGFHLHGNRHSCVDVNECRRPLERRVCHHSCHNTVGSFLCTCRPGFRLRADRVSCEAFPKAVLAPSAILQPRQHPSKMLLLLPEAGRPALSPGHSPPSGAPGPPAGVRTTRLPSPTPRLPTSSPSAPVWLLSTLLATPVPTASLLGNLRPPSLLQGEVMGTPSSPRGPESPRLAAGPSPCWHLGAMHESRSRWTEPGCSQCWCEDGKVTCEKVRCEAACSHPIPSRDGGCCPSCTGCFHSGVVRAEGDVFSPPNENCTVCVCLAGNVSCISPECPSGPCQTPPQTDCCTCVPVRCYFHGRWYADGAVFSGGGDECTTCVCQNGEVECSFMPCPELACPREEWRLGPGQCCFTCQEPTPSTGCSLDDNGVEFPIGQIWSPGDPCELCICQADGSVSCKRTDCVDSCPHPIRIPGQCCPDCSAGCTYTGRIFYNNETFPSVLDPCLSCICLLGSVACSPVDCPITCTYPFHPDGECCPVCRDCNYEGRKVANGQVFTLDDEPCTRCTCQLGEVSCEKVPCQRACADPALLPGDCCSSCPDSLSPLEEKQGLSPHGNVAFSKAGRSLHGDTEAPVNCSSCPGPPTASPSRPVLHLLQLLLRTNLMKTQTLPTSPAGAHGPHSLALGLTATFPGEPGASPRLSPGPSTPPGAPTLPLASPGAPQPPPVTPERSFSASGAQIVSRWPPLPGTLLTEASALSMMDPSPSKTPITLLGPRVLSPTTSRLSTALAATTHPGPQQPPVGASRGEESTM

SEQ ID NO: 1383 - protein, 529 aa, Homo Sapiens
AGLLPGLGSHPGVCPNQLSPNLWVDAQSTCERECSRDQDCAAAEKCCINVCGLHSCVAARFPGSPAAPTTAASCEGFVCPQQGSDCDIWDGQPVCRCRDRCEKEPSFTCASDGLTYYNRCYMDAEACLRGLHLHIVPCKHVLSWPPSSPGPPETTARPTPGAAPVPPALYSSPSPQAVQVGGTASLHCDVSGRPPPAVTWEKQSHQRENLIMRPDQMYGNVVVTSIGQLVLYNARPEDAGLYTCTARNAAGLLRADFPLSVVQREPARDAAPSIPAPAECLPDVQACTGPTSPHLVLWHYDPQRGGCMTFPARGCDGAARGFETYEACQQACARGPGDACVLPAVQGPCRGWEPRWAYSPLLQQCHPFVYGGCEGNGNNFHSRESCEDACPVPRTPPCRACRLRSKLALSLCRSDFAIVGRLTEVLEEPEAAGGIARVALEDVLKDDKMGLKFLGTKYLEVTLSGMDWACPCPNMTAGDGPLVIMGEVRDGVAVLDAGSYVRAASEKRVKKILELLEKQACELLNRFQD

SEQ ID NO: 1384 - protein, 542 aa, Homo Sapiens
LPPIRYSHAGICPNDMNPNLWVDAQSTCRRECETDQECETYEKCCPNVCGTKSCVAARYMDVKGKKGPVGMPKEATCDHFMCLQQGSECDIWDGQPVCKCKDRCEKEPSFTCASDGLTYYNRCYMDAEACSKGITLAVVTCRYHFTWPNTSPPPPETTMHPTTASPETPELDMAAPALLNNPVHQSVTMGETVSFLCDVVGRPRPEITWEKQLEDRENVVMRPNHVRGNVVVTNIAQLVIYNAQLQDAGIYTCTARNVAGVLRADFPLSVVRGHQAAATSESSPNGTAFPAAECLKPPDSEDCGEEQTRWHFDAQANNCLTFTFGHCHRNLNHFETYEACMLACMSGPLAACSLPALQGPCKAYAPRWAYNSQTGQCQSFVYGGCEGNGNNFESREACEESCPFPRGNQRCRACKPRQKLVTSFCRSDFVILGRVSELTEEPDSGRALVTVDEVLKDEKMGLKFLGQEPLEVTLLHVDWACPCPNVTVSEMPLIIMGEVDGGMAMLRPDSFVGASSARRVRKLREVMHKKTCDVLKEFLGLH

SEQ ID NO: 1385 - protein, 351 aa, Homo Sapiens
GPPQEESLYLWIDAHQARVLIGFEEDILIVSEGKMAPFTHDFRKAQQRMPAIPVNIHSMNFTWQAAGQAEYFYEFLSLRSLDKGIMADPTVNVPLLGTVPHKASVVQVGFPCLGKQDGVAAFEVDVIVMNSEGNTILKTPQNAIFFKTCQQAECPGGCRNGGFCNERRICECPDGFHGPHCEKALCTPRCMNGGLCVTPGFCICPPGFYGVNCDKANCSTTCFNGGTCFYPGKCICPPGLEGEQCEISKCPQPCRNGGKCIGKSKCKCSKGYQGDLCSKPVCEPGCGAHGTCHEPNKCQCQEGWHGRHCNKRYEASLIHALRPAGAQLRQHTPSLKKAEERRDPPESNYIW

SEQ ID NO: 1386 - protein, 93 aa, Homo Sapiens
VGSEVSDKRTCVSLTTQRLPVSRIKTYTITEGSLRAVIFITKRGLKVCADPQATWVRDVVRSMDRKSNTRNNMIQTKPTGTQQSTNTAVTLTG

SEQ ID NO: 1387 - protein, 93 aa, Homo Sapiens
VGSEVSHRRTCVSLTTQRLPVSRIKTYTITEGSLRAVIFITKRGLKVCADPQATWVRDVVRSMDRKSNTRNNMIQTKPTGTQQSTNTAVTLTG

SEQ ID NO: 1388 - protein, 307 aa, Homo Sapiens
HLVRLPRAFRLTKDSVKIVGSTSFPVKAYVMLHQKSPHVLCVTQQLRNAELIDPSFQWYGPKGKVVSVENRTAQITSTGSLVFQNFEESMSGIYTCFLEYKPTVEEIVKRLQLKYAIYAYREPHYYYQFTARYHAAPCNSIYNISFEKKLLQILSKLLLDLSCEISLLKSECHRVKMQRAGLQNELFFAFSVSSLDTEKGPKRCTDHNCEPYKRLFKAKNLIERFFNQQVEILGRRAEQLPQIYYIEGTLQMVWINRCFPGYGMNVQQHPKCPECCVICSPGSYNPRDGIHCLQCNSSLVYGAKTCL

SEQ ID NO: 1389 - protein, 299 aa, Homo Sapiens
DKIYVELHQNSPVLICMDFKLSKKEIVDPTYLWIGPNEKTLTGNNRINITETGQLMVKDFLEPLSGLYTCTLSYKTVKAETQEEKTVKKRYDFMVFAYREPDYSYQMAVRFTTRSCIGRYNDVFFRVLKKILDSLISDLSCHVIEPSYKCHSVEIPEHGLIHELFIAFQVNPFAPGWKGACNGSVDCEDTTNHNILQARDRIEDFFRSQAYIFYHNFNKTLPAMHFVDHSLQVVRLDSCRPGFGKNERLHSNCASCCVVCSPATFSPDVNVTCQTCVSVLTYGAKSCPQTSNKNQQYED

SEQ ID NO: 1390 - protein, 310 aa, Homo Sapiens
MNGLSLSELCCLFCCPPCPGRIAAKLAFLPPEATYSLVPEPEPGPGGAGAAPLGTLRASSGAPGRWKLHLTERADFQYSQRELDTIEVFPTKSARGNRVSCMYVRCVPGARYTVLFSHGNAVDLGQMSSFYIGLGSRLHCNIFSYDYSGYGASSGRPSERNLYADIDAAWQALRTRYGISPDSIILYGQSIGTVPTVDLASRYECAAVVLHSPLTSGMRVAFPDTKKTYCFDAFPNIEKVSKITSPVLIIHGTEDEVIDFSHGLALYERCPKAVEPLWVEGAGHNDIELYSQYLERLRRFISQELPSQRA

SEQ ID NO: 1391 - protein, 288 aa, Homo Sapiens
MNNLSFSELCCLFCCPPCPGKIASKLAFLPPDPTYTLMCDESGSRWTLHLSERADWQYSSREKDAIECFMTRTSKGNRIACMFVRCSPNAKYTLLFSHGNAVDLGQMSSFYIGLGSRINCNIFSYDYSGYGASSGKPTEKNLYADIEAAWLALRTRYGIRPENVIIYGQSIGTVPSVDLAARYESAAVILHSPLTSGMRVAFPDTKKTYCFDAFPNIDKISKITSPVLIIHGTEDEVIDFSHGLALFERCQRPVEPLWVEGAGHNDVELYGQYLERLKQFVSQELVNL

SEQ ID NO: 1392 - protein, 390 aa, Homo Sapiens
RPEDLKRLFEFRKMIGNRERCQNLVSSDYPVHIDKIEEQSDCKILDGHFVSPMAHYVPDIMPIESVIARFQFIVPKEWNSKYRPVCIHLAGTGDHHYWRRRTLMARPMIKEARMASLLLENPYYGCRKPKDQVRSSLKNVSDLFVMGGALVLESAALLHWLEREGYGPLGMTGISMGGHMASLAVSNWPKPMPLIPCLSWSTASGVFTTTDSFKMGQEFVKHFTSSADKLTNLNLVSRTLNLDISNQVVSQKPADCHNSSKTSVSATSEGLLLQDTSKMKRFNQTLSTNKSGYTSRNPQSYHLLSKEQSRNSLRKESLIFMKGVMDECTHVANFSVPVDPSLIIVVQAKEDAYIPRTGVRSLQEIWPGCEIRYLEGGHISAYLFKQGLFR

SEQ ID NO: 1393 - protein, 189 aa, Homo Sapiens
ASWTSRQVGERTLTGIVIDSGDGVTHVIPVAEGYVIGSCIKHIPIAGRDITYFIQQLLREREVGIPPEQSLETAKAIKEKYCYICPDIVKEFAKYDVDPQKWIKQYTGINAINQKKFVIDVGYERFLGPEIFFHPEFANPDSMESISDVVDEVIQNCPIDVRRPLYKMEQIPLSYPQGHGFHPLSPPFH

SEQ ID NO: 1394 - protein, 265 aa, Homo Sapiens
KSPEKEDFLRAQKYIDLYLVLDNAFYKNYNENLTLIRSFVFDVMNLLNVIYNTIDVQVALVGMEIWSDGDKIKVVPSASTTFDNFLRWHSSNLGKKIHDHAQLLSGISFNNRRVGLAASNSLCSPSSVAVIEAKKKNNVALVGVMSHELGHVLGMPDVPFNTKCPSGSCVMNQYLSSKFPKDFSTSCRAHFERYLLSQKPKCLLQAPIPTNIMTTPVCGNHLLEVGEDCDCGSPKECTNLCCEALTCKLKPGTDCGGDAPNHTTE

SEQ ID NO: 1395 - protein, 439 aa, Homo Sapiens
QGPGEWTPWVSWTRCSSSCGRGVSVRSRRCLRLPGEEPCWGDSHEYRLCQLPDCPPGAVPFRDLQCALYNGRPVLGTQKTYQWVPFHGAPNQCDLNCLAEGHAFYHSFGRVLDGTACSPGAQGVCVAGRCLSAGCDGLLGSGALEDRCGRCGGANDSCLFVQRVFRDAGAFAGYWNVTLIPEGARHIRVEHRSRNHLALMGGDGRYVLNGHWVVSPPGTYEAAGTHVVYTRDTGPQETLQAAGPTSHDLLLQVLLQEPNPGIEFEFWLPRERYSPFQARVQALGWPLRQPQPRGVEPQPPAAPAVTPAQTPTLAPDPCPPCPDTRGRAHRLLHYCGSDFVFQARVLGHHHQAQETRYEVRIQLVYKNRSPLRAREYVWAPGHCPCPMLAPHRDYLMAVQRLVSPDGTQDQLLLPHAGYARPWSPAEDSRIRLTARRCPG

SEQ ID NO: 1396 - protein, 282 aa, Homo Sapiens
MWIQQLLGLSSMSIRWPGRPLGSHAWILIAMFQLAVDLPACEALGPGPEFWLLPRSPPRPPRLWSFRSGQPARVPAPVWSPRPPRVERIHGQMQMPRARRAHRPRDQAAALVPKAGLAKPPAAAKSSPSLASSSSSSSSAVAGGAPEQQALLRRGKRHLQGDGLSSFDSRGSRPTTETEFIAWGPTGDEEALESNTFPGVYGPTTVSILQTRKTTVAATTTTTTTATPMTLQTKGFTESLDPRRRIPGGVSTTEPSTSPSNNGEVTQPPRILGEASGLAVHQ

SEQ ID NO: 1397 - protein, 128 aa, Homo Sapiens
GAEPREPADGQALLRLVVELVQELRKHHSAEHKGLQLLGRDCALGRAEAAGLGPSPEQRVEIVPRDLRMKDKFLKHLTGPLYFSPKCSKHFHRLYHNTRDCTIPAYYKRCARLLTRLAVSPVCMEDKQ

SEQ ID NO: 1398 - protein, 535 aa, Homo Sapiens
RAEEPAVGTSGLIFREDLDWPPGSPQEPLCLVALGGDSNGSSSPLRVVGALSAYEQAFLGAVQRARWGPRDLATFGVCNTGDRQAALPSLRRLGAWLRDPGGQRLVVLHLEEVTWEPTPSLRFQEPPPGGAGPPELALLVLYPGPGPEVTVTRAGLPGAQSLCPSRDTRYLVLAVDRPAGAWRGSGLALTLQPRGEDSRLSTARLQALLFGDDHRCFTRMTPALLLLPRSEPAPLPAHGQLDTVPFPPPRPSAELEESPPSADPFLETLTRLVRALRVPPARASAPRLALDPDALAGFPQGLVNLSDPAALERLLDGEEPLLLLLRPTAATTGDPAPLHDPTSAPWATALARRVAAELQAAAAELRSLPGLPPATAPLLARLLALCPGGPGGLGDPLRALLLLKALQGLRVEWRGRDPRGPGRAQRSAGATAADGPCALRELSVDLRAERSVLIPETYQANNCQGVCGWPQSDRNPRYGNHVVLLLKMQVRGAALARPPCCVPTAYAGKLLISLSEERISAHHVPNMVATECGCR

SEQ ID NO: 1399 - protein, 338 aa, Homo Sapiens
VSKLWVPNTDFDVAANWSQNRTPCAGGAVEFPADKMVSVLVQEGHAVSDMLLPLDGELVLASGAGFGVSDVGSHLDCGAGEPAVFRDSDRFSWHDPHLWRSGDEAPGLFFVDAERVPCRHDDVFFPPSASFRVGLGPGASPVRVRSISALGRTFTRDEDLAVFLASRAGRLRFHGPGALSVGPEDCADPSGCVCGNAEAQPWICAALLQPLGGRCPQAACHSALRPQGQCCDLCGAVVLLTHGPAFDLERYRARILDTFLGLPQYHGLQVAVSKVPRSSRLREADTEIQVVLVENGPETGGAGRLARALLADVAENGEALGVLEATMRESGAHVWGSS

SEQ ID NO: 1400 - protein, 496 aa, Homo Sapiens
QYSPNTQQGRTSIVHLFEWRWVDIALECERYLAPKGFGGVQVSPPNENVAIYNPFRPWWERYQPVSYKLCTRSGNEDEFRNMVTRCNNVGVRIYVDAVINHMCGNAVSAGTSSTCGSYFNPGSRDFPAVPYSGWDFNDGKCKTGSGDIENYNDATQVRDCRLTGLLDLALEKDYVRSKIAEYMNHLIDIGVAGFRLDASKHMWPGDIKAILDKLHNLNSNWFPAGSKPFIYQEVIDLGGEPIKSSDYFGNGRVTEFKYGAKLGTVIRKWNGEKMSYLKNWGEGWGFVPSDRALVFVDNHDNQRGHGAGGASILTFWDARLYKMAVGFMLAHPYGFTRVMSSYRWPRQFQNGNDVNDWVGPPNNNGVIKEVTINPDTTCGNDWVCEHRWRQIRNMVIFRNVVDGQPFTNWYDNGSNQVAFGRGNRGFIVFNNDDWSFSLTLQTGLPAGTYCDVISGDKINGNCTGIKIYVSDDGKAHFSISNSAEDPFIAIHAESKL

SEQ ID NO: 1401 - protein, 496 aa, Homo Sapiens
QYSPNTQQGRTSIVHLFEWRWVDIALECERYLAPKGFGGVQVSPPNENVAIHNPFRPWWERYQPVSYKLCTRSGNEDEFRNMVTRCNNVGVRIYVDAVINHMSGNAVSAGTSSTCGSYFNPGSRDFPAVPYSGWDFNDGKCKTGSGDIENYNDATQVRDCRLVGLLDLALEKDYVRSKIAEYMNHLIDIGVAGFRLDASKHMWPGDIKAILDKLHNLNSNWFPAGSKPFIYQEVIDLGGEPIKSSDYFGNGRVTEFKYGAKLGTVIRKWNGEKMSYLKNWGEGWGFMPSDRALVFVDNHDNQRGHGAGGASILTFWDARLYKMAVGFMLAHPYGFTRVMSSYRWPRQFQNGNDVNDWVGPPNNNGVIKEVTINPDTTCGNDWVCEHRWRQIRNMVNFRNVVDGQPFTNWYDNGSNQVAFGRGNRGFIVFNNDDWTFSLTLQTGLPAGTYCDVISGDKINGNCTGIKIYVSDDGKAHFSISNSAEDPFIAIHAESKL

SEQ ID NO: 1402 - protein, 468 aa, Homo Sapiens
GQFKIKKINQRRYPRATDGKEEAKKCAYTFLVPEQRITGPICVNTKGQDASTIKDMITRMDLENLKDVLSRQKREIDVLQLVVDVDGNIVNEVKLLRKESRNMNSRVTQLYMQLLHEIIRKRDNSLELSQLENKILNVTTEMLKMATRYRELEVKYASLTDLVNNQSVMITLLEEQCLRIFSRQDTHVSPPLVQVVPQHIPNSQQYTPGLLGGNEIQRDPGYPRDLMPPPDLATSPTKSPFKIPPVTFINEGPFKDCQQAKEAGHSVSGIYMIKPENSNGPMQLWCENSLDPGGWTVIQKRTDGSVNFFRNWENYKKGFGNIDGEYWLGLENIYMLSNQDNYKLLIELEDWSDKKVYAEYSSFRLEPESEFYRLRLGTYQGNAGDSMMWHNGKQFTTLDRDKDMYAGNCAHFHKGGWWYNACAHSNLNGVWYRGGHYRSKHQDGIFWAEYRGGSYSLRAVQMMIKPID

SEQ ID NO: 1403 - protein, 363 aa, Homo Sapiens
NCVHHSTDSSVVNIVEDGSNAKDESKSNDTVCKEDCEESCDVKTKITREEKHFMCRNLQNSIVSYTRSTKKLLRNMMDEQQASLDYLSNQVNELMNRVLLLTTEVFRKQLDPFPHRPVQSHGLDCTDIKDTIGSVTKTPSGLYIIHPEGSSYPFEVMCDMDYRGGGRTVIQKRIDGIIDFQRLWCDYLDGFGDLLGEFWLGLKKIFYIVNQKNTSFMLYVALESEDDTLAYASYDNFWLEDETRFFKMHLGRYSGNAGDAFRGLKKEDNQNAMPFSTSDVDNDGCRPACLVNGQSVKSCSHLHNKTGWWFNECGLANLNGIHHFSGKLLATGIQWGTWTKNNSPVKIKSVSMKIRRMYNPYFK

SEQ ID NO: 1404 - protein, 450 aa, Homo Sapiens
RAGAPRCTYTFVLPPQKFTGAVCWSGPASTRATPEAANASELAALRMRVGRHEELLRELQRLAAADGAVAGEVRALRKESRGLSARLGQLRAQLQHEAGPGAGPGADLGAEPAAALALLGERVLNASAEAQRAAARFHQLDVKFRELAQLVTQQSSLIARLERLCPGGAGGQQQVLPPPPLVPVVPVRLVGSTSDTSRMLDPAPEPQRDQTQRQQEPMASPMPAGHPAVPTKPVGPWQDCAEARQAGHEQSGVYELRVGRHVVSVWCEQQLEGGGWTVIQRRQDGSVNFFTTWQHYKAGFGRPDGEYWLGLEPVYQLTSRGDHELLVLLEDWGGRGARAHYDGFSLEPESDHYRLRLGQYHGDAGDSLSWHNDKPFSTVDRDRDSYSGNCALYQRGGWWYHACAHSNLNGVWHHGGHYRSRYQDGVYWAEFRGGAYSLRKAAMLIRPLKL

SEQ ID NO: 1405 - protein, 177 aa, Homo Sapiens
APMGGPELAQHEELTLLFHGTLQLGQALNGVYRTTEGRLTKARNSLGLYGRTIELLGQEVSRGRDAAQELRASLLETQMEEDILQLQAEATAEVLGEVAQAQKVLRDSVQRLEVQLRSAWLGPAYREFEVLKAHADKQSHILWALTGHVQRQRREMVAQQHRLRQIQERLHTAALPA

SEQ ID NO: 1406 - protein, 338 aa, Homo Sapiens
STVHEILCKLSLEGDHSTPPSAYGSVKAYTNFDAERDALNIETAIKTKGVDEVTIVNIVTNRDNAQRQDIVFSYQRRTKKELASALKSALSGHLETVILGLLKTPAQYDASELKASMKGLGTDEDSLIEIICSRTNQELQEINRVYKEMYKTDLEKDIISDTSGDFRKLMVALAKGRRAEDGSVIDYELIDQDAQDLYDAGVKRKGTDVPKWISIMTERSVPHLQKVFDRYKSYSPYDMLESIRKEVKGDLENAFLNLVQRIQNKPLYFADQLYDSMKGKGTRDKVLIRIMVSRSEVDMLKIRSEFKRKYGKSLYYYIQQDTKGDYQKALLYLCGGDD

SEQ ID NO: 1407 - protein, 541 aa, Homo Sapiens
LSNGHTCVGCVLVVSVIEQLAQVHNSTVQASMERLCSYLPEKLFLKTTCYLVIDKFGSDIIKLLSADMNADVVCHTLEFCKQNTGQPLCHLYPLPKETWKFTLQKARQIVKKSPILKYSRSGSDICSLPVLAKICQKIKLAMEQSVPFKDVDSDKYSVFPTLRGYHWRGRDCNDSDESVYPGRRPNNWDVHQDSNCNGIWGVDPKDGVPYEKKFCEGSQPRGIILLGDSAGAHFHISPEWITASQMSLNSFINLPTALTNELDWPQLSGATGFLDSTVGIKEKSIYLRLWKRNHCNHRDYQNISRNGASSRNLKKFIESLSRNKVLDYPAIVIYAMIGNDVCSGKSDPVPAMTTPEKLYSNVMQTLKHLNSHLPNGSHVILYGLPDGTFLWDNLHNRYHPLGQLNKDMTYAQLYSFLNCLQVSPCHGWMSSNKTLRTLTSERAEQLSNTLKKIAASEKFTNFNLFYMDFAFHEIIQEWQKRGGQPWQLIEPVDGFHPNEVALLLLADHFWKKVQLQWPQILGKENPFNPQIKQVFGDQGGH

SEQ ID NO: 1408 - protein, 456 aa, Homo Sapiens
EAGGSCLRWEPHCQQPLPDRVPSTAILPPRLNGPWISTGCEVRPGPEFLTRAYTFYPSRLFRAHQFYYEDPFCGEPAHSLLVKGKVRLRRASWVTRGATEADYHLHKVGIVFHSRRALVDVTGRLNQTRAGRDCARRLPPARAWLPGALYELRSARAQGDCLEALGLTMHELSLVRVQRRLQPQPRASPRLVEELYLGDIHTDPAERRHYRPTGYQRPLQSALHHVQPCPACGLIARSDVHHPPVLPPPLALPLHLGGWWVSSGCEVRPAVLFLTRLFTFHGHSRSWEGYYHHFSDPACRQPTFTVYAAGRYTRGTPSTRVRGGTELVFEVTRAHVTPMDQVTTAMLNFSEPSSCGGAGAWSMGTERDVTATNGCLPLGIRLPHVEYELFKMEQDPLGQSLLFIGQRPTDGSSPDTPEKRPTSYQAPLVLCHGEAPDFSRPPQHRPSLQKHPSTGG

SEQ ID NO: 1409 - protein, 376 aa, Homo Sapiens
EVSADQVATVMWDYFSQLSNNAKEAVEHLQKSELTQQLNALFQDKLGEVNTYAGDLQKKLVPFATELHERLAKDSEKLKEEIGKELEELRARLLPHANEVSQKIGDNLRELQQRLEPYADQLRTQVNTQAEQLRRQLTPYAQRMERVLRENADSLQASLRPHADELKAKIDQNVEELKGRLTPYADEFKVKIDQTVEELRRSLAPYAQDTQEKLNHQLEGLTFQMKKNAEELKARISASAEELRQRLAPLAEDVRGNLRGNTEGLQKSLAELGGHLDQQVEEFRRRVEPYGENFNKALVQQMEQLRQKLGPHAGDVEGHLSFLEKDLRDKVNSFFSTFKEKESQDKTLSLPELEQQQEQQQEQQQEQVQMLAPLES

SEQ ID NO: 1410 - protein, 497 aa, Homo Sapiens
SGAGASRPPHLVFLLADDLGWNDVGFHGSRIRTPHLDALAAGGVLLDNYYTQPLCTPSRSQLLTGRYQIRTGLQHQIIWPCQPSCVPLDEKLLPQLLKEAGYTTHMVGKWHLGMYRKECLPTRRGFDTYFGYLLGSEDYYSHERCTLIDALNVTRCALDFRDGEEVATGYKNMYSTNIFTKRAIALITNHPPEKPLFLYLALQSVHEPLQVPEEYLKPYDFIQDKNRHHYAGMVSLMDEAVGNVTAALKSSGLWNNTVFIFSTDNGGQTLAGGNNWPLRGRKWSLWEGGVRGVGFVASPLLKQKGVKNRELIHISDWLPTLVKLARGHTNGTKPLDGFDVWKTISEGSPSPRIELLHNIDPNFVDSSPCPRNSMAPAKDDSSLPEYSAFNTSVHAAIRHGNWKLLTGYPGCGYWFPPPSQYNVSEIPSSDPPTKTLWLFDIDRDPEERHDLSREYPHIVTKLLSRLQFYHKHSVPVYFPAQDPRCDPKATGVWGPWM

SEQ ID NO: 1411 - protein, 113 aa, Homo Sapiens
AGGPGSRARAAGARGCRLRSQLVPVRALGLGHRSDELVRFRFCSGSCRRARSPHDLSLASLLGAGALRPPPGSRPVSQPCCRPTRYEAVSFMDVNSTWRTVDRLSATACGCLG

SEQ ID NO: 1412 - protein, 369 aa, Homo Sapiens
ESSERVSYYFSYQHVTKVDEVVAQSLVFPAVTLCNLNGFRFSRLTTNDLYHAGELLALLDVNLQIPDPHLADPSVLEALRQKANFKHYKPKQFSMLEFLHRVGHDLKDMMLYCKFKGQECGHQDFTTVFTKYGKCYMFNSGEDGKPLLTTVKGGTGNGLEIMLDIQQDEYLPIWGETEETTFEAGVKVQIHSQSEPPFIQELGFGVAPGFQTFVATQEQRLTYLPPPWGECRSSEMGLDFFPVYSITACRIDCETRYIVENCNCRMVHMPGDAPFCTPEQHKECAEPALGLLAEKDSNYCLCRTPCNLTRYNKELSMVKIPSKTSAKYLEKKFNKSEKYISENILVLDIFFEALNYETIEQKKAYEVAA

SEQ ID NO: 1413 - protein, 92 aa, Homo Sapiens
RLMKEESPVVSWRLEPEDGTALDVHFVSTLEPLSNAVKRNVPRCIIILVLQEPTAFRISVTSSCFVQNTLTKLLKDRRKMQTVQCATARETS

SEQ ID NO: 1414 - protein, 92 aa, Homo Sapiens
RLMKEESPVVSWRLEPEDGTALDVHFVSTLEPLSNAVKRNVPRCIIILVLQEPTPFRISVTSSCFVQNTLTKLLKDRRKMQTVQCATAQETS

SEQ ID NO: 1415 - protein, 119 aa, Homo Sapiens
HSDPARRGELSVCDSISEWVTAADKKTAVDMSGGTVTVLEKVPVSKGQLKQYFYETKCNPMGYTKEGCRGIDKRHWNSQCRTTQSYVRALTMDSKKRIGWRFIRIDTSCVCTLTIKRGR

SEQ ID NO: 1416 - protein, 139 aa, Homo Sapiens
SASSRRRQQSRNRSTQSQDVARVSSASDYNSSELKTACRKHELYVSFQDLGWQDWIIAPKGYAANYCDGECSFPLNAHMNATNHAIVQTLVHLMNPEYVPKPCCAPTKLNAISVLYFDDNSNVILKKYRNMVVRACGCH

SEQ ID NO: 1417 - protein, 233 aa, Homo Sapiens
HKQPWPGLAQAHRDNKSTLARIIAQGLIKHNAESRIQNIHFGDRLNASAQVAPGLVGWLISGRKHQQQQESSINITNIQLDCGGIQISFHKEWFSANISLEFDLELRPSFDNNIVKMCAHMSIVVEFWLEKDEFGRRDLVIGKCDAEPSSVHVAILTEAIPPKMNQFLYNLKENLQKVLPHMVESQVCPLIGEILGQLDVKLLKSLIEQEAAHEPTHHETSQPSACQAGESPS

SEQ ID NO: 1418 - protein, 159 aa, Homo Sapiens
QEVLAGVSSQLLNDLTQGLLRADFLPSLQTTGLQKPLSSAFDGVSGLLDIFGPPLTNEINTVSIQVKNPQLLHVSIESTPQRKEATVQVPFTSELIVQLLTMKPFTANMQSDIKVQIRLEKNVGGRYELAFGNCRLLPEAIWIQTGVQLAPAQNLLWQT

SEQ ID NO: 1419 - protein, 484 aa, Homo Sapiens
QTIYPGIKARITQRALDYGVQAGMKMIEQMLKEKKLPDLSGSESLEFLKVDYVNYNFSNIKISAFSFPNTSLAFVPGVGIKALTNHGTANISTDWGFESPLFQDTGGADLFLSGVYFTGIIILTRNDFGHPTLKLQDCYAQLSHAHVSFSGELSVLYNSFAEPMEKPILKNLNEMLCPIIASEVKALNANLSTLEVLTKIDNYTLLDYSLISSPEITENYLDLNLKGVFYPLENLTDPPFSPVPFVLPERSNSMLYIGIAEYFFKSASFAHFTAGVFNVTLSTEEISNHFVQNSQGLGNVLSRIAEIYILSQPFMVRIMATEPPIINLQPGNFTLDIPASIMMLTQPKNSTVETIVSMDFVASTSVGLVILGQRLVCSLSLNRFRLALPESNRSNIEVLRFENILSSILHFGVLPLANAKLQQGFPLSNPHKFLFVNSDIEVLEGFLLISTDLKYETSSKQQPSFHVWEGLNLISRQWRGKSAP

SEQ ID NO: 1420 - protein, 450 aa, Homo Sapiens
AQRADVGGEAAGTSINHSQAVLQRLQELLRQGNASDVVLRVQAAGTDEVRVFHAHRLLLGLHSELFLELLSNQSEAVLQEPQDCAAVFDKFIRYLYCGELTVLLTQAIPLHRLATKYGVSSLQRGVADYMRAHLAGGAGPAVGWYHYAVGTGDEALRESCLQFLAWNLSAVAASTEWGAVSPELLWQLLQRSDLVLQDELELFHALEAWLGRARPPPAVAERALRAIRYPMIPPAQLFQLQARSAALARHGPAVADLLLQAYQFHAASPLHYAKFFDVNGSAFLPRNYLAPAWGAPWVINNPARDDRSTSFQTQLGPSGHDAGRRVTWNVLFSPRWLPVSLRPVYADAAGTALPAARPEDGRPRLVVTPASSGGDAAGVSFQKTVLVGARQQGRLLVRHAYSFHQSSEEAGDFLAHADLQRRNSEYLVENALHLHLIVKPVYHTLIRTPK

SEQ ID NO: 1421 - protein, 105 aa, Homo Sapiens
GVTGAWPTSGLSILAQLQPSCELRWTQLSRSSWRDLVMTTSLWSLAYFQHFSQETTTQEQLDEMEEIPRESQCGRQDFHALSCPTASPRDRVLLCCPGWRAMVPS

SEQ ID NO: 1422 - protein, 68 aa, Homo Sapiens
QPLRSQRSVPEAFSAPLELSQPLSGLVDDYGILPKHPRPRGPRPLLSRAQQRKRDGPDLAEYYYDAHL

SEQ ID NO: 1423 - protein, 521 aa, Homo Sapiens
RCCCCACKSETNGGNTGSQGGNPPPSTPITVTGHGLAVQSSEQLLHVIYQRVDKAVGLAEAALGLARANNELLKRLQEEVGDLRQGKVSIPDEDGESRAHSSPPEEPGPLKESPGEAFKALSAVEEECDSVGSGVQVVIEELRQLGAASVGPGPLGFPATQRDMRLPGCTLAASEAAPLLNPLVDDYVASEGAVQRVLVPAYAKQLSPATQLAIQRATPETGPENGTKLPPPRPEDMLNAAAALDSALEESGPGSTGELRHSLGLTVSPCRTRGSGQKNSRRKRDLVLSKLVHNVHNHITNDKRFNGSESIKSSWNISVVKFLLEKLKQELVTSPHNYTDKELKGACVAYFLTKRREYRNSLNPFKGLKEKEEKKLRSRRYRLFANRSSIMRHFGPEDQRLWNDVTEELMSDEEDSLNEPGVWVARPPRFRAQRLTELCYHLDANSKHGTKANRVYGPPSDRLPSAEAQLLPPELYNPNFQEEEDEGGDENAPGSPSFDQPHKTCCPDLNSFIEIKVEKDE

SEQ ID NO: 1424 - protein, 131 aa, Homo Sapiens
RPKPSASEVLTRHLLQRRLPHWTSFCVPYSAVRNDQFGLSHFNWPVQGANYHVLRTGCFPFIKYHCSKAPWQDLARQNRFFTALKVVNLGIPTLLYGLGSWLFARVTETVHTSYGPITVYFLNKEDEGAMY

SEQ ID NO: 1425 - protein, 129 aa, Homo Sapiens
KSMENTVTRNSTAVINTQAEGTLSPPGLSSLPVVREWALTHTAQLPECCVDVVGVNASCPGASLCGPGCYRRWNADGSASCVRCGNGTLPAYNGSECRSFAGPGAPFPMNRSSGTPGRPHPGAPRVAAS

SEQ ID NO: 1426 - protein, 223 aa, Homo Sapiens
EDLCRAPDGKKGEAGRPGRRGRPGLKGEQGEPGAPGIRTGIQGLKGDQGEPGPSGNPGKVGYPGPSGPLGARGIPGIKGTKGSPGNIKDQPRPAFSAIRRNPPMGGNVVIFDTVITNQEEPYQNHSGRFVCTVPGYYYFTFQVLSQWEICLSIVSSSRGQVRRSLGFCDTTNKGLFQVVSGGMVLQLQQGDQVWVEKDPKKGHIYQGSEADSVFSGFLIFPSA

SEQ ID NO: 1427 - protein, 226 aa, Homo Sapiens
QLSCTGPPAIPGIPGIPGTPGPDGQPGTPGIKGEKGLPGLAGDHGEFGEKGDPGIPGNPGKVGPKGPMGPKGGPGAPGAPGPKGESGDYKATQKIAFSATRTINVPLRRDQTIRFDHVITNMNNNYEPRSGKFTCKVPGLYYFTYHASSRGNLCVNLMRGRERAQKVVTFCDYAYNTFQVTTGGMVLKLEQGENVFLQATDKNSLLGMEGANSIFSGFLLFPDMEA

SEQ ID NO: 1428 - protein, 217 aa, Homo Sapiens
NTGCYGIPGMPGLPGAPGKDGYDGLPGPKGEPGIPAIPGIRGPKGQKGEPGLPGHPGKNGPMGPPGMPGVPGPMGIPGEPGEEGRYKQKFQSVFTVTRQTHQPPAPNSLIRFNAVLTNPQGDYDTSTGKFTCKVPGLYYFVYHASHTANLCVLLYRSGVKVVTFCGHTSKTNQVNSGGVLLRLQVGEEVWLAVNDYYDMVGIQGSDSVFSGFLLFPD

SEQ ID NO: 1429 - protein, 235 aa, Homo Sapiens
HYEMLGTCRMVCDPYGGTKAPSTAATPDRGLMQSLPTFIQGPKGEAGRPGKAGPRGPPGEPGPPGPMGPPGEKGEPGRQGLPGPPGAPGLNAAGAISAATYSTVPKIAFYAGLKRQHEGYEVLKFDDVVTNLGNHYDPTTGKFTCSIPGIYFFTYHVLMRGGDGTSMWADLCKNNQVRASAIAQDADQNYDYASNSVVLHLEPGDEVYIKLDGGKAHGGNNNKYSTFSGFIIYAD

SEQ ID NO: 1430 - protein, 282 aa, Homo Sapiens
GGVGARREAQRTQQPGQRADPPNATASASSREGLPEAPKPSQASGPEFSDAHMTWLNFVRRPDDGALRKRCGSRDKKPRDLFGPPGPPGAEVTAETLLHEFQELLKEATERRFSGLLDPLLPQGAGLRLVGEAFHCRLQGPRRVDKRTLVELHGFQAPAAQGAFLRGSGLSLASGRFTAPVSGIFQFSASLHVDHSELQGKARLRARDVVCVLICIESLCQRHTCLEAVSGLESNSRVFTLQVQGLLQLQAGQYASVFVDNGSGAVLTIQAGSSFSGLLLGT

SEQ ID NO: 1431 - protein, 200 aa, Homo Sapiens
LNCFTKGQKNSTLIFTRENTIRNCSCSADIRDCDYSLANLMCNCKTVLPLAVERTSYNGHLTIWFTDTSALGHLLNFTLVQDLKLSLCSTNTLPTEYLAICGLKRLRINMEAKHPFPEQSLLIHSGGDSDSREKPMWLHKGWQPCMYISFLDMALFNRDSAFKSYSIENVTSIANNFPDFSYFRTFPMPSNKSYVVTFIY

SEQ ID NO: 1432 - protein, 226 aa, Homo Sapiens
PEWEPVQGLLSQNHSCRDPQCCGNLLVLCLFLVWQVRHCWHQVTRTRFSTRNVIKVPLQKRAVPSMRCETVFKLTPEFFSPGKSRGLDSQQCAQRQRWGYRRSLQESWAQNLLSPQHPCPGPPSGVHTHSEPIFCTTSISNTCLLPQNSSWKAWQVPWCLHDGQTRPALDMCQEMEQLLLHSQERLVSLEPVISVRSRPTSMTLTTSLPNLLSAERLQFCPQRAPA

SEQ ID NO: 1433 - protein, 361 aa, Homo Sapiens
SSCSQARTMNPGGSGGARCSLSAEVRRRQCLQLSTVPGADPQRSNELLLLAAAGEGLERQDLPGDPAKEEPQPPPQHHVLYFPGDVQNYHEIMTRHPENYQWENWSLENVATILAHRFPNSYIWVIKCSRMHLHKFSCYDNFVKSNMFGAPEHNTDFGAFKHLYMLLVNAFNLSQNSLSKKSLNVWNKDSIASNCRSSPSHTTNGCQGEKVRTCEKSDESAMSFYPPSLNDASFTLIGFSKGCVVLNQLLFELKEAKKDKNIDAFIKSIRTMYWLDGGHSGGSNTWVTYPEVLKEFAQTGIIVHTHVTPYQVRDPMRSWIGKEHKKFVQILGDLGMQVTSQIHFTKEAPSIENHFRVHEVF

SEQ ID NO: 1434 - protein, 136 aa, Homo Sapiens
DEEEVPEEWVLLHVVQGQIGAGNYSYLRLNHEGKIVLRMRSLKGDADLYVSASSLHPSFDDYELQSATCGPDAVSIPAHFRRPVGIGVYGHPSHLESEFEMKVYYDGTVEQHPFGEAAYPADGADAGQKHAGAPED

SEQ ID NO: 1435 - protein, 123 aa, Homo Sapiens
MDSLDRSCQDWCDRKQHWLEIGPPDLVERKGSLTLRSHHKKYSKPVLVYSWHRDREAFPKGYDIEGPEKVKKLCNSTYRRLGTDESPIWTSETHEKLSQMCLNTEWVEMKSKALLNEETVSSG

SEQ ID NO: 1436 - protein, 182 aa, Homo Sapiens
NKPSLSGRQAPAQAQTSDLVPSLFPLGLWAPGFCTWSSPDEDKVWRPAWEQGPKGEPDPRGLRPRKPVPGTGNRDSGTRRRLQDATEQDPRPGNDVASAETAGPPSPSGIRAQDRAPRHRRAPPARMPVAPAPSADGEPLQEQGGGLFHRTRSVYNGLELNTWMKVERLFVEKFHQSFSLDN

SEQ ID NO: 1437 - protein, 291 aa, Homo Sapiens
QHVSDWTYSEGALDEAHWPQHYPACGGQRQSPINLQRTKVRYNPSLKGLNMTGYETQAGEFPMVNNGHTVQISLPSTMRMTVADGTVYIAQQMHFHWGGASSEISGSEHTVDGIRHVIEIHIVHYNSKYKSYDIAQDAPDGLAVLAAFVEVKNYPENTYYSNFISHLANIKYPGQRTTLTGLDVQDMLPRNLQHYYTYHGSLTTPPCTENVHWFVLADFVKLSRTQVWKLENSLLDHRNKTIHNDYRRTQPLNHRVVESNFPNQEYTLGSEFQFYLHKIEEILDYLRRALN

SEQ ID NO: 1438 - protein, 87 aa, Homo Sapiens
MVKLGCSFSGKPGKDPGDQDGAAMDSVPLISPLDISQLQPPLPDQVVIKTQTEYQLSSPDQQNFPDLEGQRLNCSHPEEGRRLPTAR

SEQ ID NO: 1439 - protein, 173 aa, Homo Sapiens
QNDTEPIVLEGKCLVVCDSSPSADGAVTSSLGISVRSGSAKVAFSATRSTNHEPSEMSNRTMTIYFDQVLVNIGNHFDLASSIFVAPRKGIYSFSFHVVKVYNRQTIQVSLMQNGYPVISAFAGDQDVTREAASNGVLLLMEREDKVHLKLERGNLMGGWKYSTFSGFLVFPL

SEQ ID NO: 1440 - protein, 173 aa, Homo Sapiens
QEGSEPVLLEGECLVVCEPGRAAAGGPGGAALGEAPPGRVAFAAVRSHHHEPAGETGNGTSGAIYFDQVLVNEGGGFDRASGSFVAPVRGVYSFRFHVVKVYNRQTVQVSLMLNTWPVISAFANDPDVTREAATSSVLLPLDPGDRVSLRLRRGNLLGGWKYSSFSGFLIFPL

SEQ ID NO: 1441 - protein, 193 aa, Homo Sapiens
AQPEDRRVLRYPGTAVMVTCPNRPLVPRPLLTPGGSRASLALCAFVAVPQRIPQPLLPAYILLMLPSLVVDMALPSSRLLRSIKPIQPASQVVRKERNPNPNCPQSDPLMKASSTSFLSHTYLINKTRSTTRKVEEHSWFTCTGAKYFAIPLAERNTKRLTKRSTHAQLLRGKQDGSEWVVPRSSASSNVLYH

SEQ ID NO: 1442 - protein, 161 aa, Homo Sapiens
VNGCCGLQMIALWAQSSGNADARVEEILAGEERRLAALLGSQGMRFWVCLAACRAMWGLAARRGRAEDSSSSPVDASKFPWRGGQHRTTMMPCLLRVGVFRPCHVRPTGDPSCDVQPPRLGFSRVPDTQVAFYGSGHWDPTPFSVHSCFFNFQVRKIIFLL

SEQ ID NO: 1443 - protein, 269 aa, Homo Sapiens
GHLSSPPLVDTLHGKVLGKFVSLEGFAQPVAVFLGIPFAKPPLGPLRFTLPQPAEPWNFVKNATSYPPMFTQDPKAGQLISELFTNRKENIPLKLSEDCLYLNIYTPADLTKKNRLPVMVWIHGGGLMVGAASTYDGLALAAHENVVVVTIQYRLGIWGFFSTGDEHSPGNWGHLDQLAALHWVQDNIASFGGNPGSVTIFGGSVGGESVSVLVLSPLAKNLFHRAISESGVALTSVLVKKGDVKPLAEVGLRLVRLRLDTPTSLALCS

SEQ ID NO: 1444 - protein, 541 aa, Homo Sapiens
ALHTKRPQVVTKYGTLQGKQMHVGKTPIQVFLGVPFSRPPLGILRFAPPEPPEPWKGIRDATTYPPGCLQESWGQLASMYVSTRERYKWLRFSEDCLYLNVYAPARAPGDPQLPVMVWFPGGAFIVGAASSYEGSDLAAREKVVLVFLQHRLGIFGFLSTDDSHARGNWGLLDQMAALRWVQENIAAFGGDPGNVTLFGQSAGAMSISGLMMSPLASGLFHRAISQSGTALFRLFITSNPLKVAKKVAHLAGCNHNSTQILVNCLRALSGTKVMRVSNKMRFLQLNFQRDPEEIIWSMSPVVDGVVIPDDPLVLLTQGKVSSVPYLLGVNNLEFNWLLPYIMKFPLNRQAMRKETITKMLWSTRTLLNITKEQVPLVVEEYLDNVNEHDWKMLRNRMMDIVQDATFVYATLQTAHYHRDAGLPVYLYEFEHHARGIIVKPRTDGADHGDEMYFLFGGPFATGLSMGKEKALSLQMMKYWANFARTGNPNDGNLPCWPRYNKDEKYLQLDFTTRVGMKLKEKKMAFWMSLYQSQRPEKQRQF

SEQ ID NO: 1445 - protein, 555 aa, Homo Sapiens
APTKGPSAEGPQRNTRLGWIQGKQVTVLGSPVPVNVFLGVPFAAPPLGSLRFTNPQPASPWDNLREATSYPNLCLQNSEWLLLDQHMLKVHYPKFGVSEDCLYLNIYAPAHADTGSKLPVLVWFPGGAFKTGSASIFDGSALAAYEDVLVVVVQYRLGIFGFFTTWDQHAPGNWAFKDQVAALSWVQKNIEFFGGDPSSVTIFGESAGAISVSSLILSPMAKGLFHKAIMESGVAIIPYLEAHDYEKSEDLQVVAHFCGNNASDSEALLRCLRTKPSKELLTLSQKTKSFTRVVDGAFFPNEPLDLLSQKAFKAIPSIIGVNNHECGFLLPMKEAPEILSGSNKSLALHLIQNILHIPPQYLHLVANEYFHDKHSLTEIRDSLLDLLGDVFFVVPALITARYHRDAGAPVYFYEFRHRPQCFEDTKPAFVKADHADEVRFVFGGAFLKGDIVMFEGATEEEKLLSRKMMKYWATFARTGNPNGNDLSLWPAYNLTEQYLQLDLNMSLGQRLKEPRVDFWTSTIPLILSASDMLHSPLSSLTFLSLLQPFFFFCAP

SEQ ID NO: 1446 - protein, 92 aa, Homo Sapiens
APDVQDCPECTLQENPFFSQPGAPILQCMGCCFSRAYPTPLRSKKTMLVQKNVTSESTCCVAKSYNRVTVMGGFKVENHTACHCSTCYYHKS

SEQ ID NO: 1447 - protein, 137 aa, Homo Sapiens
SKEPLRPRCRPINATLAVEKEGCPVCITVNTTICAGYCPTMTRVLQGVLPALPQVVCNYRDVRFESIRLPGCPRGVNPVVSYAVALSCQCALCRRSTTDCGGPKDHPLTCDDPRFQDSSSSKAPPPSLPSPSRLPGP

SEQ ID NO: 1448 - protein, 145 aa, Homo Sapiens
SKEPLRPRCRPINATLAVEKEGCPVCITVNTTICAGYCPTMTRVLQGVLPALPQVVCNYRDVRFESIRLPGCPRGVNPVVSYAVALSCQCALCRRSTTDCGGPKDHPLTCDDPRFQASSSSKAPPPSLPSPSRLPGPSDTPILPQ

SEQ ID NO: 1449 - protein, 145 aa, Homo Sapiens
SKEPLRPRCRPINATLAVEKEGCPVCITVNTTICAGYCPTMTRVLQGVLPALPQVVCNYRDVRFESIRLPGCPRGVNPVVSYAVALSCQCALCRRSTTDCGGPKDHPLTCDDPRFQDSSSSKAPPPSLPSPSRLPGPSDTPILPQ

SEQ ID NO: 1450 - protein, 145 aa, Homo Sapiens
SREMLRPRCRPINATLAVEKEGCPVCITVNTTICAGYCPTMTRVLQGVLPALPQVVCNYRDVRFESIRLPGCPRGVNPVVSYAVALSCQCALCRRSTTDCGGPKDHPLTCDDPRFQASSSSKAPPPSLPSPSRLPGPSDTPILPQ

SEQ ID NO: 1451 - protein, 455 aa, Homo Sapiens
YQLTCYFTNWAQYRPGLGRFMPDNIDPCLCTHLIYAFAGRQNNEITTIEWNDVTLYQAFNGLKNKNSQLKTLLAIGGWNFGTAPFTAMVSTPENRQTFITSVIKFLRQYEFDGLDFDWEYPGSRGSPPQDKHLFTVLVQEMREAFEQEAKQINKPRLMVTAAVAAGISNIQSGYEIPQLSQYLDYIHVMTYDLHGSWEGYTGENSPLYKYPTDTGSNAYLNVDYVMNYWKDNGAPAEKLIVGFPTYGHNFILSNPSNTGIGAPTSGAGPAGPYAKESGIWAYYEICTFLKNGATQGWDAPQEVPYAYQGNVWVGYDNIKSFDIKAQWLKHNKFGGAMVWAIDLDDFTGTFCNQGKFPLISTLKKALGLQSASCTAPAQPIEPITAAPSGSGNGSGSSSSGGSSGGSGFCAVRANGLYPVANNRNAFWHCVNGVTYQQNCQAGLVFDTSCDCCNWA

SEQ ID NO: 1452 - protein, 235 aa, Homo Sapiens
SEHETRLVAKLFKDYSSVVRPVEDHRQVVEVTVGLQLIQLINVDEVNQIVTTNVRLKQGDMVDLPRPSCVTLGVPLFSHLQNEQWVDYNLKWNPDDYGGVKKIHIPSEKIWRPDLVLYNNADGDFAIVKFTKVLLQYTGHITWTPPAIFKSYCEIIVTHFPFDEQNCSMKLGTWTYDGSVVAINPESDQPDLSNFMESGEWVIKESRGWKHSVTYSCCPDTPYLDITYHFVMQRL

SEQ ID NO: 1453 - protein, 238 aa, Homo Sapiens
EEAKRPPPRAPGDPLSSPSPTALPQGGSHTETEDRLFKHLFRGYNRWARPVPNTSDVVIVRFGLSIAQLIDVDEKNQMMTTNVWLKQEWSDYKLRWNPTDFGNITSLRVPSEMIWIPDIVLYNNADGEFAVTHMTKAHLFSTGTVHWVPPAIYKSSCSIDVTFFPFDQQNCKMKFGSWTYDKAKIDLEQMEQTVDLKDYWESGEWAIVNATGTYNSKKYDCCAEIYPDVTYAFVIRRL

SEQ ID NO: 1454 - protein, 219 aa, Homo Sapiens
KNEELRLYHHLFNNYDPGSRPVREPEDTVTISLKVTLTNLISLNEKEETLTTSVWIGIDWQDYRLNYSKDDFGGIETLRVPSELVWLPEIVLENNIDGQFGVAYDANVLVYEGGSVTWLPPAIYRSVCAVEVTYFPFDWQNCSLIFRSQTYNAEEVEFTFAVDNDGKTINKIDIDTEAYTENGEWAIDFCPGVIRRHHGGATDGPGETDVIYSLIIRRK

SEQ ID NO: 1455 - protein, 218 aa, Homo Sapiens
RNQEERLLADLMQNYDPNLRPAERDSDVVNVSLKLTLTNLISLNEREEALTTNVWIEMQWCDYRLRWDPRDYEGLWVLRVPSTMVWRPDIVLENNVDGVFEVALYCNVLVSPDGCIYWLPPAIFRSACSISVTYFPFDWQNCSLIFQSQTYSTNEIDLQLSQEDGQTIEWIFIDPEAFTENGEWAIQHRPAKMLLDPAAPAQEAGHQKVVFYLLIQRK

SEQ ID NO: 1456 - protein, 242 aa, Homo Sapiens
SSLVTLNNNGYDGIVIAINPSVPEDEKLIQNIKEMVTEASTHLFHATKQRAYFRNVSILIPMTYKSKSEYLIPKQETYDQADVIVADLYLKYGDDPYTLQYGQCGDKGQYIHFTPNFLLTNNLATYGPRGKVFVHGWAHLRWGVFDEYNVDQPFYISRRNTTEATRCSTRITVYMVLNECKGASCIARPFRRDSQTGLYEAKCTFIPKRSQTAKESIVFMQNLDSVTEFCTEKTHNKEAPNL

SEQ ID NO: 1457 - protein, 126 aa, Homo Sapiens
WSKHAKPVACSGDWLGVRDKCFYFSDDTRNWTASKIFCSLQKAELAQIDTQEDMEFLKRYAGTDMHWIGLSRKQGDSWKWTNGTTFNGWFEIIGNGSFAFLSADGVHSSRGFIDIKWICSKPKYFL

SEQ ID NO: 1458 - protein, 79 aa, Homo Sapiens
ALPQYKKKITDRCFHHSECYSGCCLMDLDSGGAFCAPRARITMICLPQTKGATNIICPCRMGLTCISKDLMCSRRCHMI

SEQ ID NO: 1459 - protein, 127 aa, Homo Sapiens
ELCQPGAENAFKVRLSIRTALGDKAYAWDTNEEYLFKAMVAFSMRKVPNREATEISHVLLCNVTQRVSFWFVVTDPSKNHTLPAVEVQSAIRMNKNRINNAFFLNDQTLEFLKIPSTLAPPMDPSVP

SEQ ID NO: 1460 - protein, 446 aa, Homo Sapiens
APTWKDKTAISENLKSFSEVGEIDADEEVKKALTGIKQMKIMMERKEKEHTNLMSTLKKCREEKQEALKLLNEVQEHLEEEERLCRESLADSWGECRSCLENNCMRIYTTCQPSWSSVKNKIERFFRKIYQFLFPFHEDNEKDLPISEKLIEEDAQLTQMEDVFSQLTVDVNSLFNRSFNVFRQMQQEFDQTFQSHFISDTDLTEPYFFPAFSKEPMTKADLEQCWDIPNFFQLFCNFSVSIYESVSETITKMLKAIEDLPKQDKAPDHGGLISKMLPGQDRGLCGELDQNLSRCFKFHEKCQKCQAHLSEDCPDVPALHTELDEAIRLVNVSNQQYGQILQMTRKHLEDTAYLVEKMRGQFGWVSELANQAPETEIIFNSIQVVPRIHEGNISKQDETMMTDLSILPSSNFTLKIPLEESAESSNFIGYVVAKALQHFKEHFKTW

SEQ ID NO: 1461 - protein, 526 aa, Homo Sapiens
EGAAPIAITCFTRGLDIRKEKADVLCPGGCPLEEFSVYGNIVYASVSSICGAAVHRGVISNSGGPVRVYSLPGRENYSSVDANGIQSQMLSRWSASFTVTKGKSSTQEATGQAVSTAHPPTGKRLKKTPEKKTGNKDCKADIAFLIDGSFNIGQRRFNLQKNFVGKVALMLGIGTEGPHVGLVQASEHPKIEFYLKNFTSAKDVLFAIKEVGFRGGNSNTGKALKHTAQKFFTVDAGVRKGIPKVVVVFIDGWPSDDIEEAGIVAREFGVNVFIVSVAKPIPEELGMVQDVTFVDKAVCRNNGFFSYHMPNWFGTTKYVKPLVQKLCTHEQMMCSKTCYNSVNIAFLIDGSSSVGDSNFRLMLEFVSNIAKTFEISDIGAKIAAVQFTYDQRTEFSFTDYSTKENVLAVIRNIRYMSGGTATGDAISFTVRNVFGPIRESPNKNFLVIVTDGQSYDDVQGPAAAAHDAGITIFSVGVAWAPLDDLKDMASKPKESHAFFTREFTGLEPIVSDVIRGICRDFLESQQ

SEQ ID NO: 1462 - protein, 421 aa, Homo Sapiens
TGFLYPFSAAALQQHGYPEPGAGSPGSGYASRRHWCHHTVTRTVSCQVQNGSETVVQRVYQSCRWPGPCANLVSYRTLIRPTYRVSYRTVTVLEWRCCPGFTGSNCDEECMNCTRLSDMSERLTTLEAKVLLLEAAERPSSPDNDLPAPESTPPTWNEDFLPDAIPLAHPVPRQRRPTGPAGPPGQTGPPGPAGPPGSKGDRGQTGEKGPAGPPGLLGPPGPRGLPGEMGRPGPPGPPGPAGNPGPSPNSPQGALYSLQPPTDKDNGDSRLASAIVDTVLAGVPGPRGPPGPPGPPGPRGPPGPPGTPGSQGLAGERGTVGPSGEPGVKGEEGEKAATAEGEGVQQLREALKILAERVLILEHMIGIHDPLASPEGGSGQDAALRANLKMKRGGAQPDGVLAALLGPDPGQKSVDQASSRK

SEQ ID NO: 1463 - protein, 537 aa, Homo Sapiens
DQCNVPEWLPFARPTNLTDDFEFPIGTYLNYECRPGYSGRPFSIICLKNSVWTSAKDKCKRKSCRNPPDPVNGMAHVIKDIQFRSQIKYSCPKGYRLIGSSSATCIISGNTVIWDNKTPVCDRIICGLPPTIANGDFTSISREYFHYGSVVTYHCNLGSRGKKVFELVGEPSIYCTSKDDQVGIWSGPAPQCIIPNKCTPPNVENGILVSDNRSLFSLNEVVEFRCQPGFGMKGPSHVKCQALNKWEPELPSCSRVCQPPPDVLHAERTQRDKDNFSPGQEVFYSCEPGYDLRGSTYLHCTPQGDWSPAAPRCEVKSCDDFLGQLPNGHVLFPLNLQLGAKVDFVCDEGFQLKGSSASYCVLAGMESLWNSSVPVCERKSCETPPVPVNGMVHVITDIHVGSRINYSCTTGHRLIGHSSAECILSGNTAHWSMKPPICQQIFCPNPPAILNGRHTGTPLGDIPYGKEVSYTCDPHPDRGMTFNLIGESTIRRTSEPHGNGVWSSPAPRCELPVGAGSHDALIVGKFYEVFAEEFCHL

SEQ ID NO: 1464 - protein, 228 aa, Homo Sapiens
KKKSARDQFNKLVTDLPNVQEEIVNIHNALRRRVVPPASNMLKMSWSEEAAQNARIFSKYCDMTESNPLERRLPNTFCGENMHMTSYPVSWSSVIGVWYSESTSFKHGEWTTTDDDITTDHYTQIVWATSYLIGCAIASCRQQGSPRYLYVCHYCHEGNDPETKNEPYKTGVPCEACPSNCEDKLCTNPCIYYDEYFDCDIQVHYLGCNHSTTILFCKATCLCDTEIK

SEQ ID NO: 1465 - protein, 126 aa, Homo Sapiens
GPSPDTCSQDLNSRVKPGFPKTIKTNDPGVLQAARYSVEKFNNCTNDMFLFKESRITRALVQIVKGLKYMLEVEIGRTTCKKNQHLRLDDCDFQTNHTLKQTLSCYSEVWVVPWLQHFEVPVLRCH

SEQ ID NO: 1466 - protein, 119 aa, Homo Sapiens
WRFQEEEEWNDQKQIAVYLPPTLEFAVYTFNKQSKDWYAYKLVPVLASWKEQGYDKMTFSMNLQLGRTMCGKFEDDIDNCPFQESPELNNTCTCFFTIGIEPWRTRFDLWNKTCSGGHS

SEQ ID NO: 1467 - protein, 92 aa, Homo Sapiens
RRFQRNTGEMSSNSTALALVRPSSSGLINSNTDNNLAVYDLSRDILNNFPHSIARQKRILVNLSMVENKLVELEHTLLSKGFRGASPHRKST

SEQ ID NO: 1468 - protein, 201 aa, Homo Sapiens
MSRREGSLEDPQTDSSVSLLPHLEAKIRQTHSLAHLLTKYAEQLLQEYVQLQGDPFGLPSFSPPRLPVAGLSAPAPSHAGLPVHERLRLDAAALAALPPLLDAVCRRQAELNPRAPRLLRRLEDAARQARALGAAVEALLAALGAANRGPRAEPPAATASAASATGVFPAKVLGLRVCGLYREWLSRTEGDLGQLLPGGSA

SEQ ID NO: 1469 - protein, 214 aa, Homo Sapiens
APPEWDWRSKGAVTKVKDQGMCGSCWAFSVTGNVEGQWFLNQGTLLSLSEQELLDCDKMDKACMGGLPSNAYSAIKNLGGLETEDDYSYQGHMQSCNFSAEKAKVYINDSVELSQNEQKLAAWLAKRGPISVAINAFGMQFYRHGISRPLRPLCSPWLIDHAVLLVGYGNRSDVPFWAIKNSWGTDWGEKGYYYLHRGSGACGVNTMASSAVVD

SEQ ID NO: 1470 - protein, 217 aa, Homo Sapiens
LPDSVDWREKGCVTEVKYQGSCGACWAFSAVGALEAQLKLKTGKLVSLSAQNLVDCSTEKYGNKGCNGGFMTTAFQYIIDNKGIDSDASYPYKAMDQKCQYDSKYRAATCSKYTELPYGREDVLKEAVANKGPVSVGVDARHPSFFLYRSGVYYEPSCTQNVNHGVLVVGYGDLNGKEYWLVKNSWGHNFGEEGYIRMARNKGNHCGIASFPSYPEI

SEQ ID NO: 1471 - protein, 249 aa, Homo Sapiens
VPFSCDWRKVASAISPIKDQKNCNCCWAMAAAGNIETLWRISFWDFVDVSVQELLDCGRCGDGCHGGFVWDAFITVLNNSGLASEKDYPFQGKVRAHRCHPKKYQKVAWIQDFIMLQNNEHRIAQYLATYGPITVTINMKPLQLYRKGVIKATPTTCDPQLVDHSVLLVGFGSVKSEEGIWAETVSSQSQPQPPHPTPYWILKNSWGAQWGEKGYFRLHRGSNTCGITKFPLTARVQKPDMKPRVSCPP

SEQ ID NO: 1472 - protein, 147 aa, Homo Sapiens
RLLLLPRVLLTMASGSPPTQPSPASDSGSGYVPGSVSAAFVTCPNEKVAKEIARAVVEKRLAACVNLIPQITSIYEWKGKIEEDSEVLMMIKTQSSLVPALTDFVRSVHPYEVAEVIALPVEQGNFPYLQWVRQVTESVSDSITVLP

SEQ ID NO: 1473 - protein, 193 aa, Homo Sapiens
LHLDVQRGRRVSPGCPIVGTHVCPVRVQQEIDDVIGQVRRPEMGDQAHMPCTTAVIHEVQHFGDIVPLGVTHMTSRDIEVQGFRIPKGTTLITNLSSVLKDEAVWKKPFRFHPEHFLDAQGHFVKPEAFLPFSAGRRACLGEPLARMELFLFFTSLLQHFSFSVAAGQPRPSHSRVVSFLVTPSPYELCAVPR

SEQ ID NO: 1474 - protein, 91 aa, Homo Sapiens
YDPEAASAPGSGNPCHEASAAQKENAGEDPGLARQAPKPRKQRSSLLEKGLDGAKKAVGGLGKLGKDAVEDLESVGKGAVHDVKDVLDSVL

SEQ ID NO: 1475 - protein, 91 aa, Homo Sapiens
NWYVKKCLNDVGICKKKCKPEEMHVKNGWAMCGKQRDCCVPADRRANYPVFCVQTKTTRISTVTATTATTTLMMTTASMSSMAPTPVSPTG

SEQ ID NO: 1476 - protein, 75 aa, Homo Sapiens
ARLKKCFNKVTGYCRKKCKVGERYEIGCLSGKLCCANDEEEKKHVSFKKPHQHSGEKLSVLQDYIILPTITIFTV

SEQ ID NO: 1477 - protein, 232 aa, Homo Sapiens
WNYLFDFHPHRVLVVGAFANFCTEPTGCSCLFPKLPPHLLMLPCWFHLLFFQDYIMSGASALPPGLVSFVKAPLPQWWPGGCPGVGGPLQALEAKPGQLSLPIRNQKRLVKSALELGENELFQQFPNPQSSWVQRTQEALRPLLSVALQLFLGRRGLPLPFRAPIRTVVGSAIPVQQSPPPSPAQVDTLQARYVGRLTQLFEEHQARYGVPADRHLVLTEARPTAWPRLSAG

SEQ ID NO: 1478 - protein, 230 aa, Homo Sapiens
LVQQGLKVVGCARTVGNIEELAAECKSAGYPGTLIPYRCDLSNEEDILSMFSAIRSQHSGVDICINNAGLARPDTLLSGSTSGWKDMFNVNVLALSICTREAYQSMKERNVDDGHIININSMSGHRVLPLSVTHFYSATKYAVTALTEGLRQELREAQTHIRATCISPGVVETQFAFKLHDKDPEKAAATYEQMKCLKPEDVAEAVIYVLSTPAHIQIGDIQMRPTEQVT

SEQ ID NO: 1479 - protein, 352 aa, Homo Sapiens
PPCGGMGNLRGRTAVVTGANSGIGKMTALELARRGARVVLACRSQERGEAAAFDLRQESGNNEVIFMALDLASLASVRAFATAFLSSEPRLDILIHNAGISSCGRTREAFNLLLRVNHIGPFLLTHLLLPCLKACAPSRVVVVASAAHCRGRLDFKRLDRPVVGWRQELRAYADTKLANVLFARELANQLEATGVTCYAAHPGPVNSELFLRHVPGWLRPLLRPLAWLVLRAPRGGAQTPLYCALQEGIEPLSGRYFANCHVEEVPPAARDDRAAHRLWEASKRLAGLGPGEDAEPDEDPQSEDSEAPSSLSTPHPEEPTVSQPYPSPQSSPDLSKMTHRIQAKVEPEIQLS

SEQ ID NO: 1480 - protein, 210 aa, Homo Sapiens
RMTRRDPLTNKVALVTASTDGIGFAIARRLAQDRAHVVVSSRKQQNVDQAVATLQGEGLSVTGTVCHVGKAEDRERLVAMAVKLHGGIDILVSNAAVNPFFGSLMDVTEEVWDKTLDINVKAPALMTKAVVPEMEKRGGGSVVIVSSIAAFSPSPGFSPYNVSKTALLGLNNTLAIELAPRNIRVNCLHLDLSRLASAGCSGWTRKKRKA

SEQ ID NO: 1481 - protein, 302 aa, Homo Sapiens
RKGKLKIEDITDKYIFITGCDSGFGNLAARTFDKKGFHVIAACLTESGSTALKAETSERLRTVLLDVTDPENVKRTAQWVKNQVGEKGLWGLINNAGVPGVLAPTDWLTLEDYREPIEVNLFGLISVTLNMLPLVKKAQGRVINVSSVGGRLAIVGGGYTPSKYAVEGFNDSLRRDMKAFGVHVSCIEPGLFKTNLADPVKVIEKKLAIWEQLSPDIKQQYGEGYIEKSLDKLKGNKSYVNMDLSPVVECMDHALTSLFPKTHYAAGKDAKIFWIPLSHMPAALQDFLLLKQKAELANPKAV

SEQ ID NO: 1482 - protein, 402 aa, Homo Sapiens
LPASSLSSLVPQVRTSYNFGRTFLGLDKCNACIGTSICKKFFKEEIRSDNWLASHLGLPPDSLLSYPANYSDDSKIWRPVEIFRLVSKYQNEISDRRICASASAPKTCSIERVLRKTERFQKWLQAKRLTPDLVQGLASPLLRCPSQRLLDRVVRRYAEVADAGSIFMDHFTDRDKLRLLYTLAVNSHPILLQIFPGAEGWPLPKYLGSCGRFLVSTSTRPLQEFYDAPPDQAADLAYQLLGVLESLRSNDLNYFFYFTHIDAGMFGVFNNGHLFIRDASAVGVIDKQEGSQEANRAGENKDIFSCLVSGCQAQLPSCESISEKQSLVLVCQKLLPRLLQGRFPSPVQDDIDSILVQCGDSIRPDPEVLGAASQLKDILRPLRTCDSRFAYRYPDCKYNDKF

SEQ ID NO: 1483 - protein, 431 aa, Homo Sapiens
AYTTPGPPRALTTLGAPRAHTMPGTYAPSTTLSSPSTQGLQEQARALMRDFPLVDGHNDLPLVLRQVYQKGLQDVNLRNFSYGQTSLDRLRDGLVGAQFWSAYVPCQTQDRDALRLTLEQIDLIRRMCASYSELELVTSAKALNDTQKLACLIGVEGGHSLDNSLSILRTFYMLGVRYLTLTHTCNTPWAESSAKGVHSFYNNISGLTDFGEKVVAEMNRLGMMVDLSHVSDAVARRALEVSQAPVIFSHSAARGVCNSARNVPDDILQLLKKNGGVVMVSLSMGVIQCNPSANVSTVADHFDHIKAVIGSKFIGIGGDYDGAGKFPQGLEDVSTYPVLIEELLSRGWSEEELQGVLRGNLLRVFRQVEKVQEENKWQSPLEDKFPDEQLSSSCHSDLSRLRQRQSLTSGQELTEIPIHWTAKLPAKWSVS

SEQ ID NO: 1484 - protein, 324 aa, Homo Sapiens
GALAPGTPARNLPENHIDLPGPALWTPQASHHRRRGPGKKEWGPGLPSQAQDGAVVTATRQASRLPEAEGLLPEQSPAGLLQDKDLLLGLALPYPEKENRPPGWERTRKRSREHKRRRDRLRLHQGRALVRGPSSLMKKAELSEAQVLDAAMEESSTSLAPTMFFLTTFEAAPATEESLILPVTSLRPQQAQPRSDGEVMPTLDMALFDWTDYEDLKPDGWPSAKKKEKHRGKLSSDGNETSPAEGEPCDHHQDCLPGTCCDLREHLCTPHNRGLNNKCFDDCMCVEGLRCYAKFHRNRRVTRRKGRCVEPETANGDQGSFINV

SEQ ID NO: 1485 - protein, 76 aa, Homo Sapiens
LVNNKGSANSSIVIQLSTNDGECVTVKPGTPSPACPPTMTTTSTVPASTATESTTSTATAATTSTEPITVAPTDHL

SEQ ID NO: 1486 - protein, 145 aa, Homo Sapiens
LRHVVYWNSSNPRLLRGDAVVELGLNDYLDIVCPHYEGPGPPEGPETFALYMVDWPGYESCQAEGPRAYKRWVCSLPFGHVQFSEKIQRFTPFSLGFEFLPGETYYYISVPTPESSGQCLRLQVSVCCKERKSESAHPVGSPGES

SEQ ID NO: 1487 - protein, 479 aa, Homo Sapiens
RLVGEEEAGFGECDKFFYAGTPPAGLAADSHVKICQRAEGAERFATLYSTRDRIPVYSAFRAPRPAPGGAEQRWLVEPQIDDPNSNLEEAINEAEAITSVNSLGSKQALNTDYLDSDYQRGQLYPFSLSSDVQVATFTLTNSAPMTQSFQERWYVNLHSLMDRALTPQCGSGEDLYILTGTVPSDYRVKDKVAVPEFVWLAACCAVPGGGWAMGFVKHTRDSDIIEDVMVKDLQKLLPFNPQLFQNNCGETEQDTEKMKKILEVVNQIQDEERMVQSQKSSSPLSSTRSKRSTLLPPEASEGSSSFLGKLMGFIATPFIKLFQLIYYLVVAILKNIVYFLWCVTKQVINGIESCLYRLGSATISYFMAIGEELVSIPWKVLKVVAKVIRALLRILCCLLKAICRVLSIPVRVLVDVATFPVYTMGAIPIVCKDIALGLGGTVSLLFDTAFGTLGGLFQVVFSVCKRIGYKVTFDNSGEL

SEQ ID NO: 1488 - protein, 392 aa, Homo Sapiens
GKIESCASRCNEKFNRDAACQCDRRCLWHGNCCEDYEHLCTEDHKESEPLPQLEEETEEALASNLYSAPTSCQGRCYEAFDKHHQCHCNARCQEFGNCCKDFESLCSDHEVSHSSDAITKEEIQSISEKIYRADTNKAQKEDIVLNSQNCISPSETRNQVDRCPKPLFTYVNEKLFSKPTYAAFINLLNNYQRATGHGEHFSAQELAEQDAFLREIMKTAVMKELYSFLHHQNRYGSEQEFVDDLKNMWFGLYSRGNEEGDSSGFEHVFSGEVKKGKVTGFHNWIRFYLEEKEGLVDYYSHIYDGPWDSYPDVLAMQFNWDGYYKEVGSAFIGSSPEFEFALYSLCFIARPGKVCQLSLGGYPLAVRTYTWDKSTYGNGKKYIATAYIVSST

SEQ ID NO: 1489 - protein, 510 aa, Homo Sapiens
GQNEAPPNTHSIPGEPLYNYASIRLPEEHIPFFLHNNRHIATVCRKDSLCPYKKHLEKLKYCWGYEKSCKPEFRFGYPVCSYVDMGWTDTLESAEDIFWKQADFGYARERLEEMHVLCQPKETSDSSLVCSRYLQYCRATNLYLDLRNIKRNHDRFKEDFFQSGEIGGHCKLDIRTLTSEGQRKSPLQSWFAELQSYTQLNFRPIEDAKCDIVIEKPTYFMKLDAGVNMYHHFCDFINLYITQHVNNSFSTDVYIVMWDTSSYGYGDLFSDTWNAFTDYDVIHLKTYDSKRVCFKEAVFSLLPRMRYGLFYNTPLISGCQNTGLFRAFAQHVLHRLNITQEGPKDGKIRVTILARSTEYRKILNQNELVNALKTVSTFEVQIVDYKYRELGFLDQLRITHNTDIFIGMHGAGLTHLLFLPDWAAVFELYNCEDERCYLDLARLRGVHYITWRRQNKVFPQDKGHHPTLGEHPKFTNYSFDVEEFMYLVLQAADHVLQHPKWPFKKKHDEL

SEQ ID NO: 1490 - protein, 361 aa, Homo Sapiens
NSLLTEPPFRWRFYLHETWTQGNRLSTVTLATVDCQPHGCQAQVTFNFTSFKSVLRGWSNPTICFVYDQTHSNCRDYWVDTNGGCPYAYCRMHVTQLHTAKKLQHTYRLTSDGRTTYFLTIPDPWDSRWVSGVTGRLYRWPTDSYPVGKLRIFLTYIRVIPQVLSNLKDQADNIKHQEEVINTLVQSHPKADMVTYDDKAEAGPFSWITLVRHGARLVNMAGLVNLSHCFLCTALSQPPLVAVPLPQAFNTSGNHTAHPSGVFSEQVPLFRDPLQPQFPFCYTTPNSSWCNQTYSGSLSNLSAPAGGYFWCNFTLTKHLNISSNNTLSRNLCLPISLVPRLTLYSEAELSSLVNPPMRQKR

SEQ ID NO: 1491 - protein, 121 aa, Homo Sapiens
APPSCRECYQSLHYRGEMQQYFTYHTHIERSCYGNLIEECVESGKSYYKVKNLGVCGSRNGAICPRGKQWLCFTKIGQWGVNTQVLEDIKREQIIAKAKASKPTTPPENRPRHFHSFIQKL

SEQ ID NO: 1492 - protein, 354 aa, Homo Sapiens
MVTPVTWMDNPIEVYVNDSVWVPGPTDDRCPAKPEEEGMMINISIGYHYPPICLGRAPGCLMPAVQNWLVEVPTVSPNSRFTYHMVSGMSLRPRVNCLQDFSYQRSLKFRPKGKTCPKEIPKGSKNTEVLVWEECVANSVVILQNNEFGTIIDWAPRGQFYHNCSGQTQSCPSAQVSPAVDSDLTESLDKHKHKKLQSFYLWEWEEKGISTPRPKIISPVSGPEHPELWRLTVASHHIRIWSGNQTLETRYRKPFYTIDLNSILTVPLQSCVKPPYMLVVGNIVIKPASQTITCENCRLFTCIDSTFNWQHRILLVRAREGMWIPVSTDRPWEASPSIHILTEILKGVLNRSKR

SEQ ID NO: 1493 - protein, 354 aa, Homo Sapiens
MVTPVTWMDNPIEVYVNDSEWVPGPTDDRCPAKPEEEGMMINISIGYRYPPICLGTAPGCLMPAVQNWLVEVPIVSPISRFTYHMVSGMSLRPRVNYLQDFPYQRSLKFRPKGKPCPKEIPKESKNTEVLVWEECVANSAVILQNNEFGTIIDWAPRGQFYHNCSGQTQSCPSAQVSPAVDSDLTESLDKHKHKKLQSFYPWEWGEKGISTPRPKIISPVSGPEHPELWRLTVASHHIRIWSGNQTLETRDRKPFYTVDLNSSLTLPLQSCVKPPYMLVVGNIVIKPDSQTITCENCRLLTCIDSTFNWQHRILLVRAREGVWILVSMDRPWEASPSVHILTEVLKGVLNRSKR

SEQ ID NO: 1494 - protein, 354 aa, Homo Sapiens
MVTPVTWMDNPIEIYVNDSVWVPGPIDDRCPAKPEEEGMMINISIGYRYPPICLGRAPGCLMPAVQNWLVEVPTVSPISRFTYHMVSGMSLRPRVNYLQDFSYQRSLKFRPKGKPCPKEIPKESKNTEVLVWEECVANSAVILQNNEFGTIIDWAPRGQFYHNCSGQTQSCPSAQVSPAVDSDLTESLDKHKHKKLQSFYPWEWGEKRISTPRPKIVSPVSGPEHPELWRLTVASHHIRIWSGNQTLETRDCKPFYTIDLNSSLTVPLQSCVKPPYMLVVGNIVIKPDSQTITCENCRLLSCIDSTFNWQHRILLVRAREGVWIPVSMDRPWEASPSVHILTEVLKGVLNRSKR

SEQ ID NO: 1495 - protein, 289 aa, Homo Sapiens
MWTVPSFTNDSYQVYNVFSTNSFQLLTVKRTPHEAWRVPLTTKTNKTKGLPDCPKKPTNGPFIVTSILWDNCNAPKAVVLQTLAMGIVIDWAPKGHYWQDCSSKNTLCSEFIYSLDYIEHGWQSYTMRQRVSPYPFKWMDTGIAPPRPKIIHPFFTPEHPELWKLAAALSGIKIWNTTYQLLRTKTKTPTFNITLISEWVIPIRSCVKPPYMLLVGNIIMMPDAQTIECHNCKLFTCIDATFNPTTSILLVRAREGVWIPVSLHRPWESSPSIHIVNEVLKDILKRTKR

SEQ ID NO: 1496 - protein, 300 aa, Homo Sapiens
QWNENSLVSFSKIIASGNHLSNCWICHNFITRSSSYQYILVRNFSLNLTFGSGIPEGQHKSVPLQVSLANSAHQVPCLDLTPPFNQSSKTSFYFYNCSSLNQTCCPCPEGHCDRKNTSEEGFPSPTIHPMSFSPAGCHPNLTHWCPAKQMNDYRDKSPQNRCAAWEGKELITWRVLYLLPKAHTVPTWPKSTVPLGGPLSPACNQTIPAGWKSQLHKWFDSHIPRWACTPPGYVFLCGPQKNKLPFDGSPKITYSTPPVANLYTCINNIQHTGECAVGLLGPRGIGVTIYNTTQPRQKRA

SEQ ID NO: 1497 - protein, 300 aa, Homo Sapiens
QWNENSLVSFSKIIASGNHLSNCWICHNFITRSSSYQYILVRNFSLNLTFGSGIPEGQHKSVPLQVSLANSAHQVPCLDLTPPFNQSSKTSFYFYNCSSLNQTCCPCPEGHCDRKNTSEEGFPSPTIHPMSFSPAGCHPNLTHWCPAKQMNDYRDKSPQNRCAAWEGKELITWRVLYSLPKAHTVPTWPKSTVPLGGPLSPACNQTIPAGWKSQLHKWFDSHIPRWACTPPGYVFLCGPQKNKLPFDGSPKITYSTPPVANLYTCINNIQHTGECAVGLLGPRGIGVTIYNTTQPRQKRA

SEQ ID NO: 1498 - protein, 103 aa, Homo Sapiens
NYTRLWANSTSSWDSVIQNKTGRNQNENINTNPITPEVDYKGNSTNMPETSHIVALTSKSEQELYIPSVVSNSPSTVQSIENTSKSHGEIFKKDVCAENNNNM

SEQ ID NO: 1499 - protein, 101 aa, Homo Sapiens
VPRFPRTEVGAGHSVNEETKAEKVGNQTSVIPATSRQAALGTSWTQRRTQPLQERSHWHPRGNNASGMGGHRMFPGPLRGPAAQVLENECGSLGRAAEGRS

SEQ ID NO: 1500 - protein, 100 aa, Homo Sapiens
PGANPTFQTGYTPGTPYKVSCSPTSGAVPPYSSSPNPYQTAVYPVRSAYPQQSPYAQQGTYYTQPLYAAPPHVIHHTTVVQPNGMPATVYPAPIPPPRGN

SEQ ID NO: 1501 - protein, 89 aa, Homo Sapiens
TCEIVTLDRDSSQPRRTIARQTARCACRKGQIAGTTRARPACVDARIIKTKQWCDMLPCLEGEGCDLLINRSGWTCTQPGGRIKTTTVS

SEQ ID NO: 1502 - protein, 73 aa, Homo Sapiens
LYFKVAKALKAAKDPDAVAVKNHNPDKVCWATNSQAKATTMESCPSLQCCEGCRMHASSDSLPPCCCDINEGL

SEQ ID NO: 1503 - protein, 197 aa, Homo Sapiens
FPRIQQLFTSPESSVTAAPRARKYKCGLPQPCPEEHLAFRVVSGAANVIGPKICLEDKMLMSSVKDNVGRGLNIALVNGVSGELIEARAFDMWAGDVNDLLKFIRPLHEGTLVFVASYDDPATKMNEETRKLFSELGSRNAKELAFRDSWVFVGAKGVQNKSPFEQHVKNSKHSNKYEGWPEALEMEGCIPRRSTAS

SEQ ID NO: 1504 - protein, 288 aa, Homo Sapiens
LQAADTCPEVKMVGLEGSDKLTILRGCPGLPGAPGPKGEAGTNGKRGERGPPGPPGKAGPPGPNGAPGEPQPCLTGPRTCKDLLDRGHFLSGWHTIYLPDCRPLTVLCDMDTDGGGWTVFQRRVDGSVDFYRDWATYKQGFGSRLGEFWLGNDNIHALTAQGTSELRVDLVDFEDNYQFAKYRSFKVADEAEKYNLVLGAFVEGSAGDSLTFHNNQSFSTKDQDNDLNTGNCAVMFQGAWWYKNCHVSNLNGRYLRGTHGSFANGINWKSGKGYNYSYKVSEMKVRPA

SEQ ID NO: 1505 - protein, 367 aa, Homo Sapiens
CGAMSPPQLALNPSALLSRGCNDSDVLAVAGFALRDINKDRKDGYVLRLNRVNDAQEYRRGGLGSLFYLTLDVLETDCHVLRKKAWQDCGMRIFFESVYGQCKAIFYMNNPSRVLYLAAYNCTLRPVSKKKIYMTCPDCPSSIPTDSSNHQVLEAATESLAKYNNENTSKQYSLFKVTRASSQWVVGPSYFVEYLIKESPCTKSQASSCSLQSSDSVPVGLCKGSLTRTHWEKFVSVTCDFFESQAPATGSENSAVNQKPTNLPKVEESQQKNTPPTDSPSKAGPRGSVQYLPDLDDKNSQEKGPQEAFPVHLDLTTNPQGETLDISFLFLEPMEEKLVVLPFPKEKARTAECPGPAQNASPLVLPP

SEQ ID NO: 1506 - protein, 148 aa, Homo Sapiens
TPSASRGPRSYPHLEGDVRWRRLFSSTHFFLRVDPGGRVQGTRWRHGQDSILEIRSVHVGVVVIKAVSSGFYVAMNRRGRLYGSRLYTVDCRFRERIEENGHNTYASQRWRRRGQPMFLALDRRGGPRPGGRTRRYHLSAHFLPVLVS

SEQ ID NO: 1507 - protein, 176 aa, Homo Sapiens
APTAPNGTLEAELERRWESLVALSLARLPVAAQPKEAAVQSGAGDYLLGIKRLRRLYCNVGIGFHLQALPDGRIGGAHADTRDSLLELSPVERGVVSIFGVASRFFVAMSSKGKLYGSPFFTDECTFKEILLPNNYNAYESYKYPGMFIALSKNGKTKKGNRVSPTMKVTHFLPRL

SEQ ID NO: 1508 - protein, 211 aa, Homo Sapiens
QEGPGRGPALGRELASLFRAGREPQGVSQQHVREQSLVTDQLSRRLIRTYQLYSRTSGKHVQVLANKRINAMAEDGDPFAKLIVETDTFGSRVRVRGAETGLYICMNKKGKLIAKSNGKGKDCVFTEIVLENNYTALQNAKYEGWYMAFTRKGRPRKGSKTRQHQREVHFMKRLPRGHHTTEQSLRFEFLNYPPFTRSLRGSQRTWAPEPR

SEQ ID NO: 1509 - protein, 72 aa, Homo Sapiens
RRVAVTARHLSRLVVGAAVWRGAGRAFLLIEDLTGSCFEPLPQGLLLHELPDRRSCLAAGHQWRGYTVSSHT

SEQ ID NO: 1510 - protein, 413 aa, Homo Sapiens
LWGGLLPPRTELPASRPPEDRLPRRPARSGGPAPAPRFPLPPPLAWDARGGSLKTFRALLTLAAGADGPPRQSRSEPRWHVSARQPRPEESAAVHGGVFWSRGLEEQVPPGFSEAQAAAWLEAARGARMVALERGGCGRSSNRLARFADGTRACVRYGINPEQIQGEALSYYLARLLGLQRHVPPLALARVEARGAQWAQVQEELRAAHWTEGSVVSLTRWLPNLTDVVVPAPWRSEDGRLRPLRDAGGELANLSQAELVDLVQWTDLILFDYLTANFDRLVSNLFSLQWDPRVMQRATSNLHRGPGGALVFLDNEAGLVHGYRVAGMWDKYNEPLLQSVCVFRERTARRVLELHRGQDAAARLLRLYRRHEPRFPELAALADPHAQLLQRRLDFLAKHILHCKAKYGRRSGT

SEQ ID NO: 1511 - protein, 185 aa, Homo Sapiens
LPDPGNSTWPPGAQAGLPAALALPLPRLPRILFPMAGRPARPSSDFVGCAQGMCCHGRQGTVHIHTSSVSCWTPCPVTGTGGTAVSRKDRVLPHRRQVSLACVCAVGERAGQLWSQKPVQMARPSARHLLPRGSSPNSQAVLLPSVCPVPWPPVGPSPGQGEGLSPAFPGVGTDRGDSWALVLQV

SEQ ID NO: 1512 - protein, 237 aa, Homo Sapiens [sequence omitted]

SEQ ID NO: 1513 - protein, 224 aa, Homo Sapiens
QFHGEKGISIPDHGFCQPISIPLCTDIAYNQTIMPNLLGHTNQEDAGLEVHQFYPLVKVQCSPELRFFLCSMYAPVCTVLEQAIPPCRSICERARQGCEALMNKFGFQWPERLRCEHFPRHGAEQICVGQNHSEDGAPALLTTAPPPGLQPGAGGTPGGPGGGGAPPRYATLEHPFHCPRVLKVPSYLSYKFLGERDCAAPCEPARPDGSMFFSQEETRFARLW

SEQ ID NO: 1514 - protein, 224 aa, Homo Sapiens
QPSLQDELKDNTTVFTRILDRLLDGYDNRLRPGLGERVTEVKTDIFVTSFGPVSDHDMEYTIDVFFRQSWKDERLKFKGPMTVLRLNNLMASKIWTPDTFFHNGKKSVAHNMTMPNKLLRITEDGTLLYTMRLTVRAECPMHLEDFPMDAHACPLKFGSYAYTRAEVVYEWTREPARSVVVAEDGSRLNQYDLLGQTVDSGIVQSSTGEYVVMTTHFHLKRKIG

SEQ ID NO: 1515 - protein, 223 aa, Homo Sapiens
NIQEDEAKNNITIFTRILDRLLDGYDNRLRPGLGDSITEVFTNIYVTSFGPVSDTDMEYTIDVFFRQKWKDERLKFKGPMNILRLNNLMASKIWTPDTFFHNGKKSVAHNMTMPNKLLRIQDDGTLLYTMRLTVQAECPMHLEDFPMDAHSCPLKFGSYAYTTSEVTYIWTYNASDSVQVAPDGSRLNQYDLLGQSIGKETIKSSTGEYTVMTAHFHLKRKIG

SEQ ID NO: 1516 - protein, 231 aa, Homo Sapiens
PQTESKNEASSRDVVYGPQPQPLENQLLSEETKSTETETGSRVGKLPEASRILNTILSNYDHKLRPGIGEKPTVVTVEISVNSLGPLSILDMEYTIDIIFSQTWYDERLCYNDTFESLVLNGNVVSQLWIPDTFFRNSKRTHEHEITMPNQMVRIYKDGKVLYTIRMTIDAGCSLHMLRFPMDSHSCPLSFSSFSYPENEMIYKWENFKLEINEKNSWKLFQFDFTGVSNK

SEQ ID NO: 1517 - protein, 237 aa, Homo Sapiens
RSRKVEEDEYEDSSSNQKWVLAPKSQDTDVTLILNKLLREYDKKLRPDIGIKPTVIDVDIYVNSIGPVSSINMEYQIDIFFAQTWTDSRLRFNSTMKILTLNSNMVGLIWIPDTIFRNSKTAEAHWITTPNQLLRIWNDGKILYTLRLTINAECQLQLHNFPMDEHSCPLIFSSYGYPKEEMIYRWRKNSVEAADQKSWRLYQFDFMGLRNTTEIVTTSAGDYVVMTIYFELSRRMG

SEQ ID NO: 1518 - protein, 243 aa, Homo Sapiens
ASNIKMTHQRCSSSMKQTCKQETRMKKDDSTKARPQKYEQLLHIEDNDFAMRPGFGGSPVPVGIDVHVESIDSISETNMDFTMTFYLRHYWKDERLSFPSTANKSMTFDHRLTRKIWVPDIFFVHSKRSFIHDTTMENIMLRVHPDGNVLLSLRITVSAMCFMDFSRFPLDTQNCSLELESYAYNEDDLMLYWKHGNKSLNTEEHMSLSQFFIEDFSASSGLAFYSSTGWYNRLFINFVLRRH

SEQ ID NO: 1519 - protein, 279 aa, Homo Sapiens
LAHGRRLICWQALLQCQGEPECSYAYNQYAEACAPVLAQHGGGDAPGAAAAAFPASAASFSSRWRCPSHCISALIQLNHTRRGPALEDCDCAQDENCKSTKRAIEPCLPRTSGGGAGGPGAGGVMGCTEARRRCDRDSRCNLALSRYLTYCGKVFNGLRCTDECRTVIEDMLAMPKAALLNDCVCDGLERPICESVKENMARLCFGAELGNGPGSSGSDGGLDDYYDEDYDDEQRTGGAGGEQPLDDDDGVPHPPRPGSGAAASGGRGDLPYGPGRRSS

SEQ ID NO: 1520 - protein, 317 aa, Homo Sapiens
RDITLSGHPRLSTQHVVLLREDEVGDPGTKDLGHPQHGSPIQETQSEVVTLVSPLPGSDMAALPAWRATSGLTLWPHTAEGRDLLGAENRALTGGQQAEDPTLASGAHQWPGSVEKLQGSVWCDAETLLSSSRTGGQAPPWLTDHDVQMLRLLAQGEVVDKARVPAHGQVLQVGFSTEAALQDLSSPRLSQLCSQGLCGLIKRPGDLPEVLSFHVDRVLGLRRSLPAVARRFHSPLLPYRYTDGGARPVIWWAPDVQHLSDPDEDQNSLALGWLQYQALLAHSCNWPGQAPCPGIHHTEWARLALFDFLLQVHDRLD

SEQ ID NO: 1521 - protein, 119 aa, Homo Sapiens
DAEPVLGGGPGGACRARRLYVSFREVGWHRWVIAPRGFLANYCQGQCALPVALSGSGGPPALNHAVLRALMHAAAPGAADLPCCVPARLSPISVLFFDNSDNVVLRQYEDMVVDECGCR

SEQ ID NO: 1522 - protein, 129 aa, Homo Sapiens
TALAGTRTAQGSGGGAGRGHGRRGRSRCSRKPLHVDFKELGWDDWIIAPLDYEAYHCEGLCDFPLRSHLEPTNHAIIQTLLNSMAPDAAPASCCVPARLSPISILYIDAANNVVYKQYEDMVVEACGCR

SEQ ID NO: 1523 - protein, 98 aa, Homo Sapiens
LPFVPIREQFFEIPMPSIILKLKEPHTMSRSQKFLIWLSDLLLMRKALFDHLTARGIQVYIWVLNEEQEYKRAFDLGATGVMTDYPTKLRDFLHNFSA

SEQ ID NO: 1524 - protein, 175 aa, Homo Sapiens
RRPHLLHTPRAPTFRIRLGAHRGGSGELLENTMEAMENSMAQRSDLLELDCQLTRDRVVVVSHDENLCRQSGLNRDVGSLDFEDLPLYKEKLEVYFSPGHFAHGSDRRMVRLEDLFQRFPRTPMSVEIKGKNEELIREIAGLVRRYDRNEITIWASEKSSVMKKCKAANPEMPLS

SEQ ID NO: 1525 - protein, 360 aa, Homo Sapiens
EGFTVEALWGKTEEEAKQLAEEMNIAFYTSRTDDILLHQDVDLVCISIPPPLTRQISVKALGIGKNVVCEKAATSVDAFRMVTASRYYPQLMSLVGNVLRFLPAFVRMKQLISEHYVGAVMICDARIYSGSLLSPSYGWICDELMGGGGLHTMGTYIVDLLTHLTGRRAEKVHGLLKTFVRQNAAIRGIRHVTSDDFCFFQMLMGGGVCSTVTLNFNMPGAFVHEVMVVGSAGRLVARGADLYGQKNSATQEELLLRDSLAVGAGLPEQGPQDVPLLYLKGMVYMVQALRQSFQGQGDRRTWDRTPVSMAASFEDGLYMQSVVDAIKRSSRSGEWEAVEVLTEEPDTNQNLCEALQRNNL

SEQ ID NO: 1526 - protein, 333 aa, Homo Sapiens
SQTNNCTYLREQCLRDANGCKHAWRVMEDACNDSDPGDPCKMRNSSYCNLSIQYLVESNFQFKECLCTDDFYCTVNKLLGKKCINKSDNVKEDKFKWNLTTRSHHGFKGMWSCLEVAEACVGDVVCNAQLASYLKACSANGNPCDLKQCQAAIRFFYQNIPFNIAQMLAFCDCAQSDIPCQQSKEALHSKTCAVNMVPPPTCLSVIRSCQNDELCRRHYRTFQSKCWQRVTRKCHEDENCISTLSKQDLTCSGSDDCKAAYIDILGTVLQVQCTCRTITQSEESLCKIFQHMLHRKSCFNYPTLSNVKGMALYTRKHANKITLTGFHSPFNGE

SEQ ID NO: 1527 - protein, 542 aa, Homo Sapiens
PSASKEPDNHVYTRAAVAADAKQCLEIGRDTLRDGGSAVDAAIAALLCVGLMNAHSMGIGVGLFLTIYNSTTRKAEVINAREVAPRLAFASMFNSSEQSQKGGLSVAVPGEIRGYELAHQRHGRLPWARLFQPSIQLARQGFPVGKGLAAVLENKRTVIEQQPVLCEVFCRDRKVLREGERLTLPRLADTYEMLAIEGAQAFYNGSLMAQIVKDIQAAGGIVTAEDLNNYCAELIEHPLNISLGDAVLYMPSARLSGPVLALILNILKGYNFSRESVETPEQKGLTYHRIVEAFRFAYAKRTLLGDPKFVDVTEVVRNMTSEFFAAQLRSQISDHTTHPISYYKPEFYTPDDGGTAHLSVVAEDGSAVSATSTINLYFGSKVCSPVSGILFNNMDDFSSPSITNEFGAPPSPANFIQPGKQPLLSMCPTIMVGQDGQVRMVVGAAGGTQITTDTALAIIYNLWFGYDVKRAVEEPRLHNKLLPNVTTVERNIDQAVTAALETRHHHTQIASTFIAVVQAIVRTAGGWAAASDSRKGGEPAGY

SEQ ID NO: 1528 - protein, 513 aa, Homo Sapiens
LLRQQRSQDARLSWLAGLQHRVAWGALVWAATWQRRRLEQSTLHVHQSQQQALRWCLQGAQRPHCSLRRSTDISTFRNHLPLTKASQTQQEDSGEQPLPPTSNQDLGEASLQATLLGLAALNKAYPEVLAQGRTARVTLTSPWPRPLPWPGNTLGQVGTPGTKDPRALLLDALRSPGLRALEAGTAVELLDVFLGLETDGEELAGAIAAGNPGAPLRERAAELREALEQGPRGLALRLWPKLQVVVTLDAGGQAEAVAALGALWCQGLAFFSPAYAASGGVLGLNLQPEQPHGLYLLPPGAPFIELLPVKEGTQEEAASTLLLAEAQQGKEYELVLTDRASLTRCRLGDVVRVVGAYNQCPVVRFICRLDQTLSVRGEDIGEDLFSEALGRAVGQWAGAKLLDHGCVESSILDSSAGSAPHYEVFVALRGLRNLSEENRDKLDHCLQEASPRYKSLRFWGSVGPARVHLVGQGAFRALRAALAACPSSPFPPAMPRVLRHRHLAQCLQERVVS

SEQ ID NO: 1529 - protein, 161 aa, Homo Sapiens
MMNIRFNHPLYGSFGTQIIHIGAFQGMVSIRDNNIFSEWDGILDYKNALLVAKVFNKMACVLARMDKAVFPSLDDISKALDKQAFKYYPSTRGLTYTVLPSWVKNLAQYGKPIKNMCRDDPTYFAQQQKEGTALAIDSNSCFEIQLLSFMGLFICGETPGL

SEQ ID NO: 1530 - protein, 512 aa, Homo Sapiens
QWRGLSSALRALEAQRGREQREDSALRSFLAELSRAPRGASAPPQDPASSARNKRSHSGEPAPHIRAESHDMLMMMTYSMVPIRVMVDLCNSTKGICLTGPSGPPGPPGAGGLPGHNGLDGQPGPQGPKGEKGANGKRGKMGIPGAAGNPGERGEKGDHGELGLQGNEGPPGQKGEKGDKGDVSNDVLLAGAKGDQGPPGPPGPPGPPGPPGPPGSRRAKGPRQPSMFNGQCPGETCAIPNDDTLVGKADEKASEHHSPQAESMITSIGNPVQVLKVTETFGTWIRESANKSDDRIWVTEHFSGIMVKEFKDQPSLLNGSYTFIHLPYYFHGCGHVVYNNSLYYHKGGSNTLVRFEFGQETSQTLKLENALYFDRKYLFANSKTYFNLAVDEKGLWIIYASSVDGSSILVAQLDERTFSVVQHVNTTYPKSKAGNAFIARGILYVTDTKDMRVTFAFDLLGGKQINANFDLRTSQSVLAMLAYNMRDQHLYSWEDGHLMLYPVQFLSTTLNQ

SEQ ID NO: 1531 - protein, 229 aa, Homo Sapiens
KEEVKSGTKGSQPMSPSDFLDKLMGRTSGYDARIRPNFKGPPVNVTCNIFINSFSSITKTTMDYRVNVFLRQQWNDPRLSYREYPDDSLDLDPSMLDSIWKPDLFFANEKGANFHEVTTDNKLLRIFKNGNVLYSIRLTLILSCLMDLKNFPMDIQTCTMQLESFGYTMKDLVFEWLEDAPAVQVAEGLTLPQFILRDEKDLGCCTKHYNTGKFTCIEVKFHLERQMGY

SEQ ID NO: 1532 - protein, 330 aa, Homo Sapiens
VTAQRVRAHLEAAGHVCVLKDAFDFESRSEIANLILAENCEAALALHLYRGGRLLQGHRIPFGVIFGGTDVNEDANQAEKNTVMGRVLEEARFAVAFTESMKEMAQAQWPHAKGKVYVQSQGIATTPNAAFNWNTFLQRSEINQSADNLHIFLLICGLRQVKDPLYLVDAFSAWHQEEPNVHLVIVGPEVDPVFTREVKAKVKRAAGVRLIGEMPQEDLHAVVKNCFAVVNSSVSEGMSAAILEAMDLEVPVLARNIPGNAAVVKHEVTGLLFSNPQEFVHLAKRLVSDPALEKEIVVNGREYVRMYHSWQVERDTYQQLIRKLEGSTED

SEQ ID NO: 1533 - protein, 106 aa, Homo Sapiens
ASSGNLRTFVGCAVREFTFLAKKPGCRGLRITTDACWGRCETWEKPILEPPYIEAHHRVCTYNETKQVTVKLPNCAPGVDPFYTYPVAIRCDCGACSTATTECETI

SEQ ID NO: 1534 - protein, 230 aa, Homo Sapiens
RIHQLALTGEKRADIQLNSFGFYTNGSLEVELSVLRLGLREAEEKSLLVGFSLSRVRSGRVRSYSTRDFQDCPLQKNSSSFLVLFLINTKDLQVQVRKYGEQKTLFIFPGLLPEAPSKPGLPKPQATVPRKVDGGGTSAASKPKSTPAVIQGPSGKDKDLVLGLSHLNNSYNFSFHVVIGSQAEEGQYSLNFHNCNNSVPGKEHPFDITVMIREKNPDGFLSAAEMPLFK

SEQ ID NO: 1535 - protein, 103 aa, Homo Sapiens
THWCQGTQRVPKPGCGQGGRANCPNSGANATANGTAAPAAAAAAATASGNGPPGGALYSWETGDDRFLFRNFHTGIWYSCEEELSGLGEKCRSFIDLAPASEK

SEQ ID NO: 1536 - protein, 91 aa, Homo Sapiens
HWCEGTRRVVKPLCQDQPGGQHCIHFKRDNSSNGRMDNNSQAVLYIWELGDDKFIQRGFHVGLWQSCEESLNGEDEKCRSFRSVVPAEEQG

SEQ ID NO: 1537 - protein, 168 aa, Homo Sapiens
SGPRRQWHPLASCSSWSRPQSQGSTPGVLCKTGMGREPIPETQCHFANSMCSLHVSVPYFGNSPNISNFFRWSLALSPRQWCDLGSLQPPSPRFKGFSCLSLPSSWDYRRAPSPANFCILVEMGFHHVGQADLELLTSADLPTSASQSAGITGVSHHAWPQTLSLLLY

SEQ ID NO: 1538 - protein, 400 aa, Homo Sapiens
AAGLQGRPARRCYAVGPAQSPPTFGFLLDIDGVLVRGHRVIPAALKAFRRLVNSQGQLRVPVVFVTNAGNILQHSKAQELSALLGCEVDADQVILSHSPMKLFSEYHEKRMLVSGQGPVMENAQGLGFRNVVTVDELRMAFPLLDMVDLERRLKTTPLPRNDFPRIEGVLLLGEPVRWETSLQLIMDVLLSNGSPGAGLATPPYPHLPVLASNMDLLWMAEAKMPRFGHGTFLLCLETIYQKVTGKELRYEGLMGKPSILTYQYAEDLIRRQAERRGWAAPIRKLYAVGDNPMSDVYGANLFHQYLQKATHDGAPELGAGGTRQQQPSASQSCISILVCTGVYNPRNPQSTEPVLGGGEPPFHGHRDLCFSPGLMEASHVVNDVNEAVQLVFRKEGWALE

SEQ ID NO: 1539 - protein, 502 aa, Homo Sapiens
IKGEAKKEKGMTFLPTTVSGLREEERKEKGVAFLATTELPARSIDLSALNLTELVNGMLSRALKDSKKFFSLLSVTSYSSFAFHKFSVAVYNISNLKTVDPAKFPTRYCYCLNNRTNDLSDFTALLVDIIGNSTSYLTEIFKSTSILSVNQSNESDCIFICVMTGKSGRNLSDFWEIEEKYPIINYTFTSGLSGVLGAATRGTARTSKPTTKSQKTLPSTSPGHWTQSTPWASALRSSPWTETAAPSETEETLNTGRPPELPARATATWFSASHTLPALATRRVARTQWLTADRQTWASISSVPWAQTISEKKPGGSLWETRSSPPTTAGTEEAMNTTSLLAPAAEIMATPGSPSQASPTLGAFTHGTQTPSPTKATAPRYPQTGDLSAEWPFTAGEEPVLVPRPHQVSRCPQPLFKVGAMAAAPLTLAIQRLNPCLMELCQFFQQCLCMSQRSPRTEDMRYCLEYYSWFLKNATYICQRVKRVSHSHTLKQKCLENICKSV

SEQ ID NO: 1540 - protein, 119 aa, Homo Sapiens
QMSQALCFSKIGGEDGDIHRGFQSLLVAINRTDTEYVLRTANGLFGEKSYDFLTGFTDSCGKFYQATIKQLDFVNDTEKSTTRVNSWVADKTKGENILLFYFDNILNSFIVSSLQNCQI

SEQ ID NO: 1541 - protein, 353 aa, Homo Sapiens
MEKTLETVPLERKKREKEQFRKLFIGGLSFETTEESLRNYYEQWGKLTDCVVMRDPASKRSRGFGFVTFSSMAEVDAAMAARPHSIDGRVVEPKRAVAREESGKPGAHVTVKKLFVGGIKEDTEEHHLRDYFEEYGKIDTIEIITDRQSGKKRGFGFVTFDDHDPVDKIVLQKYHTINGHNAEVRKALSRQEMQEVQSSRSGRGGNFGFGDSRGGGGNFGPGPGSNFRGGSDGYGSGRGFGDGYNGYGGGPGGGNFGGSPGYGGGRGGYGGGGPGYGNQGGGYGGGYDNYGGGNYGSGNYNDFGNYNQQPSNYGPMKSGNFGGSRNMGGPYGGGNYGPGGSGGSGGYGGRSRY

SEQ ID NO: 1542 - protein, 388 aa, Homo Sapiens
VDSGNDVTDIADDGCPKPPEIAHGYVEHSVRYQCKNYYKLRTEGDGVYTLNDKKQWINKAVGDKLPECEADDGCPKPPEIAHGYVEHSVRYQCKNYYKLRTEGDGVYTLNNEKQWINKAVGDKLPECEAVCGKPKNPANPVQRILGGHLDAKGSFPWQAKMVSHHNLTTGATLINEQWLLTTAKNLFLNHSENATAKDIAPTLTLYVGKKQLVEIEKVVLHPNYSQVDIGLIKLKQKVSVNERVMPICLPSKDYAEVGRVGYVSGWGRNANFKFTDHLKYVMLPVADQDQCIRHYEGSTVPEKKTPKSPVGVQPILNEHTFCAGMSKYQEDTCYGDAGSAFAVHDLEEDTWYATGILSFDKSCAVAEYGVYVKVTSIQDWVQKTIAEN

SEQ ID NO: 1543 - protein, 348 aa, Homo Sapiens
MSDLGAVISLLLWGRQLFALYSGNDVTDISDDRFPKPPEIANGYVEHLFRYQCKNYYRLRTEGDGVYTLNDKKQWINKAVGDKLPECEAVCGKPKNPANPVQRILGGHLDAKGSFPWQAKMVSHHNLTTGATLINEQWLLTTAKNLFLNHSENATAKDIAPTLTLYVGKKQLVEIEKVVLHPNYHQVDIGLIKLKQKVLVNERVMPICLPSKNYAEVGRVGYVSGWGQSDNFKLTDHLKYVMLPVADQYDCITHYEGSTCPKWKAPKSPVGVQPILNEHTFCVGMSKYQEDTCYGDAGSAFAVHDLEEDTWYAAGILSFDKSCAVAEYGVYVKVTSIQHWVQKTIAEN

SEQ ID NO: 1544 - protein, 439 aa, Homo Sapiens
TPLPPTSAHGNVAEGETKPDPDVTERCSDGWSFDATTLDDNGTMLFFKGEFVWKSHKWDRELISERWKNFPSPVDAAFRQGHNSVFLIKGDKVWVYPPEKKEKGYPKLLQDEFPGIPSPLDAAVECHRGECQAEGVLFFQGDREWFWDLATGTMKERSWPAVGNCSSALRWLGRYYCFQGNQFLRFDPVRGEVPPRYPRDVRDYFMPCPGRGHGHRNGTGHGNSTHHGPEYMRCSPHLVLSALTSDNHGATYAFSGTHYWRLDTSRDGWHSWPIAHQWPQGPSAVDAAFSWEEKLYLVQGTQVYVFLTKGGYTLVSGYPKRLEKEVGTPHGIILDSVDAAFICPGSSRLHIMAGRRLWWLDLKSGAQATWTELPWPHEKVDGALCMEKSLGPNSCSANGPGLYLIHGPNLYCYSDVEKLNAAKALPQPQNVTSLLGCTH

SEQ ID NO: 1545 - protein, 300 aa, Homo Sapiens
YYWDDNFDPASLQGARVLLTGANAGVGEELAYHYARLGSHLVLTAHTEALLQKVVGNCRKLGAPKVFYIAADMASPEAPESVVQFALDKLGGLDYLVLNHIGGAPAGTRARSPQATRWLMQVNFVSYVQLTSRALPSLTDSKGSLVVVSSLLGRVPTSFSTPYSAAKFALDGFFGSLRRELDVQDVNVAITMCVLGLRDRASAAEAVRSSTSRPRQPEHRGVPLQSQTAMFLPPTVPGARTLTETPLRGWPQPKMKSSRQKSKTEKNDGHLEPVTAWEVQVPRVRRLCRGLARPHLFGHD

SEQ ID NO: 1546 - protein, 208 aa, Homo Sapiens
DTLIINCPGFGQHRVDPAAFQAVFDRKAIGPVTNYSVATHVNISFTLSAIWNCYSRIHTFNCHHARPWHNQFVQWNPDECGGIKKSGMATENLWLSDVFIEESVDQTPAGLMASMSIVKATSNTISQCGWSASANWTPSISPSMDRARAWRRMSRSFQIHHRTSFRTRREWVLLGIQKRTIKVTVATNQYEQAIFHVAIRRRCRPSPY

SEQ ID NO: 1547 - protein, 458 aa, Homo Sapiens
QLSRAGRSAPLAAGCPDRCEPARCPPQPEHCEGGRARDACGCCEVCGAPEGAACGLQEGPCGEGLQCVVPFGVPASATVRRRAQAGLCVCASSEPVCGSDANTYANLCQLRAASRRSERLHRPPVIVLQRGACGQGQEDPNSLRHKYNFIADVVEKIAPAVVHIELFRKLPFSKREVPVASGSGFIVSEDGLIVTNAHVVTNKHRVKVELKNGATYEAKIKDVDEKADIALIKIDHQGKLPVLLLGRSSELRPGEFVVAIGSPFSLQNTVTTGIVSTTQRGGKELGLRNSDMDYIQTDAIINYGNSGGPLVNLDGEVIGINTLKVTAGISFAIPSDKIKKFLTESHDRQAKGKAITKKKYIGIRMMSLTSSKAKELKDRHRDFPDVISGAYIIEVIPDTPAEAGGLKENDVIISINGQSVVSANDVSDVIKRESTLNMVVRRGNEDIMITVIPEEIDP

SEQ ID NO: 1548 - protein, 517 aa, Homo Sapiens
TDALNVLLIIVDDLRPSLGCYGDKLVRSPNIDQLASHSLLFQNAFAQQAVCAPSRVSFLTGRRPDTTRLYDFNSYWRVHAGNFSTIPQYFKENGYVTMSVGKVFHPGISSNHTDDSPYSWSFPPYHPSSEKYENTKTCRGPDGELHANLLCPVDVLDVPEGTLPDKQSTEQAIQLLEKMKTSASPFFLAVGYHKPHIPFRYPKEFQKLYPLENITLAPDPEVPDGLPPVAYNPWMDIRQREDVQALNISVPYGPIPVDFQRKIRQSYFASVSYLDTQVGRLLSALDDLQLANSTIIAFTSDHGWALGEHGEWAKYSNFDVATHVPLIFYVPGRTASLPEAGEKLFPYLDPFDSASQLMEPGRQSMDLVELVSLFPTLAGLAGLQVPPRCPVPSFHVELCREGKNLLKHFRFRDLEEDPYLPGNPRELIAYSQYPRPSDIPQWNSDKPSLKDIKIMGYSIRTIDYRYTVWVGFNPDEFLANFSDIHAGELYFVDSDPLQDHNMYNDSQGGDLFQLLMP

SEQ ID NO: 1549 - protein, 70 aa, Homo Sapiens
GPETLCGAELVDALQFVCGDRGFYFNKPTGYGSSSRRAPQTGIVDECCFRSCDLRRLEMYCAPLKPAKSA

SEQ ID NO: 1550 - protein, 105 aa, Homo Sapiens
EGVTDLRLWLCQPAPRCGEWTYNPLEQCCDDGVILDLNQTRLCGSSCTFWPCFQHCCLESLGSQNQTVVRFKVPGMKPDCKSSPITRICAQEYHPKSPVSRSDLI

SEQ ID NO: 1551 - protein, 175 aa, Homo Sapiens
CGPGRVVGSRRRPPRKLVPLAYKQFSPNVPEKTLGASGRYEGKIARSSERFKELTPNYNPDIIFKDEENTGADRLMTQRCKDRLNSLAISVMNQWPGVKLRVTEGWDEDGHHSEESLHYEGRAVDITTSDRDRNKYGLLARLAVEAGFDWVYYESKAHVHCSVKSEHSAAAKTGG

SEQ ID NO: 1552 - protein, 115 aa, Homo Sapiens
GLECDGRTNLCCRQQFFIDFRLIGWNDWIIAPTGYYGNYCEGSCPAYLAGVPGSASSFHTAVVNQYRMRGLNPGTVNSCCIPTKLSTMSMLYFDDEYNIVKRDVPNMIVEECGCA

SEQ ID NO: 1553 - protein, 435 aa, Homo Sapiens
ADGPDAAAGNASQAQLQNNLNVGSDTTSETSFSLSKEAPREHLDHQAAHQPFPRPRFRQETGHPSLQRDFPRSFLLDLPNFPDLSKADINGQNPNIQVTIEVVDGPDSEADKDQHPENKPSWSVPSPDWRAWWQRSLSLARANSGDQDYKYDSTSDDSNFLNPPRGWDHTAPGHRTFETKDQPEYDSTDGEGDWSLWSVCSVTCGNGNQKRTRSCGYACTATESRTCDRPNCPGIEDTFRTAATEVSLLAGSEEFNATKLFEVDTDSCERWMSCKSEFLKKYMHKVMNDLPSCPCSYPTEVAYSTADIFDRIKRKDFRWKDASGPKEKLEIYKPTARYCIRSMLSLESTTLAAQHCCYGDNMQLITRGKGAGTPNLISTEFSAELHYKVDVLPWIICKGDWSRYNEARPPNNGQKCTESPSDEDYIKQFQEAREY

SEQ ID NO: 1554 - protein, 532 aa, Homo Sapiens
IINHPLLFPRENATVPENEEEIIRKMQAHQEKLQLEQLRLEEEVARLAAEKEALEQVAEEGRQQNETRVAWDLWSTLCMILFLMIEVWRQDHQEGPSPECLGGEEDELPGLGGAPLQGLTLPNKATLGHFYERCIRGATADAARTREFLEGFVDDLLEALRSLCNRDTDMEVEDFIGVDSMYENWQVDRPLLCHLFVPFTPPEPYRFHPELWCSGRSVPLDRQGYGQIKVVRADGDTLSCICGKTKLGEDMLCLLHGRNSMAPPCGDMENLLCATDSLYLDTMQVMKWFQTALTRAWKGIAHKYEFDLAFGQLDSPGSLKIKFRSGKFMPFNLIPVIQCDDSDLYFVSHLPREPSEGTPASSTDWLLSFAVYERHFLRTTLKALPEGACHLSCLQIASFLLSKQSRLTGPSGLSSYHLKTALLHLLLLRQAADWKAGQLDARLHELLCFLEKSLLQKKLHHFFIGNRKVPEAMGLPEAVLRAEPLNLFRPFVLQRSLYRKTLDSFYEMLKNAPALISEYSLHVPSDQPTPKS

SEQ ID NO: 1555 - protein, 79 aa, Homo Sapiens
HPLMVSDRMDLDTLARSRQLEKRMSEEMRLLEMEFEERKRAAEQRQKAENFWTGDTSSDQLVLGKKDMGWPFQADGQEG

SEQ ID NO: 1556 - protein, 191 aa, Homo Sapiens
DRSMEKKKGEPRTRAEARPWVDEDLKDSSDLHQAEEDADEWQESEENVEHIPFSHNHYPEKEMVKRSQEFYELLNKRRSVRFISNEQVPMEVIDNVIRTAGTAPSGAHTEPWTFVVVKDPDVKHKIRKIIEEEEEINYMKRMGHRWVTDLKKLRTNWIKEYLDTAPILILIFKQVHGFAANGKKKVHYYNE

SEQ ID NO: 1557 - protein, 209 aa, Homo Sapiens
GDELLNICMNAKHHKRVPSPEDKLYEECIPWKDNACCTLTTSWEAHLDVSPLYNFSLFHCGLLMPGCRKHFIQAICFYECSPNLGPWIQPVGSLGWEVAPSGQGERVVNVPLCQEDCEEWWEDCRMSYTCKSNWRGGWDWSQGKNRCPKGAQCLPFSHYFPTPADLCEKTWSNSFKASPERRNSGRCLQKWFEPAQGNPNVAVARLFAS

SEQ ID NO: 1558 - protein, 166 aa, Homo Sapiens
CLQCDPLVLEALGHLRSALIPSRFQLEQLQARAGAVLMGMEGPFFRDYALNVFVGKVETNQLDLVASFVKNQTQHLMGNSLKDEPLLEELVTLRANVIKEFKKVLISYELKACNPKLCRLLKEEVLDCLHCQRITPKCIHKKYCFVDRQPRVALQYQMDSKYPRNQ

SEQ ID NO: 1559 - protein, 154 aa, Homo Sapiens
CLECDPKFIEDVGSLLGNLIPSEVPGRTQLLERQIKEMIHLSFKVSHSDKRLRVLAVQQVVKLRTWLKNEFYKLGNETWKGVFIYQGKLLDVCQNLESKLKELLKNFSEIACSEDCIVVEGPILDCWTCLRMTNRCFKGEYCGDEDPRKAENRE

SEQ ID NO: 1560 - protein, 69 aa, Homo Sapiens
ETLPQFRVDGRGGNNGGVSRVSPVSRGSQEEEEDEDDSYTFHHGITPGEMGTGGSSSLSTLGGSFFTDP

SEQ ID NO: 1561 - protein, 86 aa, Homo Sapiens
MHFLTIYPNCSSGVVRAQSRTEQKNPLGLDDLGIQNLGQTVSLAPAVEAASMLKMEPLNSTHPGTAASSSPLESRAAGGGSGNGNE

SEQ ID NO: 1562 - protein, 118 aa, Homo Sapiens
PLYQKSVWTQESKCHLIETNIRDQEELKGKKVPQYPCLWVNVSAAGRWAVLYHTEDTRDQNQQCSYIPGSVDNYQTARADVEKVRAKFQEQQVFYCFSAPRGNETSVLFQRLYGPQAL

SEQ ID NO: 1563 - protein, 229 aa, Homo Sapiens
IIKGFECKPHSQPWQAALFEKTRLLCGATLIAPRWLLTAAHCLKPRYIVHLGQHNLQKEEGCEQTRTATESFPHPGFNNSLPNKDHRNDIMLVKMASPVSITWAVRPLTLSSRCVTAGTSCLISGWGSTSSPQLRLPHTLRCANITIIEHQKCENAYPGNITDTMVCASVQEGGKDSCQGDSGGPLVCNQSLQGIISWGQDPCAITRKPGVYTKVCKYVDWIQETMKNN

SEQ ID NO: 1564 - protein, 231 aa, Homo Sapiens
ATPKIFNGTECGRNSQPWQVGLFEGTSLRCGGVLIDHRWVLTAAHCSGSRYWVRLGEHSLSQLDWTEQIRHSGFSVTHPGYLGASTSHEHDLRLLRLRLPVRVTSSVQPLPLPNDCATAGTECHVSGWGITNHPRNPFPDLLQCLNLSIVSHATCHGVYPGRITSNMVCAGGVPGQDACQGDSGGPLVCGGVLQGLVSWGSVGPCGQDGIPGVYTYICKYVDWIRMIMRNN

SEQ ID NO: 1565 - protein, 228 aa, Homo Sapiens
VLGGHECQPHSQPWQAALFQGQQLLCGGVLVGGNWVLTAAHCKKPKYTVRLGDHSLQNKDGPEQEIPVVQSIPHPCYNSSDVEDHNHDLMLLQLRDQASLGSKVKPISLADHCTQPGQKCTVSGWGTVTSPRENFPDTLNCAEVKIFPQKKCEDAYPGQITDGMVCAGSSKGADTCQGDSGGPLVCDGALQGITSWGSDPCGRSDKPGVYTNICRYLDWIKKIIGSKG

SEQ ID NO: 1566 - protein, 339 aa, Homo Sapiens
GSLHSPGLSECFQVNGADYRGHQNRTGPRGAGRPCLFWDQTQQHSYSSASDPHGRWGLGAHNFCRNPDGDVQPWCYVAETEEGIYWRYCDIPSCHMPGYLGCFVDSGAPPALSGPSGTSTKLTVQVCLRFCRMKGYQLAGVEAGYACFCGSESDLARGRLAPATDCDQICFGHPGQLCGGDGRLGVYEVSVGSCQGNWTAPQGVIYSPDFPDEYGPDRNCSWALGPPGAALELTFRLFELADPRDRLELRDAASGSLLRAFDGARPPPSGPLRLGTAALLLTFRSDARGHAQGFALTYRGLQDAAEDPEAPEGSAQTPAAPLDGANVSCSPRPGAPPAA

SEQ ID NO: 1567 - protein, 341 aa, Homo Sapiens
SNSDGSFHYKDKLYRSASQALQAYIDDFDLGQIYPGASTGKINIDEDFTNMSQFCNYIYKPNNAFENLDHKKHSNFISCRRHTVNDIDSMSLTTDDLLRLPADGSFSYTYVGPSHRTSKKNKKCRGRLGSLDIEKNPHFQGPYTSMGKDNFVTPVIRSNINGKQCGDKIELLILKAKRNLEQCTEELPKSMKKDDSPCSLDKLEADRSWENIPVTFKSPVPVNSDDSPQQTSRAKSAKGVLEDFLNNDNQSCTLSGGKHHGPVEALKQMLFNLQAVQERFNQNKTTDPKEEIKQVSEDDFSKLQLKESMIPITRSLQKALHHLSRLRDLVDDTNGERSPKM

SEQ ID NO: 1568 - protein, 416 aa, Homo Sapiens
FWLLNVLFPPHTTPKAELSNHTRPVILVPGCLGNQLEAKLDKPDVVNWMCYRKTEDFFTIWLDLNMFLPLGVDCWIDNTRVVYNRSSGLVSNAPGVQIRVPGFGKTYSVEYLDSSKLAGYLHTLVQNLVNNGYVRDETVRAAPYDWRLEPGQQEEYYRKLAGLVEEMHAAYGKPVFLIGHSLGCLHLLYFLLRQPQAWKDRFIDGFISLGAPWGGSIKPMLVLASGDNQGIPIMSSIKLKEEQRITTTSPWMFPSRMAWPEDHVFISTPSFNYTGRDFQRFFADLHFEEGWYMWLQSRDLLAGLPAPGVEVYCLYGVGLPTPRTYIYDHGFPYTDPVGVLYEDGDDTVATRSTELCGLWQGRQPQPVHLLPLHGIQHLNMVFSNLTLEHINAILLGAYRQGPPASPTASPEPPPPE

SEQ ID NO: 1569 - protein, 158 aa, Homo Sapiens
HHLLASDEEIQDVSGTWYLKAMTVDREFPEMNLESVTPMTLTTLEGGNLEAKVTMLISGRCQEVKAVLEKTDEPGKYTADGGKHVAYIIRSHVKDHYIFYCEGELHGKPVRGVKLVGRDPKNNLEALEDFEKAAGARGLSTESILIPRQSETCSPGSD

SEQ ID NO: 1570 - protein, 168 aa, Homo Sapiens
AGSQVQEWYPRESHALNWNKFSGFWYILATATDAQGFLPARDKRKLGASVVKVNKVGQLRVLLAFRRGQGCGRAQPRHPGTSGHLWASLSVKGVKAFHVLSTDYSYGLVYLRLGRATQNYKNLLLFHRQNVSSFQSLKEFMDACDILGLSKAAVILPKDASRTHTILP

SEQ ID NO: 1571 - protein, 173 aa, Homo Sapiens
QTPTPLPLPPPMQSFQGNQFQGEWFVLGLAGNSFRPEHRALLNAFTATFELSDDGRFEVWNAMTRGQHCDTWSYVLIPAAQPGQFTVDHGVEPGADREETRVVDSDYTQFALMLSRRHTSRLAVLRISLLGRSWLLPPGTLDQFICLGRAQGLSDDNIVFPDVTGWSPQASVC

SEQ ID NO: 1572 - protein, 144 aa, Homo Sapiens
HHLLASDEEIQDVSGTWYLKAMTVDRELPEMNLESVTPMTLTILEGGNLEAKATMLISGQCQEVKVILEKTDEPGKYTANRGKHVAYIIRSHMKDHYIFYCEGRDPENNLEALEDFEKAAGARGLSTESILIPRQSETCSPGSD

SEQ ID NO: 1573 - protein, 208 aa, Homo Sapiens
LETADLAELCGQTWQGDGLLLRSHAASRRFYFVAPDTDCGLWVQAAAPGDRIRFQFRFFLVYSLTPAPPALNTSSPAPADPCAPGSYLQFYEGPPGAPRPLGSPLCGLNIPVPVASSGPFLGLRLVTRGRQPRVDFVGEVTSFRLGPCGAYFRCQNGRCIPSSLVCDPWGMDNCGDGSDQGSWSPADCRGPSPVPSQTGSTDAHTSRS

SEQ ID NO: 1574 - protein, 156 aa, Homo Sapiens
QLLPGNNFTNECNIPGNFMCSNGRCIPGAWQCDGLPDCFDKSDEKECPKAKSKCGPTFFPCASGIHCIIGRFRCNGFEDCPDGSDEENCTANPLLCSTARYHCKNGLCIDKSFICDGQNNCQDNSDEESCESSQEPGSGQVFVTSENQLVYYPSIT

SEQ ID NO: 1575 - protein, 310 aa, Homo Sapiens
GTSNLSETEPPLWKESPGQLSDYRVENSMYIINPWVYLERMGMYKIILNQTARYFAKFAPDNEQNILWGLPLQYGWQYRTGRLADPTRRTNCGYESGDHMCISVDSWWADLNYFLSSLPFLAAVDSGVMGISSDQVRLLPPPKNERKFCYDVSSCRSSFPETMNKWNTFYQYLQSPFSKFDDLLKYLWAAHTSTLADNIKSFEDRYDYYSKAEAHFERSWVLAVDHLAAVLFPTTLIRSYKFQKGMPPRILLNTDVAPFISDFTAFQNVVLVLLNMLDNVDKSIGYLCTEKSNVYRDHSESSSRSYGNNS

SEQ ID NO: 1576 - protein, 121 aa, Homo Sapiens
SREPLRPWCHPINAILAVEKEGCPVCITVNTTICAGYCPTMMRVLQAVLPPLPQVVCTYRDVRFESIRLPGCPRGVDPVVSFPVALSCRCGPCRRSTSDCGGPKDHPLTCDHPQLSGLLFL

SEQ ID NO: 1577 - protein, 83 aa, Homo Sapiens
ATCKDEKGKQEMETGQQPSGLSATLTKVKCAKRQKTVVRVRFYMLSMKNKACRKNLSKGYNQRPEGSKEESHMVVKEKRKGDH

SEQ ID NO: 1578 - protein, 123 aa, Homo Sapiens
QHFSAADSPGTEFTPATTTSRLLHVLYVCSCSLVAEKDDFSSPHSHSLLLVSLPEPHFELSEGLRLAFRGSQSSDSIRYRRGGNEGVRPWRAGATGLPPTGKDISVSLAHELYSLLKQLQMSI

SEQ ID NO: 1579 - protein, 390 aa, Homo Sapiens
VHMPTKAVDPEAFMNISEIIQHQGYPCEEYEVATEDGYILSVNRIPRGLVQPKKTGSRPVVLLQHGLVGGASNWISNLPNNSLGFILADAGFDVWMGNSRGNAWSRKHKTLSIDQDEFWAFSYDEMARFDLPAVINFILQKTGQEKIYYVGYSQGTTMGFIAFSTMPELAQKIKMYFALAPIATVKHAKSPGTKFLLLPDMMIKGLFGKKEFLYQTRFLRQLVIYLCGQVILDQICSNIMLLLGGFNTNNMNMSRASVYAAHTLAGTSVQNILHWSQAVNSGELRAFDWGSETKNLEKCNQPTPVRYRVRDMTVPTAMWTGGQDWLSNPEDVKMLLSEVTNLIYHKNIPEWAHVDFIWGLDAPHRMYNEIIHLMQQEETNLSQGRCEAVL

SEQ ID NO: 1580 - protein, 380 aa, Homo Sapiens
GGFLDLENEVNPEVWMNTSEIIIYNGYPSEEYEVTTEDGYILLVNRIPYGRTHARSTGPRPVVYMQHALFADNAYWLENYANGSLGFLLADAGYDVWMGNSRGNTWSRRHKTLSETDEKFWAFSFDEMAKYDLPGVIDFIVNKTGQEKLYFIGHSLGTTIGFVAFSTMPELAQRIKMNFALGPTISFKYPTGIFTRFFLLPNSIIKAVFGTKGFFLEDKKTKIASTKICNNKILWLICSEFMSLWAGSNKKNMNQSRMDVYMSHAPTGSSVHNILHIKQLYHSDEFRAYDWGNDADNMKHYNQSHPPIYDLTAMKVPTAIWAGGHDVLVTPQDVARILPQIKSLHYFKLLPDWNHFDFVWGLDAPQRMYSEIIALMKAYS

SEQ ID NO: 1581 - protein, 94 aa, Homo Sapiens
SPGPKDGSQTEKTPSADQNQEQFEEHFVASSVGEMWQVVDMAQQEEDQSSKTAAVHKHSFHLSFCFSLASVMVFSGGPLRRTFPNIQLCFMLTH

SEQ ID NO: 1582 - protein, 111 aa, Homo Sapiens
GPSVQECYHSNGQSYRGTYFTTVTGRTCQAWSSMTPHQHSRTPEKYPNDGLISNYCRNPDCSAGPWCYTTDPNVRWEYCNLTRCSDDEGTVFVPLTVIPVPSLEDSFIQVA

SEQ ID NO: 1583 - protein, 137 aa, Homo Sapiens
GYGPQKKLNLSHKGIGEPCRRHEECQSNCCTINSLAPHTLCTPKTIFLQCLPWRKPNGYRCSHDSECQSSCCVRNNSPQELCTPQSVFLQCVPWRKPNGDFCSSHQECHSQCCIQLREYSPFRCIPRTGILAQCLPL

SEQ ID NO: 1584 - protein, 217 aa, Homo Sapiens
MRHEELLTKTFQGPAVVCGTPTSHVYMFKNGSGDSGDSSEEESHRVVLRPRGKERHKSGVHQPPQAGAGDVVLLQRELAQEDSLNKLALQYGCKVADIKKVNNFIREQDLYALKSVKIPVRNHGILMETHKELKPLLSPSSETTVTVELPEADRAGAGTGAQAGQLMGFFKGIDQDIERAVQSEIFLHESYCMDTSHQPLLPAPPKTPMDGADCGIQ

SEQ ID NO: 1585 - protein, 260 aa, Homo Sapiens
SPTIFYRDCWIRRFPGLLINLEESQKLGAQFLKYYSESTGQKCSRSCCLRKDVSCNLAVFYHSPIHDNINCLHVHCPTLESCILEPGTSAILYNITDGIDPDLLVFEQSPTYLNTRSSSNRWDRLRILKAMNLDKQTTTINGMLPSTEAPSSTTHQDLVVNTNSTSYSKELTTDFWARFTSLNESITTKINKVSPSTDFISNPDNKTISPFFEPIDTKLSHMPVPPGLNSSKQLLNKTKGYNSRNHTSANEDEVSVTSKT

SEQ ID NO: 1586 - protein, 318 aa, Homo Sapiens
QGLTQTPTEMQRVSLRFGGPMTRSYRSTARTGLPRKTRIILEDENDAMADADRLAGPAAAELLAATVSTGFSRSSAINEEDGSSEEGVVINAGKDSTSRELPSATPNTAGSSSTRFIANSQEPEIRLTSSLPRSPGRSTEDLPGSQATLSQWSTPGSTPSRWPSPSPTAMPSPEDLRLVLMPWGPWHCHCKSGTMSRSRSGKLHGLSGRLRVGALSQLRTEHKPCTYQQCPCNRLREECPLDTSLCTDTNCASQSTTSTRTTTTPFPTIHLRSSPSLPPASPCPALAFWKRVRIGLEDIWNSLSSVFTEMQPIDRNQR

SEQ ID NO: 1587 - protein, 270 aa, Homo Sapiens
GYSEERCSWRGSGLTQEPGSVGQLALACAEGAVEWLYPAGALRLTLGGPDPRARPGIACLRPVRPFAGAQVFAERAGGALELLLAEGPGPAGGRCVRWGPRERRALFLQATPHQDISRRVAAFRFELREDGRPELPPQAHGLGVDGACRPCSDAELLLAACTSDFVIHGIIHGVTHDVELQESVITVVAARVLRQTPPLFQAGRSGDQGLTSIRTPLRCGVHPGPGTFLFMGWSRFGEARLGCAPRFQEFRRAYEAARAAHLHPCEVALH

SEQ ID NO: 1588 - protein, 266 aa, Homo Sapiens
QYSSDRCSWKGSGLTHEAHRKEVEQVYLRCAAGAVEWMYPTGALIVNLRPNTFSPARHLTVCIRSFTDSSGANIYLEKTGELRLLVPDGDGRPGRVQCFGLEQGGLFVEATPQQDIGRRTTGFQYELVRRHRASDLHELSAPCRPCSDTEVLLAVCTSDFAVRGSIQQVTHEPERQDSAIHLRVSRLYRQKSRVFEPVPEGDGHWQGRVRTLLECGVRPGHGDFLFTGHMHFGEARLGCAPRFKDFQRMYRDAQERGLNPCEVGTD

SEQ ID NO: 1589 - protein, 337 aa, Homo Sapiens
CAELRRAGPGSPTRSAPPGPAWRPPGPHLPPAPGQPRGASRRQVTYVRSGRRAPPGGGGSGTPEPGCCAPRGRPRRKGPRWHIDLQPWAGSAQSLDEEAWRFLRYISTTQIACNHMNTDSLATDSSPTHKPWSVCLDDRFNLAHQIRNKQCRLYSLGLGSDDTHFEVSMANNGCEVHRFDPSVKSAHILESQHLWYHRLSIDWRDPHPAVAAQKPHSNTRKLGSILNEFGHHKIDVLKADLESAEWKVLENLILEDVLEQIGQLIFEIHLHWPGFEVSGSDSSVVRFWYSLLKELEQKDFRLFHSYKDLSKPQLFLKKDIFNASSCYTLSWVNTRWK

SEQ ID NO: 1590 - protein, 221 aa, Homo Sapiens
LLGCWQPLCKSYFPYLMAVLTPKSNRKMESKKRELFSQIKGLTGASGKVALLELGCGTGANFQFYPPGCRVTCLDPNPHFEKFLTKSMAENRHLQYERFVVAPGEDMRQLADGSMDVVVCTLVLCSVQSPRKVLQEVRRVLRPGGVLFFWEHVAEPYGSWAFMWQQVFEPTWKHIGDGCCLTRETWKDLENAQFSEIQMERQPPPLKWLPVGPHIMGKAVK

SEQ ID NO: 1591 - protein, 489 aa, Homo Sapiens
QLQAAPPSGASHSPLPAGGLTTTTTTPTITTSQAAGTPKGQQESGVSPSPQSTCGGLLSGPRGFFSSPNYPDPYPPNTHCVWHIQVATDHAIQLKIEALSIESVASCLFDRLELSPEPEGPLLRVCGRVPPPTLNTNASHLLVVFVSDSSVEGFGFHAWYQAMAPGRGSCAHDEFRCDQLICLLPDSVCDGFANCADGSDETNCSAKFSGCGGNLTGLQGTFSTPSYLQQYPHQLLCTWHISVPAGHSIELQFHNFSLEAQDECKFDYVEVYETSSSGAFSLLGRFCGAEPPPHLVSSHHELAVLFRTDHGISSGGFSATYLAFNATENPCGPSELSCQAGGCKGVQWMCDMWRDCTDGSDDNCSGPLFPPPELACEPVQVEMCLGLSYNTTAFPNIWVGMITQEEVVEVLSGYKSLTSLPCYQHFRRLLCGLLVPRCTPLGSVLPPCRSVCQEAEHQCQSGLALLGTPWPFNCNRLPEAADLEACAQP

SEQ ID NO: 1592 - protein, 77 aa, Homo Sapiens
YESHESMESYELNPFINRRNANTFISPQQRWRAKVQERIRERSKPVHELNREACDDYRLCERYAMVYGYNAAYNRYF

SEQ ID NO: 1593 - protein, 391 aa, Homo Sapiens
FVLSGGRWEKTDLTYRILRFPWQLVQEQVRQTMAEALKVWSDVTPLTFTEVHEGRADIMIDFARYWHGDDLPFDGPGGILAHAFFPKTHREGDVHFDYDETWTIGDDQGTDLLQVAAHEFGHVLGLQHTTAAKALMSAFYTFRYPLSLSPDDCRGVQHLYGQPWPTVTSRTPALGPQAGIDTNEIAPLEPDAPPDACEASFDAVSTIRGELFFFKAGFVWRLRGGQLQPGYPALASRHWQGLPSPVDAAFEDAQGHIWFFQGAQYWVYDGEKPVLGPAPLTELGLVRFPVHAALVWGPEKNKIYFFRGRDYWRFHPSTRRVDSPVPRRATDWRGVPSEIDAAFQDADGYAYFLRGRLYWKFDPVKVKALEGFPRLVGPDFFGCAEPANTFL

SEQ ID NO: 1594 - protein, 425 aa, Homo Sapiens
SPRAPLSLSRRGWQPRGYPDGGAAQAFSKRTLSWRLLGEALSSQLSVADQRRIVALAFRMWSEVTPLDFREDLAAPGAAVDIKLGFGRGRHLGCPRAFDGSGQEFAHAWRLGDIHFDDDEHFTPPTSDTGISLLKVAVHEIGHVLGLPHTYRTGSIMQPNYIPQEPAFELDWSDRKAIQKLYGSCEGSFDTAFDWIRKERNQYGEVMVRFSTYFFRNSWYWLYENRNNRTRYGDPIQILTGWPGIPTHNIDAFVHIWTWKRDERYFFQGNQYWRYDSDKDQALTEDEQGKSYPKLISEGFPGIPSPLDTAFYDRRQKLIYFFKESLVFAFDVNRNRVLNSYPKRITEVFPAVIPQNHPFRNIDSAYYSYAYNSIFFFKGNAYWKVVNDKDKQQNSWLPANGLFPKKFISEKWFDVCDVHISTLNM

SEQ ID NO: 1595 - protein, 432 aa, Homo Sapiens
YALSGSVWKKRTLTWRVRSFPQSSQLSQETVRVLMSYALMAWGMESGLTFHEVDSPQGQEPDILIDFARAFHQDSYPFDGLGGTLAHAFFPGEHPISGDTHFDDEETWTFGSKDGEGTDLFAVAVHEFGHALGLGHSSAPNSIMRPFYQGPVGDPDKYRLSQDDRDGLQQLYGKAPQTPYDKPTRKPLAPPPQPPASPTHSPSFPIPDRCEGNFDAIANIRGETFFFKGPWFWRLQPSGQLVSPRPARLHRFWEGLPAQVRVVQAAYARHRDGRILLFSGPQFWVFQDRQLEGGARPLTELGLPPGEEVDAVFSWPQNGKTYLVRGRQYWRYDEAAARPDPGYPRDLSLWEGAPPSPDDVTVSNAGDTYFFKGAHYWRFPKNSIKTEPDAPQPMGPNWLDCPAPSSGPRAPRPPKATPVSETCDCQCELNQA

SEQ ID NO: 1596 - protein, 483 aa, Homo Sapiens
VPLQSNRLGPTSRLRYSRFLDPSNVIFLRWDFDLEAEIISFELQVRTAGWVGFGVTNRYTNVGSDLVVGGVLPNGNVYFSDQHLVEEDTLKEDGSQDAELLGLTEDAVYTTMHFSRPFRSCDPHDLDITSNTVRVLAAYGLDDTLKLYRERTFVKSIFLLQVVHPDDLDVPEDTIIHDLEITNFLIPEDDTTYACTFLPLPIVSEKHHIYKFEPKLVYHNETTVHHILVYACGNASVLPTGISDCYGADPAFSLCSQVIVGSAVGGTSYQFPDDVGVSIGTPLDPQWILEIHYSNFNNLPGVYDSSGIRVYYTSQLCKYDTDVLQLGFFTFPIHFIPPGAESFMSYGLCRTEKFEEMNGAPMPDIQVYGYLLHTHLAGRALQAVQYRNGTQLRKICKDDSYDFNLQETRDLPSRVEIKPGDELLVECHYQTLDRDSMTFGGPSTINEMCLIFLFYYPQNNISSCMGYPDIIYVAHELGEEASE

SEQ ID NO: 1597 - protein, 104 aa, Homo Sapiens
SKCYFQAQAPCHYEGKYFTLGESWLRKDCFHCTCLHPVGVGCCDTSQHPIDFPAGCEVRQEAGTCQFSLVQKSDPRLPCKGGGPDPEWGSANTPVPGAPAPHSS

SEQ ID NO: 1598 - protein, 419 aa, Homo Sapiens
TTFQEYQKTGELSTSDHIFPLTPGLVYSIPFDHIVLHSGQRPPELPKSTEIHEQKRHCNTTRHSKPTDKPTGNSKTIDHKSSTDNHEAPPTSEENSSNQGKDPMIRNQRSVDPADSTTTHKESAGKKHITPAPKSKINCRKSTTGKSTVTRKSDKTGRPLEKSMSTLDKTSTSSHKTTTSFHNSGNSQTKQKSTSFPEKITAASKTTYKTTGTPEESEKTEDSRTTVASDKLLTKTTKNIQETISANELTQSLAEPTEHGGRTANENNTPSPAEPTENRERTANENKKTICTKGKNTPVPEKPTENLGNTTLTTETIKAPVKSTENPEKTAAVTKTIKPSVKVTGDKSLTTTSSHLNKTEVTHQVPTGSFTLITSRTKLSSITSEATGNESHPYLNKDGSQKGIHAGQMGENDSFPAWA

SEQ ID NO: 1599 - protein, 331 aa, Homo Sapiens
SPPAAPRFNVSLDSVPELRWLPVLRHYDLDLVRAAMAQVIGDRVPKWVHVLIGKVVLELERFLPQPFTGEIRGMCDFMNLSLADCLLVNLAYESSVFCTSIVAQDSRGHIYHGRNLDYPFGNVLRKLTVDVQFLKNGQIAFTGTTFIGYVGLWTGQSPHKFTVSGDERDKGWWWENAIAALFRRHIPVSWLIRATLSESENFEAAVGKLAKTPLIADVYYIVGGTSPREGVVITRNRDGPADIWPLDPLNGAWFRVETNYDHWKPAPKEDDRRTSAIKALNATGQANLSLEALFQILSVVPVYNNFTIYTTVMSAGSPDKYMTRIRNPSRK

SEQ ID NO: 1600 - protein, 165 aa, Homo Sapiens
AAPPPINKLALFPDKSAWCEAKNITQIVGHSGCEAKSIQNRACLGQCFSYSVPNTFPQSTESLVHCDSCMPAQSMWEIVTLECPGHEEVPRVDKLVEKILHCSCQACGKEPSHEGLSVYVQGEDGPGSQPGTHPHPHPHPHPGGQTPEPEDPPGAPHTEEEGAED

SEQ ID NO: 1601 - protein, 322 aa, Homo Sapiens
TKKGTEKQTTSETQKSVQCGTWTKHAEGGIFTSPNYPSKYPPDRECIYIIEAAPRQCIELYFDEKYSIEPSWECKFDHIEVRDGPFGFSPIIGRFCGQQNPPVIKSSGRFLWIKFFADGELESMGFSARYNFTPDPDFKDLGALKPLPACEFEMGGSEGIVESIQIMKEGKATASEAVDCKWYIRAPPRSKIYLRFLDYEMQNSNECKRNFVAVYDGSSSVEDLKAKFCSTVANDVMLRTGLGVIRMWADEGSRNSRFQMLFTSFQEPPCEGNTFFCHSNMCINNTLVCNGLQNCVYPWDENHCKEKRKTSLLDQLTNTSGT

SEQ ID NO: 1602 - protein, 276 aa, Homo Sapiens
AVTRCGFATRGVAGPGPIGREPDPDSDWEPEERELQEVESTLKRQKQAIRFQKIRRQMEAPGAPPRTLTWEAMEQIRYLHEEFPESWSVPRLAEGFDVSTDVIRRVLKSKFLPTLEQKLKQDQKVLKKAGLAHSLQHLRGSGNTSKLLPAGHSVSGSLLMPGHEASSKDPNHSTALKVIESDTHRTNTPRRRKGRNKEIQDLEESFVPVAAPLGHPRELQKYSSDSESPRGTGSGALPSGQKLEELKAEEPDNFSSKVVQRGREFFDSNGNFLYRI

SEQ ID NO: 1603 - protein, 117 aa, Homo Sapiens
MPGDSSPGTLPLWDASLSPPLGPDPGGFSRASHAGDKSRPPAPELGSPGAVRPRVGSCAPGPMELRVSNTSCENGSLLHLYCSSQEVLCQIVNDLSPEVPSNATFHSWQERIRQNYG

SEQ ID NO: 1604 - protein, 477 aa, Homo Sapiens
SEGRKTWRRRGQQPPPPPRTEAAPAAGQPVESFPLDFTAVEGNMDSFMAQVKSLAQSLYPCSAQQLNEDLRLHLLLNTSVTCNDGSPAGYYLKESRGSRRWLLFLEGGWYCFNRENCDSRYDTMRRLMSSRDWPRTRTGTGILSSQPEENPYWWNANMVFIPYCSSDVWSGASSKSEKNEYAFMGALIIQEVVRELLGRGLSGAKVLLLAGSSAGGTGVLLNVDRVAEQLEKLGYPAIQVRGLADSGWFLDNKQYRHTDCVDTITCAPTEAIRRGIRYWNGVVPERCRRQFQEGEEWNCFFGYKVYPTLRCPVFVVQWLFDEAQLTVDNVHLTGQPVQEGLRLYIQNLGRELRHTLKDVPASFAPACLSHEIIIRSHWTDVQVKGTSLPRALHCWDRSLHDSHKASKTPLKGCPVHLVDSCPWPHCNPSCPTVRDQFTGQEMNVAQFLMHMGFDMQTVAQPQGLEPSELLGMLSNGS

SEQ ID NO: 1605 - protein, 173 aa, Homo Sapiens
GRIVRGQTQDSLSLHNITFCRDRYAEWQTVAQCPVPQFSGKEPSAWKWILGPVVLYACERIIRFWRFQQEVVITKVVSHPSGVLELHMKKRGFKMAPGQYILVQCPAISSLEWHPFTLTSAPQEDFFSVHIRAAGDWTAALLEAFGAEGQALQEPWSLPRLAVDGPFGTALTD

SEQ ID NO: 1606 - protein, 425 aa, Homo Sapiens
QPTPVINSLAVYRHRETDFGVGVRDHPGQHGKTPSPQKLDNLIIIIIGFLRRDTFTILFCTSYLCVSFLKTIFWSRNGHDGSTDVQQRAWRSNRSRQKGLRSICMHTKKRVSSFRGNKIGLKDVITLRRHVETKVRAKIRKRKVTTKINRHDKINGKRKTARKQKMFQRAQELRRRAEDYHKCKIPPSARKPLCNWVRMAAAEHRHSSGLPCWPYLTAEALKNRMGRQPPPPTQQHSITDNSLSLKTPPECLLHPLPPSVDDNIKECPLAPLPPSVDDNLKEYLLVPLPPSPLPPSVDDNLKDCLFVPLPPSPLPPSVDDNLKTPPLATQEAEAEKPPKPKRWRVDEVEQSPKPKRRRADEVEQSPKPKRQREAEAQQLPKPKRRRLSKLRTRHCTQAWAIRINPWVEKKKKIKKQNKTHAPKTN

SEQ ID NO: 1607 - protein, 396 aa, Homo Sapiens
QPTPVINSLAVYRHRETDFGVGVRDHPGQHGKTPSPQKLDNLIIIIIGFLRRYTFNVLFCTSCLCVSFLKTIFWSRNGHDGSMDVQQRAWRSNRSRQKGLRSICMHTKKRVSSFRGNKIGLKDVITLRRHVETKVRAKIRKRKVTTKINRHDKINGKRKTARKQKMFQRAQELRRRAEDYHKCKIPPSARKPLCNWVRMAAAEHCHSSGLPYWLYLTAETLKNRMGRQPPPPTQQHSITDNSLSLKTPPECLLTPLPPSVDDNIKECPLAPLPPSPLPPSVDDNLKECLFVPLPPSPLPPSVDDNLKECLFVPLPPSPLPPSVDDNLKTPPLATQEAEVEKPPKPKRWRVDEVEQSPKPKRQREAEAQQLPKPKRRRLSKLRTRHCTQAWAIRINP

SEQ ID NO: 1608 - protein, 108 aa, Homo Sapiens
HPLGSPGSASDLETSGLQEQRNHLQGKLSELQVEQTSLEPLQESPRPTGVWKSREVATEGIRGHRKMVLYTLRAPRSPKMVQGSGCFGRKMDRISSSSGLGCKVLRRH

SEQ ID NO: 1609 - protein, 455 aa, Homo Sapiens
GGVGGGGGGAGIGGGRQEREALPPQKIEVLVLLPQDDSYLFSLTRVRPAIEYALRSVEGNGTGRRLLPPGTRFQVAYEDSDCGNRALFSLVDRVAAARGAKPDLILGPVCEYAAAPVARLASHWDLPMLSAGALAAGFQHKDSEYSHLTRVAPAYAKMGEMMLALFRHHHWSRAALVYSDDKLERNCYFTLEGVHEVFQEEGLHTSIYSFDETKDLDLEDIVRNIQASERVVIMCASSDTIRSIMLVAHRHGMTSGDYAFFNIELFNSSSYGDGSWKRGDKHDFEAKQAYSSLQTVTLLRTVKPEFEKFSMEVKSSVEKQGLNMEDYVNMFVEGFHDAILLYVLALHEVLRAGYSKKDGGKIIQQTWNRTFEGIAGQVSIDANGDRYGDFSVIAMTDVEAGTQEVIGDYFGKEGRFEMRPNVKYPWGPLKLRIDENRIVEHTNSSPCKSSGGLEE

SEQ ID NO: 1610 - protein, 89 aa, Homo Sapiens
AGKCDAVFKGFSDCLLKLGDSMANYPQGLDDKTNIKTVCTYWEDFHSCTVTALTDCQEGAKDMWDKLRKESKNLNIQGSLFELCGSGNG

SEQ ID NO: 1611 - protein, 102 aa, Homo Sapiens
ARLGARPCGLRELEVRVSELGLGYASDETVLFRYCAGACEAAARVYDLGLRRLRQRRRLRRERVRAQPCCRPTAYEDEVSFLDAHSRYHTVHELSARECACV

SEQ ID NO: 1612 - protein, 435 aa, Homo Sapiens
VPLERGAPNKEETPATESPDTGLYYHRYLQEVIDVLETDGHFREKLQAANAEDIKSGKLSRELDFVSHHVRTKLDELKRQEVSRLRMLLKAKMDAEQDPNVQVDHLNLLKQFEHLDPQNQHTFEARDLELLIQTATRDLAQYDAAHHEEFKRYEMLKEHERRRYLESLGEEQRKEAERKLEEQQRRHREHPKVNVPGSQAQLKEVWEELDGLDPNRFNPKTFFILHDINSDGVLDEQELEALFTKELEKVYDPKNEEDDMREMEEERLRMREHVMKNVDTNQDRLVTLEEFLASTQRKEFGDTGEGWETVEMHPAYTEEELRRFEEELAAREAELNAKAQRLSQETEALGRSQGRLEAQKRELQQAVLHMEQRKQQQQQQQGHKAPAAHPEGQLKFHPDTDDVPVPAPAGDQKEVDTSEKKLLERLPEVEVPQHL

SEQ ID NO: 1613 - protein, 396 aa, Homo Sapiens
VPIDIDKTKVQNIHPVESAKIEPPDTGLYYDEYLKQVIDVLETDKHFREKLQKADIEEIKSGRLSKELDLVSHHVRTKLDELKRQEVGRLRMLIKAKLDSLQDIGMDHQALLKQFDHLNHLNPDKFESTDLDMLIKAATSDLEHYDKTRHEEFKKYEMMKEHERREYLKTLNEEKRKEEESKFEEMKKKHENHPKVNHPGSKDQLKEVWEETDGLDPNDFDPKTFFKLHDVNSDGFLDEQELEALFTKELEKVYDPKNEEDDMVEMEEERLRMREHVMNEVDTNKDRLVTLEEFLKATEKKEFLEPDSWETLDQQQFFTEEELKEYENIIALQENELKKKADELQKQKEELQRQHDQLEAQKLEYHQVIQQMEQKKLQQGIPPSGPAGELKFEPHI

SEQ ID NO: 1614 - protein, 400 aa, Homo Sapiens
MMDLRNTPAKSLDKFIEDYLLPDTCFRMQINHAIDIICGFLKERCFRGSSYPVCVSKVVKGGSSGKGTTLRGRSDADLVVFLSPLTTFQDQLNRRGEFIQEIRRQLEACQRERAFSVKFEVQAPRWGNPRALSFVLSSLQLGEGVEFDVLPAFDALGQLTGGYKPNPQIYVKLIEECTDLQKEGEFSTCFTELQRDFLKQRPTKLKSLIRLVKHWYQNCKKKLGKLPPQYALELLTVYAWERGSMKTHFNTAQGFRTVLELVINYQQLCIYWTKYYDFKNPIIEKYLRRQLTKPRPVILDPADPTGNLGGGDPKGWRQLAQEAEAWLNYPCFKNWDGSPVSSWILLAESNSADDETDDPRRYQKYGYIGTHEYPHFSHRPSTLQAASTPQAEEDWTCTIL

SEQ ID NO: 1615 - protein, 155 aa, Homo Sapiens
LSFTLEEEDITGTWYVKAMVVDKDFPEDRRPRKVSPVKVTALGGGNLEATFTFMREDRCIQKKILMRKTEEPGKFSAYGGRKLIYLQELPGTDDYVFYCKDQRRGGLRYMGKLVGRNPNTNLEALEEFKKLVQHKGLSEEDIFMPLQTGSCVLEH

SEQ ID NO: 1616 - protein, 460 aa, Homo Sapiens
HPLDTPHLPQELPPGLPNNINITFFSGMFKNVESVAEIFDCLGPHFTWLQAVFTNFPVLIQFVNGMKCVAGLCPRDFEDYGCTCRFEMEGLPVDESDSCCFQHRRCYEEAAEMDCLQDPAKLSTEVNCVSKKIICESKDNCEHLLCTCDKAAIECLARSSLNSSLNLLDTSFCLAQTPETTIKEDLTTLLPRVVPVEPTDTSLTALSGEEAGHDQEGVGAARATSPPGSAEIVATRVTAKIVTLVPAGIKSLGLAVSSVENDPEETTEKACDRFTFLHLGSGDNMQVMPQLGEMLFCLTSRCPEEFESYGCYCGQEGRGEPRDDLDRCCLSHHCCLEQVRRLGCLLERLPWSPVVCVDHTPKCGGQSLCEKLLCACDQTAAECMTSASFNQSLKSPSRLGCPGQPAACEDSLHPVPAAPTLGSSSEEDSEEDPPQEDLGRAKRFLRKSLGPLGIGPLHGR

SEQ ID NO: 1617 - protein, 264 aa, Homo Sapiens
APLIPQRLMSASNSNELLLNLNNGQLLPLQLQGPLNSWIPPFSGILQQQQQAQIPGLSQFSLSALDQFAGLLPNQIPLTGEASFAQGAQAGQVDPLQLQTPPQTQPGPSHVMPYVFSFKMPQEQGQMFQYYPVYMVLPWEQPQQTVPRSPQQTRQQQYEEQIPFYAQFGYIPQLAEPAISGGQQQLAFDPQLGTAPEIAVMSTGEEIPYLQKEAINFRHDSAGVFMPSTSPKPSTTNVFTSAVDQTITPELPEEKDKTDSLREP

SEQ ID NO: 1618 - protein, 107 aa, Homo Sapiens
QEEVFTPPGDSQNNADATDCQIFTLTPPPAPRSPVTRAQPITKTPRCPFHFFPRRPRIHFRFPNRPFVPSRCNHRFPFQPFYWPHRYLTYRYFPRRRLQRGSSSEES

SEQ ID NO: 1619 - protein, 97 aa, Homo Sapiens
IQVHCTQFWFFARIKPTIFYNLYVNPDEVFLGDGCHVTHVLPNVYYEFFYHPHDCGIVTQPLQEVLLLKTKIRYISRDSTVRSEMPLSCVVHKQKCQ

SEQ ID NO: 1620 - protein, 141 aa, Homo Sapiens
ENLHVKISCSLDWLMVSVIPVAESRNLYIFADELHLGMGCPANRIHTYVYEFIYLVRDCGIRTRVVSEETLLFQTELYFTPRNIDHDPQEIHLECSTSRKSVWLTPVSTENEIKLDPSPFIADFQTTAEELGLLSSSPNLL

SEQ ID NO: 1621 - protein, 454 aa, Homo Sapiens
KTTPHTKFTKKSEEREMPKGLKPSSGPPPEEEETLFTEMAEMAEPITKPSALDSVFGTATLSPFENFTLDPADFFLNCCDCCSPVPGQKGEPGETGQPGPKGEAGNLGIPGPPGVVGPQGPRGYKGEKGLKGERGDQGVPGYPGKPGAQGEPGPKGDKGNIGLGGVKGQKGSKGDTCGNCTKGEKGDQGAMGSPGLHGGPGAKGEKGEMGEKGEMGDKGCCGDSGERGGKGQKGEGGMKGEKGSKGDSGMEGKSGRNGLPGAKGDPGIKGEKGELGPPGLLGPTGPKGDIGNKGVRGPTGKKGSRGFKGSKGELARVPRSAFSAGLSKPFPPPNIPIKFEKILYNDQGNYSPVTGKFNCSIPGTYVFSYHITVRGRPARISLVAQNKKQFKSRETLYGQEIDQASLLVILKLSAGDQVWLEVSKDWNGVYVSAEDDSIFTGFLLYPEETSGISP

SEQ ID NO: 1622 - protein, 68 aa, Homo Sapiens
KPVQEEGDPYAELPAMPYWPFSTSDFWNYVQHFQALGAYPQIEDMARTFFAHFPLGSTLGFHVPYQED

SEQ ID NO: 1623 - protein, 513 aa, Homo Sapiens
ILGGSQVEKGSYPWQVSLKQRQKHICGGSIVSPQWVITAAHCIANRNIVSTLNVTAGEYDLSQTDPGEQTLTIETVIIHPHFSTKKPMDYDIALLKMAGAFQFGHFVGPICLPELREQFEAGFICTTAGWGRLTEGGVLSQVLQEVNLPILTWEECVAALLTLKRPISGKTFLCTGFPDGGRDACQGDSGGSLMCRNKKGAWTLAGVTSWGLGCGRGWRNNVRKSDQGSPGIFTDISKVLPWIHEHIQTGNRRKSSRAWCSEQDVIVSGAEGKLHFPESLHLYYESKQRCVWTLLVPEEMHVLLSFSHLDVESCHHSYLSMYSLEDRPIGKFCGESLPSSILIGSNSLRLKFVSDATDNAARFNLTYKALKPNYIPDSGCSYLTVLFEEGLIQSLNYPENYSDKANCDWIFQASKHHLIKLSFQSLEIEESGDCTSDYVTVHSDVERKKEIARLCGYDVPTPVLSPSSIMLISFHSDENGTCRGFQATVSFIPKAGKKIELPTLWFPVLILVM

SEQ ID NO: 1624 - protein, 274 aa, Homo Sapiens
QKSYQESETGPESSIITKVKGITTSEHKVWDVEEYVKPPEGGSVFSIITRVEATHSQTQGTCPESIRVHNATCLSDADCVAGELDMLGNGLRTGRCVPYYQGPSKTCEVFGWCPVEDGASVSQFLGTMAPNFTILIKNSIHYPKFHFSKGNIADRTDGYLKRCTFHEASDLYCPIFKLGFIVEKAGESFTELAHKGGVIGVIINWDCDLDLPASECNPKYSFRRLDPKHVPASSGYNFRFAKYYKINGTTTRTLIKAYGIRIDVIVHGQAGKFS

SEQ ID NO: 1625 - protein, 472 aa, Homo Sapiens
DAPPGKIAVVGAGIGGSAVAHFLQQHFGPRVQIDVYEKGTVGGRLATISVNKQHYESGAASFHSLSLHMQDFVKLLGLRHRREVVGRSAIFGGEHFMLEETDWYLLNLFRLWWHYGISFLRLQMWVEEVMEKFMRIYKYQAHGYAFSGVEELLYSLGESTFVNMTQHSVAESLLQVGVTQRFIDDVVSAVLRASYGQSAAMPAFAGAMSLAGAQGSLWSVEGGNKLVCSGLLKLTKANVIHATVTSVTLHSTEGKALYQVAYENEVGNSSDFYDIVVIATPLHLDNSSSNLTFAGFHPPIDDVQGSFQPTVVSLVHGYLNSSYFGFPDPKLFPFANILTTDFPSFFCTLDNICPVNISASFRRKQPQEAAVWRVQSPKPLFRTQLKTLFRSYYSVQTAEWQAHPLYGSRPTLPRFALHDQLFYLNALEWAASSVEVMAVAAKNVALLAYNRWYQDLDKIDQKDLMHKVKTEL

SEQ ID NO: 1626 - protein, 421 aa, Homo Sapiens
LYSSSDDVIELTPSNFNREVIQSDSLWLVEFYAPWCGHCQRLTPEWKKAATALKDVVKVGAVDADKHHSLGGQYGVQGFPTIKIFGSNKNRPEDYQGGRTGEAIVDAALSALRQLVKDRLGGRSGGYSSGKQGRSDSSSKKDVIELTDDSFDKNVLDSEDVWMVEFYAPWCGHCKNLEPEWAAAASEVKEQTKGKVKLAAVDATVNQVLASRYGIRGFPTIKIFQKGESPVDYDGGRTRSDIVSRALDLFSDNAPPPELLEIINEDIAKRTCEEHQLCVVAVLPHILDTGAAGRNSYLEVLLKLADKYKKKMWGWLWTEAGAQSELETALGIGGFGYPAMAAINARKMKFALLKGSFSEQGINEFLRELSFGRGSTAPVGGGAFPTIVEREPWDGRDGELPVEDDIDLSDVELDDLGKDEL

SEQ ID NO: 1627 - protein, 205 aa, Homo Sapiens
DEDENSPCAHEALLDEDTLFCQGLEVFYPELGNIGCKVVPDCNNYRQKITSWMEPIVKFPGAVDGATYILVMVDPDAPSRAEPRQRFWRHWLVTDIKGADLKKGKIQGQELSAYQAPSPPAHSGFHRYQFFVYLQEGKVISLLPKENKTRGSWKMDRFLNRFHLGEPEASTQFMTQNYQDSPTLQAPRERASEPKHKNQAEIAAC

SEQ ID NO: 1628 - protein, 326 aa, Homo Sapiens
VDEQPLENYLDMEYFGTIGIGTPAQDFTVVFDTGSSNLWVPSVYCSSLACTNHNRFNPEDSSTYQSTSETVSITYGTGSMTGILGYDTVQVGGISDTNQIFGLSETEPGSFLYYAPFDGILGLAYPSISSSGATPVFDNIWNQGLVSQDLFSVYLSADDQSGSVVIFGGIDSSYYTGSLNWVPVTVEGYWQITVDSITMNGEAIACAEGCQAIVDTGTSLLTGPTSPIANIQSDIGASENSDGDMVVSCSAISSLPDIVFTINGVQYPVPPSAYILQSEGSCISGFQGMNLPTESGELWILGDVFIRQYFTVFDRANNQVGLAPVA

SEQ ID NO: 1629 - protein, 329 aa, Homo Sapiens
SVTYEPMAYMDAAYFGEISIGTPPQNFLVLFDTGSSNLWVPSVYCQSQACTSHSRFNPSESSTYSTNGQTFSLQYGSGSLTGFFGYDTLTVQSIQVPNQEFGLSENEPGTNFVYAQFDGIMGLAYPALSVDEATTAMQGMVQEGALTSPVFSVYLSNQQGSSGGAVVFGGVDSSLYTGQIYWAPVTQELYWQIGIEEFLIGGQASGWCSEGCQAIVDTGTSLLTVPQQYMSALLQATGAQEDEYGQFLVNCNSIQNLPSLTFIINGVEFPLPPSSYILSNNGYCTVGVEPTYLSSQNGQPLWILGDVFLRSYYSVYDLGNNRVGFATAA

SEQ ID NO: 1630 - protein, 555 aa, Homo Sapiens
SLPLLMDSVIQALAELEQKVPAAKTRHTASAWLMSAPNSGPHNRLYHFLLGAWSLNATELDPCPLSPELLGLTKEVARHDVREGKEYGVVLAPDGSTVAVEPLLAGLEAGLQGRRVINLPLDSMAAPWETGDTFPDVVAIAPDVRATSSPGLRDGSPDVTTADIGANTPDATKGCPDVQASLPDAKAKSPPTMVDSLLAVTLAGNLGLTFLRGSQTQSHPDLGTEGCWDQLSAPRTFTLLDPKASLLTMAFLNGALDGVILGDYLSRTPEPRPSLSHLLSQYYGAGVARDPGFRSNFRRQNGAALTSASILAQQVWGTLVLLQRLEPVHLQLQCMSQEQLAQVAANATKEFTEAFLGCPAIHPRCRWGAAPYRGRPKLLQLPLGFLYVHHTYVPAPPCTDFTRCAANMRSMQRYHQDTQGWGDIGYSFVVGSDGYVYEGRGWHWVGAHTLGHNSRGFGVAIVGNYTAALPTEAALRTVRDTLPSCAVRAGLLRPDYALLGHRQLVRTDCPGDALFDLLRTWPHFTATVKPRPARSVSKRSRREPPPRTLPATDLQ

SEQ ID NO: 1631 - protein, 356 aa, Homo Sapiens
DSSWNKTQAKQVSEGLQYLFENISQLTEKGLPTDVSTTVSRKAWGAEAVGCSIQLTTPVNVLVIHHVPGLECHDQTVCSQRLRELQAHHVHNNSGCDVAYNFLVGDDGRVYEGVGWNIQGVHTQGYNNISLGFAFFGTKKGHSPSPAALSAMENLITYAVQKGHLSSSYVQPLLGKGENCLAPRQKTSLKKACPGVVPRSVWGARETHCPRMTLPAKYGIIIHTAGRTCNISDECRLLVRDIQSFYIDRLKSCDIGYNFLVGQDGAIYEGVGWNVQGSSTPGYDDIALGITFMGTFTGIPPNAAALEAAQDLIQCAMVKGYLTPNYLLVGHSDVARTLSPGQALYNIISTWPHFKH

SEQ ID NO: 1632 - protein, 436 aa, Homo Sapiens
LTDEEKRLMVELHNLYRAQVSPTASDMLHMRWDEELAAFAKAYARQCVWGHNKERGRRGENLFAITDEGMDVPLAMEEWHHEREHYNLSAATCSPGQMCGHYTQVVWAKTERIGCGSHFCEKLQGVEETNIELLVCNYEPPGNVKGKRPYQEGTPCSQCPSGYHCKNSLCEPIGSPEDAQDLPYLVTEAPSFRATEASDSRKMGTPSSLATGIPAFLVTEVSGSLATKALPAVETQAPTSLATKDPPSMATEAPPCVTTEVPSILAAHSLPSLDEEPVTFPKSTHVPIPKSADKVTDKTKVPSRSPENSLDPKMSLTGARELLPHAQEEAEAEAELPPSSEVLASVFPAQDKPGELQATLDHTGHTSSKSLPNFPNTSATANATGGRALALQSSLPGAEGPDKPSVVSGLNSGPGHVWGPLLGLLLLPPLVLAGIF

SEQ ID NO: 1633 - protein, 379 aa, Homo Sapiens
AGRHPPVVLVPGDLGNQLEAKLDKPTVVHYLCSKKTESYFTIWLNLELLLPVIIDCWIDNIRLVYNKTSRATQFPDGVDVRVPGFGKTFSLEFLDPSKSSVGSYFHTMVESLVGWGYTRGEDVRGAPYDWRRAPNENGPYFLALREMIEEMYQLYGGPVVLVAHSMGNMYTLYFLQRQPQAWKDKYIRAFVSLGAPWGGVAKTLRVLASGDNNRIPVIGPLKIREQQRSAVSTSWLLPYNYTWSPEKVFVQTPTINYTLRDYRKFFQDIGFEDGWLMRQDTEGLVEATMPPGVQLHCLYGTGVPTPDSFYYESFPDRDPKICFGDGDGTVNLKSALQCQAWQSRQEHQVLLQELPGSEHIEMLANATTLAYLKRVLLGP

SEQ ID NO: 1634 - protein, 131 aa, Homo Sapiens
SFWQFQRRVKHITGRSAFFSYYGYGCYCGLGDKGIPVDDTDRHSPSSPSPYEKLKEFSCQPVLNSYQFHIVNGAVVCGCTLGPGASCHCRLKACECDKQSVHCFKESLPTYEKNFKQFSSQPRCGRHKPWC

SEQ ID NO: 1635 - protein, 515 aa, Homo Sapiens
GVYYATAYWMPAEKTVQVKNVMDKNGDAYGFYNNSVKTTGWGILEIRAGYGSQTLSNEIIMFVAGFLEGYLTAPHMNDHYTNLYPQLITKPSIMDKVQDFMEKQDKWTRKNIKEYKTDSFWRHTGYVMAQIDGLYVGAKKRAILEGTKPMTLFQIQFLNSVGDLLDLIPSLSPTKNGSLKVFKRWDMGHCSALIKVLPGFENILFAHSSWYTYAAMLRIYKHWDFNVIDKDTSSSRLSFSSYPGFLESLDDFYILSSGLILLQTTNSVFNKTLLKQVIPETLLSWQRVRVANMMADSGKRWADIFSKYNSGTYNNQYMVLDLKKVKLNHSLDKGTLYIVEQIPTYVEYSEQTDVLRKGYWPSYNVPFHEKIYNWSGYPLLVQKLGLDYSYDLAPRAKIFRRDQGKVTDTASMKYIMRYNNYKKDPYSRGDPCNTICCREDLNSPNPSPGGCYDTKVADIYLASQYTSYAISGPTVQGGLPVFRWDRFNKTLHQGMPEVYNFDFITMKPILKLDIK

SEQ ID NO: 1636 - protein, 202 aa, Homo Sapiens
IPAPGGRWARDGQVPPASRSRSVLLDVSAGQLLMVDGRHPDAVAWANLTNAIRETGWAFLELGTSGQYNDSLQAYAAGVVEAAVSEELIYMHWMNTVVNYCGPFEYEVGYCERLKSFLEANLEWMQEEMESNPDSPYWHQVRLTLLQLKGLEDSYEGRVSFPAGKFTIKPLGFLLLQLSGDLEDLELALNKTKIKPSLGSGS

SEQ ID NO: 1637 - protein, 162 aa, Homo Sapiens
TFIRYSSTCFTFDEYYTITLDIKASSHIYESNAVYSVFVPVNDSVYAVVMKTLDENSDSAGLWQRADKNCYSNSTYYVKDQYMTVLEAQWQAPEPENITEVEIQAFTVQIRALPILSTLKLREKLSTLALAAKIPQSSAFKPFFMITPKSIRLEGLANQVFS

SEQ ID NO: 1638 - protein, 77 aa, Homo Sapiens
EPLDDYVNAQGASLFSVTKKQLGAGSREECAAKCEEDKEFTCRAFQYHSKEQQCVIMAENKKSSIIIRMRDVVLFEK

SEQ ID NO: 1639 - protein, 77 aa, Homo Sapiens
EPLDDYVNTQGPSLFSVTKKQLGAGSREECAAKCEEDKEFTCRAFQYHSKEQQCVIMAENRKSSIIIRMRDAVLFEK

SEQ ID NO: 1640 - protein, 477 aa, Homo Sapiens
MGPRSGEHQRASRIPSQFSKEERVAMKEALKGAIQIPTVTFSSEKSNTTALAEFGKYIHKVFPTVVSTSFIQHEVVEEYSHLFTIQGSDPSLQPYLLMAHFDVVPAPEEGWEVPPFSGLERDGIIYGRGTLDDKNSVMALLQALELLLIRKYIPRRSFFISLGHDEESSGTGAQRISALLQSRGVQLAFIVDEGGFILDDFIPNFKKPIALIAVSEKGSMNLMLQVNMTSGHSSAPPKETSIGILAAAVSRLEQTPMPIIFGSGTVVTVLQQLANEFPFPVNIILSNPWLFEPLISRFMERNPLTNAIIRTTTALTIFKAGVKFNVIPPVAQATVNFRIHPGQTVQEVLELTKNIVADNRVQFHVLSAFDPLPVSPSDDKALGYQLLRQTVQSVFPEVNITAPVTSIGNTDSRFFTNLTTGIYRFYPIYIQPEDFKRIHGVNEKISVQAYETQVKFIFELIQNADTDQEPVSHLHKL

SEQ ID NO: 1641 - protein, 450 aa, Homo Sapiens
KEVCYEDLGCFSDTEPWGGTAIRPLKILPWSPEKIGTRFLLYTNENPNNFQILLLSDPSTIEASNFQMDRKTRFIIHGFIDKGDESWVTDMCKKLFEVEEVNCICVDWKKGSQATYTQAANNVRVVGAQVAQMLDILLTEYSYPPSKVHLIGHSLGAHVAGEAGSKTPGLSRITGLDPVEASFESTPEEVRLDPSDADFVDVIHTDAAPLIPFLGFGTNQQMGHLDFFPNGGESMPGCKKNALSQIVDLDGIWAGTRDFVACNHLRSYKYYLESILNPDGFAAYPCTSYKSFESDKCFPCPDQGCPQMGHYADKFAGRTSEEQQKFFLNTGEASNFARWRYGVSITLSGRTATGQIKVALFGNKGNTHQYSIFRGILKPGSTHSYEFDAKLDVGTIEKVKFLWNNNVINPTLPKVGATKITVQKGEEKTVYNFCSEDTVREDTLLTLTPC

SEQ ID NO: 1642 - protein, 76 aa, Homo Sapiens
LHLDASIHPFRLPFSSKPFLLIPMSNTTLPHTAWPLSFLHQTVSTLKAVAVTHSLWHLQIPVDCQACNRKSKKIYC

SEQ ID NO: 1643 - protein, 223 aa, Homo Sapiens
MSSEKSGLPDSVPHTSPPPYNAPQPPAEPPAPPPQAAPSSHHHHHHHYHQSGTATLPRLGAGGLASSAATAQRGPSSSATLPRPPHHAPPGPAAGAPPPGCATLPRMPPDPYLQETRFEGPLPPPPPAAAAPPPPAPAQTAQAPGFVVPTHAGTVGTLPLGGYVAPGYPLQLQPCTAYVPVYPVGTPYAGGTPGGTGVTSTLPPPPQGPGLALLEPRRPPHDY

SEQ ID NO: 1644 - protein, 364 aa, Homo Sapiens
QVSPYSAPWKPTWPAYRLPVVLPQSTLNLAKPDFGAEAKLEVSSSCGPQCHKGTPLPTYEEAKQYLSYETLYANGSRTETQVGIYILSSSGDGAQHRDSGSSGKSRRKRQIYGYDSRFSIFGKDFLLNYPFSTSVKLSTGCTGTLVAEKHVLTAAHCIHDGKTYVKGTQKLRVGFLKPKFKDGGRGANDSTSAMPEQMKFQWIRVKRTHVPKGWIKGNANDIGMDYDYALLELKKPHKRKFMKIGVSPPAKQLPGGRIHFSGYDNDRPGNLVYRFCDVKDETYDLLYQQCDAQPGASGSGVYVRMWKRQQQKWERKIIGIFSGHQWVDMNGSPQDFNVAVRITPLKYAQICYWIKGNYLDCREG

SEQ ID NO: 1645 - protein, 256 aa, Homo Sapiens [sequence omitted]

SEQ ID NO: 1646 - protein, 224 aa, Homo Sapiens
IVGGYTCEENSLPYQVSLNSGSHFCGGSLISEQWVVSAAHCYKTRIQVRLGEHNIKVLEGNEQFINAAKIIRHPKYNRDTLDNDIMLIKLSSPAVINARVSTISLPTTPPAAGTECLISGWGNTLSFGADYPDELKCLDAPVLTQAECKASYPGKITNSMFCVGFLEGGKDSCQRDSGGPVVCNGQLQGVVSWGHGCAWKNRPGVYTKVYNYVDWIKDTIAANS

SEQ ID NO: 1647 - protein, 232 aa, Homo Sapiens
VPFDDDDKIVGGYTCEENSVPYQVSLNSGSHFCGGSLISEQWVVSAGHCYKPHIQVRLGEHNIEVLEGNEQFINAAKIIRHPKYNRIILNNDIMLIKLSTPAVINAHVSTISLPTAPPAAGTECLISGWGNTLSSGADYPDELQCLDAPVLTQAKCKASYPLKITSNMFCVGFLEGGKDSCQGDSGGPVVCNGQLQGIVSWGYGCAQKRRPGVYTKVYNYVDWIKDTIAANS

SEQ ID NO: 1648 - protein, 245 aa, Homo Sapiens
VAGGVESARGRWPWQASLRLRRRHRCGGSLLSRRWVLSAAHCFQKHYYPSEWTVQLGELTSRPTPWNLRAYSSRYKVQDIIVNPDALGVLRNDIALLRLASSVTYNAYIQPICIESSTFNFVHRPDCWVTGWGLISPSGTPLPPPYNLREAQVTILNNTRCNYLFEQPSSRSMIWDSMFCAGAEDGSVDTCKGDSGGPLVCDKDGLWYQVGIVSWGMDCGQPNRPGVYTNISVYFHWIRRVMSHS

SEQ ID NO: 1649 - protein, 317 aa, Homo Sapiens
GRVGAQGGVALLFPSALPSGPGGQDPGASGWEPPPVGAPGSPAAPQSRGNAVRPASVLLPSACGQRTSRITGGLPAPDRKWPWQVSLQTSNRHICGGSLIARHWVLTAAHCISGHLEYTVKLGDTNVHHRSKTALVVPVRDVVIHRYFTSPGIIENDIALALLDFPVNYSTHIQLVCLPEQAFMVQAGTNCWVTGWGKVNETEKIVTEPQEAELSIILHDKCNEVLKEKIRMRSEMVKKGTICGYNDQGKDACQGDSGGPLVCELNGTWVQVGIVSWGIGCGRKGYPGVYTEVSFYKKWIIDHLRQASCLNSKTSSS

SEQ ID NO: 1650 - protein, 352 aa, Homo Sapiens
FLALAQLLTSKNLPDTVDGQLPMGPHSRASQVAPETTSSKVDRGVSTVCGKPKVVGKIYGGRDAAAGQWPWQASLLYWGSHLCGAVLIDSCWLVSTTHCFLNKSQAPKNYQVLLGNIQLYHQTQHTQKMSVHRIITHPDFEKLHPFGSDIAMLQLHLPMNFTSYIVPVCLPSRDMQLPSNVSCWITGWGMLTEDHKRGPVHTAVPSRLQAVCCSGCRGQRVGSRVGRFRSMIVHSEGQLRSLMPGDFHLGDSGGPLVCYLPSAWVLVGLASWGLDCRHPAYPSIFTRVTYFINWIDEIMRLTPLSDPALAPHTCSPPKPLRAAGLPGPCAALVLPQTWLLLPLTLRAPWQTL

SEQ ID NO: 1651 - protein, 259 aa, Homo Sapiens
ITGGMEAEVGEFPWQVSIQARSEPFCGGSILNKWWILTAAHCLYSEELFPEELSVVLGTNDLTSPSMEIKEVASIILHKDFKRANMDNDIALLLLASPIKLDDLKVPICLPTQPGPATWRECWVAGWGQTNAADKNSVKTDLMKAPMVIMDWEECSKMFPKLTKNMLCAGYKNESYDACKGDSGGPLVCTPEPGEKWYQVGIISWGKSCGEKNTPGIYTSLVNYNLWIEKVTQLEGRPFNAEKRRTSVKQKPMGSPVSG

SEQ ID NO: 1652 - protein, 224 aa, Homo Sapiens
FNPDYTVSSTPPYLVYLKSDYLPCAGVLIHPLWVITAAHCNLPKLRVILGVTIPADSNEKHLQVIGYEKMIHHPHFSVTSIDHDIMLIKLKTEAELNDYVKLANLPYQTISENTMCSVSTWSYNVCDIYKEPDSLQTVNISVISKPQCRDAYKTYNITENMLCVGIVPGRRQPCKEVSAAPAICNGMLQGILSFADGCVLRADVGIYAKIFYYIPWIENVIQNN

SEQ ID NO: 1653 - protein, 84 aa, Homo Sapiens
SLPCDVCQDIAAAAGNGLNPDATESDILALVMKTCEWLPSQESSAGCKWMVDAHSSAILSMLRGAPDSAPAQVCTALSLCEPLQ

SEQ ID NO: 1654 - protein, 114 aa, Homo Sapiens
SEGHPSHPPAEDREEAGSPTLPQGPPVPGDPWPGAPPLFEDPPPTRPSRPWRDLPETGVWLPEPPRTDPPQPPRPDDPWPAGPQPPENPWPPAPEVDNRPQEEPDLDPPREEYR

SEQ ID NO: 1655 - protein, 84 aa, Homo Sapiens
SVSEIQLMHNLGKHLNSMERVEWLRKKLQDVHNFVALGAPLAPRDAGSQRPRKKEDNVLVESHEKSLGEADKADVNVLTKAKSQ

SEQ ID NO: 1656 - protein, 453 aa, Homo Sapiens
QEAAPVGPRKPFFERLRRLEEQFRRFQEVTWTHLQNIASNYNVSYNVDVRFRSLAEESQAVAQAVNRSQASVQGELAQLKAWVRKLQRRGRKVDTRLRALDLTLGERSQQRARERKAHKAQRDALQDSLARLEGLVHSQGARLAALEGRLPVAHPGTAALGPALVPTPTQPEELGPTSLKLQRDRQELRAASEHRGPPQDSSAPLQGRREPPASGSHRVLSGTAPKDPRQQAWSPQVPGEICGVGPTLVFPNASTRNVVFLSPGFVTALRALSFCSWVRTASGRLGTLLSYATEDNDNKLVLHGRDSLLPGSIHFVIGDPAFRELPLQLLLDGQWHHICVIWTSTQGRYWLHVDRRLVATGSRFREGYEIPPGGSLVLGQEQDSVGGGFDSSEAFVGSMSGLAIWDRALVPGEVANLAIGKEFPTGAILTLANAALAGGFVQGANCTCLERCP

SEQ ID NO: 1657 - protein, 193 aa, Homo Sapiens
GLADPHSLCYDITVIPKFRPGPRWCAVQGQVDEKTFLHYDCGSKTVTPVSPLGKKLNVTTAWKAQNPVLREVVDILTEQLLDIQLENYIPKEPLTLQARMSCEQKAEGHGSGSWQLSFDGQIFLLFDSENRMWTTVHPGARKMKEKWENDKDMTMSFHYISMGDCTGWLEDFLMGMDSTLEPSAGAPPTMSSG

SEQ ID NO: 1658 - protein, 193 aa, Homo Sapiens
RRDDPHSLCYDITVIPKFRPGPRWCAVQGQVDEKTFLHYDCGNKTVTPVSPLGKKLNVTMAWKAQNPVLREVVDILTEQLLDIQLENYTPKEPLTLQARMSCEQKAEGHSSGSWQFSIDGQTFLLFDSEKRMWTTVHPGARKMKEKWENDKDVAMSFHYISMGDCIGWLEDFLMGMDSTLEPSAGAPLAMSSG

SEQ ID NO: 1659 - protein, 228 aa, Homo Sapiens
MAVDVEFGVAGWWEAAAPLSPSAVAATFTETWPGSERAEPGRIQHPLWPGSSEGLQLLVCFLLLNSCPGGCSDTSAHDGQDQVGVGQLWPLQGFATPVFQHLQVVLQQIIPQGLFWKDDITQDAMIQKMEHASRLHPQEPCLKDGKALFPTKTTESPLAKVNRDQCFTSEVVSKALKQEVANPVKITYRCSYGGLDMMQAPGPSKEEIIYKIMRLLWATSYCGPQPCG

SEQ ID NO: 1660 - protein, 167 aa, Homo Sapiens
DNASQEYYTALINVTVQEPGRGAPLTFRIDRGRYGLDSPKAEVRGQVLAPLPLHGVADHLGCDPQTRFFVPPNIKQWIALLQRGNCTFKEKISRAAFHNAVAVVIYNNKSKEEPVTMTHPGTGDIIAVMITELRGKDILSYLEKNISVQMTIAVGTRMPPKNFSRGS

SEQ ID NO: 1661 - protein, 150 aa, Homo Sapiens
KAIWTAHLNITFQVGNEITSELGESGVFGNHSPLERVSGVVALPEGWNQNACHPLTNFSRPKQADSWLALIERGGCTFTHKINVAAEKGANGVIIYNYQGTGSKVFPMSHQGTENIVAVMISNLKGMEILHSIQKGVYVTVIIEVGRMHM

SEQ ID NO: 1662 - protein, 149 aa, Homo Sapiens
LIRATSDHNASMDFADLPALFGATLSQEGLQGFLVEAHPDNACSPIAPPPPAPVNGSVFIALLRRFDCNFDLKVLNAQKAGYGAAVVHNVNSNELLNMVWNSEEIQQQIWIPSVFIGERSSEYLRALFVYEKGARVLLVPDNTFPLGYY

SEQ ID NO: 1663 - protein, 181 aa, Homo Sapiens
MWLFTVNQVLRKMQRRHSSNTDNIPPERNRSQALSSEASVDEGGVFESLKAEAASPPALFSGLSGSLPTSSFPSSLVLGSSAGGGDVFIQMPASREEGGGRGEGGAYHHRQPHHHFHHGGHRGGSLLQHVGGDHRGHSEEGGDEQPGTPAPALSELKAVICWLQKGLPFILILLAKLCFQH

SEQ ID NO: 1664 - protein, 222 aa, Homo Sapiens
QGNRWRRSKRASYVSNPICKGCLSCSKDNGCSRCQQKLFFFLRREGMRQYGECLHSCPSGYYGHRAPDMNRCARCRIENCDSCFSKDFCTKCKVGFYLHRGRCFDECPDGFAPLEETMECVEGCEVGHWSEWGTCSRNNRTCGFKWGLETRTRQIVKKPVKDTILCPTIAESRRCKMTMRHCPGGKRTPKAKEKRNKKKKRKLIERAQEQHSVFLATDRANQ

SEQ ID NO: 1665 - protein, 91 aa, Homo Sapiens
TKLEEHLEGIVNIFHQYSVRKGHFDTLSKGELKQLLTKELANTIKNIKDKAVIDEIFQGLDANQDEQVDFQEFISLVAIALKAAHYHTHKE

SEQ ID NO: 1666 - protein, 414 aa, Homo Sapiens
SRPRSSPDDLKALTRNVNRLNESFRDLQLRLLQAPLQADLTEQVWKVQDALQNQSDSLLALAGAVQRLEGALWGLQAQAVQTEQAVALLRDRTGQQSDTAQLELYQLQVESNSSQLLLRRHAGLLDGLARRVGILGEELADVGGVLRGLNHSLSYDVALHRTRLQDLRVLVSNASEDTRRLRLAHVGMELQLKQELAMLNAVTEDLRLKDWEHSIALRNISLAKGPPGPKGDQGDEGKEGRPGIPGLPGLRGLPGERGTPGLPGPKGDDGKLGATGPMGMRGFKGDRGPKGEKGEKGDRAGDASGVEAPMMIRLVNGSGPHEGRVEVYHDRRWGTVCDDGWDKKDGDVVCRMLGFRGVEEVYRTARFGQGTGRIWMDDVACKGTEETIFRCSFSKWGVTNCGHAEDASVTCNRH

SEQ ID NO: 1667 - protein, 72 aa, Homo Sapiens
EDNDEFFMDFLQTLLVGTPEELYEGTLGKYNVNEDAKAAMTELKSCIDGLQPMHKAELVKLLVQVLGSQDGA

SEQ ID NO: 1668 - protein, 387 aa, Homo Sapiens
MKPGPPHRAGAAHGAGAGAGAAAGPGARGLLLPPLLLLLLAGRAAGAQRWRSENFERPVDLEGSGDDDSFPDDELDDLYSGSGSGYFEQESGIETAMRFSPDVALAVSTTPAVLPTTNIQPVGTPFEELPSERPTLEPATSPLVVTEVPEEPSQRATTVSTTMATTAATSTGDPTVATVPATVATATPSTPAAPPFTATTAVIRTTGVRRLLPLPLTTVATARATTPEAPSPPTTAAVLDTEAPTPRLVSTATSRPRALPRPATTQEPDIPERSTLPLGTTAPGPTEVAQTPTPETFLTTIRDEPEVPVSGGPSGDFELPEEETTQPDTANEVVAVGGAAAKASSPPGTLPKGARPGPGLLDNAIDSGSSAAQLPQKSILERKEVLV

SEQ ID NO: 1669 - protein, 142 aa, Homo Sapiens
KGLMVITGSESPIVLLSGSMEPAFHRGYLLFLTNRVEDPIRVGEIAVLRIEGRKIPIVHRVLKIHEKQNGHIKFLTKGDNNAVDDRGLYKQDQHWLEKKDVVGRARGFVPYIGIGTSLMNDYPKHKYEVLFLLGLFVLVHRE

SEQ ID NO: 1670 - protein, 439 aa, Homo Sapiens
QKGGSKGRLPSEFSQFPHGQKGQHYSGQKGKQQTESKGSFSIQYTYHVDANDHDQSRKSQQYDLNALHKTTKSQRHLGGSQQLLHNKQEGRDHDKSKGHFHRVVIHHKGGKAHRGTQNPSQDQGNSPSGKGISSQYSNTEERLWVHGLSKEQTSVSGAQKGRKQGGSQSSYVLQTEELVANKQQRETKNSHQNKGHYQNVVEVREEHSSKVQTSLCPAHQDKLQHGSKDIFSTQDELLVYNKNQHQTKNLNQDQQHGRKANKISYQSSSTEERRLHYGENGVQKDVSQSSIYSQTEEKAQGKSQKQITIPSQEQEHSQKANKISYQSSSTEERRLHYGENGVQKDVSQRSIYSQTEKLVAGKSQIQAPNPKQEPWHGENAKGESGQSTNREQDLLSHEQKGRHQHGSHGGLDIVIIEQEDDSDRHLAQHLNNDRNPLFT

SEQ ID NO: 1671 - protein, 286 aa, Homo Sapiens
LVDQEASDLIHSGPQDSSPGPALPCHKISVSNIDFAFKLYRQLALNAPGENILFFPVSISLALAMLSWGAPVASRTQLLEGLGFTLTVVPEEEIQEGFWDLLIRLRGQGPRLLLTMDQRRFSGLGARANQSLEEAQKHIDEYTEQQTQGKLGAWEKDLGSETTAVLVNHMLLRAEWMKPFDSHATSPKEFFVDEHSAVWVPMMKEKASHRFLHDRELQCSVLRMDHAGNTTTFFIFPNRGKMRHLEDALLPETLIKWDSLLRTRELDFHFPKFSISRTCRLEMLLP

SEQ ID NO: 1672 - protein, 399 aa, Homo Sapiens
SLVEDPQGDAAQKTDTSHHDQGDWEDLACQKISYNVTDLAFDLYKSWLIYHNQHVLVTPTSVAMAFRMLSLGTKADTRTEILEGLNVNLTETPEAKIHECFQQVLQALSRPDTRLQLTTGSSLFVNKSMKLVDTFLEDTKKLYHSEASSINFRDTEEAKEQINNYVEKRTGRKVVDLVKHLKKDTSLALVDYISFHGKWKDKFKAERIMVEGFHVDDKTIIRVPMINHLGRFDIHRDRELSSWVLAQHYVGNATAFFILPDPKKMWQLEEKLTYSHLENIQRAFDIRSINLHFPKLSISGTYKLKRVPRNLGITKIFSNEADLSGVSQEAPLKLSKAVHVAVLTIDEKGTEATGAPHLEEKAWSKYQTVMFNRPFLVIIKEYITNFPLFIGKVVNPTQK

SEQ ID NO: 1673 - protein, 375 aa, Homo Sapiens
MDALQLANSAFAVDLFKQLCEKEPLGNVLFSPICLSTSLSLAQVGAKGDTANEIGQVLHFENVKDVPFGFQTVTSDVNKLSSFYSLKLIKRLYVDKSLNLSTEFISSTKRPYAKELETVDFKDKLEETKGQINNSIKDLTDGHFENILADNSVNDQTKILVVNAAYFVGKWMKKFSESETKECPFRVNKTDTKPVQMMNMEATFCMGNIDSINCKIIELPFQNKHLSMFILLPKDVEDESTGLEKIEKQLNSESLSQWTNPSTMANAKVKLSIPKFKVEKMIDPKACLENLGLKHIFSEDTSDFSGMSETKGVALSNVIHKVCLEITEDGGDSIEVPGARILQHKDELNADHPFIYIIRHNKTRNIIFFGKFCSP

SEQ ID NO: 1674 - protein, 432 aa, Homo Sapiens [sequence omitted]

SEQ ID NO: 1675 - protein, 404 aa, Homo Sapiens
HLREGMTLLKTEFALHLYQSVAACRNETNFVISPAGVSLPLEILQFGAEGSTGQQLADALGYTVHDKRVKDFLHAVYATLPTSSQGTEMELACSLFVQVGTPLSPCFVEHVSWWANSSLEPADLSEPNSTAIQTSEGASRETAGGGPSEGPGGWPWEQVSAAFAQLVLVSTMSFQGTWRKRFSSTDTQILPFTCAYGLVLQVPMMHQTTEVNYGQFQDTAGHQVGVLELPYLGSAVSLFLVLPRDKDTPLSHIEPHLTASTIHLWTTSLRRARMDVFLPRFRIQNQFNLKSILNSWGVTDLFDPLKANLKGISGQDGFYVSEAIHKAKIEVLEEGTKASGATALLLLKRSRIPIFKADRPFIYFLREPNTGITVFFDRIQIIYQCLSSNKGSFVHYPLKNKHSF

SEQ ID NO: 1676 - protein, 394 aa, Homo Sapiens
TGATFPEEAIADLSVNMYNRLRATGEDENILFSPLSIALAMGMMELGAQGSTQKEIRHSMGYDSLKNGEEFSFLKEFSNMVTAKESQYVMKIANSLFVQNGFHVNEEFLQMMKKYFNAAVNHVDFSQNVAVANYINKWVENNTNNLVKDLVSPRDFDAATYLALINAVYFKGNWKSQFRPENTRTFSFTKDDESEVQIPMMYQQGEFYYGEFSDGSNEAGGIYQVLEIPYEGDEISMMLVLSRQEVPLATLEPLVKAQLVEEWANSVKKQKVEVYLPRFTVEQEIDLKDVLKALGITEIFIKDANLTGLSDNKEIFLSKAIHKSFLEVNEEGSEAAAVSGMIAISRMAVLYPQVIVDHPFFFLIRNRRTGTILFMGRVMHPETMNTSGHDFEEL

SEQ ID NO: 1677 - protein, 94 aa, Homo Sapiens
MRAGFSDFQLIRDQVLFLQDQAQRLTEWLQLSGFENPVSESTTLCLREREKRIPTCVAVCVPSPGTVHTALLHPTTLSQSRSSSEAKMLIIHTA

SEQ ID NO: 1678 - protein, 233 aa, Homo Sapiens
KVMWFSPAGMGHLCVTKDGLRLEGESEFLFPLYAKEIHSRVDSSLLLQSTQNVTVNARNSEGEVTGRLKVGPKMVEVQNQQFQINSNDGKPLFTVDEKEVVVGTDKLRVTGPEGALFEHSVETPLVRADPFQDLRLESPTRSLSMDAPRGVHIQAHAGKIEALSQMDILFHSSDGMLVLDAETVCLPKLVQGTWGPSGSSQSLYEICVCPDGKLYLSVAGVSTTCQEHNHICL

SEQ ID NO: 1679 - protein, 241 aa, Homo Sapiens
KVMNFTVDGMGNLRVTKKGIRLEGISEFLLPLYVKEIHSRKDSPLVLQSDRNVTVNARNHMGQLTGQLTIGADAVEAQCKRFEVRASEDGRVLFSADEDEITIGAEKLKVTGTEGAVFGHSVETPHIRAEPSQDLRLESPTRSLIMEAPRGVQVSAAAGDFKATCRKELHLQSTEGEIFLNAETIKLGNLPTGSFSSSSPSSSSSRQTVYELCVCPNGKLYLSPAGVGSTCQSSSNICLWS

SEQ ID NO: 1680 - protein, 77 aa, Homo Sapiens
EVCMASRGLSLFPESCPDFCCGTCDDQYCCSDVLKKFVWSEERCAVPEASVPASVEPVEQLGSALRFRPGYNDPMSG

SEQ ID NO: 1681 - protein, 149 aa, Homo Sapiens
ARGRAANRTLSAGGAAVGGRRAGGALARGGRELNGTARAPGIPEAGSRRGQPAAAVAAAASAAVTYETCWGYYDVSGQYDKEFECNNSESGYLYCCGTCYYRFCCKKRHEKLDQRQCTNYQSPVWVQTPSTKVVSPGPENKYDPEKDKT

SEQ ID NO: 1682 - protein, 167 aa, Homo Sapiens
RPSNATSAEPAGPLPALLAHLRRLTGALTGGGGAASPGANGTRTGPAGGAGAAARAPPPAELCHGYYDVMGQYDATFNCSTGSYRFCCGTCHYRFCCEHRHMRLAQASCSNYDTPRWATTPPPLAGGAGGAGGAGGGPGPGQAGWLEGGRTGGAGGRGGEGPGGSTA

SEQ ID NO: 1683 - protein, 100 aa, Homo Sapiens
GAPEAQGPAAPGTTAPEGGDRCRGYYDVMGQWDPPFNCSSGAYSFCCGTCGYRFCCHDGPRRLDQSRCSNYDTPAWVQTGRPPARARDTAAPRDPGRERS

SEQ ID NO: 1684 - protein, 126 aa, Homo Sapiens
QERAGHGQLAQLGGVLLLAGGNRSGAASGEASEGAEASDAPPTRAPTPDFCRGYFDVMGQWDPPFNCSSGDFIFCCGTCGFRFCCTFKKRRLNQSTCTNYDTPLWLNTGKPPARKDDPLHDPTKDK

SEQ ID NO: 1685 - protein, 342 aa, Homo Sapiens
EEELQVIQPDKSISVAAGESATLHCTVTSLIPVGPIQWFRGAGPGRELIYNQKEGHFPRVTTVSDLTKRNNMDFSIRISNITPADAGTYYCVKFRKGSPDHVEFKSGAGTELSVRAKPSAPVVSGPAARATPQHTVSFTCESHGFSPRDITLKWFKNGNELSDFQTNVDPAGDSVSYSIHSTAKVVLTREDVHSQVICEVAHVTLQGDPLRGTANLSETIRVPPTLEVTQQPVRAENQVNVTCQVRKFYPQRLQLTWLENGNVSRTETASTLTENKDGTYNWMSWLLVNVSAHRDDVKLTCQVEHDGQPAVSKSHDLKVSAHPKEQGSNTAPGPALASAAPL

SEQ ID NO: 1686 - protein, 109 aa, Homo Sapiens
LENFAAAIPGHRCWVHMLDNNTGSGNETGILSEDALLRISIPLDSNLRPEKCRRFVHPQWQLLHLNGTIHSTSEADTEPCVDGWVYDQSYFPSTIVTKWDLVCDYQSLK

SEQ ID NO: 1687 - protein, 97 aa, Homo Sapiens
MVLDEPHHCAVAWVKNHTFNLSAAEQLVLSVPLDTAGHPEPCLMFRPPPANASLQDILSHRFNETQPCDMGWEYPENRLPSLKNEFNLVCDRKHLKD

SEQ ID NO: 1688 - protein, 107 aa, Homo Sapiens
GFTPDHRCRSPGVAELSLRCGWSPAEELNYTVPGPGPAGEASPRQCRRYEVDWNQSTFDCVDPLASLDTNRSRLPLGPCRDGWVYETPGSSIVTEFNLVCANSWMLD

SEQ ID NO: 1689 - protein, 93 aa, Homo Sapiens
PPHHCRGPANHTEASTNDSGAWLRATIPLDQLGAPEPCRRFTKPQWALLSPNSSIPGAATEGCKDGWVYNRSVFPSTIVMEWDLVCEARTLRD

SEQ ID NO: 1690 - protein, 115 aa, Homo Sapiens
VYHQTQLENFAAFILDHRCWVHILDNDTIPDNDPGTLSQDALLRISIPFDSNLRPEKCRRFVHPQWKLIHLNGTFPNTSEPDTEPCVDGWVYDQSSFPSTIVTKWDLVCESQPLN

SEQ ID NO: 1691 - protein, 84 aa, Homo Sapiens
QPAPHCRPDPTLLPPALRALRGPALLDAAIPRLGPTRAPAEALGVLSPSYLAPLTRAPRPSSWASCSGAAAGPTWNLVCGDGWK

SEQ ID NO: 1692 - protein, 67 aa, Homo Sapiens
NAPQQVIISHYRHVLGVPLDDRKAINNYVINSTDELPTISYSMNPKPTPWAEEETVAAAQLITMLWS

SEQ ID NO: 1693 - protein, 113 aa, Homo Sapiens
ESATALLERLSELALGAASLTPRAQAPDILKVLTKPLTHLIVQLDSDMIMSSATGNATNSSLIKHWCGTTGQPTQENSSCGAFGPCTEKNSTAPADRLPCRHLFAGTELTDLA

SEQ ID NO: 1694 - protein, 104 aa, Homo Sapiens
MDPMELRNVNIEPDDESSSGESAPDSYIGIGNSEKAAMSSQFANEDTESQKFLTNGFLGKKKLADYADEHHPGTTSFGMSSFNLSNAIMGSGILGLSYAMANTG

SEQ ID NO: 1695 - protein, 119 aa, Homo Sapiens
SSWEVSERIRECNYYQNLAVPQGLEYQTNEPSEEPIKTIRNWLKEKLHVFSEKLEEEVQQLEQLAWDLELWLDALLGEPHQEEHCSTYKSHLWEWAWALGREHKGGEGLLEISLSGAEL

SEQ ID NO: 1696 - protein, 413 aa, Homo Sapiens
EPGKFWHIADLHLDPDYKVSKDPFQVCPSAGSQPVPDAGPWGDYLCDSPWALINSSIYAMKEIEPEPDFILWTGDDTPHVPDEKLGEAAVLEIVERLTKLIREVFPDTKVYAALGNHDFHPKNQFPAGSNNIYNQIAELWKPWLSNESIALFKKGAFYCEKLPGPSGAGRIVVLNTNLYYTSNALTADMADPGQQFQWLEDVLTDASKAGDMVYIVGHVPPGFFEKTQNKAWFREGFNEKYLKVVRKHHRVIAGQFFGHHHTDSFRMLYDDAGVPISAMFITPGVTPWKTTLPGVVNGANNPAIRVFEYDRATLSLKDMVTYFMNLSQANAQGTPRWELEYQLTEAYGVPDASAHSMHTVLDRIAGDQSTLQRYYVYNSVSYSAGVCDEACSMQHVCAMRQVDIDAYTTCLYA

SEQ ID NO: 1697 - protein, 532 aa, Homo Sapiens
AVLGFLQEHGGKVRNSELLSRFKPLLDAGDPRGRAARRDRFKQFVNNVAVVKELDGVKFVVLRKKPRPPEPEPAPFGPPGAAAQPSKPTSTVLPRSASAPGAPPLVRVPRPVEPPGDLGLPTEPQDTPGGPASEPAQPPGERSADPPLPALELAQATERPSADAAPPPRAPSEAASPCSDPPDAEPGPGAAKGPPQQKPCMLPVRCVPAPATLRLRAEEPGLRRQLSEEPSPRSSPLLLRRLSVEESGLGLGLGPGRSPHLRRLSRAGPRLLSPDAEELPAAPPPSAVPLEPSEHEWLVRTAGGRWTHQLHGLLLRDRGLAAKRDFMSGFTALHWAAKSGDGEMALQLVEVARRSGAPVDVNARSHGGYTPLHLAALHGHEDAAVLLVVRLGAQVHVRDHSGRRAYQYLRPGSSYALRRLLGDPGLRGTTEPDATGGGSGSLAARRPVQVAATILSSTTSAFLGVLADDLMLQDLARGLKKSSSFSKFLSASPMAPRKKTKIRGGLPAFSEISRRPTPGPLAGLVPSFPPTT

SEQ ID NO: 1698 - protein, 138 aa, Homo Sapiens
KIYERCELAARLERAGLNGYKGYGVGDWLCMAHYESGFDTAFVDHNPDGSSEYGIFQLNSAWWCDNGITPTKNLCHMDCHDLLNRHILDDIRCAKQIVSSQNGLSAWTSWRLHCSGHDLSEWLKGCDMHVKIDPKIHP

SEQ ID NO: 1699 - protein, 171 aa, Homo Sapiens
RPRTVIPGSPTEIPFSSKQEDMSELLDEILVQEILDLNKTTPSEMPSTASTLSTPLHAGIDENYQAGGSENYHELLENLQFSPGIEVKISNDEANANANLHGDPSENYRGPQVSPGSEKSVSSKEKNSKNTQYENLSILDQILQNIGRSSGNIFHKEQQRTSAQRRSQGSQ

SEQ ID NO: 1700 - protein, 98 aa, Homo Sapiens
RHVNHSATEALGELRERAPGQGTNGFQLLRHAVKRDLLPPRTPPYQVHISHQEARGPSFKICVGFLGPRWARGCSTGNEKYHLPYAARDLQTFFLPFW

SEQ ID NO: 1701 - protein, 78 aa, Homo Sapiens
RHVNHSATEALGELRERAPGQGTNGFQLLRHAVKRDLLPPRTPPYQVHISHREARGPSFRICVDFLGPRWARGCSTGN

SEQ ID NO: 1702 - protein, 286 aa, Homo Sapiens
APQQEALPDETEVVEETVAEVTEVSVGANPVQVEVGEFDDGAEETEEEVVAENPCQNHHCKHGKVCELDENNTPMCVCQDPTSCPAPIGEFEKVCSNDNKTFDSSCHFFATKCTLEGTKKGHKLHLDYIGPCKYIPPCLDSELTEFPLRMRDWLKNVLVTLYERDEDNNLLTEKQKLRVKKIHENEKRLEAGDHPVELLARDFEKNYNMYIFPVHWQFGQLDQHPIDGYLSHTELAPLRAPLIPMEHCTTRFFETCDLDNDKYIALDEWAGCFGIKQKDIDKDLVI

SEQ ID NO: 1703 - protein, 76 aa, Homo Sapiens
IDFPLPMASERGQLDKTIVECLKNVNKCWFLSYIKPSEPICGSDQVTYSSDCHLCSKILFEGLNITKLYDGQCENS

SEQ ID NO: 1704 - protein, 75 aa, Homo Sapiens
GVNKIAEKICGDLKDPCKLDMNFGSCYEVHFRYFYNRTSKRCETFVFSGCNGNLNNFKLKIEREVACVAKYKPPR

SEQ ID NO: 1705 - protein, 305 aa, Homo Sapiens
QPLGGESICSARALAKYSITFTGKWSQTAFPKQYPLFRPPAQWSSLLGAAHSSDYSMWRKNQYVSNGLRDFAERGEAWALMKEIEAAGEALQSVHEVFSAPAVPSGTGQTSAELEVQRRHSLVSFVVRIVPSPDWFVGVDSLDLCDGDRWREQAALDLYPYDAGTDSGFTFSSPNFATIPQDTVTEITSSSPSHPANSFYYPRLKALPPIARVTLVRLRQSPRAFIPPAPVLPSRDNEIVDSASVPETPLDCEVSLWSSWGLCGGHCGRLGTKSRTRYVRVQPANNGSPCPELEEEAECVPDNCV

SEQ ID NO: 1706 - protein, 182 aa, Homo Sapiens
FPVYDYDPSSLRDALSASVVKVNSQSLSPYLFRAFRSSLKRVEVLDENNLVMNLEFSIRETTCRKDSGEDPATCAFQRDYYVSTAVCRSTVKVSAQQVQGVHARCSWSSSTSESYSSEEMIFGDMLGSHKWRNNYLFGLISDESISEQFYDRSLGIMRRVLPPGNRRYPNHRHRARINTDFE

SEQ ID NO: 1707 - protein, 82 aa, Homo Sapiens
LATEAGQKPSLRGLLDVGNIQHRAARARGLTRGVIRVSPQERSQQNQSAPKGPTPSTRPKPRTLGPQAHSLALQSVDLLFRP

SEQ ID NO: 1708 - protein, 162 aa, Homo Sapiens
MESLSELQNPLLPRSPAHLHGPYPYPETPPSWSCQEKLYSYLLGGAGPAGAHQLLDPGSLQLAVEAWYRPSCLLGRDKVKEPRAGSCETSFTEDREPQEGPPEQPTGPGQAAENVTIQTVSYGVQEELRDQEDDQEEEESDATSTESESEDNFLTLPPRDHL

SEQ ID NO: 1709 - protein, 83 aa, Homo Sapiens
NWLVKYEHKLTLPEPQQDEILQRLLFSEMKMKVLENQMFIIWNKMNHHGRSSRHRNFPMKKHRMRRHESICPTLSDCTSSSPS

SEQ ID NO: 1710 - protein, 276 aa, Homo Sapiens
DSEEDEEHTIITDTELPPLKLMHSFCAFKADDGPCKAIMKRFFFNIFTRQCEEFIYGGCEGNQNRFESLEECKKMCTRDNANRIIKTTLQQEKPDFCFLEEDPGICRGYITRYFYNNQTKQCERFKYGGCLGNMNNFETLEECKNICEDGPNGFQVDNYGTQLNAVNNSLTPQSTKVPSLFEFHGPSWCLTPADRGLCRANENRFYYNSVIGKCRPFKYSGCGGNENNFTSKQECLRACKKGFIQRISKGGLIKTKRKRKKQRVKIAYEEIFVKNM

SEQ ID NO: 1711 - protein, 268 aa, Homo Sapiens
MGESAAATASLFQRRRRGRGGRVTFPGGLKGSARFLSFGPPFPAPPAPPFPAAPGPWLRRPLFSLKLSDTEDVFPRRAGPLEVPADSRVFVQAALARPSPRWGLALHRCSVTPSSRPAPGPALALLREGCPADTSVAFPPPPPPSPGAARPARFSFRLRPVFNASVQFLHCQLSRCRRLRGVRRAPAPLTPPPPPPPSRCLPQDEACADTGSGSAEGLAADGPHLHTLTQPIVVTVPRPPPRPPKSVPGRAVRPEPPAPAPAALEPAP

SEQ ID NO: 1712 - protein, 191 aa, Homo Sapiens
LLDVWYLVRLPCAVLRARLLQPRVRDLLAEQRFPGRVLPSDLDLLLHMNNARYLREADFARVAHLTRCGVLGALRELRAHTVLAASCARHRRSLRLLEPFEVRTRLLGWDDRAFYLEARFVSLRDGFVCALLRFRQHLLGTSPERVVQHLCQRRVEPPELPADLQHWISYNEASSQLLRMESGLSDVTKDQ

SEQ ID NO: 1713 - protein, 484 aa, Homo Sapiens
MWYVSTRGVAPRVNFEGALFSGYAPDGGLFMPEELPQLDRGTLCQWSTLSYPGLVKELCALFIGSELLPKDELNDLIDRAFSRFRHREVVHLSRLRNGLNVLELWHGVTYAFKDLSLSCTTQFLQYFLEKREKHVTVVVGTSGDTGSAAIESVQGAKNMDIIVLLPKGHCTKIQELQMTTVLKQNVHVFGVEGNSDELDEPIKTVFADVAFVKKHNLMSLNSINWSRVLVQMAHHFFAYFQCTPSLDTHPLPLVEVVVPTGAAGNLAAGYIAQKIGLPIRLVVAVNRNDIIHRTVQQGDFSLSEAVKSTLASAMDIQVPYNMERVFWLLSGSDSQVTRALMEQFERTQSVNLPKELHSKLSEAVTSVSVSDEAITQTMGRCWDENQYLLCPHSAVAVNYHYQQIDRQQPSTPRCCLAPASAAKFPEAVLAAGLTPETPAEIVALEHKETRCTLMRRGDNWMLMLRDTIEDLSRQWRSHALNTSQ

SEQ ID NO: 1714 - protein, 332 aa, Homo Sapiens
SPAPPACDLRVLSKLLRDSHVLHSRLSQCPEVHPLPTPVLLPAVDFSLGEWKTQMEETKAQDILGAVTLLLEGVMAARGQLGPTCLSSLLGQLSGQVRLLLGALQSLLGTQLPPQGRTTAHKDPNAIFLSFQHLLRGKVRFLMLVGGSTLCVRRAPPTTAVPSRTSLVLTLNELPNRTSGLLETNFTASARTTGSGLLKWQQGFRAKIPGLLNQTSRSLDQIPGYLNRIHELLNGTRGLFPGPSRRTLGAPDISSGTSDTGSLPPNLQPGYSPSPTHPPTGQYTLFPLPPTLPTPVVQLHPLLPDPSAPTPTPTSPLLNTSYTHSQNLSQEG

SEQ ID NO: 1715 - protein, 274 aa, Homo Sapiens
AEVFGNSSEGLIEFSVGKFRYFELNRPFPEEAILHDISSNVTFLIFQIHSQYQNTTVSFSPTLLSNSSETGTASGLVFILRPEQSTCTWYLGTSGIQPVQNMAILLSYSERDPVPGGCNLEFDLDIDPNIYLEYNFFETTIKFAPANLGYARGVDPPPCDAGTDQDSRWRLQYDVYQYFLPENDLTEEMLLKHLQRMVSVPQVKASALKVVTLTANDKTSVSFSSLPGQGVIYNVIVWDPFLNTSAAYIPAHTYACSFEAGEGSCASLGRVSSK

SEQ ID NO: 1716 - protein, 195 aa, Homo Sapiens
DEHEHTYQDKEEVVLWMNTVGPYHNRQETYKYFSLPFCVGSKKSISHYHETLGEALQGVELEFSGLDIKFKDDVMPATYCEIDLDKEKRDAFVYAIKNHYWYQMYIDDLPIWGIVGEADENGEDYYLWTYKKLEIGFNGNRIVDVNLTSEGKVKLVPNTKIQMSYSVKWKKSDVKFEDRFDKYLDPSFFQHRIHW

SEQ ID NO: 1717 - protein, 71 aa, Homo Sapiens
RSVPLKATFLEDVAGSGEAEGSSASSPSLPPPWTPALSPTSMGPQPITLGGPSPPTNFLDGIVDFFRQYVM

SEQ ID NO: 1718 - protein, 135 aa, Homo Sapiens
MQPPPPGPLGDCLRDWEDLQQDFQNIQETHRLYRLKLEELTKLQNNCTSSITRQKKRLQELALALKKCKPSLPAEAEGAAQELENQMKERQGLFFDMEAYLPKKNGLYLSLVLGNVNVTLLSKQAKFAYKDEYEK

SEQ ID NO: 1719 - protein, 186 aa, Homo Sapiens
KTPKERTLELSCLEVCLQSNFTYSLSSLNFSFVTFLQPVRETQIIMRIFLNPSNFRNFTRTCQDITGEFKMCSSCLVCESKGNMDFISQEQTSKVLIRRGSMEVKANDFHSPCQHFNFSVAPLVDHLEEYNTTCHLKNHTGRSTIMEDEPSKEKSINYTCRIMEYPNDCIHISLHLEMDIKNITCS

SEQ ID NO: 1720 - protein, 210 aa, Homo Sapiens
GAADAPGLLGVPSNASVNASSADEPIAPRLLASAAPGPPERPGPEEAAAAAAPCNISVQRQMLSSLLVRWGRPRGFQCDLLLFSTNAHGRAFFAAAFHRVGPPLLIEHLGLAAGGAQQDLRLCVGCGWVRGRRTGRLRPAAAPSAAAATAGAPTALPAYPAAEPPGPLWLQGEPLHFCCLDFSLEELQGEPGWRLNRKPIESTLVACFMT

SEQ ID NO: 1721 - protein, 154 aa, Homo Sapiens
IFTDHWYETDPRRHKESCERSRAGADPPDQKNRLMPLSHLPLRDSPPLGRRLLPGGPGRADPESWRSLLGLGGLDAECGRPLFATYSGLWRKCYFLGIDRDIDTLILKGIAQRCTAIKYHFSQPIRLRNIPFNLTKTIQQDEWHLLHLRRITAG

SEQ ID NO: 1722 - protein, 148 aa, Homo Sapiens
VAICSDHWYETDARKHRDRCKAFNTRRVDPGFIYNNNNNLPLRASRSRLDRWEGKLLRARNRRQLFAMSPADECSRQYNSTNMGLWRKCHRQGFDPEIAALIRKGEIERCTYIKYHYSSATIPRNLTFNITKTIRQDEWHALHLRRMT

SEQ ID NO: 1723 - protein, 216 aa, Homo Sapiens
YRTITDFREKLKHPVMSVSYKEVDRYDAPGIALYPGQAQLLSCKHHYEVIPPLTSPGQPGDMNCTTQRINYTDPFSNQTVKSALIVQGPREVKKRELVFLQFRLNKSSEDFSAIDYLLFSSFQEFLQSPNRVGFMQACESAYSSWKFSGGFRTWVKMSLVKTKEEDGREAVEFRQETSVVNYIDQRPAAKKSAQLFFVVFEWKDPFIQKVQDIVTA

SEQ ID NO: 1724 - protein, 166 aa, Homo Sapiens
SFLLTHRTGLRSPDIPQDWVSFLRSFGQLTLCPRNGTVTGKWRGSHVVGLLTTLNFGDGPDRNKTRTFQATVLGSQMGLKGSSAGQLVLITARVTTERTAGTCLYFSAVPGILPSSQPPISCSEEGAGNATLSPRMGEECVSVWSHEGLVLTKLLTSEELALCGSR

SEQ ID NO: 1725 - protein, 67 aa, Homo Sapiens
DYWYILEVADAGNGSAWPGRAELLSSHSGLWRICEGQNGCIPLVDPFASESLDVSTSVQHLILLHRA

SEQ ID NO: 1726 - protein, 69 aa, Homo Sapiens
NKSSEDIRCKCICPPYRNISGHIYNQNVSQKDCNCLHVVEPMPVPGHDVEAYCLLCECRYEERSTTTIK

SEQ ID NO: 1727 - protein, 97 aa, Homo Sapiens
MDSPSLRELQQPLLEGTECETPAQKPGRHELGSPLREIAFAESLRGLQFLSPPLPSVSAGLGEPRPPDVEDMSSSDSDSDWDGGSRLSPFLPHDHLG

SEQ ID NO: 1728 - protein, 74 aa, Homo Sapiens
SYVPSVAPTAAHSVRVPHSAGHCGQRVLACSLPQVFLKPWIFVEHFSSWLSLELFSFLRYLGTLLCACGHRLRE

SEQ ID NO: 1729 - protein, 385 aa, Homo Sapiens
EDDKSFYYLASFKVTNIKYKENYGIRSSREFIERSHQIERMMSRIFRHSSVGGRFIKSHVIKLSPDEQGVDILIVLIFRYPSTDSAEQIKKKIEKALYQSLKTKQLSLTINKPSFRLTPIDSKKMRNLLNSRCGIRMTSSNMPLPASSSTQRIVQGRETAMEGEWPWQASLQLIGSGHQCGASLISNTWLLTAAHCFWKNKDPTQWIATFGATITPPAVKRNVRKIILHENYHRETNENDIALVQLSTGVEFSNIVQRVCLPDSSIKLPPKTSVFVTGFGSIVDDGPIQNTLRQARVETISTDVCNRKDVYDGLITPGMLCAGFMEGKIDACKGDSGGPLVYDNHDIWYIVGIVSWGQSCALPKKPGVYTRVTKYRDWIASKTGM

SEQ ID NO: 1730 - protein, 166 aa, Homo Sapiens
TAGPEEAALPPEQSRVQPMTASNWTLVMEGEWMLKFYAPWCPSCQQTDSEWEAFAKNGEILQISVGKVDVIQEPGLSGRFFVTTLPAFFHAKDGIFRRYRGPGIFEDLQNYILEKKWQSVEPLTGWKSPASLTMSGMAGLFSISGKIWHLHNYFTVTLGIPAWCSY

SEQ ID NO: 1731 - protein, 267 aa, Homo Sapiens
KHFWPEVPKKAYDMEHTFYSNGEKKKIYMEIDPVTRTEIFRSGNGTDETLEVHDFKNGYTGIYFVGLQKCFIKTQIKVIPEFSEPEEEIDENEEITTTFFEQSVIWVPAEKPIENRDFLKNSKILEICDNVTMYWINPTLISVSELQDFEEEGEDLHFPANEKKGIEQNEQWVVPQVKVEKTRHARQASEEELPINDYTENGIEFDPMLDERGYCCIYCRRGNRYCRRVCEPLLGYYPYPYCYQGGRVICRVIMPCNWWVARMLGRV

SEQ ID NO: 1732 - protein, 216 aa, Homo Sapiens
AWDLASLRCTLGAFCECDFRPDLPGLECDLAQHLAGQHLAKALVVKALKAFVRDPAPTKPLVLSLHGWTGTGKSYVSSLLAHYLFQGGLRSPRVHHFSPVLHFPHPSHIERYKKDLKSWVQGNLTACGRSLFLFDEMDKMPPGLMEVLRPFLGSSWVVYGTNYRKAIFIFIRWLLKLGHHGRAPPRRSGALPPAPAAPRPALRAQRAGPAGPGAKG

SEQ ID NO: 1733 - protein, 282 aa, Homo Sapiens
GPAEEAGAHCPESLWPLPPQVSPRVTYTRVSPGQAEDVTFLYHPCAHPWLKLQLALLAYACMANPSLTPDFSLTQDRPLVLTAWGLALEMAWVEPAWAAHWLMRRRRRKQRKKKAWIYCESLSGPAPSEPTPGRGRLCRRGCVQALALAFALRSWRPPGTEVTSQGPRQPSSSGAKRRRLRAALGPQPTRSALRFPSASPGSLKAKQSMAGIPGRESNAPSVPTVSLLPGAPGGNASSRTEAQVPNGQGSPGGCVCSSQASPAPRAAAPPRAARGPTPRTEE

SEQ ID NO: 1734 - protein, 245 aa, Homo Sapiens
IVGGQEAPRSKWPWQVSLRVHGPYWMHFCGGSLIHPQWVLTAAHCVGPDVKDLAALRVQLREQHLYYQDQLLPVSRIIVHPQFYTAQIGADIALLELEEPVNVSSHVHTVTLPPASETFPPGMPCWVTGWGDVDNDERLPPPFPLKQVKVPIMENHICDAKYHLGAYTGDDVRIVRDDMLCAGNTRRDSCQGDSGGPLVCKVNGTWLQAGVVSWGEGCAQPNRPGIYTRVTYYLDWIHHYVPKKP

SEQ ID NO: 1735 - protein, 205 aa, Homo Sapiens
IVGGQEAPRSKWPWQVSLRVRGPYWMHFCGGSLIHPQWVLTAAHCVEPDIKDLAALRVQLREQHLYYQDQLLPVSRIIVHPQFYIIQTGADIALLELEEPVNISSHIHTVTLPPASETFPPGMPCWVTGWGDVDNNVHLPPPYPLKEVEVPVVENHLCNAEYHTGLHTGHSFQIVRDDMLCAGSENHDSCQGDSGGPLVCKVNGT

SEQ ID NO: 1736 - protein, 475 aa, Homo Sapiens
RPQPPDGGQCRPPGSQRDLNSFLWTIRRDPPAYLFGTIHVPYTRVWDFIPDNSKAAFQASTRVYFELDLTDPYTISALASCQLLPHGENLQDVLPHELYWRLKRHLDYVKLMMPSWMTPAQRGKGLYADYLFNAIAGNWERKRPVWVMLMVNSLTERDVRFRGVPVLDLYLAQQAEKMKKTTGAVEQVEEQCHPLNNGLNFSQVLFALNQTLLQQESVRAGSLQASYTTEDLIKHYNCGDLSAVIFNHDTSQLPNFINTTLPPHEQVTAQEIDSYFRQELIYKRNERMGKRVMALLRENEDKICFFAFGAGHFLGNNTVIDILRQAGLEVDHTPAGQAIHSPAPQSPAPSPEGTSTSPAPVTPAAAVPEAPSVTPTAPPEDEDPALSPHLLLPDSLSQLEEFGRQRKWHKRQSTHQRPRQFNDLWVRIEDSTTASPPPLPLQPTHSSGTAKPPFQLSDQLQQQDPPGPASSSAPT

SEQ ID NO: 1737 - protein, 542 aa, Homo Sapiens
MPLRDETLREVWASDSGHEEESLSPEAPRRPKQRPAPAQRLRKKRTEAPESPCPTGSKPRKPGAGRTGRPREEPSPDPAQARAPQTVYARFLRDPEAKKRDPRETFLVARAPDAEDEEEEEEEDEEDEEEEAEEKKEKILLPPKKPLREKSSADLKERRAKAQGPRGDLGSPDPPPKPLRVRNKEAPAGEGTKMRKTKKKGSGEADKDPSGSPASARKSPAAMFLVGEGSPDKKALKKKGTPKGARKEEEEEEEAATVIKKSNQKGKAKGKGKKKAKEERAPSPPVEVDEPREFVLRPAPQGRTVRCRLTRDKKGMDRGMYPSYFLHLDTEKKVFLLAGRKRKRSKTANYLISIDPTNLSRGGENFIGKLRSNLLGNRFTVFDNGQNPQRGYSTNVASLRQELAAVIYETNVLGFRGPRRMTVIIPGMSAENERVPIRPRNASDGLLVRWQNKTLESLIELHNKPPVWNDDSGSYTLNFQGRVTQASVKNFQIVHADDPDYIVLQFGRVAEDAFTLDYRYPLCALQAFAIALSSFDGKLACE

SEQ ID NO: 1738 - protein, 442 aa, Homo Sapiens
MEASRCRLSPSGDSVFHEEMMKMRQAKLDYQRLLLEKRQRKKRLEPFMVQPNPEARLRRAKPRASDEQTPLVNCHTPHSNVILHGIDGPAAVLKPDEVHAPSVSSSVVEEDAENTVDTASKPGLQERLQKHDISESVNFDEETDGISQSACLERPNSASSQNSTDTGTSGSATAAQPADNLLGDIDDLEDFVYSPAPQGVTVRCRIIRDKRGMDRGLFPTYYMYLEKEENQKIFLLAARKRKKSKTANYLISIDPVDLSREGESYVGKLRSNLMGTKFTVYDRGICPMKGRGLVGAAHTRQELAAISYETNVLGFKGPRKMSVIIPGMTLNHKQIPYQPQNNHDSLLSRWQNRTMENLVELHNKAPVWNSDTQSYVLNFRGRVTQASVKNFQIVHKNDPDYIVMQFGRVADDVFTLDYNYPLCAVQAFGIGLSSFDSKLACE

SEQ ID NO: 1739 - protein, 104 aa, Homo Sapiens
VKQIESKTAFQEALDAAGDKLVVVDFSATWCGPCKMIKPFFHSLSEKYSNVIFLEVDVDDCQDVASECEVKCMPTFQFFKKGQKVGEFSGANKEKLEATINELV

SEQ ID NO: 1740 - protein, 74 aa, Homo Sapiens
SPKSRDEVNVENRQKLRVDELRREYYEEQRNEFENFVEEQNDEQEERSREAVEQWRQWHYDGLHPSYLYNRHHT

SEQ ID NO: 1741 - protein, 470 aa, Homo Sapiens
GNVLIWPMEGSHWLNVKIIIDELIKKEHNVTVLVASGALFITPTSNPSLTFEIYRVPFGKERIEGVIKDFVLTWLENRPSPSTIWRFYQEMAKVIKDFHMVSQEICDGVLKNQQLMAKLKKSKFEVLVSDPVFPCGDIVALKLGIPFMYSLRFSPASTVEKHCGKVPYPPSYVPAVLSELTDQMSFTDRIRNFISYHLQDYMFETLWKSWDSYYSKALGRPTTLCETMGKAEIWLIRTYWDFEFPRPYLPNFEFVGGLHCKPAKPLPKEMEEFIQSSGKNGVVVFSLGSMVKNLTEEKANLIASALAQIPQKVLWRYKGKKPATLGNNTQLFDWIPQNDLLGHPKTKAFITHGGTNGIYEAIYHGVPMVGVPMFADQPDNIAHMKAKGAAVEVNLNTMTSVDLLSALRTVINEPSYKENAMRLSRIHHDQPVKPLDRAVFWIEFVMRHKGAKHLRVAAHDLTWFQYHSLD

SEQ ID NO: 1742 - protein, 468 aa, Homo Sapiens
KVLVWAAEYSLWMNMKTILKELVQRGHEVTVLASSASILFDPNDSSTLKLEVYPTSLTKTEFENIIMQLVKRLSEIQKDTFWLPFSQEQEILWAINDIIRNFCKDVVSNKKLMKKLQESRFDIVFADAYLPCGELLAELFNIPFVYSHSFSPGYSFERHSGGFIFPPSYVPVVMSKLSDQMTFMERVKNMLYVLYFDFWFQIFNMKKWDQFYSEVLGRPTTLSETMRKADIWLMRNSWNFKFPHPFLPNVDFVGGLHCKPAKPLPKEMEEFVQSSGENGVVVFSLGSMVSNMTEERANVIATALAKIPQKVLWRFDGNKPDALGLNTRLYKWIPQNDLLGHPKTRAFITHGGANGIYEAIYHGIPMVGIPLFFDQPDNIAHMKAKGAAVRVDFNTMSSTDLLNALKTVINDPSYKENIMKLSRIQHDQPVKPLDRAVFWIEFVMRHKGAKHLRVAAHNLTWFQYHSLD

SEQ ID NO: 1743 - protein, 470 aa, Homo Sapiens
KVLVWTGEYSHWMNMKTILKELVQRGHEVTVLASSASILFDPNDAFTLKLEVYPTSLTKTEFENIIMQQVKRWSDIQKDSFWLYFSQEQEILWEFHDIFRNFCKDVVSNKKVMKKLQESRFDIIFADAFFPCGELLAALLNIPFVYSLCFTPGYTIERHSGGLIFPPSYIPVVMSKLSDQMTFMERVKNMIYVLYFDFWFQMCDMKKWDQFYSEVLGRPTTLFETMGKADIWLMRNSWSFQFPHPFLPNIDFVGGLHCKPAKPLPKEMEEFVQSSGENGVVVFSLGSVISNMTAERANVIATALAKIPQKVLWRFDGNKPDALGLNTRLYKWIPQNDLLGLPKTRAFITHGGANGIYEAIYHGIPMVGIPLFWDQPDNIAHMKAKGAAVRLDFHTMSSTDLLNALKTVINDPSYKENVMKLSIIQHDQPVKPLHRAVFWIEFVMCHKGAKHLRVAARDLTWFQYHSLDVI

SEQ ID NO: 1744 - protein, 451 aa, Homo Sapiens
AKIIIVPPIMFESHMYIFKTLASALHERGHHTVFLLSEGRDIAPSNHYSLQRYPGIFNSTTSDAFLQSKMRNIFSGRLTAIELFDILDHYTKNCDLMVGNHALIQGLKKEKFDLLLVDPNDMCGFVIAHLLGVKYAVFSTGLWYPAEVGAPAPLAYVPEFNSLLTDRMNLLQRMKNTGVYLISRLGVSFLVLPKYERIMQKYNLLPEKSMYDLVHGSSLWMLCTDVALEFPRPTLPNVVYVGGILTKPASPLPEDLQRWVNGANEHGFVLVSFGAGVKYLSEDIANKLAGALGRLPQKVIWRFSGPKPKNLGNNTKLIEWLPQNDLLGHSKIKAFLSHGGLNSIFETIYHGVPVVGIPLFGDHYDTMTRVQAKGMGILLEWKTVTEKELYEALVKVINNPSYRQRAQKLSEIHKDQPGHPVNRTIYWIDYIIRHNGAHHLRAAVHQISFCQ

SEQ ID NO: 1745 - protein, 188 aa, Homo Sapiens
DAHSLWYNFTIIHLPRHGQQWCEVQSQVDQKNFLSYDCGSDKVLSMGHLEEQLYATDAWGKQLEMLREVGQRLRLELADTELEDFTPSGPLTLQVRMSCECEADGYIRGSWQFSFDGRKFLLFDSNNRKWTVVHAGARRMKEKWEKDSGLTTFFKMVSMRDCKSWLRDFLMHRKKRLEPTAPPTMAPG

SEQ ID NO: 1746 - protein, 76 aa, Homo Sapiens
HEAHKTSLSSWKHDQDWANVSNMTFSNGKLRVKGIYYRNADICSRHRVTSAGLTLQDLQLWCNLRSVARGQIPSTL

SEQ ID NO: 1747 - protein, 127 aa, Homo Sapiens [sequence omitted]

SEQ ID NO: 1748 - protein, 104 aa, Homo Sapiens
GRDPSASRARFPQRLGRAPCFEVGLRKPPPPPLLSPPSFSSGSSRPLQRPRGPKDGAGRKVCAKLVKRLPGESGSCEDGQSAPAQPPRRRTGTRACPPRAPLWR

SEQ ID NO: 1749 - protein, 154 aa, Homo Sapiens
FNVLIPKRDEDGDGEGPGDVTAGVSRAAGSPSGWEAPWVQQPRCCRRATPVCCAGQGPPRSLQQGGSEVLLGQLCSPEPDWLPSSGPKVAKQVFQVAAELLQHPEHFVPSSVPEGCVHKPGSTCDGSLKGRAYPSCVPKRDPEHSREESHPLSG

SEQ ID NO: 1750 - protein, 103 aa, Homo Sapiens
QPLPGNTTEATPRSLRASGSLCGPHAKAPYLCEATHEPAAARIRAQVPDTRWSRVGGQRFYSRVLSPLHRGPSGHTEASAQRSHMGKLKEPQPQDHKPGLGAS

SEQ ID NO: 1751 - protein, 352 aa, Homo Sapiens
LPLPSYLHHTINLTHSLLAASNPSLVNNCWLCISLSSSAYTAVPAVQTDWATSPISLHLRTSFNSPHLYPPEELIYFLDRSSKTSPDISHQQAAALLRTYLKNLSPYINSTPPIFGPLTTQTTIPVAAPLCISWQRPTGIPLGNLSPSRCSFTLHLRSPTTNINETIGAFQLHITDKPSINTDKLKNISSNYCLGRHLPCISLHPWLSSPCSSDSPPRPSSCLLIPSPENNSERLLVDTRRFLIHHENRTFPSTQLPHQSPLQPLTAAALAGSLGVWVQDTPFSTPSHLFTLHLQFCLAQGLFFLCGSSTYMCLPANWTGTCTLVFLTPKIQFANGTEELPVPLMTPTQQKR

SEQ ID NO: 1752 - protein, 352 aa, Homo Sapiens
LPLPSYLHHTINLTHSLPAASNPSLANNCWLCISLSSSAYIAVPTLQTDRATSPVSLHLRTSFNSPHLYPPEELIYFLDRSSKTSPDISHQPAAALLHIYLKNLSPYINSTPPIFGPLTTQTTIPVAAPLCISRQRPTGIPLGNISPSRCSFTLHLQSPTTHVTETIGVFQLHIIDKPSINTDKLKNVSSNYCLGRHLPYISLHPWLPSPCSSDSPPRPSSCLLTPSPQNNSERLLVDTQRFLIHHENRTSSSMQLAHQSPLQPLTAAALAGSLGVWVQDTPFSTPSHPFSLHLQFCLTQGLFFLCGSSTYMCLPANWTGTCTLVFLTPKIQFANGTKELPVPLMTLTPQKR

SEQ ID NO: 1753 - protein, 175 aa, Homo Sapiens
TFLPVLAATEPAVSVPSGDLSMPVKTRAEGEDDGFGEAGDPRRLLERPWRFRGCLPGKGNRDVGFEGTEGPTSTRPEWVWSCRCCLGCRASTRERVTSPVRAAGPQPRFTDRETEAAAGTLAHMGFAPPTSFSHFTDQELRDCSSLECLGVVEGDPHVLCSTLSLSRPSPSATLT

SEQ ID NO: 1754 - protein, 113 aa, Homo Sapiens
RVGTYAVCWCSWNTGRFTGCPSWKDFWKPVGPALHVFNVKCEAQRGLKLTQPFTVACKIDPVLCKSGLGFPPQLFTGCVYLSTYTYPWQAQAECVRCPRDSNRCKRITPSACL

SEQ ID NO: 1755 - protein, 101 aa, Homo Sapiens
VNFYLPPESIDFEFMAHNWSKGRSPSSTLGLSWFKAGFRFSDGWSMFYSFGLPGVALPGSPPRSHLLPGTQILIRSFQPCESAKHSARLSSLLTTTSYSVS

SEQ ID NO: 1756 - protein, 101 aa, Homo Sapiens
VNFYLPPESIDFEFMAHNWSKGRSPSSTLGLSWFKAGFRFSDGWSMFYSSGLPGVALPGSPPRSHLLPGTQILIRSFQPCESAKHSARLSSLLTTTSYSVS

SEQ ID NO: 1757 - protein, 97 aa, Homo Sapiens
AEHLPHRPAVEKDVPGAGEVLFMCSWRIFPVASASPSSSISGLAGHSVFLVPGLAAHPGSHSDQPPGVPSRRKSRLERWSPSVSRSTSPPTEAPFCL

SEQ ID NO: 1758 - protein, 79 aa, Homo Sapiens
ACVVVSRDWLSLVPAFFYSPPPGGSFSGIKRESRRKRPSRNEIYGGGVLEQEVRMRRWSKTASPPVSLHHRPLGPARKP

SEQ ID NO: 1759 - protein, 171 aa, Homo Sapiens
GTDVAAPEHISYVPQLSNDTLAGRLTLSTFTLEQPLGQFSSHNISDLDTIWLVVALSNATQSFTAPRTNQDIPAPANFSQRGYYLTLRANRVLYQTRGQLHVLRVGNDTHCQPTKIGCNHPLPGPGPYRVKFLVMNDEGPVAETKWSSDTRLQQAQALRAVPGPQSPGTVV

SEQ ID NO: 1760 - protein, 355 aa, Homo Sapiens
MTGSAADTHRCPHPKGAKGTRSRSSHARPVSLATSGGSEEEDKDGGVLFHVNKSGFPIDSHTWERMWMHVAKVHPKGGEMVGAIRNAAFLAKPSIPQVPNYRLSMTIPDWLQAIQNYMKTLQYNHTGTQFFEIRKMRPLSGLMETAKEMTRESLPIKCLEAVILGIYLTNGQPSIERFPISFKTYFSGNYFHHVVLGIYCNGRYGSLGMSRRAELMDKPLTFRTLSDLIFDFEDSYKKYLHTVKKVKIGLYVPHEPHSFQPIEWKQLVLNVSKMLRADIRKELEKYARDMRMKILKPASAHSPTQVRSRGKSLSPRRRQASPPRRLGRREKSPALPEKKVADLSTLNEVGYQIRI

SEQ ID NO: 1761 - protein, 448 aa, Homo Sapiens
LDTFIAAVYEHAVILPNRTETPVSKEEALLLMNKNIDVLEKAVKLAAKQGAHIIVTPEDGIYGWIFTRESIYPYLEDIPDPGVNWIPCRDPWRFGNTPVQQRLSCLAKDNSIYVVANIGDKKPCNASDSQCPPDGRYQYNTDVVFDSQGKLLARYHKYNLFAPEIQFDFPKDSELVTFDTPFGKFGIFTCFDIFSHDPAVVVVDEVSIDSILYPTAWYNTLPLLSAVPFHSAWAKAMGVNLLAANTHNTSMHMTGSGIYAPEAVKVYHYDMETESGQLLLSELKSRPRREPTYPAAVDWHAYASSVKPFSSEQSDFLGMIYFDEFTFTKLKRNTGNYTACQKDLCCHLTYKMSEKRTDEIYALGAFDGLHTVEGQYYLQICALLKCQTTDLETCGEPVGSAFTKFEDFSLSGTFGTRYVFPQIILSGSQLAPERHYEISRDGRLRSRS

SEQ ID NO: 1762 - protein, 71 aa, Homo Sapiens
SPKQRVLKYILEPPPCISAPENCTHLCTMQEDCEKGFQCCSSFCGIVCSSETFQKRNRIKHKGSEVIMPAN

SEQ ID NO: 1763 - protein, 203 aa, Homo Sapiens
MLTKKIKHKPGLCPKERLTCTTELPDSCNTDFDCKEYQKCCFFACQKKCMDPFQEPCMLPVRHGNCNHEAQRWHFDFKNYRCTPFKYRGCEGNANNFLNEDACRTACMLIVKDGQCPLFPFTERKECPPSCHSDIDCPQTDKCCESRCGFVCARAWTVKKGFCPRKPLLCTKIDKPKCLQDEECPLVEKCCSHCGLKCMDPRR

SEQ ID NO: 1764 - protein, 345 aa, Homo Sapiens
TALSPAPTTMDFTPAPLEDTSSRPQFCKWPCECPPSPPRCPLGVSLITDGCECCKMCAQQLGDNCTEAAICDPHRGLYCDYSGDRPRYAIGVCAQVVGVGCVLDGVRYNNGQSFQPNCKYNCTCIDGAVGCTPLCLRVRPPRLWCPHPRRVSIPGHCCEQWVCEDDAKRPRKTAPRDTGAFDAVGEVEAWHRNCIAYTSPWSPCSTSCGLGVSTRISNVNAQCWPEQESRLCNLRPCDVDIHTLIKAGKKCLAVYQPEASMNFTLAGCISTRSYQPKYCGVCMDNRCCIPYKSKTIDVSFQCPDGLGFSRQVLWINACFCNLSCRNPNDIFADLESYPDFSEIAN

SEQ ID NO: 1765 - protein, 334 aa, Homo Sapiens
GYPIWWSLALGQQYTSLGSQPLLCGSIPGLVPKQLRFCRNYIEIMPSVAEGVKLGIQECQHQFRGRRWNCTTIDDSLAIFGPVLDKATRESAFVHAIASAGVAFAVTRSCAEGTSTICGCDSHHKGPPGEGWKWGGCSEDADFGVLVSREFADARENRPDARSAMNKHNNEAGRTTILDHMHLKCKCHGLSGSCEVKTCWWAQPDFRAIGDFLKDKYDSASEMVVEKHRESRGWVETLRAKYSLFKPPTERDLVYYENSPNFCEPNPETGSFGTRDRTCNVTSHGIDGCDLLCCGRGHNTRTEKRKEKCHCIFHWCCYVSCQECIRIYDVHTCK

SEQ ID NO: 1766 - protein, 341 aa, Homo Sapiens
LWWAVGSPLVMDPTSICRKARRLAGRQAELCQAEPEVVAELARGARLGVRECQFQFRFRRWNCSSHSKAFGRILQQDIRETAFVFAITAAGASHAVTQACSMGELLQCGCQAPRGRAPPRPSGLPGTPGPPGPAGSPEGSAAWEWGGCGDDVDFGDEKSRLFMDARHKRGRGDIRALVQLHNNEAGRLAVRSHTRTECKCHGLSGSCALRTCWQKLPPFREVGARLLERFHGASRVMGTNDGKALLPAVRTLKPPGRADLLYAADSPDFCAPNRRTGSPGTRGRACNSSAPDLSGCDLLCCGRGHRQESVQLEENCLCRFHWCCVVQCHRCRVRKELSLCL

SEQ ID NO: 1767 - protein, 327 aa, Homo Sapiens
VNNFLITGPKAYLTYTTSVALGAQSGIEECKFQFAWERWNCPENALQLSTHNRLRSATRETSFIHAISSAGVMYIITKNCSMGDFENCGCDGSNNGKTGGHGWIWGGCSDNVEFGERISKLFVDSLEKGKDARALMNLHNNRAGRLAVRATMKRTCKCHGISGSCSIQTCWLQLAEFREMGDYLKAKYDQALKIEMDKRQLRAGNSAEGHWVPAEAFLPSAEAELIFLEESPDYCTCNSSLGIYGTEGRECLQNSHNTSRWERRSCGRLCTECGLQVEERKTEVISSCNCKFQWCCTVKCDQCRHVVSKYYCARSPGSAQSLGKGSA

SEQ ID NO: 1768 - protein, 335 aa, Homo Sapiens
SYFGLTGREVLTPFPGLGTAAAPAQGGAHLKQCDLLKLSRRQKQLCRREPGLAETLRDAAHLGLLECQFQFRHERWNCSLEGRMGLLKRGFKETAFLYAVSSAALTHTLARACSAGRMERCTCDDSPGLESRQAWQWGVCGDNLKYSTKFLSNFLGSKRGNKDLRARADAHNTHVGIKAVKSGLRTTCKCHGVSGSCAVRTCWKQLSPFRETGQVLKLRYDSAVKVSSATNEALGRLELWAPARQGSLTKGLAPRSGDLVYMEDSPSFCRPSKYSPGTAGRVCSREASCSSLCCGRGYDTQSRLVAFSCHCQVQWCCYVECQQCVQEELVYTCKH

SEQ ID NO: 1769 - protein, 365 aa, Homo Sapiens
QPLWLLQGGASHPETSVQPVLVECQEATLMVMVSKDLFGTGKLIRAADLTLGPEACEPLVSMDTEDVVRFEVGLHECGNSMQVTDDALVYSTFLLHDPRPVGNLSIVRTNRAEIPIECRYPRQGNVSSQAILPTWLPFRTTVFSEEKLTFSLRLMEENWNAEKRSPTFHLGDAAHLQAEIHTGSHVPLRLFVDHCVATPTPDQNASPYHTIVDFHGCLVDGLTDASSAFKVPRPGPDTLQFTVDVFHFANDSRNMIYITCHLKVTLAEQDPDELNKACSFSKPSNSWFPVEGSADICQCCNKGDCGTPSHSRRQPHVMSQWSRSASRNRRHVTEEADVTVGPLIFLDRRGDHEVEQWALPSDTSV

SEQ ID NO: 1770 - protein, 487 aa, Homo Sapiens
GQHKPEAPDYSSVLHCGPWSFQFAVNLNQEATSPPVLIAWDNQGLLHELQNDSDCGTWIRKGPGSSVVLEATYSSCYVTEWDSHYIMPVGVEGAGAAEHKVVTERKLLKCPMDLLARDAPDTDWCDSIPARDRLPCAPSPISRGDCEGLGCCYSSEEVNSCYYGNTVTLHCTREGHFSIAVSRNVTSPPLLLDSVRLALRNDSACNPVMATQAFVLFQFPFTSCGTTRQITGDRAVYENELVATRDVKNGSRGSVTRDSIFRLHVSCSYSVSSNSLPINVQVFTLPPPFPETQPGPLTLELQIAKDKNYGSYYGVGDYPVVKLLRDPIYVEVSILHRTDPYLGLLLQQCWATPSTDPLSQPQWPILVKGCPYIGDNYQTQLIPVQKALDLPFPSHHQRFSIFTFSFVNPTVEKQALRGPVHLHCSVSVCQPAETPSCVVTCPDLSRRRNFDNSSQNTTASVSSKGPMILLQATKDPPEKLRVPVDSK

SEQ ID NO: 1771 - protein, 267 aa, Homo Sapiens
ILGGVPAPERKWPWQVSVHYAGLHVCGGSILNEYWVLSAAHCFHRDKNIKIYDMYVGLVNLRVDGNHTQWYEVNRVILHPTYEMYHPIGGDVALVQLKTRIVFSESVLPVCLATPEVNLTSANCWATGWGLVSKQGETSDELQEVQLPLILEPWCHLLYGHMSYIMPDMLCAGDILNAKTVCEGDSGGPLVCEFNRSWLQIGIVSWGRGCSNPLYPGVYASVSYFSKWICDNIEITPTPAQPAPALSPALGPTLSVLMAMLAGWSVL

SEQ ID NO: 1772 - protein, 98 aa, Homo Sapiens
SLSPTKYNLLELKESCIRNQDCETGCCQRAPDNCESHCAEKGSEGSLCQTQVFFGQYRACPCLRNLTCIYSKNEKWLSIAYGRCQKIGRQKLAKKMFF

SEQ ID NO: 1773 - protein, 992 aa, Homo Sapiens
LRGSRKLTAAAPGAVPHTSTETQASRCKKGFSQDKQCFLLSGNAQETRKVKESMETHFGSHGRRAILYRPPFYSKTELQLHQHILTQHGYTVVIAEERLNAGLGPGLLEQGDLGSWDLLICLSSKKAEGTPCISKEVMCQLGLHQKANRLPEIQQPLCRKEGLCQIVRRFPELQLPVSPSVCLDQGMQLKPSTSSHLLKTVKPRVWKPGDWSREQLNETTVLAPHETIFRAEDLSVILKAYVLVTSLTPLRAFIHSTGTVWNPPKKKRFTVKLQTFFETFLRASSPQQAFDIMKEAIGKLLLAAEVFSETSTLGPKTFHRCRFCFQLLTFDIGYGSFMYPVVLQVHEHLNFQDYDNMDFEDQNTEEFLLNDTFNFLFPNESSLSIFSEIFQRLYRSDVFKGENYQKELNQCLSLEEINSIMTFIKELGSLGQFQLLFPSTTPGIQSLMHEFYDVANPVGNPGSVLTQYWSLLNVFEQFQFMNKKTQPHPLEWNSFTEDKNIEKPQVPFDAIENKKAAVPQIKNENKEIHCSDDENTPCHIKQIFTHPHLELNPDFHPKIKDYYCEVPFDVVTVTIGVETPKCLCKVHLYEQAGPSFASYPLGLGMNKISIFVVDESPAHGETLITYKLTIYREDRPSLPLFEAFTACGFVQDCGLLIHPEETCGLQPISSDYIGAILQSELKRCPSGDMKGQWIVPCLSCSDNRTCDWREITWQPHNCQYGVLTKPQLQQCLGGRKILFIGDSTNRGIMYYLIERLNETLQEWQKVHGTKFYHNVNGGKTLISYSYYPQFWISPSLRPTFENALEHLLQRSRPLENTGQTVLVVGGVQWLNSNHLQIIHKVLKRENLLNILVIIKTLGIGFHLPVDGVHFLTQSEVQNLWKENLIILDTAKKHGYEVVDTFTITMGRYKEFLQGKCGCHFHEVVKSKLSKEYNFIKMKRSRNHIMGRYFSNQSKLQQGTVTNFRSPYHVRGPINQVCSEILLSRMCANKRTM

SEQ ID NO: 1774 - protein, 216 aa, Homo Sapiens
SVQKEDPAPYLVYLKSHFNPCVGVLIKPSWVLAPAHCYLPNLKVMLGNFKSRVRDGTEQTINPIQIVRYWNYSHSAPQDDLMLIKLAKPAMLNPKVQPLTLATTNVRPGTVCLLSGLDWSQENSGRHPDLRQNLEAPVMSDRECQKTEQGKSHRNSLCVKFVKVFSRIFGEVAVATVICKDKLQGIEVGHFMGGDVGIYTNVYKYVSWIENTAKDK

SEQ ID NO: 1775 - protein, 223 aa, Homo Sapiens
VTFTINCSGFGQHGADPTTLNSVFNRKPFRPVTNISVPTQVNISFAMSAILDVNEQLHLLSSFLWLEMVWDNPFISWNPEECEGITKMSMAAKNLWLPDIFIIELMDVDKTPKGLTAYVSNEGRIRYKKPMKVDSICNLDIFYFPFDQQNCTLTFSSFLYTVDSMLLDMEKEVWEITDASRNILQTHGEWELLGLSKATAKLSRGGNLYDQIVFYVAIRRRPS

SEQ ID NO: 1776 - protein, 293 aa, Homo Sapiens
LLFIYQEVSRLWSKSAVQNKVVVITDAISGLGKECARVFHTGGARLVLCGKNWERLENLYDALISVADPSKTFTPKLVLLDLSDISCVPDVAKEVLDCYGCVDILINNASVKVKGPAHKISLELDKKIMDANYFGPITLTKALLPNMISRRTGQIVLVNNIQGKFGIPFRTTYAASKHAALGFFDCLRAEVEEYDVVISTVSPTFIRSYHVYPEQGNWEASIWKFFFRKLTYGVHPVEVAEEVMRTVRRKKQEVFMANPIPKAAVYVRTFFPEFFFAVVACGVKEKLNVPEEG

SEQ ID NO: 1777 - protein, 893 aa, Homo Sapiens
NSLIQLNNNGYEGIVVAIDPNVPEDETLIQQIKDMVTQASLYLFEATGKRFYFKNVAILIPETWKTKADYVRPKLETYKNADVLVAESTPPGNDEPYTEQMGNCGEKGERIHLTPDFIAGKKLAEYGPQGRAFVHEWAHLRWGVFDEYNNDEKFYLSNGRIQAVRCSAGITGTNVVKKCQGGSCYTKRCTFNKVTGLYEKGCEFVLQSRQTEKASIMFAQHVDSIVEFCTEQNHNKEAPNKQNQKCNLRSTWEVIRDSEDFKKTTPMTTQPPNPTFSLLQIGQRIVCLVLDKSGSMATGNRLNRLNQAGQLFLLQTVELGSWVGMVTFDSAAHVQNELIQINSGSDRDTLAKRLPAAASGGTSICSGLRSAFTVIRKKYPTDGSEIVLLTDGEDNTISGCFNEVKQSGAIIHTVALGPSAAQELEELSKMTGGLQTYASDQVQNNGLIDAFGALSSGNGAVSQRSIQLESKGLTLQNSQWMNGTVIVDSTVGKDTLFLITWTMQPPQILLWDPSGQKQGGFVVDKNTKMAYLQIPGIAKVGTWKYSLQASSQTLTLTVTSRASNATLPPITVTSKTNKDTSKFPSPLVVYANIRQGASPILRASVTALIESVNGKTVTLELLDNGAGADATKDDGVYSRYFTTYDTNGRYSVKVRALGGVNAARRRVIPQQSGALYIPGWIENDEIQWNPPRPEINKDDVQHKQVCFSRTSSGGSFVASDVPNAPIPDLFPPGQITDLKAEIHGGSLINLTWTAPGDDYDHGTAHKYIIRISTSILDLRDKFNESLQVNTTALIPKEANSEEVFLFKPENITFENGTDLFIAIQAVDKVDLKSEISNIARVSLFIPPQTPPETPSPDETSAPCPNIHINSTIPGIHILKIMWKWIGELQLSIA

SEQ ID NO: 1778 - protein, 98 aa, Homo Sapiens
IRLVPPYPSSQEDPIHIACMAPGNFPGANFTLYRGGQVVQLLQAPTDQRGVTFNLSGGSSKAPGGPFHCQYGVLGELNQSQLSDLSEPVNVSFPVPTW

SEQ ID NO: 1779 - protein, 314 aa, Homo Sapiens
QDTCRQGHPGIPGNPGHNGLPGRDGRDGAKGDKGDAGEPGCPGSPGKDGTSGEKGERGADGKVEAKGIKGDQGSRGSPGKHGPKGLAGPMGEKGLRGETGPQGQKGNKGDVGPTGPEGPRGNIGPLGPTGLPGPMGPIGKPGPKGEAGPTGPQGEPGVRGIRGWKGDRGEKGKIGETLVLPKSAFTVGLTVLSKFPSSDVPIKFDKILYNEFNHYDTAVGKFTCHIAGVYYFTYHITVFSRNVQVSLVKNGVKILHTRDAYVSSEDQASGSIVLQLKLGDEMWLQVTGGERFNGLFADEDDDTTFTGFLLFSSQ

SEQ ID NO: 1780 - protein, 201 aa, Homo Sapiens
AAISHEDYPADEGDQISSNDNLIFDDYRGKGCVDDSGFVYKLGERFFPGHSNCPCVCALDGPVCDQPECPKIHPKCTKVEHNGCCPECKEVKNFCEYHGKNYKILEEFKPSPCEWCRCEPSNEVHCVVADCAVPECVNPVYEPEQCCPVCKNGPNCFAGTTIIPAGIEVKVDECNICHCHNGDWWKPAQCSKRECQGKQTV

SEQ ID NO: 1781 - protein, 135 aa, Homo Sapiens
DLDTAARRGQHQVPQHRGHVCYLGVCRTHRLAEIIYWIRCLHQGALGEGQPRAPGPLQLWAPPVARGGSPARFPGFRPAARGLAQCPARWVTSGTARPLLGFSLPICMLELLLHISSPLTPAPETVFPSPSPGCD

SEQ ID NO: 1782 - protein, 342 aa, Homo Sapiens
CYGDSGQPVDWFVVYKLPALRGSGEAAQRGLQYKYLDESSGGWRDGRALINSPEGAVGRSLQPLYRSNTSQLAFLLYNDQPPQPSKAQDSSMRGHTKGVLLLDHDGGFWLVHSVPNFPPPASSAAYSWPHSACTYGQTLLCVSFPFAQFSKMGKQLTYTYPWVYNYQLEGIFAQEFPDLENVVKGHHVSQEPWNSSITLTSQAGAVFQSFAKFSKFGDDLYSGWLAAALGTNLQVQFWHKTVGILPSNCSDIWQVLNVNQIAFPGPAGPSFNSTEDHSKWCVSPKGPWTCVGDMNRNQGEEQRGGGTLCAQLPALWKAFQPLVKNYQPCNGMARKPSRAYKI

SEQ ID NO: 1783 - protein, 207 aa, Homo Sapiens
LEIGRFDPERGRGAAPCQAVEIPMCRGIGYNLTRMPNLLGHTSQGEAAAELAEFAPLVQYGCHSHLRFFLCSLYAPMCTDQVSTPIPACRPMCEQARLRCAPIMEQFNFGWPDSLDCARLPTRNDPHALCMEAPENATAGPAEPHKGLGMLPVAPRPARPPGDLGPGAGGSGTCENREKFQYVEKSRSCAPRCGPGVEVFWSRRDKD

SEQ ID NO: 1784 - protein, 62 aa, Homo Sapiens
SSVELPYEDLLRQELRKLKRRFLEEHECLSEQQLEQFLGRVLEASNYGVSVLSNASGNWNWD

SEQ ID NO: 1785 - protein, 356 aa, Homo Sapiens
MAFSGCQAPYLSPAVPFSGTIQGGLQDGFQITVNGAVLSCSGTRFAVDFQTGFSGNDIAFHFNPRFEDGGYVVCNTRQKGTWGPEERKMHMPFQKGMPFDLCFLVQSSDFKVMVNGSLFVQYFHRVPFHRVDTISVNGSVQLSYISFQNPRAVPVQPAFSTVPFSQPVCFPPRPRGRRQKPPIVRPANPAPITQTVIHTVQSASGQMFSQTPAIPPMMYPHPAYPMPFITTIPGGLYPSKSIILSGTVLPSAQRFHINLCSGSHIAFHMNPRFDENAVVRNTQINNSWGSEERSLPRKMPFVRGQSFSVWILCEAHCLKVAVDGQHVFEYYHRLRNLPTINKLEVGGDIQLTHVQT

SEQ ID NO: 1786 - protein, 50 aa, Homo Sapiens
SSRRCVRLHESCLGQQVPCCDPCATCYCRFFNAFCYCRKLGTAMNPCSRT

SEQ ID NO: 1787 - protein, 290 aa, Homo Sapiens
RFSQSFREVAGRFLASEASTHLLVFGMEQRLPPNSELVQAVLRLFQEPVPKAALHRHGRLSPRSAQARVTVEWLRVRDDGSNRTSLIDSRLVSVHESGWKAFDVTEAVNFWQQLSRPRQPLLLQVSVQREHLGPLASGAHKLVRFASQGAPAGLGEPQLELHTLDLRDYGAQGDCDPEAPMTEGTRCCRQEMYIDLQGMKWAKNWVLEPPGFLAYECVGTCQQPPEALAFNWPFLGPRQCIASETASLPMIVSIKEGGRTRPQVVSLPNMRVQKCSCASDGALVPRRLQP

SEQ ID NO: 1788 - protein, 520 aa, Homo Sapiens
MSQDNDTLMRDILGHELAAMRLQKLEQQRRLFEKKQRQKRQELLMVQANPDASPWLWRSCLREERLLGDRGLGNPFLRKKVSEAHLPSGIHSALGTVSCGGDGRGERGLPTPRTEAVFRNLGLQSPFLSWLPDNSDAELEEVSVENGSVSPPPFKQSPRIRRKGWQAHQRPGTRAEGESDSQDMGDAHKSPNMGPNPGMDGDCVYENLAFQKEEDLEKKREASESTGTNSSAAHNEELSKALKGEGGTDSDHMRHEASLAIRSPCPGLEEDMEAYVLRPALPGTMMQCYLTRDKHGVDKGLFPLYYLYLETSDSLQRFLLAGRKRRRSKTSNYLISLDPTHLSRDGDNFVGKVRSNVFSTKFTIFDNGVNPDREHLTRNTARIRQELGAVCYEPNVLGYLGPRKMTVILPGTNSQNQRINVQPLNEQESLLSRYQRGDKQGLLLLHNKTPSWDKENGVYTLNFHGRVTRASVKNFQIVDPKHQEHLVLQFGRVGPDTFTMDFCFPFSPLQAFSICLSSFN

SEQ ID NO: 1789 - protein, 517 aa, Homo Sapiens
MAVSRKDWSALSSLARQRTLEDEEEQERERRRRHRNLSSTTDDEAPRLSQNGDRQASASERLPSVEEAEVPKPLPPASKDEDEDIQSILRTRQERRQRRQVVEAAQAPIQERLEAEEGRNSLSPVQATQKPLVSKKELEIPPRRRLSREQRGPWALEEESLVGREPEERKKGVPEKSPVLEKSSMPKKTAPEKSLVSDKTSISEKVLASEKTSLSEKIAVSEKRNSSEKKSVLEKTSVSEKSLAPGMALGSGRRLVSEKASIFEKALASEKSPTADAKPAPKRATASEQPLAQEPPASGGSPATTKEQRGRALPGKNLPSLAKQGASDPPTVASRLPPVTLQVKIPSKEEEADMSSPTQRTYSSSLKRSSPRTISFRMKPKKENSETTLTRSASMKLPDNTVKLGEKLERYHTAIRRSESVKSRGLPCTELFVAPVGVASKRHLFEKELAGQSRAEPASSRKENLRLSGVVTSRLNLWISRTQESGDQDPQEAQKASSATERTQWGQKSDSSLDAEV

SEQ ID NO: 1790 - protein, 297 aa, Homo Sapiens
SLYPSLEDLKVDKVIQAQTAFSANPANPAILSEASAPIPHDGNLYPRLYPELSQYMGLSLNEEEIRANVAVVSGAPLQGQLVARPSSINYMVAPVTGNDVGIRRAEIKQGIREVILCKDQDGKIGLRLKSIDNGIFVQLVQANSPASLVGLRFGDQVLQINGENCAGWSSDKAHKVLKQAFGEKITMTIRDRPFERTITMHKDSTGHVGFIFKNGKITSIVKDSSAARNGLLTEHNICEINGQNVIGLKDSQIADILSTSGTVVTITIMPAFIFEHIIKRMAPSIMKSLMDHTIPEV

SEQ ID NO: 1791 - protein, 232 aa, Homo Sapiens
DKRLRDNHEWKKLIMVQHWPETVCEKIQNDCRDPPDYWTIHGLWPDKSEGCNRSWPFNLEEIKDLLPEMRAYWPDVIHSFPNRSRFWKHEWEKHGTCAAQVDALNSQKKYFGRSLELYRELDLNSVLLKLGIKPSINYYQVADFKDALARVYGVIPKIQCLPPSQDEEVQTIGQIELCLTKQDQQLQNCTEPGEQPSPKQEVWLANGAAESRGLRVCEDGPVFYPPPKKTKH

SEQ ID NO: 1792 - protein, 50 aa, Homo Sapiens
MAATASPQPLATEDADSENSSFYYYDYLDEVAFMLCRKDAVVSFGKVFLP

SEQ ID NO: 1793 - protein, 226 aa, Homo Sapiens
ERMCIQGSQFNVEVGRSDKLSLPGFENLTAGYNKFLRPNFGGEPVQIALTLDIASISSISESNMDYTATIYLRQRWMDQRLVFEGNKSFTLDARLVEFLWVPDTYIVESKKSFLHEVTVGNRLIRLFSNGTVLYALRITTTVACNMDLSKYPMDTQTCKLQLESWGYDGNDVEFTWLRGNDSVRGLEHLRLAQYTIERYFTLVTRSQQETGNYTRLVLQFELRRNV

SEQ ID NO: 1794 - protein, 407 aa, Homo Sapiens
SPSPSPSPSQNATQTTTDSSNKTAPTPASSVTIMATDTAQQSTVPTSKANEILASVKATTLGVSSDSPGTTTLAQQVSGPVNTTVARGGGSGNPTTTIESPKSTKSADTTTVATSTATAKPNTTSSQNGAEDTTNSGGKSSHSVTTDLTSTKAEHLTTPHPTSPLSPRQPTSTHPVATPTSSGHDHLMKISSSSSTVAIPGYTFTSPGMTTTLPSSVISQRTQQTSSQMPASSTAPSSQETVQPTSPATALRTPTLPETMSSSPTAASTTHRYPKTPSPTVAHESNWAKCEDLETQTQSEKQLVLNLTGNTLCAGGASDEKLISLICRAVKATFNPAQDKCGIRLASVPGSQTVVVKEITIHTKLPAKDVYERLKDKWDELKEAGVSDMKLGDQGPPEEAEDRFSMP

SEQ ID NO: 1795 - protein, 297 aa, Homo Sapiens
ADTCPEVKVVGLEGSDKLTILRGCPGLPGAPGPKGEAGVIGERGERGLPGAPGKAGPVGPKGDRGEKGMRGEKGDAGQSQSCATGPRNCKDLLDRGYFLSGWHTIYLPDCRPLTVLCDMDTDGGGWTVFQRRMDGSVDFYRDWAAYKQGFGSQLGEFWLGNDNIHALTAQGSSELRVDLVDFEGNHQFAKYKSFKVADEAEKYKLVLGAFVGGSAGNSLTGHNNNFFSTKDQDNDVSSSNCAEKFQGAWWYADCHASNLNGLYLMGPHESYANGINWSAAKGYKYSYKVSEMKVRPA

SEQ ID NO: 1796 - protein, 357 aa, Homo Sapiens
TCPAACHCPLEAPKCAPGVGLVRDGCGCCKVCAKQLNEDCSKTQPCDHTKGLECNFGASSTALKGICRAQSEGRPCEYNSRIYQNGESFQPNCKHQCTCIDGAVGCIPLCPQELSLPNLGCPNPRLVKVTGQCCEEWVCDEDSIKDPMEDQDGLLGKELGFDASEVELTRNNELIAVGKGSSLKRLPVFGMEPRILYNPLQGQKCIVQTTSWSQCSKTCGTGISTRVTNDNPECRLVKETRICEVRPCGQPVYSSLKKGKKCSKTKKSPEPVRFTYAGCLSVKKYRPKYCGSCVDGRCCTPQLTRTVKMRFRCEDGETFSKNVMMIQSCKCNYNCPHANEAAFPFYRLFNDIHKFRD

SEQ ID NO: 1797 - protein, 361 aa, Homo Sapiens
NEILGLKLPGEPPLTANTVCLTLSGLSKRQLGLCLRNPDVTASALQGLHIAVHECQHQLRDQRWNCSALEGGGRLPHHSAILKRGFRESAFSFSMLAAGVMHAVATACSLGKLVSCGCGWKGSGEQDRLRAKLLQLQALSRGKSFPHSLPSPGPGSSPSPGPQDTWEWGGCNHDMDFGEKFSRDFLDSREAPRDIQARMRIHNNRVGRQVVTENLKRKCKCHGTSGSCQFKTCWRAAPEFRAVGAALRERLGRAIFIDTHNRNSGAFQPRLRPRRLSGELVYFEKSPDFCERDPTMGSPGTRGRACNKTSRLLDGCGSLCCGRGHNVLRQTRVERCHCRFHWCCYVLCDECKVTEWVNVCK

SEQ ID NO: 1798 - protein, 533 aa, Homo Sapiens
QDSASPIRTTHTGQVLGSLVHVKGANAGVQTFLGIPFAKPPLGPLRFAPPEPPESWSGVRDGTTHPAMCLQDLTAVESEFLSQFNMTFPSDSMSEDCLYLSIYTPAHSHEGSNLPVMVWIHGGALVFGMASLYDGSMLAALENVVVVIIQYRLGVLGFFSTGDKHATGNWGYLDQVAALRWVQQNIAHFGGNPDRVTIFGESAGGTSVSSLVVSPISQGLFHGAIMESGVALLPGLIASSADVISTVVANLSACDQVDSEALVGCLRGKSKEEILAINKPFKMIPGVVDGVFLPRHPQELLASADFKPVPSIVGVNNNEFGWLIPKVMRIYDTQKEMDREASQAALQKMLTLLMLPPTFGDLLREEYIGDNGDPQTLQAQFQEMMADSMFVIPALQVAHFQCSRAPVYFYEFQHQPSWLKNIRPPHMKADHGDELPFVFRSFFGGNYIKFTEEEEQLSRKMMKYWANFARNGNPNGEGLPHWPLFDQEEQYLQLNLQPAVGRALKAHRLQFWKKALPQKIQELEEPEERHTEL

SEQ ID NO: 1799 - protein, 962 aa, Homo Sapiens
GGYETCPTVQPNMLNVHLLPHTHDDVGWLKTVDQYFYGIKNDIQHAGVQYILDSVISALLADPTRRFIYVEIAFFSRWWHQQTNATQEVVRDLVRQGRLEFANGGWVMNDEAATHYGAIVDQMTLGLRFLEDTFGNDGRPRVAWHIDPFGHSREQASLFAQMGFDGFFFGRLDYQDKWVRMQKLEMEQVWRASTSLKPPTADLFTGVLPNGYNPPRNLCWDVLCVDQPLVEDPRSPEYNAKELVDYFLNVATAQGRYYRTNHTVMTMGSDFQYENANMWFKNLDKLIRLVNAQQAKGSSVHVLYSTPACYLWELNKANLTWSVKHDDFFPYADGPHQFWTGYFSSRPALKRYERLSYNFLQVCNQLEALVGLAANVGPYGSGDSAPLNEAMAVLQHHDAVSGTSRQHVANDYARQLAAGWGPCEVLLSNALARLRGFKDHFTFCQQLNISICPLSQTAARFQVIVYNPLGRKVNWMVRLPVSEGVFVVKDPNGRTVPSDVVIFPSSDSQAHPPELLFSASLPALGFSTYSVAQVPRWKPQARAPQPIPRRSWSPALTIENEHIRATFDPDTGLLMEIMNMNQQLLLPVRQTFFWYNASIGDNESDQASGAYIFRPNQQKPLPVSRWAQIHLVKTPLVQEVHQNFSAWCSQVVRLYPGQRHLELEWSVGPIPVGDTWGKEVISRFDTPLETKGRFYTDSNGREILERRRDYRPTWKLNQTEPVAGNYYPVNTRIYITDGNMQLTVLTDRSQGGSSLRDGSLELMVHRRLLKDDGRGVSEPLMENGSGAWVRGRHLVLLDTAQAAAAGHRLLAEQEVLAPQVVLAPGGGAAYNLGAPPRTQFSGLRRDLPPSVHLLTLASWGPEMVLLRLEHQFAVGEDSGRNLSAPVTLNLRDLFSTFTITRLQETTLVANQLREAASRLKWTTNTGPTPHQTPYQLDPANITLEPMEIRTFLASVQWKEVDG

SEQ ID NO: 1800 - protein, 318 aa, Homo Sapiens
LGASIICNKIPGLAPRQRAICQSRPDAIIVIGEGSQMGLDECQFQFRNGRWNCSALGERTVFGKELKVGSREAAFTYAIIAAGVAHAITAACTQGNLSDCGCDKEKQGQYHRDEGWKWGGCSADIRYGIGFAKVFVDAREIKQNARTLMNLHNNEAGRKILEENMKLECKCHGVSGSCTTKTCWTTLPQFRELGYVLKDKYNEAVHVEPVRASRNKRPTFLKIKKPLSYRKPMDTDLVYIEKSPNYCEEDPVTGSVGTQGRACNKTAPQASGCDLMCCGRGYNTHQYARVWQCNCKFHWCCYVKCNTCSERTEMYTCK

SEQ ID NO: 1801 - protein, 53 aa, Homo Sapiens
MWRVTAFIGSNIVTSQTIWEGLWMNCVVQSTGQMQCKVYDSLLALPQDLQAAR

SEQ ID NO: 1802 - protein, 845 aa, Homo Sapiens
LLVIMSLGLGLGLGLRKLEKQGSCRKKCFDASFRGLENCRCDVACKDRGDCCWDFEDTCVESTRIWMCNKFRCGETRLEASLCSCSDDCLQRKDCCADYKSVCQGETSWLEENCDTAQQSQCPEGFDLPPVILFSMDGFRAEYLYTWDTLMPNINKLKTCGIHSKYMRAMYPTKTFPNHYTIVTGLYPESHGIIDNNMYDVNLNKNFSLSSKEQNNPAWWHGQPMWLTAMYQGLKAATYFWPGSEVAINGSFPSIYMPYNGSVPFEERISTLLKWLDLPKAERPRFYTMYFEEPDSSGHAGGPVSARVIKALQVVDHAFGMLMEGLKQRNLHNCVNIILLADHGMDQTYCNKMEYMTDYFPRINFFYMYEGPAPRIRAHNIPHDFFSFNSEEIVRNLSCRKPDQHFKPYLTPDLPKRLHYAKNVRIDKVHLFVDQQWLAVRSKSNTNCGGGNHGYNNEFRSMEAIFLAHGPSFKEKTEVEPFENIEVYNLMCDLLRIQPAPNNGTHGSLNHLLKVPFYEPSHAEEVSKFSVCGFANPLPTESLDCFCPHLQNSTQLEQVNQMLNLTQEEITATVKVNLPFGRPRVLQKNVDHCLLYHREYVSGFGKAMRMPMWSSYTVPQLGDTSPLPPTVPDCLRADVRVPPSESQKCSFYLADKNITHGFLYPPASNRTSDSQYDALITSNLVPMYEEFRKMWDYFHSVLLIKHATERNGVNVVSGPIFDYNYDGHFDAPDEITKHLANTDVPIPTHYFVVLTSCKNKSHTPENCPGWLDVLPFIIPHRPTNVESCPEGKPEALWVEERFTAHIARVRDVELLTGLDFYQDKVQPVSEILQLKTYLPTFETTI

SEQ ID NO: 1803 - protein, 312 aa, Homo Sapiens
VEPISLGLALAGVLTGYIYPRLYCLFAECCGQKRSLSREALQKDLDDNLFGQHLAKKIILNAVFGFINNPKPKKPLTLSLHGWTGTGKNFVSKIIAENIYEGGLNSDYVHLFVATLHFPHASNITLYKDQLQLWIRGNVSACARSIFIFDEMDKMHAGLIDAIKPFLDYYDLVDGVSYQKAMFIFLSNAGAERITDVALDFWRSGKQREDIKLKDIEHALSVSVFNNKNSGFWHSSLIHRNLIDYFVPFLPLEYKHLKMCIRVEMQSRGYEIDEDIVSRVAEEMTFFPKEERVFSDKGCKTVFTKLDYYYDD

SEQ ID NO: 1804 - protein, 312 aa, Homo Sapiens
FEPITVGLAIGAASAITGYLSYNDIYCRFAECCREERPLNASALKLDLEEKLFGQHLATEVIFKALTGFRNNKNPKKPLTLSLHGWAGTGKNFVSQIVAENLHPKGLKSNFVHLFVSTLHFPHEQKIKLYQDQLQKWIRGNVSACANSVFIFDEMDKLHPGIIDAIKPFLDYYEQVDGVSYRKAIFIFLSNAGGDLITKTALDFWRAGRKREDIQLKDLEPVLSVGVFNNKHSGLWHSGLIDKNLIDYFIPFLPLEYRHVKMCVRAEMRARGSAIDEDIVTRVAEEMTFFPRDEKIYSDKGCKTVQSRLDFH

SEQ ID NO: 1805 - protein, 63 aa, Homo Sapiens
ANGFFEEIRQGNIERECKEEFCTFEEAREAFENNEKTKEFWSTYTKAQQGESNRGSDWFQFYL

SEQ ID NO: 1806 - protein, 300 aa, Homo Sapiens
YRERQVVSHLQDKYVFITGCDSGFGNLLARQLDARGLRVLAACLTEKGAEQLRGQTSDRLETVTLDVTKMESIAAATQWVKEHVGDRGLWGLVNNAGILTPITLCEWLNTEDSMNMLKVNLIGVIQVTLSMLPLVRRARGRIVNVSSILGRVAFFVGGYCVSKYGVEAFSDILRREIQHFGVKISIVEPGYFRTGMTNMTQSLERMKQSWKEAPKHIKETYGQQYFDALYNIMKEGLLNCSTNLNLVTDCMEHALTSVHPRTRYSAGWDAKFFFIPLSYLPTSLADYILTRSWPKPAQAV

SEQ ID NO: 1807 - protein, 232 aa, Homo Sapiens
QQLRGTRAMNDIGDYVGSNLEISWLPNLDGLIAGYARNFRPGIGGPPVNVALALEVASIDHISEANMEYTMTVFLHQSWRDSRLSYNHTNETLGLDSRFVDKLWLPDTFIVNAKSAWFHDVTVENKLIRLQPDGVILYSIRITSTVACDMDLAKYPMDEQECMLDLESYGYSSEDIVYYWSESQEHIHGLDKLQLAQFTITSYRFTTELMNFKSAGQFPRLSLHFHLRRNRG

SEQ ID NO: 1808 - protein, 368 aa, Homo Sapiens
LHLGVTPSVIRKRYNLTSQDVGSGTSNNSQACAQFLEQYFHDSDLAQFMRLFGGNFAHQASVARVVGQQGRGRAGIEASLDVQYLMSAGANISTWVYSSPGRHEGQEPFLQWLMLLSNESALPHVHTVSYGDDEDSLSSAYIQRVNTELMKAAARGLTLLFASGDSGAGCWSVSGRHEFRPTFPASSPYVTTVGGTSFQEPFLITNEIVDYISGGGFSNVFPRPSYQEEAVTKFLSSSPHLPPSSYFNASGRAYPDVAALSDGYWVVSNRVPIPWVSGTSASTPVFGGILSLINEHRILSGRPPLGFLNPRLYQQHGAGLFDVTRGCHESCLDEEVEGQGFCSGPGWDPVTGWGTPNFPALLKTLLNP

SEQ ID NO: 1809 - protein, 371 aa, Homo Sapiens
EEAGARVQQNVPSGTDTGDPQSKPLGDWAAGTMDPESSIFIEDAIKYFKEKVSTQNLLLLLTDNEAWNGFVAAAELPRNEADELRKALDNLARQMIMKDKNWHDKGQQYRNWFLKEFPRLKSELEDNIRRLRALADGVQKVHKGTTIANVVSGSLSISSGILTLVGMGLAPFTEGGSLVLLEPGMELGITAALTGITSSTMDYGKKWWTQAQAHDLVIKSLDKLKEVREFLGENISNFLSLAGNTYQLTRGIGKDIRALRRARANLQSVPHASASRPRVTEPISAESGEQVERVNEPSILEMSRGVKLTDVAPVSFFLVLDVVYLVYESKHLHEGAKSETAEELKKVAQELEEKLNILNNNYKILQADQEL

SEQ ID NO: 1810 - protein, 287 aa, Homo Sapiens
RTAELGQQELLRKAGTLQDDVRDGVAPNGSAQQLPQTIIIGVRKGGTRALLEMLSLHPDVAAAENEVHFFDWEEHYSHGLGWYLSQMPFSWPHQLTVEKTPAYFTSPKVPERVYSMNPSIRLLLILRDPSERVLSDYTQVFYNHMQKHKPYPSIEEFLVRDGRLNVDYKALNRSLYHVHMQNWLRFFPLRHIHIVDGDRLIRDPFPEIQKVERFLKLSPQINASNFYFNKTKGFYCLRDSGRDRCLHESKGRAHPQVDPKLLNKLHEYFHEPNKKFFELVGRTFDWH

SEQ ID NO: 1811 - protein, 336 aa, Homo Sapiens
YFGLTGSEPLTILPLTLEPEAAAQAHYKACDRLKLERKQRRMCRRDPGVAETLVEAVSMSALECQFQFRFERWNCTLEGRYRASLLKRGFKETAFLYAISSAGLTHALAKACSAGRMERCTCDEAPDLENREAWQWGGCGDNLKYSSKFVKEFLGRRSSKDLRARVDFHNNLVGVKVIKAGVETTCKCHGVSGSCTVRTCWRQLAPFHEVGKHLKHKYETALKVGSTTNEAAGEAGAISPPRGRASGAGGSDPLPRTPELVHLDDSPSFCLAGRFSPGTAGRRCHREKNCESICCGRGHNTQSRVVTRPCQCQVRWCCYVECRQCTQREEVYTCKG

SEQ ID NO: 1812 - protein, 380 aa, Homo Sapiens
EEGLNFPTYDGKDRVVSLSEKNFKQVLKKYDLLCLYYHEPVSSDKVTQKQFQLKEIVLELVAQVLEHKAIGFVMVDAKKEAKLAKKLGFDEEGSLYILKGDRTIEFDGEFAADVLVEFLLDLIEDPVEIISSKLEVQAFERIEDYIKLIGFFKSEDSEYYKAFEEAAEHFQPYIKFFATFDKGVAKKLSLKMNEVDFYEPFMDEPIAIPNKPYTEEELVEFVKEHQRPTLRRLRPEEMFETWEDDLNGIHIVAFAEKSDPDGYEFLEILKQVARDNTDNPDLSILWIDPDDFPLLVAYWEKTFKIDLFRPQIGVVNVTDADSVWMEIPDDDDLPTAEELEDWIEDVLSGKINTEDDDEDDDDDDNSDEEDNDDSDDDDDE

SEQ ID NO: 1813 - protein, 133 aa, Homo Sapiens
GPWANICAGKSSNEIRTCDRHGCGQYSAQRSQRPHQGVDVLCSAGSTVYAPFTGMIVGQEKPYQNKNAINNGVRISGRGFCVKMFYIKPIKYKGPIKKGEKLGTLLPLQKVYPGIQSHVHIENCDSSDPTAYL

SEQ ID NO: 1814 - protein, 71 aa, Homo Sapiens
RHGGRTVENMSIIGWFVRSFKYFYGLRFEVRDPRRLQEARPCVIVSNHQSILDMMGLMEVLPERCVQIAKR

SEQ ID NO: 1815 - protein, 107 aa, Homo Sapiens
GFTPDHHCQSPGVAELSQRCGWSPAEELNYTVPGLGPAGEAFLGQCRRYEVDWNQSALSCVDPLASLATNRSHLPLGPCQDGWVYDTPGSSIVTEFNLVCADSWKLD

SEQ ID NO: 1816 - protein, 209 aa, Homo Sapiens
PGVEGVTHYKAGDPVILYVNKVGPYHNPQETYHYYQLPVCCPEKIRHKSLSLGEVLDGDRMAESLYEIRFRENVEKRILCHMQLSSAQVEQLRQAIEELYYFEFVVDDLPIRGFVGYMEESGFLPHSHKIGLWTHLDFHLEFHGDRIIFANVSVRDVKPHSLDGLRPDEFLGLTHTYSVRWSETSVERRSDRRRGDDGGFFPRTLEIHW

SEQ ID NO: 1817 - protein, 387 aa, Homo Sapiens
WKFMGSKCSNSGIECDSSGTCINPSNWCDGVSHCPGGEDENRCVRLYGPNFILQVYSSQRKSWHPVCQDDWNENYGRAACRDMGYKNNFYSSQGIVDDSGSTSFMKLNTSAGNVDIYKKLYHSDACSSKAVVSLRCIACGVNLNSSRQSRIVGGESALPGAWPWQVSLHVQNVHVCGGSIITPEWIVTAAHCVEKPLNNPWHWTAFAGILRQSFMFYGAGYQVEKVISHPNYDSKTKNNDIALMKLQKPLTFNDLVKPVCLPNPGMMLQPEQLCWISGWGATEEKGKTSEVLNAAKVLLIETQRCNSRYVYDNLITPAMICAGFLQGNVDSCQGDSGGPLVTSKNNIWWLIGDTSWGSGCAKAYRPGVYGNVMVFTDWIYRQMRADG

SEQ ID NO: 1818 - protein, 61 aa, Homo Sapiens
MDHSHHMGMSYMDSNSTMQPSHHHPTTSASHSHGGGDSSMMMMPMTFYFGFKNVELLFSGL

SEQ ID NO: 1819 - protein, 512 aa, Homo Sapiens
EFFTSIGHMTDLIYAEKELVQSLKEYILVEEAKLSKIKSWANKMEALTSKSAADAEGYLAHPVNAYKLVKRLNTDWPALEDLVLQDSAAGFIANLSVQRQFFPTDEDEIGAAKALMRLQDTYRLDPGTISRGELPGTKYQAMLSVDDCFGMGRSAYNEGDYYHTVLWMEQVLKQLDAGEEATTTKSQVLDYLSYAVFQLGDLHRALELTRRLLSLDPSHERAGGNLRYFEQLLEEEREKTLTNQTEAELATPEGIYERPVDYLPERDVYESLCRGEGVKLTPRRQKRLFCRYHHGNRAPQLLIAPFKEEDEWDSPHIVRYYDVMSDEEIERIKEIAKPKLARATVRDPKTGVLTVASYRVSKSSWLEEDDDPVVARVNRRMQHITGLTVKTAELLQVANYGVGGQYEPHFDFSRRPFDSGLKTEGNRLATFLNYMSDVEAGGATVFPDLGAAIWPKKGTAVFWYNLLRSGEGDYRTRHAACPVLVGCKWVSNKWFHERGQEFLRPCGSTEVD

SEQ ID NO: 1820 - protein, 123 aa, Homo Sapiens
GILELAGTVGCVGPRTPIAYMKYGCFCGLGGHGQPRDAIDWCCHGHDCCYTRAEEAGCSPKTERYSWQCVNQSVLCGPAENKCQELLCKCDQEIANCLAQTEYNLKYLFYPQFLCEPDSPKCD

SEQ ID NO: 1821 - protein, 201 aa, Homo Sapiens
STEDEGEDPWYQKACKCDCQGGPNALWSAGATSLDCIPECPYHKPLGFESGEVTPDQITCSNPEQYVGWYSSWTANKARLNSQGFGCAWLSKFQDSSQWLQIDLKEIKVISGILTQGRCDIDEWMTKYSVQYRTDERLNWIYYKDQTGNNRVFYGNSDRTSTVQNLLRPPIISRFIRLIPLGWHVRIAIRMELLECVSKCA

SEQ ID NO: 1822 - protein, 273 aa, Homo Sapiens
KKGYQERDLEPQFSIITKLKGVSVTQIKELGNRLWDVADFVKPPQGENVFFLVTNFLVTPAQVQGRCPEHPSVPLANCWVDEDCPEGEGGTHSHGVKTGQCVVFNGTHRTCEIWSWCPVESGVVPSRPLLAQAQNFTLFIKNTVTFSKFNFSKSNALETWDPTYFKHCRYEPQFSPYCPVFRIGDLVAKAGGTFEDLALLGGSVGIRVHWDCDLDTGDSGCWPHYSFQLQEKSYNFRTATHWWEQPGVEARTLLKLYGIRFDILVTGQAGKFG

SEQ ID NO: 1823 - protein, 51 aa, Homo Sapiens
RVSAFIGSNIITSQNIWEGLWMNCVVQSTGQMQCKVYDSLLALPQDLQAAR

SEQ ID NO: 1824 - protein, 246 aa, Homo Sapiens
AEAALLPQNDTRLDPEAYGAPCARGSQPWQVSLFNGLSFHCAGVLVDQSWVLTAAHCGNKPLWARVGDDHLLLLQGEQLRRTTRSVVHPKYHQGSGPILPRRTDEHDLMLLKLARPVVPGPRVRALQLPYRCAQPGDQCQVAGWGTTAARRVKYNKGLTCSSITILSPKECEVFYPGVVTNNMICAGLDRGQDPCQSDSGGPLVCDETLQGILSWGVYPCGSAQHPAVYTQICKYMSWINKVIRSN

SEQ ID NO: 1825 - protein, 502 aa, Homo Sapiens
LPPPCESEIYCHGELLNQVQMAKLYQDDKQFVDMPLSIAPEQVLQTFTELSRDHNHSIPREQLQAFVHEHFQAKGQELQPWTPADWKDSPQFLQKISDAKLRAWAGQLHQLWKKLGKKMKPEVLSHPERFSLIYSEHPFIVPGGRFVEFYYCYGHVPNGGRVYYLQRSQPPLLTLMMDCYLTHTNDTAFLQENIETLALELDFWTKNRTVSVSLEGKNYLLNRYYVPYGGPRPESYSKDVELADTLPEGDREALWAELKAGAESGWDFSSRWLIGGPNPNSLSGIRTSKLVPVDLNAFLCQAEELMSNFYSRLGNDSQATKYRILRSQRLAALNTVLWDEQTGAWFDYDLEKKKKNREFYPSNLTPLWAGCFSDPGVADKALKYLEDNRILTYQYGIPTSLQKTGQQWDFPNAWAPLQDLVIRGLAKAPLRRAQEVAFQLAQNWIRTNFDVYSQKSAMYEKYDVSNGGQPGGGGEYEVQEGFGWTNGVVLMLLDRYGDRLTS

SEQ ID NO: 1826 - protein, 170 aa, Homo Sapiens
ADRERSIHDFCLVSKVVGRCRASMPRWWYNVTDGSCQLFVYGGCDGNSNNYLTKEECLKKCATVTENATGDLATSRNAADSSVPSAPRRQDSEDHSSDMFNYEEYCTANAVTGPCRASFPRWYFDVERNSCNNFIYGGCRGNKNSYRSEEACMLRCFRQQENPPLPLGSK

SEQ ID NO: 1827 - protein, 176 aa, Homo Sapiens
CGPGRGPVGRRRYARKQLVPLLYKQFVPGVPERTLGASGPAEGRVARGSERFRDLVPNYNPDIIFKDEENSGADRLMTERCKERVNALAIAVMNMWPGVRLRVTEGWDEDGHHAQDSLHYEGRALDITTSDRDRNKYGLLARLAVEAGFDWVYYESRNHVHVSVKADNSLAVRAGG

SEQ ID NO: 1828 - protein, 360 aa, Homo Sapiens
ATESVKQEDAGVRPSAGNVSTHPSLSQRPGGSTKSHPEPQTPKDSPSKSSAEAQTPEDTPNKSGAEAKTQKDSSNKSGAEAKTQKGSTSKSGSEAQTTKDSTSKSHPELQTPKDSTGKSGAEAQTPEDSPNRSGAEAKTQKDSPSKSGSEAQTTKDVPNKSGADGQTPKDGSSKSGAEDQTPKDVPNKSGAEKQTPKDGSNKSGAEEQGPIDGPSKSGAEEQTSKDSPNKVVPEQPSRKDHSKPISNPSDNKELPKADTNQLADKGKLSPHAFKTESGEETDLISPPQEEVKSSEPTEDVEPKEAEDDDTGPEEGSPPKEEKEKMSGSASSENREGTLSDSTGSEKDDLYPNGSGNGSAE

SEQ ID NO: 1829 - protein, 97 aa, Homo Sapiens
QHWSHGWYPGGKRALSSAQDPQNALRPPGRALDTAAGSPVQTAHGLPSDALAPLDDSMPWEGRTTAQWSLHRKRHLARTLLTAAREPRPAPPSSNKV

SEQ ID NO: 1830 - protein, 317 aa, Homo Sapiens
MQLPRWWELGDPCAWTGQGRGTRRMSPATTGTFLLTVYSIFSKVHSDRSVYPSAGVLFVHVLEREYFKGEFPPYPKPGEISNDPITFNTNLMGYPDRPGWLRYIQRTPYSDGVLYGSPTAENVGKPTIIEITAYNRRTFETARHNLIINIMSAEDFPLPYQAEFFIKNMNVEEMLASEVLGDFLGAVKNVWQPERLNAINITSALDRGGRVPLPINDLKEGVYVMVGADVPFSSCLREVENPQNQLRCSQEMEPVITCDKKFRTQFYIDWCKISLVDKTKQVSTYQEVIRGEGILPDGGEYKPPSDSLKSRDYYTDF

SEQ ID NO: 1831 - protein, 277 aa, Homo Sapiens
APVNGSKWTYFGPDGENSWSKKYPSCGGLLQSPIDLHSDILQYDASLTPLEFQGYNLSANKQFLLTNNGHSVKLNLPSDMHIQGLQSRYSATQLHLHWGNPNDPHGSEHTVSGQHFAAELHIVHYNSDLYPDASTASNKSEGLAVLAVLIEMGSFNPSYDKIFSHLQHVKYKGQEAFVPGFNIEELLPERTAEYYRYRGSLTTPPCNPTVLWTVFRNPVQISQEQLLALETALYCTHMDDPSPREMINNFRQVQKFDERLVYTSFSQVQVCTAAGLS

SEQ ID NO: 1832 - protein, 54 aa, Homo Sapiens
MSGTKLEDSPPCRNWSSASELNETQEPFLNPTDYDDEEFLRYLWREYLHPKEYE

SEQ ID NO: 1833 - protein, 198 aa, Homo Sapiens
YISQNDMIAILDYHNQVRGKVFPPAANMEYMVWDENLAKSAEAWAATCIWDHGPSYLLRFLGQNLSVRTGRYRSILQLVKPWYDEVKDYAFPYPQDCNPRCPMRCFGPMCTHYTQMVWATSNRIGCAIHTCQNMNVWGSVWRRAVYLVCNYAPKGNWIGEAPYKVGVPCSSCPPSYGGSCTDNLCFPGVTSNYLYWFK

SEQ ID NO: 1834 - protein, 296 aa, Homo Sapiens
KPTEKKDRVHHEPQLSDKVHNDAQSFDYDHDAFLGAEEAKTFDQLTPEESKERLGKIVSKIDGDKDGFVTVDELKDWIKFAQKRWIYEDVERQWKGHDLNEDGLVSWEEYKNATYGYVLDDPDPDDGFNYKQMMVRDERRFKMADKDGDLIATKEEFTAFLHPEEYDYMKDIVVQETMEDIDKNADGFIDLEEYIGDMYSHDGNTDEPEWVKTEREQFVEFRDKNRDGKMDKEETKDWILPSDYDHAEAEARHLVYESDQNKDGKLTKEEIVDKYDLFVGSQATDFGEALVRHDEF

SEQ ID NO: 1835 - protein, 328 aa, Homo Sapiens
SPSGVRLVGGLHRCEGRVEVEQKGQWGTVCDDGWDIKDVAVLCRELGCGAASGTPSGILYEPPAEKEQKVLIQSVSCTGTEDTLAQCEQEEVYDCSHDEDAGASCENPESSFSPVPEGVRLADGPGHCKGRVEVKHQNQWYTVCQTGWSLRAAKVVCRQLGCGRAVLTQKRCNKHAYGRKPIWLSQMSCSGREATLQDCPSGPWGKNTCNHDEDTWVECEDPFDLRLVGGDNLCSGRLEVLHKGVWGSVCDDNWGEKEDQVVCKQLGCGKSLSPSFRDRKCYGPGVGRIWLDNVRCSGEEQSLEQCQHRFWGFHDCTHQEDVAVICSG

SEQ ID NO: 1836 - protein, 63 aa, Homo Sapiens
CIGVLEQNNFSLNRRMQKARHCGHCPEEWITYSNSCYYIGKERRTWEERVCWPVLRRTLICFL

SEQ ID NO: 1837 - protein, 316 aa, Homo Sapiens
MATFVELSTKAKMPIVGLGTWKSPLGKVKEAVKVAIDAGYRHIDCAYVYQNEHEVGEAIQEKIQEKAVKREDLFIVSKLWPTFFERPLVRKAFEKTLKDLKLSYLDVYLIHWPQGFKSGDDLFPKDDKGNAIGGKATFLDAWEAMEELVDEGLVKALGVSNFSHFQIEKLLNKPGLKYKPVTNQVECHPYLTQEKLIQYCHSKGITVTAYSPLGSPDRPWAKPEDPSLLEDPKIKEIAAKHKKTAAQVLIRFHIQRNVIVIPKSVTPARIVENIQVFDFKLSDEEMATILSFNRNWRACNVLQSSHLEDYPFDAEY

SEQ ID NO: 1838 - protein, 377 aa, Homo Sapiens
AFDQKSYFYRSSFQLLNVEYNSQLNSPATQEYRTLSGRIESLITKTFKESNLRNQFIRAHVAKLRQDGSGVRADVVMKFQFTRNNNGASMKSRIESVLRQMLNNSGNLEINPSTEITSLTDQAAANWLINECGAGPDLITLSEQRILGGTEAEEGSWPWQVSLRLNNAHHCGGSLINNMWILTAAHCFRSNSNPRDWIATSGISTTFPKLRMRVRNILIHNNYKSATHENDIALVRLENSVTFTKDIHSVCLPAATQNIPPGSTAYVTGWGAQEYAGHTVPELRQGQVRIISNDVCNAPHSYNGAILSGMLCAGVPQGGVDACQGDSGGPLVQEDSRRLWFIVGIVSWGDQCGLPDKPGVYTRVTAYLDWIRQQTGI

SEQ ID NO: 1839 - protein, 160 aa, Homo Sapiens
KKKGSQGAIPPPDKAQHNDSEQTQSPQQPGSRNRGRGQGRGTAMPGEEVLESSQEALHVTERKYLKRDWCKTQPLKQTIHEEGCNSRTIINRFCYGQCNSFYIPRHIRKEEGSFQSCSFCKPKKFTTMMVTLNCPELQPPTKKKRVTRVKQCRCISIDLD

SEQ ID NO: 1840 - protein, 714 aa, Homo Sapiens
SDRPRGRDPVNPEKLLVITVATAETEGYLRFLRSAEFFNYTVRTLGLGEEWRGGDVARTVGGGQKVRWLKKEMEKYADREDMIIMFVDSYDVILAGSPTELLKKFVQSGSRLLFSAESFCWPEWGLAEQYPEVGTGKRFLNSGGFIGFATTIHQIVRQWKYKDDDDDQLFYTRLYLDPGLREKLSLNLDHKSRIFQNLNGALDEVVLKFDRNRVRIRNVAYDTLPIVVHGNGPTKLQLNYLGNYVPNGWTPEGGCGFCNQDRRTLPGGQPPPRVFLAVFVEQPTPFLPRFLQRLLLLDYPPDRVTLFLHNNEVFHEPHIADSWPQLQDHFSAVKLVGPEEALSPGEARDMAMDLCRQDPECEFYFSLDADAVLTNLQTLRILIEENRKVIAPMLSRHGKLWSNFWGALSPDEYYARSEDYVELVQRKRVGVWNVPYISQAYVIRGDTLRMELPQRDVFSGSDTDPDMAFCKSFRDKGIFLHLSNQHEFGRLLATSRYDTEHLHPDLWQIFDNPVDWKEQYIHENYSRALEGEGIVEQPCPDVYWFPLLSEQMCDELVAEMEHYGQWSGGRHEDSRLAGGYENVPTVDIHMKQVGYEDQWLQLLRTYVGPMTESLFPGYHTKARAVMNFVVRYRPDEQPSLRPHHDSSTFTLNVALNHKGLDYEGGGCRFLRYDCVISSPRKGWALLHPGRLTHYHEGLPTTWGTRYIMVSFVDP

SEQ ID NO: 1841 - protein, 60 aa, Homo Sapiens
GKLPFSRMPICEHMVESPTCSQMSNLVCGTDGLTYTNECQLCLARIKTKQDIQIMKDGKC

SEQ ID NO: 1842 - protein, 462 aa, Homo Sapiens
GKLLVVPMDGSHWFTMRSVVEKLILRGHEVVVVMPEVSWQLGRSLNCTVKTYSTSYTLEDLDREFKAFAHAQWKAQVRSIYSLLMGSYNDIFDLFFSNCRSLFKDKKLVEYLKESSFDAVFLDPFDNCGLIVAKYFSLPSVVFARGILCHYLEEGAQCPAPLSYVPRILLGFSDAMTFKERVRNHIMHLEEHLLCHRFFKNALEIASEILQTPVTEYDLYSHTSIWLLRTDFVLDYPKPVMPNMIFIGGINCHQGKPLPMEFEAYINASGEHGIVVFSLGSMVSEIPEKKAMAIADALGKIPQTVLWRYTGTRPSNLANNTILVKWLPQNDLLGHPMTRAFITHAGSHGVYESICNGVPMVMMPLFGDQMDNAKRMETKGAGVTLNVLEMTSEDLENALKAVINDKSYKENIMRLSSLHKDRPVEPLDLAVFWVEFVMRHKGAPHLRPAAHDLTWYQYHSLD

SEQ ID NO: 1843 - protein, 121 aa, Homo Sapiens
KDPKKNETGVLRKLKPVNASNANVKQCLWFAMQEYNKESEDKYVFLVVKTLQAQLQVTNLLEYLIDVEIARSDCRKPLSTNEICAIQENSKLKRKLSCSFLVGALPWNGEFTVMEKKCEDA

SEQ ID NO: 1844 - protein, 151 aa, Homo Sapiens
NAIQARSSSYSGEYGSGGGKRFSHSGNQLDGPITALRVRVNTYYIVGLQVRYGKVWSDYVGGRNGDLEEIFLHPGESVIQVSGKYKWYLKKLVFVTDKGRYLSFGKDSGTSFNAVPLHPNTVLRFISGRSGSLIDAIGLHWDVYPTSCSRC

SEQ ID NO: 1845 - protein, 376 aa, Homo Sapiens
YRLFPGEPKWKKNTLTYRISKYTPSMSSVEVDKAVEMALQAWSSAVPLSFVRINSGEADIMISFENGDHGDSYPFDGPRGTLAHAFAPGEGLGGDTHFDNAEKWTMGTNGFNLFTVAAHEFGHALGLAHSTDPSALMYPTYKYKNPYGFHLPKDDVKGIQALYGPRKVFLGKPTLPHAPHHKPSIPDLCDSSSSFDAVTMLGKELLLFKDRIFWRRQVHLRTGIRPSTITSSFPQLMSNVDAAYEVAERGTAYFFKGPHYWITRGFQMQGPPRTIYDFGFPRHVQQIDAAVYLREPQKTLFFVGDEYYSYDERKRKMEKDYPKNTEEEFSGVNGQIDAAVELNGYIYFFSGPKTYKYDTEKEDVVSVVKSSSWIGC

SEQ ID NO: 1846 - protein, 91 aa, Homo Sapiens
CQEANYGALLRELCLTQFQVDMEAVGETLWCDWGRTIRSYRELADCTWHMAEKLGCFWPNAEVDRFFLAVHGRYFRSCPISGRAVRDPPGS

SEQ ID NO: 1847 - protein, 103 aa, Homo Sapiens
QPLPTTGTPGSEGGTVKNYETAVQFCWNHYKDQMDPIEKDWCDWAMISRPYSTLRDCLEHFAELFDLGFPNPLAERIIFETHQIHFANCSLVQPTFSDPPEDV

SEQ ID NO: 1848 - protein, 95 aa, Homo Sapiens
RAGGCNETGMLERLPLCGKAFADMMGKVDVWKWCNLSEFIVYYESFTNCTEMEANVVGCYWPNPLAQGFITGIHRQFFSNCTVDRVHLEDPPDEV

SEQ ID NO: 1849 - protein, 221 aa, Homo Sapiens
LPKSVDWRKKGYVTPVKNQKQCGSCWAFSATGALEGQMFRKTGKLVSLSEQNLVDCSRPQGNQGCNGGFMARAFQYVKENGGLDSEESYPYVAVDEICKYRPENSVANDTGFTVVAPGKEKALMKAVATVGPISVAMDAGHSSFQFYKSGIYFEPDCSSKNLDHGVLVVGYGFEGANSNNSKYWLVKNSWGPEWGSNGYVKIAKDKNNHCGIATAASYPNV

SEQ ID NO: 1850 - protein, 224 aa, Homo Sapiens
QPYHGEKGISVPDHGFCQPISIPLCTDIAYNQTILPNLLGHTNQEDAGLEVHQFYPLVKVQCSPELRFFLCSMYAPVCTVLDQAIPPCRSLCERARQGCEALMNKFGFQWPERLRCENFPVHGAGEICVGQNTSDGSGGPGGGPTAYPTAPYLPDLPFTALPPGASDGRGRPAFPFSCPRQLKVPPYLGYRFLGERDCGAPCEPGRANGLMYFKEEERRFARLW

SEQ ID NO: 1851 - protein, 724 aa, Homo Sapiens
QPPHCPSVSHRAQPWPHPGQSQLFADLSREELTAVMRFLTQRLGPGLVDAAQAQPSDNCIFSVELQLPPKAAALAHLDRGSPPPAREALAIVLFGGQPQPNVSELVVGPLPHPSYMRDVTVERHGGPLPYHRRPVLRAEFTQMWRHLKEVELPKAPIFLSSTFNYNGSTLAAVHATPRGLRSGDRATWMALYHNISGVGLFLHPVGLELLLDHRALDPAHWTVQQVFYLGHYYADLGQLEREFKSGRLEVVRVPLPPPNGASSLRSRNSPGPLPPLQFSPQGSQYSVQGNLVVSSLWSFTFGHGVFSGLRIFDVRFQGERIAYEVSVQECVSIYGADSPKTMLTRYLDSSFGLGRNSRGLVRGVDCPYQATMVDIHILVGKGAVQLLPGAVCVFEEAQGLPLRRHHNYLQNHFYGGLASSALVVRSVSSVGNYDYIWDFVLYPNGALEGRVHATGYINTAFLKGGEEGLLFGNRVGERVLGTVHTHAFHFKLDLDVAGLKNWVVAEDVVFKPVAAPWNPEHWLQRPQLTRQVLGKEDLTAFSLGSPLPRYLYLASNQTNAWGHQRGYRIQIHSPLGIHIPLESDMERALSWGRYQLVVTQRKEEESQSSSIYHQNDIWTPTVTFADFINNETLLGEDLVAWVTASFLHIPHAEDIPNTVTLGNRVGFLLRPYNFFDEDPSIFSPGSVYFEKGQDAGLCSINPVACLPDLAACVPDLPPFSYHGF

SEQ ID NO: 1852 - protein, 398 aa, Homo Sapiens
RMAKKRVIVKKLPIVETLGCCSVLCSDKTGTLTANEMTVTQLVTSDGLRAEVSGVGYDGQGTVCLLPSKEVIKEFSNVSVGKLVEAGCVANNAVIRKNAVMGQPTEGALMALAMKMDLSDIKNSYIRKKEIPFSSEQKWMAVKCSLKTEDQEDIYFMKGALEEVIRYCTMYNNGGIPLPLTPQQRSFCLQEEKRMGSLGLRVLALASGPELGRLTFLGLVGIIDPPRVGVKEAVQVLSESGVSVKMITGDALETALAIGRNIGLCNGKLQAMSGEEVDSVEKGELADRVGKVSVFFRTSPKHKLKIIKALQESGAIVAMTGDGVNDAVALKSADIGIAMGQTGTDVSKEAANMILVDDDFSAIMNAVEEGKGIFYNIKNFVRFQLSTSISALSLITLS

SEQ ID NO: 1853 - protein, 471 aa, Homo Sapiens
SCGKVLVWAAEYSHWMNMKTILKELVQRGHEVTVLASSASILFDPNDASTLKFEVYPTSLTKTEFENIIMQQVKRWSDIRKDSFWLYFSQEQEILWELYDIFRNFCKDVVSNKKVMKKLQESRFDIVFADAVFPCGELLAALLNIRFVYSLRFTPGYTIERHSGGLIFPPSYIPIVMSKLSDQMTFMERVKNMIYVLYFDFWFQMSDMKKWDQFYSEVLGRPTTLFETMGKADIWLMRNSWSFQFPHPFLPNVDFVGGFHCKPAKPLPKEMEEFVQSSGENGVVVFSLGSVISNMTAERANVIATALAKIPQKVLWRFDGNKPDALGLNTRLYKWIPQNDLLGHPKTRAFITHGGANGIYEAIYHGIPMVGIPLFFDQPDNIAHMKAKGAAVRLDFNTMSSTDLLNALKTVINDPLYKENIMKLSRIQHDQPVKPLDRAVFWIEFVMPHKGAKHLRVAAHDLTWFQYHSLD

SEQ ID NO: 1854 - protein, 222 aa, Homo Sapiens
ARSRSAPMSPSDFLDKLMGRTSGYDARIRPNFKGPPVNVTCNIFINSFGSIAETTMDYRVNIFLRQKWNDPRLAYSEYPDDSLDLDPSMLDSIWKPDLFFANEKGANFHEVTTDNKLLRIFKNGNVLYSIRLTLTLSCPMDLKNFPMDVQTCIMQLESFGYTMNDLIFEWQDEAPVQVAEGLTLPQFLLKEEKDLRYCTKHYNTGKFTCIEVRFHLERQMGY

SEQ ID NO: 1855 - protein, 404 aa, Homo Sapiens
NQQTWFEGIFLSSMCPINVSASTLYGIMFDAGSTGTRIHVYTFVQKMPGQLPILEGEVFDSVKPGLSAFVDQPKQGAETVQGLLEVAKDSIPRSHWKKTPVVLKATAGLRLLPEHKAKALLFEVKEIFRKSPFLVPKGSVSIMDGSDEGILAWVTVNFLTGQLHGHRQETVGTLDLGGASTQITFLPQFEKTLEQTPRGYLTSFEMFNSTYKLYTHSYLGFGLKAARLATLGALETEGTDGHTFRSACLPRWLEAEWIFGGVKYQYGGNQEGEVGFEPCYAEVLRVVRGKLHQPEEVQRGSFYAFSYYYDRAVDTDMIDYEKGGILKVEDFERKAREVCDNLENFTSGSPFLCMDLSYITALLKDGFGFADSTVLQLTKKVNNIETGWALGATFHLLQSLGISH

SEQ ID NO: 1856 - protein, 565 aa, Homo Sapiens
MEDSDSAAKQLGLAEAAAVAAAAAVAAAAAAAAGGEAEEPVLSRDEDSEEDADSEAERETPRVTAVAVMAAEPGHMDMGAEALPGPDEAAAAAAFAEVTTVTVANVGAAADNVFTTSVANAASISGHVLSGRTALQIGDSLNTEKATLIVVHTDGSIVETTGLKGPAAPLTPGPQSPPTPLAPGQEKGGTKYNWDPSVYDSELPVRCRNISGTLYKNRLGSGGRGRCIKQGENWYSPTEFEAMAGRASSKDWKRSIRYAGRPLQCLIQDGILNPHAASCTCAACCDDMTLSGPVRLFVPYKRRKKENELPTTPVKKDSPKNITLLPATAATTFTVTPSGQITTSGALTFDRASTVEATAVISESPAQGDVFAGATVQEASVQPPCRASHPEPHYPGYQDSCQIAPFPEAALPTSHPKIVLTSLPALAVPPPTPTKAAPPALVNGLELSEPRSWLYLEEMVNSLLNTAQQLKTLFEQAKHASTYREAATNQAKIHADAERKEQSCVNCGREAMSECTGCHKVNYCSTFCQRKDWKDHQHICGQSAAVTVQADEVHVAESVMEKVTV

SEQ ID NO: 1857 - protein, 511 aa, Homo Sapiens
ALLAAELKSKSCSEVRRLYVSKGFNKNDAPLHEINGDHLKICPQGSTCCSQEMEEKYSLQSKDDFKSVVSEQCNHLQAVFASRYKKFDEFFKELLENAEKSLNDMFVKTYGHLYMQNSELFKDLFVELKRYYVVGNVNLEEMLNDFWARLLERMFRLVNSQYHFTDEYLECVSKYTEQLKPFGDVPRKLKLQVTRAFVAARTFAQGLAVAGDVVSKVSVVNPTAQCTHALLKMIYCSHCRGLVTVKPCYNYCSNIMRGCLANQGDLDFEWNNFIDAMLMVAERLEGPFNIESVMDPIDVKISDAIMNMQDNSVQVSQKVFQGCGPPKPLPAGRISRSISESAFSARFRPHHPEERPTTAAGTSLDRLVTDVKEKLKQAKKFWSSLPSNVCNDERMAAGNGNEDDCWNGKGKSRYLFAVTGNGLANQGNNPEVQVDTSKPDILILRQIMALRVMTSKMKNAYNGNDVDFFDISDESSGEGSGSGCEYQQCPSEFDYNATDHAGKSANEKADS

SEQ ID NO: 1858 - protein, 305 aa, Homo Sapiens
HIGPAPDPEDWWSYKDNLQGNFVPGPPFWGLVNAAWSLCAVGKRQSPVDVELKRVLYDPFLPPLRLSTGGEKLRGTLYNTGRHVSFLPAPRPVVNVSGGPLLYSHRLSELRLLFGARDGAGSEHQINHQGFSAEVQLIHFNQELYGNFSAASRGPNGLAILSLFVNVASTSNPFLSRLLNRDTITRISYKNDAYFLQDLSLELLFPESFGFITYQGSLSTPPCSETVTWILIDRALNITSLQMHSLRLLSQNPPSQIFQSLSGNSRPLQPLAHRALRGNRDPRHPERRCRGPNYRLHVDGVPHGR

SEQ ID NO: 1859 - protein, 317 aa, Homo Sapiens
SRVSGIPSRRHWPVPYKRFDFRPKPDPYCQAKYTFCPTGSPIPVMEGDDDIEVFRLQAPVWEFKYGDLLGHLKIMHDAIGFRSTLTGKNYTMEWYELFQLGNCTFPHLRPEMDAPFWCNQGAACFFEGIDDVHWKENGTLVQVATISGNMFNQMAKWVKQDNETGIYYETWNVKASPEKGAETWFDSYDCSKFVLRTFNKLAEFGAEFKNIETNYTRIFLYSGEPTYLGNETSVFGPTGNKTLGLAIKRFYYPFKPHLPTKEFLLSLLQIFDAVIVHKQFYLFYNFEYWFLPMKFPFIKITYEEIPLPIRNKTLSGL

SEQ ID NO: 1860 - protein, 60 aa, Homo Sapiens
VTTSTNDWVVTCGYTIPTCRKLDELGSKGLWADCVMATGLYHCKPLVDILILPGYVQACR

SEQ ID NO: 1861 - protein, 77 aa, Homo Sapiens
DSGCKLLEDMVEKTINSDISIPEYKELLQEFIDSDAAAEAMGKFKQCFLNQSHRTLKNFGLMMHTVYDSIWCNMKSN

SEQ ID NO: 1862 - protein, 290 aa, Homo Sapiens
RFSQSFREVAGRFLALEASTHLLVFGMEQRLPPNSELVQAVLRLFQEPVPKAALHRHGRLSPRSARARVTVEWLRVRDDGSNRTSLIDSRLVSVHESGWKAFDVTEAVNFWQQLSRPRQPLLLQVSVQREHLGPLASGAHKLVRFASQGAPAGLGEPQLELHTLDLGDYGAQGDCDPEAPMTEGTRCCRQEMYIDLQGMKWAENWVLEPPGFLAYECVGTCRQPPEALAFKWPFLGPRQCIASETDSLPMIVSIKEGGRTRPQVVSLPNMRVQKCSCASDGALVPRRLQP

SEQ ID NO: 1863 - protein, 189 aa, Homo Sapiens
RGGRDHGDWDEASRLPPLPPREDAARVARFVTHVSDWGALATISTLEAVRGRPFADVLSLSDGPPGAGSGVPYFYLSPLQLSVSNLQENPYATLTMTLAQTNFCKKHGFDPQSPLCVHIMLSGTVTKVNETEMDIAKHSLFIRHPEMKTWPSSHNWFFAKLNITNIWVLDYFGGPKIVTPEEYYNVTVQ

SEQ ID NO: 1864 - protein, 265 aa, Homo Sapiens
QEHPSCPGPRELEASKVVLLPSCPGAPGSPGEKGAPGPQGPPGPPGKMGPKGEPGPRNCRELLSQGATLSGWYHLCLPEGRALPVFCDMDTEGGGWLVFQRRQDGSVDFFRSWSSYRAGFGNQESEFWLGNENLHQLTLQGNWELRVELEDFNGNRTFAHYATFRLLGEVDHYQLALGKFSEGTAGDSLSLHSGRPFTTYDADHDSSNSNCAVIVHGAWWYASCYRSNLNGRYAVSEAAAHKYGIDWASGRGVGHPYRRVRMMLR

SEQ ID NO: 1865 - protein, 78 aa, Homo Sapiens
MPANRLSCYRKILKDHNCHNLPEGVADLTQIDVNVQDHFWDGKGCEMICYCNFSELLCCPKDVFFGPKISFVIPCNNQ

SEQ ID NO: 1866 - protein, 200 aa, Homo Sapiens
SPKQEKMKMDCHKDEKGTIYDYEAIALNKNEYVSFKQYVGKHILFVNVATYCGLTAQYPELNALQEELKPYGLVVLGFPCNQFGKQEPGDNKEILPGLKYVRPGGGFVPSFQLFEKGDVNGEKEQKVFSFLKHSCPHPSEILGTFKSISWDPVKVHDIRWNFEKFLVGPDGIPVMRWSHRATVSSVKTDILAYLKQFKTK

SEQ ID NO: 1867 - protein, 375 aa, Homo Sapiens
QYERYSFRSFPRDELMPLESAYRHALDKYSGEHWAESVGYLEISLRLHRLLRDSEAFCHRNCSAAPQPEPAAGLASYPELRLFGGLLRRAHCLKRCKQGLPAFRQSQPSRDVLADFQRREPYKFLQFAYFKANNLPKAIAAAHTFLLKHPDDEMMKRNMAYYKSLPGAEDYIKDLETKSYESLFIRAVRAYNGENWRTSITDMELALPDFFKAFYECLAACEGSREIKDFKDFYLSIADHYVEVLECKIQCEENLTPVIGGYPVEKFVATMYHYLQFAYYKLNDLKNAAPCAVSYLLFDQNDKVMQQNLVYYQYHRDTWGLSDEHFQPRPEAVQFFNVTTLQKELYDFAKENIMDDDEGEVVEYVDDLLELEETS

SEQ ID NO: 1868 - protein, 286 aa, Homo Sapiens
NEFSILKSPGSVVFRNGNWPIPGERIPDVAALSMGFSVKEDLSWPGLAVGNLFHRPRATVMVMVKGVNKLALPPGSVISYPLENAVPFSLDSVANSIHSLFSEETPVVLQLAPSEERVYMVGKANSVFEDLSVTLRQLRNRLFQENSVLSSLPLNSLSRNNEVDLLFLSELQVLHDISSLLSRHKHLAKDHSPDLYSLELAGLDEIGKRYGEDSEQFRDASKILVDALQKFADDMYSLYGGNAVVELVTVKSFDTSLIRKTRTILEAKQAKNPASPYNLAYKYNFE

SEQ ID NO: 1869 - protein, 471 aa, Homo Sapiens
GKVLVWPTEYSHWINMKTILEELVQRGHEVIVLTSSASILVNASKSSAIKLEVYPTSLTKNDLEDFFMKMFDRWTYSISKNTFWSYFSQLQELCWEYSDYNIKLCEDAVLNKKLMRKLQESKFDVLLADAVNPCGELLAELLNIPFLYSLRFSVGYTVEKNGGGFLFPPSYVPVVMSELSDQMIFMERIKNMIYMLYFDFWFQAYDLKKWDQFYSEVLGRPTTLFETMGKAEMWLIRTYWDFEFPRPFLPNVDFVGGLHCKPAKPLPKEMEEFVQSSGENGIVVFSLGSMISNMSEESANMIASALAQIPQKVLWRFDGKKPNTLGSNTRLYKWLPQNDLLGHPKTKAFITHGGTNGIYEAIYHGIPMVGIPLFADQHDNIAHMKAKGAALSVDIRTMSSRDLLNALKSVINDPIYKENIMKLSRIHHDQPVKPLDRAVFWIEFVMRHKGAKHLRVAAHNLTWIQYHSLDV

SEQ ID NO: 1870 - protein, 387 aa, Homo Sapiens
SRCSAQKNTEFAVDLYQEVSLSHKDNIIFSPLGITLVLEMVQLGAKGKAQQQIRQTLKQQETSAGEEFFVLKSFFSAISEKKQEFTFNLANALYLQEGFTVKEQYLHGNKEFFQSAIKLVDFQDAKACAEMISTWVERKTDGKIKDMFSGEEFGPLTRLVLVNAIYFKGDWKQKFRKEDTQLINFTKKNGSTVKIPMMKALLRTKYGYFSESSLNYQVLELSYKGDEFSLIIILPAEGMDIEEVEKLITAQQILKWLSEMQEEEVEISLPRFKVEQKVDFKDVLYSLNITEIFSGGCDLSGITDSSEVYVSQVTQKVFFEINEDGSEAATSTGIHIPVIMSLAQSQFIANHPFLFIMKHNPTESILFMGRVTNPDTQEIKGRDLDSL

SEQ ID NO: 1871 - protein, 129 aa, Homo Sapiens
SLISRCDLAQVLQLEDLDGFEGYSLSDWLCLAFVESKFNISKINENADGSFDYGLFQINSHYWCNDYKSYSENLCHVDCQDLLNPNLLAGIHCAKRIVSGARGMNNWVEWRLHCSGRPLFYWLTGCRLR

SEQ ID NO: 1872 - protein, 276 aa, Homo Sapiens
MDSSREPTLGRLDAAGFWQVWQRFDADEKGYIEEKELDAFFLHMLMKLGTDDTVMKANLHKVKQQFMTTQDASKDGRIRMKELAGMFLSEDENFLLLFRRENPLDSSVEFMQIWRKYDADSSGFISAAELRNFLRDLFLHHKKAISEAKLEEYTGTMMKIFDRNKDGRLDLNDLARILALQENFLLQFKMDACSTEERKRDFEKIFAYYDVSKTGALEGPEVDGFVKDMMELVQPSISGVDLDKFREILLRHCDVNKDGKIQKSELALCLGLKINP

SEQ ID NO: 1873 - protein, 278 aa, Homo Sapiens
TDATNPPEGPQDRSSQQKGRLSLQNTAEIQHCLVNAGDVGCGVFECFENNSCEIRGLHGICMTFLHNAGKFDAQGKSFIKDALKCKAHALRHRFGCISRKCPAIREMVSQLQRECYLKHDLCAAAQENTRVIVEMIHFKDLLLHEPYVDLVNLLLTCGEEVKEAITHSVQVQCEQNWGSLCSILSFCTSAIQKPPTAPPERQPQVDRTKLSRAHHGEAGHHLPEPSSRETGRGAKGERGSKSHPNAHARGRVGGLGAQGPSGSSEWEDEQSEYSDIRR

SEQ ID NO: 1874 - protein, 227 aa, Homo Sapiens
QLCPTPCTCPWPPPRCPLGVPLVLDGCGCCRVCARRLGEPCDQLHVCDASQGLVCQPGAGPGGRGALCLLAEDDSSCEVNGRLYREGETFQPHCSIRCRCEDGGFTCVPLCSEDVRLPSWDCPHPRRVEVLGKCCPEWVCGQGGGLGTQPLPAQGPQFSGLVSSLPPGVPCPEWSTAWGPCSTTCGLGMATRVSNQNRFCRLETQRRLCLSRPCPPSRGRSPQNSAF

SEQ ID NO: 1875 - protein, 101 aa, Homo Sapiens
LIATPEHRCRVPDAANLSSAWRNHTVPLRLRDGREVPHSCRRYRLATIANFSALGLEPGRDVDLGQLEQESCPDGWEFSQDVYLSTIVTEWNLVCEDDWKA

SEQ ID NO: 1876 - protein, 75 aa, Homo Sapiens
EAPVQEEKLSASTSNLPCWLVEEFVVAEECSPCSNFRAKTTPECGPTGYVEKITCSSSKRNEFKSCRSALMEQRL

SEQ ID NO: 1877 - protein, 235 aa, Homo Sapiens
TLNSVLNSNAIKNLPPPLGGAAGHPGSAVSAAPGILYPGGNKYQTIDNYQPYPCAEDEECGTDEYCASPTRGGDAGVQICLACRKRRKRCMRHAMCCPGNYCKNGICVSSDQNHFRGEIEETITESFGNDHSTLDGYSRRTTLSSKMYHTKGQEGSVCLRSSDCASGLCCARHFWSKICKPVLKEGQVCTKHRRKGSHGLEIFQRCYCGEGLSCRIQKDHHQASNSSRLHTCQRH

SEQ ID NO: 1878 - protein, 104 aa, Homo Sapiens
FFIGCSSHQIAGITHQTSAHPGLELSPSCMEACSCPLDGFNPVCDPSTRVEYITPCHAGCSSWVVQDALDNSQVFYTNCSCVVEGNPVLAGSCDSTCSHLVVPF

SEQ ID NO: 1879 - protein, 821 aa, Homo Sapiens
ARVNKHKPWLEPTYHGIVTENDNTVLLDPPLIALDKDAPLRFAGEICGFKIHGQNVPFDAVVVDKSTGEGVIRSKEKLDCELQKDYSFTIQAYDCGKGPDGTNVKKSHKATVHIQVNDVNEYAPVFKEKSYKATVIEGKQYDSILRVEAVDADCSPQFSQICSYEIITPDVPFTVDKDGYIKNTEKLNYGKEHQYKLTVTAYDCGKKRATEDVLVKISIKPTCTPGWQGWNNRIEYEPGTGALAVFPNIHLETCDEPVASVQATVELETSHIGKGCDRDTYSEKSLHRLCGAAAGTAELLPSPSGSLNWTMGLPTDNGHDSDQVFEFNGTQAVRIPDGVVSVSPKEPFTISVWMRHGPFGRKKETILCSSDKTDMNRHHYSLYVHGCRLIFLFRQDPSEEKKYRPAEFHWKLNQVCDEEWHHYVLNVEFPSVTLYADGTSHEPFSVTEDYPLHPSKIETQLVVGACWQEFSGVENDNETEPVTVACAGGDLHMTQFFRGNLAGLTLRSGKLADKKVIDCLYTCKEGLDLQVLEDSGRGVQIQAHRSQLVLTLEGEDLGELDKAMQHISYLNSRQFPTPGIRRLKITSTIKCFNEATCISVPPVDGYVMVLQPEEPKISLSGVHHFARAASEFESSEGVFLFPELRIISTITREVEPEGDGAEDPTVQESLVSEEIVHDLDTCEVTVEGEELNHEQESLEVDMARLQQKGIEVSSSELGMTFTGVDTMASYEEVLHLLRYRNWHARSLLDRKFKLICSELNGRYISNEFKVEVNVIHTANPMEHANHMAAQPQFVHPEHRSFVDLSGHNLANPHPFAVVHST

SEQ ID NO: 1880 - protein, 242 aa, Homo Sapiens
KEVVHATEGLDWEDKDAPGTLVGNVVHSRIISPLRLFVKQSPVPKPGPMAYADSMENFWDWLANITEIQEPLARTKRRPIVKTGKFKKMFGWGDFHSNIKTVKLNLLITGKIVDHGNGTFRVYFRHNSTGLGNVSVSLVPPSKVVEFEVSPQSTLETKESKSFNCRIEYEKTDRAKKTALCNFDPSKICYQEQTQSHVSWLCSKPFKVICIYIAFYSVDYKLVQKVCPDYNYHSETPYLSSG

SEQ ID NO: 1881 - protein, 230 aa, Homo Sapiens
QDDGPPGSEDPERDDHEGQPRPRVPRKRGHISPKSRPMANSTLLGLLAPPGEAWGILGQPPNRPNHSPPPSAKVKKIFGWGDFYSNIKTVALNLLVTGKIVDHGNGTFSVHFQHNATGQGNISISLVPPSKAVEFHQEQQIFIEAKASKIFNCRMGWEKVERGRRTSLCTHDPAKICSRDHAQSSATWSCSQPFKVVCVYIAFYSTDYRLVQKVCPDYNYHSDTPYYPSG

SEQ ID NO: 1882 - protein, 285 aa, Homo Sapiens
QIPESGRPQYLGLRPAAAGAGAPGQQLPEPRSSDGLGVGRAWSWAWPTNHTGALARAGAAGALPAQRTKRKPSIKAARAKKIFGWGDFYFRVHTLKFSLLVTGKIVDHVNGTFSVYFRHNSSSLGNLSVSIVPPSKRVEFGGVWLPGPVPHPLQSTLALEGVLPGLGPPLGMAAAAAGPGLGGSLGGALAGPLGGALGVPGAKESRAFNCHVEYEKTNRARKHRPCLYDPSQVCFTEHTQSQAAWLCAKPFKVICIFVSFLSFDYKLVQKVCPDYNFQSEHPYFG

SEQ ID NO: 1883 - protein, 217 aa, Homo Sapiens
TDTHHPQDSALYHLSKQLLQKYHKEVRPVYNWTKATTVYLDLFVHAILDVDAENQILKTSVWYQEVWNDEFLSWNSSMFDEIREISLPLSAIWAPDIIINEFVDIERYPDLPYVYVNSSGTIENYKPIQVVSACSLETYAFPFDVQNCSLTFKSILHTVEDVDLAFLRSPEDIQHDKKAFLNDSEWELLSVSSTYSILQSSAGGFAQIQFNVVMRRH

SEQ ID NO: 1884 - protein, 546 aa, Homo Sapiens
APVAGLGSDAELQIERRFVPDECPRTVRSGDFVRYHYVGTFPDGQKFDSSYDRDSTFNVFVGKGQLITGMDQALVGMCVNERRFVKIPPKLAYGNEGVSGVIPPNSVLHFDVLLMDIWNSEDQVQIHTYFKPPSCPRTIQVSDFVRYHYNGTFLDGTLFDSSHNRMKTYDTYVGIGWLIPGMDKGLLGMCVGEKRIITIPPFLAYGEDGDGKDIPGQASLVFDVALLDLHNPKDSISIENKVVPENCERISQSGDFLRYHYNGTLLDGTLFDSSYSRNRTFDTYIGQGYVIPGMDEGLLGVCIGEKRRIVVPPHLGYGEEGRGNIPGSAVLVFDIHVIDFHNPSDSISITSHYKPPDCSVLSKKGDYLKYHYNASLLDGTLLDSTWNLGKTYNIVLGSGQVVLGMDMGLREMCVGEKRTVIIPPHLGYGEAGVDGEVPGSAVLVFDIELLELVAGLPEGYMFIWNGEVSPNLFEEIDKDGNGEVLLEEFSEYIHAQVASGKGKLAPGFDAELIVKNMFTNQDRNGDGKVTAEEFKLKDQEAKHDEL

SEQ ID NO: 1885 - protein, 331 aa, Homo Sapiens
TGPLDTTPEGRPGEVSDAPQRKQFCHWPCKCPQQKPRCPPGVSLVRDGCGCCKICAKQPGEICNEADLCDPHKGLYCDYSVDRPRYETGVCAYLVAVGCEFNQVHYHNGQVFQPNPLFSCLCVSGAIGCTPLFIPKLAGSHCSGAKGGKKSDQSNCSLEPLLQQLSTSYKTMPAYRNLPLIWKKKCLVQATKWTPCSRTCGMGISNRVTNENSNCEMRKEKRLCYIQPCDSNILKTIKIPKGKTCQPTFQLSKAEKFVFSGCSSTQSYKPTFCGICLDKRCCIPNKSKMITIQFDCPNEGSFKWKMLWITSCVCQRNCREPGDIFSELKIL

SEQ ID NO: 1886 - protein, 129 aa, Homo Sapiens
VEVATHYLEIITQLIVESFHFKNGEDAPDLLKVITKPFTKLIVQLDKKVISQIAMNDEKAKNKSLVKIWCKTFTNKTQINVTVPSTANCTSPSLCWTDGIQNWTMKNVTYKENIAKCQHIFVNFHLPDL

SEQ ID NO: 1887 - protein, 188 aa, Homo Sapiens
MFHQIWAALLYFYGIILNSIYQCPEHSQLTTLGVDGKEFPEVHLGQWYFIAGAAPTKEELATFDPVDNIVFNMAAGSAPMQLHLRATIRMKDGLCVPRKWIYHLTEGSTDLRTEGRPDMKTELFSSSCPGGIMLNETGQGYQRFLLYNRSPHPPEKCVEEFKSLTSCLDSKAFLLTPRNQEACELSNN

SEQ ID NO: 1888 - protein, 53 aa, Homo Sapiens
QWQMSSYAGDNIITAQAMYKGLWMDCVTQSTGMMSCKMYDSVLALSAALQATR

SEQ ID NO: 1889 - protein, 53 aa, Homo Sapiens
LWKVTAFIGNSIVVAQVVWEGLWMSCVVQSTGQMQCKVYDSLLALPQDLQAAR

SEQ ID NO: 1890 - protein, 470 aa, Homo Sapiens
QDTFTAAVYEHAAILPNATLTPVSREEALALMNRNLDILEGAITSAADQGAHIIVTPEDAIYGWNFNRDSLYPYLEDIPDPEVNWIPCNNRNRFGQTPVQERLSCLAKNNSIYVVANIGDKKPCDTSDPQCPPDGRYQYNTDVVFDSQGKLVARYHKQNLFMGENQFNVPKEPEIVTFNTTFGSFGIFTCFDILFHDPAVTLVKDFHVDTIVFPTAWMNVLPHLSAVEFHSAWAMGMRVNFLASNIHYPSKKMTGSGIYAPNSSRAFHYDMKTEEGKLLLSQLDSHPSHSAVVNWTSYASSIEALSSGNKEFKGTVFFDEFTFVKLTGVAGNYTVCQKDLCCHLSYKMSENIPNEVYALGAFDGLHTVEGRYYLQICTLLKCKTTNLNTCGDSAETASTRFEMFSLSGTFGTQYVFPEVLLSENQLAPGEFQVSTDGRLFSLKPTSGPVLTVTLFGRLYEKDWASNASSG

SEQ ID NO: 1891 - protein, 471 aa, Homo Sapiens
QDSFIAAVYEHAVILPNKTETPVSQEDALNLMNENIDILETAIKQAAEQGARIIVTPEDALYGWKFTRETVFPYLEDIPDPQVNWIPCQDPHRFGHTPVQARLSCLAKDNSIYVLANLGDKKPCNSRDSTCPPNGYFQYNTNVVYNTEGKLVARYHKYHLYSEPQFNVPEKPELVTFNTAFGRFGIFTCFDIFFYDPGVTLVKDFHVDTILFPTAWMNVLPLLTAIEFHSAWAMGMGVNLLVANTHHVSLNMTGSGIYAPNGPKVYHYDMKTELGKLLLSEVDSHPLSSLAYPTAVNWNAYATTIKPFPVQKNTFRGFISRDGFNFTELFENAGNLTVCQKELCCHLSYRMLQKEENEVYVLGAFTGLHGRRRREYWQVCTMLKCKTTNLTTCGRPVETASTRFEMFSLSGTFGTEYVFPEVLLTEIHLSPGKFEVLKDGRLVNKNGSSGPILTVSLFGRWYTKDSLYSSC

SEQ ID NO: 1892 - protein, 53 aa, Homo Sapiens
HWRRTAHVGTNILTAVSYLKGLWMECVWHSTGIYQCQIYRSLLALPQDLQAAR

SEQ ID NO: 1893 - protein, 477 aa, Homo Sapiens
ASVPLAASPARALPGGADNASVASGAAASPGPQRSLSALHGAGGSAGPPALPGAPAASAHPLPPGPLFSRFLCTPLAAACPSGAQQGDAAGAAPGEREELLLLQSTAEQLRQTALQQEARIRADQDTIRELTGKLGRCESGLPRGLQGAGPRRDTMADGPWDSPALILELEDAVRALRDRIDRLEQELPARVNLSAAPAPVSAVPTGLHSKMDQLEGQLLAQVLALEKERVALSHSSRRQRQEVEKELDVLQGRVAELEHGSSAYSPPDAFKISIPIRNNYMYARVRKALPELYAFTACMWLRSRSSGTGQGTPFSYSVPGQANEIVLLEAGHEPMELLINDKVAQLPLSLKDNGWHHICIAWTTRDGLWSAYQDGELQGSGENLAAWHPIKPHGILILGQEQDTLGGRFDATQAFVGDIAQFNLWDHALTPAQVLGIANCTAPLLGNVLPWEDKLVEAFGGATKAAFDVCKGRAKA

SEQ ID NO: 1894 - protein, 95 aa, Homo Sapiens
AVPMDSGPSCLAVPNATGQTGLPGDSGLLQDSSLPPIPRTNEDQREPILSTAKKTKPHPRSGDPSAPPRLALSSALPGPPLPARGHALLRWTALL

SEQ ID NO: 1895 - protein, 53 aa, Homo Sapiens
NSRDLLGCLAQEHNISASQVNACHVAESAVNYSLGDEQGFCGSPWPNCNFPEY

SEQ ID NO: 1896 - protein, 142 aa, Homo Sapiens
GGGGKAWPTHVVCSDSGLEVLYQSCDPLQDFGFSVEKCSKQLKSNINIRFGIILREDIKELFLDLALMSQGSSVLNFSYPICEAALPKFSFCGRRKGEQIYYAGPVNNPEFTIPQGEYQVLLELYTEKRSTVACANATIMCS

SEQ ID NO: 1897 - protein, 250 aa, Homo Sapiens
TRHQDGRQNQSSLSPVLLPRNQRELPTGNHEEAEEKPDLFVAVPHLVGTSPAGEGQRQREKMLSRFGRFWKKPEREMHPSRDSDSEPFPPGTQSLIQPIDGMKMEKSPLREEAKKFWHHFMFRKTPASQGVILPIKSHEVHWETCRTVPFSQTITHEGCEKVVVQNNLCFGKCGSVHFPGAAQHSHTSCSHCLPAKFTTMHLPLNCTELSSVIKVVMLVEECQCKVKTEHEDGHILHAGSQDSFIPGVSA

SEQ ID NO: 1898 - protein, 53 aa, Homo Sapiens
QWRIYSYAGDNIVTAQAMYEGLWMSCVSQSTGQIQCKVFDSLLNLSSTLQATR

SEQ ID NO: 1899 - protein, 146 aa, Homo Sapiens
HNGLGKGFGDHIHWRTLEDGKKEAAASGLPLMVIIHKSWCGACKALKPKFAESTEISELSHNFVMVNLEDEEEPKDEDFSPDGGYIPRILFLDPSGKVHPEIINENGNPSYKYFYVSAEQVVQGMKEAQERLTGDAFRKKHLEDEL

SEQ ID NO: 1900 - protein, 434 aa, Homo Sapiens
QTLFQNPEEGWQLYTSAQAPDGKCICTAVIPAQSTCSRDGRSRELRQLMEKVQNVSQSMEVLELRTYRDLQYVRGMETLMRSLDARLRAADGSLSAKSFQELKDRMTELLPLSSVLEQYKADTRTIVRLREEVRNLSGSLAAIQEEMGAYGYEDLQQRVMALEARLHACAQKLGCGKLTGVSNPITVRAMGSRFGSWMTDTMAPSADSRVWYMDGYYKGRRVLEFRTLGDFIKGQNFIQHLLPQPWAGTGHVVYNGSLFYNKYQSNVVVKYHFRSRSVLVQRSLPGAGYNNTFPYSWGGFSDMDFMVDESGLWAVYTTNQNAGNIVVSRLDPHTLEVMRSWDTGYPKRSAGEAFMICGVLYVTNSHLAGAKVYFAYFTNTSSYEYTDVPFHNQYSHISMLDYNPRERALYTWNNGHQVLYNVTLFHVISTSGDP

SEQ ID NO: 1901 - protein, 112 aa, Homo Sapiens
PGLTDWLFPRRCPKIREECEFQERDVCTKDRQCQDNKKCCVFSCGKKCLDLKQDVCEMPKETGPCLAYFLHWWYDKKDNTCSMFVYGGCQGNNNNFQSKANCLNTCKNKRFP

SEQ ID NO: 1902 - protein, 69 aa, Homo Sapiens
VVCQALGSEITGFLLAGKPVFKFQLAKFKAPLEAVAAKMEVKKCVDTMAYEKRVLITKTLGKIAEKCDR

SEQ ID NO: 1903 - protein, 69 aa, Homo Sapiens
EFCPALVSELLDFFFISEPLFKLSLAKFDAPPEAVAAKLGVKRCTDQMSLQKRSLIAEVLVKILKKCSV

SEQ ID NO: 1904 - protein, 155 aa, Homo Sapiens
RDTTVKPGAKKDTKDSRPKLPQTLSRGWGDQLIWTQTYEEALYKSKTSNKPLMIIHHLDECPHSQALKKVFAENKEIQKLAEQFVLLNLVYETTDKHLSPDGQYVPRIMFVDPSLTVRADITGRYSNRLYAYEPADTALLLDNMKKALKLLKTEL

SEQ ID NO: 1905 - protein, 353 aa, Homo Sapiens
AAAQEADGARSAVVAAGGGSSGQVTSNGSIGRDPPAETQPQNPPAQPAPNAWQVIKGVLFRIFIIWAISSWFRRGPAPQDQAGPGGAPRVASRNLFPKDTLMNLHVYISEHEHFTDFNATSALFWEQHDLVYGDWTSGENSDGCYEHFAELDIPQSVQQNGSIYIHVYFTKSGFHPDPRQKALYRRLATVHMSRMINKYKRRRFQKTKNLLTGETEADPEMIKRAEDYGPVEVISHWHPNITINIVDDHTPWVKGSVPPPLDQYVKFDAVSGDYYPIIYFNDYWNLQKDYYPINESLASLPLRVSFCPLSLWRWQLYAAQSTKSPWNFLGDELYEQSDEEQDSVKVALLETNP

SEQ ID NO: 1906 - protein, 357 aa, Homo Sapiens
KPIFVPLSNYRDVQYFGEIGLGTPPQNFTVAFDTGSSNLWVPSRRCHFFSVPCWLHHRFDPKASSSFQANGTKFAIQYGTGRVDGILSEDKLTIGGIKGASVIFGEALWEPSLVFAFAHFDGILGLGFPILSVEGVRPPMDVLVEQGLLDKPVFSFYLNRDPEEPDGGELVLGGSDPAHYIPPLTFVPVTVPAYWQIHMERVKVGPGLTLCAKGCAAILDTGTSLITGPTEEIRALHAAIGGIPLLAGEYIILCSEIPKLPAVSFLLGGVWFNLTAHDYVIQTTRNGVRLCLSGFQALDVPPPAGPFWILGDVFLGTYVAVFDRGDMKSSARVGLARARTRGADLGWGETAQAQFPG

SEQ ID NO: 1907 - protein, 330 aa, Homo Sapiens
IKWLALSKTPSALALNQTQHCKQLEGLVSAQVQLCRSNLELMHTVVHAAREVMKACRRAFADMRWNCSSIELAPNYLLDLERGTRESAFVYALSAAAISHAIARACTSGDLPGCSCGPVPGEPPGPGNRWGGCADNLSYGLLMGAKFSDAPMKVKKTGSQANKLMRLHNSEVGRQALRASLEMKCKCHGVSGSCSIRTCWKGLQELQDVAADLKTRYLSATKVVHRPMGTRKHLVPKDLDIRPVKDSELVYLQSSPDFSMKNEKVGSHGTQDRQCNKTSNGSDSCDLMCCGRGYNPYTDRVVERCHCKYHWCCYVTCRRCERTVERYVCK

SEQ ID NO: 1908 - protein, 1046 aa, Homo Sapiens
KEKHYYIGIIETTWDYASDHGEKKLISVDTEHSNIYLQNGPDRIGRLYKKALYLQYTDETFRTTIEKPVWLGFLGPIIKAETGDKVYVHLKNLASRPYTFHSHGITYYKEHEGAIYPDNTTDFQRADDKVYPGEQYTYMLLATEEQSPGEGDGNCVTRIYHSHIDAPKDIASGLIGPLIICKKDSLDKEKEKHIDREFVVMFSVVDENFSWYLEDNIKTYCSEPEKVDKDNEDFQESNRMYSVNGYTFGSLPGLSMCAEDRVKWYLFGMGNEVDVHAAFFHGQALTNKNYRIDTINLFPATLFDAYMVAQNPGEWMLSCQNLNHLKAGLQAFFQVQECNKSSSKDNIRGKHVRHYYIAAEEIIWNYAPSGIDIFTKENLTAPGSDSAVFFEQGTTRIGGSYKKLVYREYTDASFTNRKERGPEEEHLGILGPVIWAEVGDTIRVTFHNKGAYPLSIEPIGVRFNKNNEGTYYSPNYNPQSRSVPPSASHVAPTETFTYEWTVPKEVGPTNADPVCLAKMYYSAVDPTKDIFTGLIGPMKICKKGSLHANGRQKDVDKEFYLFPTVFDENESLLLEDNIRMFTTAPDQVDKEDEDFQESNKMHSMNGFMYGNQPGLTMCKGDSVVWYLFSAGNEADVHGIYFSGNTYLWRGERRDTANLFPQTSLTLHMWPDTEGTFNVECLTTDHYTGGMKQKYTVNQCRRQSEDSTFYLGERTYYIAAVEVEWDYSPQREWEKELHHLQEQNVSNAFLDKGEFYIGSKYKKVVYRQYTDSTFRVPVERKAEEEHLGILGPQLHADVGDKVKIIFKNMATRPYSIHAHGVQTESSTVTPTLPGETLTYVWKIPERSGAGTEDSACIPWAYYSTVDQVKDLYSGLIGPLIVCRRPYLKVFNPRRKLEFALLFLVFDENESWYLDDNIKTYSDHPEKVNKDDEEFIESNKMHAINGRMFGNLQGLTMHVGDEVNWYLMGMGNEIDLHTVHFHGHSFQYKHRGVYSSDVFDIFPGTYQTLEMFPRTPGIWLLHCHVTDHIHAGMETTYTVLQNEDTKSG

SEQ ID NO: 1909 - protein, 123 aa, Homo Sapiens
KQFTKCELSQLLKDIDGYGGIALPELICTMFHTSGYDTQAIVENNESTEYGLFQISNKLWCKSSQVPQSRNICDISCDKFLDDDITDDIMCAKKILDIKGIDYWLAHKALCTEKLEQWLCEKL

SEQ ID NO: 1910 - protein, 579 aa, Homo Sapiens
ANTFLEEVRKGNLERECVEETCSYEEAFEALESSTATDVFWAKYTACETARTPRDKLAACLEGNCAEGLGTNYRGHVNITRSGIECQLWRSRYPHKPEINSTTHPGADLQENFCRNPDSSTTGPWCYTTDPTVRRQECSIPVCGQDQVTVAMTPRSEGSSVNLSPPLEQCVPDRGQQYQGRLAVTTHGLPCLAWASAQAKALSKHQDFNSAVQLVENFCRNPDGDEEGAWCYVAGKPGDFGYCDLNYCEEAVEEETGDGLDEDSDRAIEGRTATSEYQTFFNPRTFGSGEADCGLRPLFEKKSLEDKTERELLESYIDGRIVEGSDAEIGMSPWQVMLFRKSPQELLCGASLISDRWVLTAAHCLLYPPWDKNFTENDLLVRIGKHSRTRYERNIEKISMLEKIYIHPRYNWRENLDRDIALMKLKKPVAFSDYIHPVCLPDRETAASLLQAGYKGRVTGWGNLKETWTANVGKGQPSVLQVVNLPIVERPVCKDSTRIRITDNMFCAGYKPDEGKRGDACEGDSGGPFVMKSPFNNRWYQMGIVSWGEGCDRDGKYGFYTHVFRLKKWIQKVIDQFGE

SEQ ID NO: 1911 - protein, 234 aa, Homo Sapiens
TPWSLAWPQGSCSLEGVEIKGGSFRLLQEGQALEYVCPSGFYPYPVQTRTCRSTGSWSTLKTQDQKTVRKAECRAIHCPRPHDFENGEYWPRSPYYNVSDEISFHCYDGYTLRGSANRTCQVNGRWSGQTAICDNGAGYCSNPGIPIGTRKVGSQYRLEDSVTYHCSRGLTLRGSQRRTCQEGGSWSGTEPSCQDSFMYDTPQEVAEAFLSSLTETIEGVDAEDGHGPGEQQKR

SEQ ID NO: 1912 - protein, 340 aa, Homo Sapiens
LTLGNTTSSVILTNYMDTQYYGEIGIGTPPQTFKVVFDTGSSNVWVPSSKCSRLYTACVYHKLFDASDSSSYKHNGTELTLRYSTGTVSGFLSQDIITVGGITVTQMFGEVTEMPALPFMLAEFDGVVGMGFIEQAIGRVTPIFDNIISQGVLKEDVFSFYYNRDSENSQSLGGQIVLGGSDPQHYEGNFHYINLIKTGVWQIQMKGVSVGSSTLLCEDGCLALVDTGASYISGSTSSIEKLMEALGAKKRLFDYVVKCNEGPTLPDISFHLGGKEYTLTSADYVFQESYSSKKLCTLAIHAMDIPPPTGPTWALGATFIRKFYTEFDRRNNRIGFALAR

SEQ ID NO: 1913 - protein, 56 aa, Homo Sapiens
DSLGREAKCYNELNGCTKIYDPVCGTDGNTYPNECVLCFENRKRQTSILIQKSGPC

SEQ ID NO: 1914 - protein, 394 aa, Homo Sapiens
EDPQGDAAQKTDTSHHDQDHPTFNKITPNLAEFAFSLYRQLAHQSNSTNIFFSPVSIATAFAMLSLGTKADTHDEILEGLNFNLTEIPEAQIHEGFQELLRTLNQPDSQLQLTTGNGLFLSEGLKLVDKFLEDVKKLYHSEAFTVNFGDTEEAKKQINDYVEKGTQGKIVDLVKELDRDTVFALVNYIFFKGKWERPFEVKDTEEEDFHVDQVTTVKVPMMKRLGMFNIQHCKKLSSWVLLMKYLGNATAIFFLPDEGKLQHLENELTHDIITKFLENEDRRSASLHLPKLSITGTYDLKSVLGQLGITKVFSNGADLSGVTEEAPLKLSKAVHKAVLTIDEKGTEAAGAMFLEAIPMSIPPEVKFNKPFVFLMIDQNTKSPLFMGKVVNPTQK

SEQ ID NO: 1915 - protein, 398 aa, Homo Sapiens
NSPLDEENLTQENQDRGTHVDLGLASANVDFAFSLYKQLVLKAPDKNVIFSPLSISTALAFLSLGAHNTTLTEILKGLKFNLTETSEAEIHQSFQHLLRTLNQSSDELQLSMGNAMFVKEQLSLLDRFTEDAKRLYGSEAFATDFQDSAAAKKLINDYVKNGTRGKITDLIKDLDSQTMMVLVNYIFFKAKWEMPFDPQDTHQSRFYLSKKKWVMVPMMSLHHLTIPYFRDEELSCTVVELKYTGNASALFILPDQDKMEEVEAMLLPETLKRWRDSLEFREIGELYLPKFSISRDYNLNDILLQLGIEEAFTSKADLSGITGARNLAVSQVVHKAVLDVFEEGTEASAATAVKITLLSALVETRTIVRFNRPFLMIIVPTDTQNIFFMSKVTNPKQA

SEQ ID NO: 1916 - protein, 452 aa, Homo Sapiens
DRVYIHPFHLVIHNESTCEQLAKANAGKPKDPTFIPAPIQAKTSPVDEKALQDQLVLVAAKLDTEDKLRAAMVGMLANFLGFRIYGMHSELWGVVHGATVLSPTAVFGTLASLYLGALDHTADRLQAILGVPWKDKNCTSRLDAHKVLSALQAVQGLLVAQGRADSQAQLLLSTVVGVFTAPGLHLKQPFVQGLALYTPVVLPRSLDFTELDVAAEKIDRFMQAVTGWKTGCSLTGASVDSTLAFNTYVHFQGKMKGFSLLAEPQEFWVDNSTSVSVPMLSGMGTFQHWSDIQDNFSVTQVSFTESACLLLIQPHYASDLDKVEGLTFQQNSLNWMKKLSPRTIHLTMPQLVLQGSYDLQDLLAQAELPAILHTELNLQKLSNDRIRVGEVLNSIFFELEADEREPTESTQQLNKPEVLEVTLNRPFLFAVYDQSATALHFLGRVANPLSTA

SEQ ID NO: 1917 - protein, 184 aa, Homo Sapiens
CTCVPPHPQTAFCNSDLVIRAKFVGTPEVNQTTLYQRYEIKMTKMYKGFQALGDAADIRFVYTPAMESVCGYFHRSHNRSEEFLIAGKLQDGLLHITTCSFVAPWNSLSLAQRRGFTKTYTVGCEECTVFPCLSIPCKLQSGTHCLWTDQLLQGSEKGFQSRHLACLPREPGLCTWQSLRSQIA

SEQ ID NO: 1918 - protein, 120 aa, Homo Sapiens
SSPGKPPRLVGGPMDASVEEEGVRRALDFAVGEYNKASNDMYHSRALQVVRARKQIVAGVNYFLDVELGRTTCTKTQPNLDNCPFHDQPHLKRKAFCSFQIYAVPWQGTMTLSKSTCQDA

SEQ ID NO: 1919 - protein, 121 aa, Homo Sapiens
SSSKEENRIIPGGIYDADLNDEWVQRALHFAISEYNKATEDEYYRRPLQVLRAREQTFGGVNYFFDVEVGRTICTKSQPNLDTCAFHEQPELQKKQLCSFEIYEVPWEDRMSLVNSRCQEA

SEQ ID NO: 1920 - protein, 121 aa, Homo Sapiens
WSPKEEDRIIPGGIYNADLNDEWVQRALHFAISEYNKATKDDYYRRPLRVLRARQQTVGGVNYFFDVEVGRTICTKSQPNLDTCAFHEQPELQKKQLCSFEIYEVPWENRRSLVKSRCQES

SEQ ID NO: 1921 - protein, 69 aa, Homo Sapiens
QHWSYGLRPGGKRDAENLIDSFQEIVKEVGQLAETQRFECTTHQPRSPLRDLKGALESLIEEETGQKKI

SEQ ID NO: 1922 - protein, 94 aa, Homo Sapiens
AAPDLDVRKCLPCGPGGKGRCFGPNICCAEELGCFVGTAEALRCQEENYLPSPCQSGQKACGSGGRCAVLGLCCSPDGCHADPACDAEATFSQR

SEQ ID NO: 1923 - protein, 93 aa, Homo Sapiens
AMSDLELRQCLPCGPGGKGRCFGPSICCADELGCFVGTAEALRCQEENYLPSPCQSGQKACGSGGRCAAFGVCCNDESCVTEPECREGFHRRA

SEQ ID NO: 1924 - protein, 89 aa, Homo Sapiens
ELTGQRLREGDGPDGPADDGAGAQADLEHSLLVAAEKKDEGPYRMEHFRWGSPPKDKRYGGFMTSEKSQTPLVTLFKNAIIKNAYKKGE

SEQ ID NO: 1925 - protein, 112 aa, Homo Sapiens
FCIPTEYTMHIERRECAYCLTINTTICAGYCMTRDINGKLFLPKYALSQDVCTYRDFIYRTVEIPGCPLHVAPYFSYPVALSCKCGKCNTDYSDCIHEAIKTNYCTKPQKSY

SEQ ID NO: 1926 - protein, 111 aa, Homo Sapiens
NSCELTNITIAIEKEECRFCISINTTWCAGYCYTRDLVYKDPARPKIQKTCTFKELVYETVRVPGCAHHADSLYTYPVATQCHCGKCDSDSTDCTVRGLGPSYCSFGEMKE

SEQ ID NO: 1927 - protein, 199 aa, Homo Sapiens
LPICPGGAARCQVTLRDLFDRAVVLSHYIHNLSSEMFSEFDKRYTHGRGFITKAINSCHTSSLATPEDKEQAQQMNQKDFLSLIVSILRSWNEPLYHLVTEVRGMQEAPEAILSKAVEIEEQTKRLLEGMELIVSQVHPETKENEIYPVWSGLPSLQMADEESRLSAYYNLLHCLRRDSHKIDNYLKLLKCRIIHNNNC

SEQ ID NO: 1928 - protein, 191 aa, Homo Sapiens
FPTIPLSRLFDNAMLRARRLYQLAYDTYQEFEEAYILKEQKYSFLQNPQTSLCFSESIPTPSNRVKTQQKSNLELLRISLLLIQSWLEPVQLLRSVFANSLVYGASDSNVYRHLKDLEEGIQTLMWRLEDGSPRTGQIFNQSYSKFDTKSHNDDALLKNYGLLYCFRKDMDKVETFLRIVQCRSVEGSCGF

SEQ ID NO: 1929 - protein, 69 aa, Homo Sapiens
RSLQDTEEKSRSFSASQADPLSDPDQMNEDKRHSQGTFTSDYSKYLDSRRAQDFVQWLMNTKRNRNNIA

SEQ ID NO: 1930 - protein, 71 aa, Homo Sapiens
SWKPRSQQPDAPLGTGANRDLELPWLEQQGPASHHRRQLGPQGPPHLVADPSKKQGPWLEEEEEAYGWMDF

SEQ ID NO: 1931 - protein, 243 aa, Homo Sapiens
DEPPQSPWDRVKDLATVYVDVLKDSGRDYVSQFEGSALGKQLNLKLLDNWDSVTSTFSKLREQLGPVTQEFWDNLEKETEGLRQEMSKDLEEVKAKVQPYLDDFQKKWQEEMELYRQKVEPLRAELQEGARQKLHELQEKLSPLGEEMRDRARAHVDALRTHLAPYSDELRQRLAARLEALKENGGARLAEYHAKATEHLSTLSEKAKPALEDLRQGLLPVLESFKVSFLSALEEYTKKLNTQ

SEQ ID NO: 1932 - protein, 299 aa, Homo Sapiens
KVEQAVETEPEPELRQQTEWQSGQRWELALGRFWDYLRWVQTLSEQVQEELLSSQVTQELRALMDETMKELKAYKSELEEQLTPVAEETRARLSKELQAAQARLGADMEDVCGRLVQYRGEVQAMLGQSTEELRVRLASHLRKLRKRLLRDADDLQKRLAVYQAGAREGAERGLSAIRERLGPLVEQGRVRAATVGSLAGQPLQERAQAWGERLRARMEEMGSRTRDRLDEVKEQVAEVRAKLEEQAQQIRLQAEAFQARLKSWFEPLVEDMQRQWAGLVEKVQAAVGTSAAPVPSDNH

SEQ ID NO: 1933 - protein, 77 aa, Homo Sapiens
QAKEPCVESLVSQYFQTVTDYGKDLMEKVKSPELQAEAKSYFEKSKEQLTPLIKKAGTELVNFLSYFVELGTQPATQ

SEQ ID NO: 1934 - protein, 57 aa, Homo Sapiens
TPDVSSALDKLKEFGNTLEDKARELISRIKQSELSAKMREWFSETFQKVKEKLKIDS

SEQ ID NO: 1935 - protein, 73 aa, Homo Sapiens
DEMPSPTLLTQVKESLSSYWESAKTAAQNLYEKTYLPAVDEKLRDLYSKSTAAMSTYTGIFTDQVLSVLKGEE

SEQ ID NO: 1936 - protein, 79 aa, Homo Sapiens
SEAEDASLLSFMQGYMKHATKTAKDALSSVQESQVAQQARGWVTDGFSSLKDYWSTVKDKFSEFWDLDPEVRPTSAVAA

SEQ ID NO: 1937 - protein, 447 aa, Homo Sapiens
GHRPLDKKREEAPSLRPAPPPISGGGYRARPAKAAATQKKVERKAPDAGGCLHADPDLGVLCPTGCQLQEALLQQERPIRNSVDELNNNVEAVSQTSSSSFQYMYLLKDLWQKRQKQVKDNENVVNEYSSELEKHQLYIDETVNSNIPTNLRVLRSILENLRSKIQKLESDVSAQMEYCRTPCTVSCNIPVVSGKECEEIIRKGGETSEMYLIQPDSSVKPYRVYCDMNTENGGWTVIQNRQDGSVDFGRKWDPYKQGFGNVATNTDGKNYCGLPGEYWLGNDKISQLTRMGPTELLIEMEDWKGDKVKAHYGGFTVQNEANKYQISVNKYRGTAGNALMDGASQLMGENRTMTIHNGMFFSTYDRDNDGWLTSDPRKQCSKEDGGGWWYNRCHAANPNGRYYWGGQYTWDMAKHGTDDGVVWMNWKGSWYSMRKMSMKIRPFFPQQ

SEQ ID NO: 1938 - protein, 411 aa, Homo Sapiens
YVATRDNCCILDERFGSYCPTTCGIADFLSTYQTKVDKDLQSLEDILHQVENKTSEVKQLIKAIQLTYNPDESSKPNMIDAATLKSRKMLEEIMKYEASILTHDSSIRYLQEIYNSNNQKIVNLKEKVAQLEAQCQEPCKDTVQIHDITGKDCQDIANKGAKQSGLYFIKPLKANQQFLVYCEIDGSGNGWTVFQKRLDGSVDFKKNWIQYKEGFGHLSPTGTTEFWLGNEKIHLISTQSAIPYALRVELEDWNGRTSTADYAMFKVGPEADKYRLTYAYFAGGDAGDAFDGFDFGDDPSDKFFTSHNGMQFSTWDNDNDKFEGNCAEQDGSGWWMNKCHAGHLNGVYYQGGTYSKASTPNGYDNGIIWATWKTRWYSMKKTTMKIIPFNRLTIGEGQQHHLGGAKQAGDV

SEQ ID NO: 1939 - protein, 72 aa, Homo Sapiens [sequence omitted]

SEQ ID NO: 1940 - protein, 206 aa, Homo Sapiens
QTDMSRKAFVFPKESDTSYVSLKAPLTKPLKAFTVCLHFYTELSSTRGYSIFSYATKRQDNEILIFWSKDIGYSFTVGGSEILFEVPEVTVAPVHICTSWESASGIVEFWVDGKPRVRKSLKKGYTVGAEASIILGQEQDSFGGNFEGSQSLVGDIGNVNMWDFVLSPDEINTIYLGGPFSPNVLNWRALKYEVQGEVFTKPQLWP

SEQ ID NO: 1941 - protein, 204 aa, Homo Sapiens
HTDLSGKVFVFPRESVTDHVNLITPLEKPLQNFTLCFRAYSDLSRAYSLFSYNTQGRDNELLVYKERVGEYSLYIGRHKVTSKVIEKFPAPVHICVSWESSSGIAEFWINGTPLVKKGLRQGYFVEAQPKIVLGQEQDSYGGKFDRSQSFVGEIGDLYMWDSVLPPENILSAYQGTPLPANILDWQALNYEIRGYVIIKPLVWV

SEQ ID NO: 1942 - protein, 326 aa, Homo Sapiens
GRTCPKPDDLPFSTVVPLKTFYEPGEEITYSCKPGYVSRGGMRKFICPLTGLWPINTLKCTPRVCPFAGILENGAVRYTTFEYPNTISFSCNTGFYLNGADSAKCTEEGKWSPELPVCAPIICPPPSIPTFATLRVYKPSAGNNSLYRDTAVFECLPQHAMFGNDTITCTTHGNWTKLPECREVKCPFPSRPDNGFVNYPAKPTLYYKDKATFGCHDGYSLDGPEEIECTKLGNWSAMPSCKASCKVPVKKATVVYQGERVKIQEKFKNGMLHGDKVSFFCKNKEKKCSYTEDAQCIDGTIEVPKCFKEHSSLAFWKTDASDVKPC

SEQ ID NO: 1943 - protein, 183 aa, Homo Sapiens
ERDCRVSSFRVKENFDKARFSGTWYAMAKKDPEGLFLQDNIVAEFSVDETGQMSATAKGRVRLLNNWDVCADMVGTFTDTEDPAKFKMKYWGVASFLQKGNDDHWIVDTDYDTYAVQYSCRLLNLDGTCADSYSFVFSRDPNGLPPEAQKIVRQRQEELCLARQYRLIVHNGYCDGRSERNLL

SEQ ID NO: 1944 - protein, 184 aa, Homo Sapiens
GPVPTPPDNIQVQENFNISRIYGKWYNLAIGSTCPWLKKIMDRMTVSTLVLGEGATEAEISMTSTRWRKGVCEETSGAYEKTDTDGKFLYHKSKWNITMESYVVHTNYDEYAIFLTKKFSRHHGPTITAKLYGRAPQLRETLLQDFRVVAQGVGIPEDSIFTMADRGECVPGEQEPEPILIPRV

SEQ ID NO: 1945 - protein, 183 aa, Homo Sapiens
QIPLCANLVPVPITNATLDRITGKWFYIASAFRNEEYNKSVQEIQATFFYFTPNKTEDTIFLREYQTRQDQCIYNTTYLNVQRENGTISRYVGGQEHFAHLLILRDTKTYMLAFDVNDEKNWGLSVYADKPETTKEQLGEFYEALDCLRIPKSDVVYTDWKKDKCEPLEKQHEKERKQEEGES

SEQ ID NO: 1946 - protein, 349 aa, Homo Sapiens
APHGPGLIYRQPNCDDPETEEAALVAIDYINQNLPWGYKHTLNQIDEVKVWPQQPSGELFEIEIDTLETTCHVLDPTPVARCSVRQLKEHAVEGDCDFQLLKLDGKFSVVYAKCDSSPDSAEDVRKVCQDCPLLAPLNDTRVVHAAKAALAAFNAQNNGSNFQLEEISRAQLVPLPPSTYVEFTVSGTDCVAKEATEAAKCNLLAEKQYGFCKATLSEKLGGAEVAVTCTVFQTQPVTSQPQPEGANEAVPTPVVDPDAPPSPPLGAPGLPPAGSPPDSHVLLAAPPGHQLHRAHYDLRHTFMGVVSLGSPSGEVSHPRKTRTVVQPSVGAAAGPVVPPCPGRIRHFKV

SEQ ID NO: 1947 - protein, 127 aa, Homo Sapiens
GPTGTGESKCPLMVKVLDAVRGSPAINVAVHVFRKAADDTWEPFASGKTSESGELHGLTTEEEFVEGIYKVEIDTKSYWKALGISPFHEHAEVVFTANDSGPRRYTIAALLSPYSYSTTAVVTNPKE

SEQ ID NO: 1948 - protein, 585 aa, Homo Sapiens [sequence omitted]

SEQ ID NO: 1949 - protein, 591 aa, Homo Sapiens
RTLHRNEYGIASILDSYQCTAEISLADLATIFFAQFVQEATYKEVSKMVKDALTAIEKPTGDEQSSGCLENQLPAFLEELCHEKEILEKYGHSDCCSQSEEGRHNCFLAHKKPTPASIPLFQVPEPVTSCEAYEEDRETFMNKFIYEIARRHPFLYAPTILLWAARYDKIIPSCCKAENAVECFQTKAATVTKELRESSLLNQHACAVMKNFGTRTFQAITVTKLSQKFTKVNFTEIQKLVLDVAHVHEHCCRGDVLDCLQDGEKIMSYICSQQDTLSNKITECCKLTTLERGQCIIHAENDEKPEGLSPNLNRFLGDRDFNQFSSGEKNIFLASFVHEYSRRHPQLAVSVILRVAKGYQELLEKCFQTENPLECQDKGEEELQKYIQESQALAKRSCGLFQKLGEYYLQNAFLVAYTKKAPQLTSSELMAITRKMAATAATCCQLSEDKLLACGEGAADIIIGHLCIRHEMTPVNPGVGQCCTSSYANRRPCFSSLVVDETYVPPAFSDDKFIFHKDLCQAQGVALQTMKQEFLINLVKQKPQITEEQLEAVIADFSGLLEKCCQGQEQEVCFAEEGQKLISKTRAALGV

SEQ ID NO: 1950 - protein, 458 aa, Homo Sapiens
LERGRDYEKNKVCKEFSHLGKEDFTSLSLVLYSRKFPSGTFEQVSQLVKEVVSLTEACCAEGADPDCYDTRTSALSAKSCESNSPFPVHPGTAECCTKEGLERKLCMAALKHQPQEFPTYVEPTNDEICEAFRKDPKEYANQFMWEYSTNYGQAPLSLLVSYTKSYLSMVGSCCTSASPTVCFLKERLQLKHLSLLTTLSNRVCSQYAAYGEKKSRLSNLIKLAQKVPTADLEDVLPLAEDITNILSKCCESASEDCMAKELPEHTVKLCDNLSTKNSKFEDCCQEKTAMDVFVCTYFMPAAQLPELPDVELPTNKDVCDPGNTKVMDKYTFELSRRTHLPEVFLSKVLEPTLKSLGECCDVEDSTTCFNAKGPLLKKELSSFIDKGQELCADYSENTFTEYKKKLAERLKAKLPDATPTELAKLVNKRSDFASNCCSINSPPLYCDSEIDAELKNIL

SEQ ID NO: 1951 - protein, 150 aa, Homo Sapiens
QDLDEDVSQEDVPLVISDGGDSEQFIDEERQGPPLGGQQSQPSAGDGNQDDGPQQGPPQQGGQQQQGPPPPQGKPQGPPQQGGHPPPPQGRPQGPPQQGGHPRPPRGRPQGPPQQGGHQQGPPPPPPGKPQGPPPQGGRPQGPPQGQSPQ

SEQ ID NO: 1952 - protein, 57 aa, Homo Sapiens
QRGPRGPYPPGPLAPPQPFGPGFVPPPPPPPYGPGRIPPPPPAPYGPGIFPPPPPQP

SEQ ID NO: 1953 - protein, 49 aa, Homo Sapiens
YLYQWLGAPVPYPDPLEPRREVCELNPDCDELADHIGFQEAYRRFYGPV

SEQ ID NO: 1954 - protein, 123 aa, Homo Sapiens [sequence omitted]

SEQ ID NO: 1955 - protein, 607 aa, Homo Sapiens
ECVTQLLKDTCFEGGDITTVFTPSAKYCQVVCTYHPRCLLFTFTAESPSEDPTRWFTCVLKDSVTETLPRVNRTAAISGYSFKQCSHQISACNKDIYVDLDMKGINYNSSVAKSAQECQERCTDDVHCHFFTYATRQFPSLEHRNICLLKHTQTGTPTRITKLDKVVSGFSLKSCALSNLACIRDIFPNTVFADSNIDSVMAPDAFVCGRICTHHPGCLFFTFFSQEWPKESQRNLCLLKTSESGLPSTRIKKSKALSGFSLQSCRHSIPVFCHSSFYHDTDFLGEELDIVAAKSHEACQKLCTNAVRCQFFTYTPAQASCNEGKGKCYLKLSSNGSPTKILHGRGGISGYTLRLCKMDNECTTKIKPRIVGGTASVRGEWPWQVTLHTTSPTQRHLCGGSIIGNQWILTAAHCFYGVESPKILRVYSGILNQSEIKEDTSFFGVQEIIIHDQYKMAESGYDIALLKLETTVNYTDSQRPICLPSKGDRNVIYTDCWVTGWGYRKLRDKIQNTLQKAKIPLVTNEECQKRYRGHKITHKMICAGYREGGKDACKGDSGGPLSCKHNEVWHLVGITSWGEGCAQRERPGVYTNVVEYVDWILEKTQAV

SEQ ID NO: 1956 - protein, 619 aa, Homo Sapiens
GCLTQLYENAFFRGGDVASMYTPNAQYCQMRCTFHPRCLLFSFLPASSINDMEKRFGCFLKDSVTGTLPKVHRTGAVSGHSLKQCGHQISACHRDIYKGVDMRGVNFNVSKVSSVEECQKRCTNNIRCQFFSYATQTFHKAEYRNNCLLKYSPGGTPTAIKVLSNVESGFSLKPCALSEIGCHMNIFQHLAFSDVDVARVLTPDAFVCRTICTYHPNCLFFTFYTNVWKIESQRNVCLLKTSESGTPSSSTPQENTISGYSLLTCKRTLPEPCHSKIYPGVDFGGEELNVTFVKGVNVCQETCTKMIRCQFFTYSLLPEDCKEEKCKCFLRLSMDGSPTRIAYGTQGSSGYSLRLCNTGDNSVCTTKTSTRIVGGTNSSWGEWPWQVSLQVKLTAQRHLCGGSLIGHQWVLTAAHCFDGLPLQDVWRIYSGILNLSDITKDTPFSQIKEIIIHQNYKVSEGNHDIALIKLQAPLNYTEFQKPICLPSKGDTSTIYTNCWVTGWGFSKEKGEIQNILQKVNIPLVTNEECQKRYQDYKITQRMVCAGYKEGGKDACKGDSGGPLVCKHNGMWRLVGITSWGEGCARREQPGVYTKVAEYMDWILEKTQSSDGKAQMQSPA

SEQ ID NO: 1957 - protein, 170 aa, Homo Sapiens
FVLTEGNPRWEQTHLTYRIENYTPDLPRADVDHAIEKAFQLWSNVTPLTFTKVSEGQADIMISFVRGDHRDNSPFDGPGGNLAHAFQPGPGIGGDAHFDEDERWTNNFREYNLHRVAAHELGHSLGLSHSTDIGALMYPSYTFSGDVQLAQDDIDGIQAIYGRSQNPVQP

SEQ ID NO: 1958 - protein, 107 aa, Homo Sapiens
SGKSFKAGVCPPKKSAQCLRYKKPECQSDWQCPGKKRCCPDTCGIKCLDPVDTPNPTRRKPGKCPVTYGQCLMLNPPNFCEMDGQCKRDLKCCMGMCGKSCVSPVKA

SEQ ID NO: 1959 - protein, 52 aa, Homo Sapiens
MAQQWSLQRLAGRHPQDSYEDSTQSSIFTYTNSNSTRGPFEGPNYHIAPRWV

SEQ ID NO: 1960 - protein, 549 aa, Homo Sapiens
NCGPPPTLSFAAPMDITLTETRFKTGTTLKYTCLPGYVRSHSTQTLTCNSDGEWVYNTFCIYKRCRHPGELRNGQVEIKTDLSFGSQIEFSCSEGFFLIGSTTSRCEVQDRGVGWSHPLPQCEIVKCKPPPDIRNGRHSGEENFYAYGFSVTYSCDPRFSLLGHASISCTVENETIGVWRPSPPTCEKITCRKPDVSHGEMVSGFGPIYNYKDTIVFKCQKGFVLRGSSVIHCDADSKWNPSPPACEPNSCINLPDIPHASWETYPRPTKEDVYVVGTVLRYRCHPGYKPTTDEPTTVICQKNLRWTPYQGCEALCCPEPKLNNGEITQHRKSRPANHCVYFYGDEISFSCHETSRFSAICQGDGTWSPRTPSCGDICNFPPKIAHGHYKQSSSYSFFKEEIIYECDKGYILVGQAKLSCSYSHWSAPAPQCKALCRKPELVNGRLSVDKDQYVEPENVTIQCDSGYGVVGPQSITCSGNRTWYPEVPKCEWETPEGCEQVLTGKRLMQCLPNPEDVKMALEVYKLSLEIEQLELQRDSARQSTLDKEL

SEQ ID NO: 1961 - protein, 459 aa, Homo Sapiens
DQESCKGRCTEGFNVDKKCQCDELCSYYQSCCTDYTAECKPQVTRGDVFTMPEDEYTVYDDGEEKNNATVHEQVGGPSLTSDLQAQSKGNPEQTPVLKPEEEAPAPEVGASKPEGIDSRPETLHPGRPQPPAEEELCSGKPFDAFTDLKNGSLFAFRGQYCYELDEKAVRPGYPKLIRDVWGIEGPIDAAFTRINCQGKTYLFKGSQYWRFEDGVLDPDYPRNISDGFDGIPDNVDAALALPAHSYSGRERVYFFKGKQYWEYQFQHQPSQEECEGSSLSAVFEHFAMMQRDSWEDIFELLFWGRTSAGTRQPQFISRDWHGVPGQVDAAMAGRIYISGMAPRPSLAKKQRFRHRNRKGYRSQRGHSRGRNQNSRRPSRAMWLSLFSSEESNLGANNYDDYRMDWLVPATCEPIQSVFFFSGDKYYRVNLRTRRVDTVDPPYPRSIAQYWLGCPAPGHL

SEQ ID NO: 1962 - protein, 126 aa, Homo Sapiens
AVWQFRKMIKCVIPGSDPFLEYNNYGCYCGLGGSGTPVDELDKCCQTHDNCYDQAKKLDSCKFLLDNPYTHTYSYSCSGSAITCSSKNKECEAFICNCDRNAAICFSKAPYNKAHKNLDTKKYCQS

SEQ ID NO: 1963 - protein, 497 aa, Homo Sapiens
ARPCIPKSFGYSSVVCVCNATYCDSFDPPTFPALGTFSRYESTRSGRRMELSMGPIQANHTGTGLLLTLQPEQKFQKVKGFGGAMTDAAALNILALSPPAQNLLLKSYFSEEGIGYNIIRVPMASCDFSIRTYTYADTPDDFQLHNFSLPEEDTKLKIPLIHRALQLAQRPVSLLASPWTSPTWLKTNGAVNGKGSLKGQPGDIYHQTWARYFVKFLDAYAEHKLQFWAVTAENEPSAGLLSGYPFQCLGFTPEHQRDFIARDLGPTLANSTHHNVRLLMLDDQRLLLPHWAKVVLTDPEAAKYVHGIAVHWYLDFLAPAKATLGETHRLFPNTMLFASEACVGSKFWEQSVRLGSWDRGMQYSHSIITNLLYHVVGWTDWNLALNPEGGPNWVRNFVDSPIIVDITKDTFYKQPMFYHLGHFSKFIPEGSQRVGLVASQKNDLDAVALMHPDGSAVVVVLNRSSKDVPLTIKDPAVGFLETISPGYSIHTYLWRRQ

SEQ ID NO: 1964 - protein, 435 aa, Homo Sapiens
QPPRRYTPDWPSLDSRPLPAWFDEAKFGVFIHWGVFSVPAWGSEWFWWHWQGEGRPQYQRFMRDNYPPGFSYADFGPQFTARFFHPEEWADLFQAAGAKYVVLTTKHHEGFTNWPSPVSWNWNSKDVGPHRDLVGELGTALRKRNIRYGLYHSLLEWFHPLYLLDKKNGFKTQHFVSAKTMPELYDLVNSYKPDLIWSDGEWECPDTYWNSTNFLSWLYNDSPVKDEVVVNDRWGQNCSCHHGGYYNCEDKFKPQSLPDHKWEMCTSIDKFSWGYRRDMALSDVTEESEIISELVQTVSLGGNYLLNIGPTKDGLIVPIFQERLLAVGKWLSINGEAIYASKPWRVQWEKNTTSVWYTSKGSAVYAIFLHWPENGVLNLESPITTSTTKITMLGIQGDLKWSTDPDKGLFISLPQLPPSAVPAEFAWTIKLTGVK

SEQ ID NO: 1965 - protein, 345 aa, Homo Sapiens
AMVSEFLKQAWFIENEEQEYVQTVKSSKGGPGSAVSPYPTFNPSSDVAALHKAIMVKGVDEATIIDILTKRNNAQRQQIKAAYLQETGKPLDETLKKALTGHLEEVVLALLKTPAQFDADELRAAMKGLGTDEDTLIEILASRTNKEIRDINRVYREELKRDLAKDITSDTSGDFRNALLSLAKGDRSEDFGVNEDLADSDARALYEAGERRKGTDVNVFNTILTTRSYPQLRRVFQKYTKYSKHDMNKVLDLELKGDIEKCLTAIVKCATSKPAFFAEKLHQAMKGVGTRHKALIRIMVSRSEIDMNDIKAFYQKMYGISLCQAILDETKGDYEKILVALCGGN

SEQ ID NO: 1966 - protein, 161 aa, Homo Sapiens
DSWMEEVIKLCGRELVRAQIAICGMSTWSKRSLSQEDAPQTPRPVAEIVPSFINKDTETINMMSEFVANLPQELKLTLSEMQPALPQLQQHVPVLKDSSLLFEEFKKLIRNRQSEAADSSPSELKYLGLDTHSRKKRQLYSALANKCCHVGCTKRSLARFC

SEQ ID NO: 1967 - protein, 90 aa, Homo Sapiens
GIIINLENGELCMNSAQCKSNCCQHSSALGLARCTSMASENSECSVKTLYGIYYKCPCERGLTCEGDKTIVGSITNTNFGICHDAGRSKQ

SEQ ID NO: 1968 - protein, 60 aa, Homo Sapiens
EAQTETCTVAPRERQNCGFPGVTPSQCANKGCCFDDTVRGVPWCFYPNTIDVPPEEECEF

SEQ ID NO: 1969 - protein, 208 aa, Homo Sapiens
KKRPKPGGWNTGGSRYPGQGSPGGNRYPPQGGGGWGQPHGGGWGQPHGGGWGQPHGGGWGQPHGGGWGQGGGTHSQWNKPSKPKTNMKHMAGAAAAGAVVGGLGGYLLGSAMSRPIIHFGSDYEDRYYRENMHRYPNQVYYRPMDEYSNQNNFVHDCVNITIKQHTVTTTTKGENFTETDVKMMERVVEQMCITQYERESQAYYQRGS

SEQ ID NO: 1970 - protein, 507 aa, Homo Sapiens
VSPTDCSAVEPEAEKALDLINKRRRDGYLFQLLRIADAHLDRVENTTVYYLVLDVQESDCSVLSRKYWNDCEPPDSRRPSEIVIGQCKVIATRHSHESQDLRVIDFNCTTSSVSSALANTKDSPVLIDFFEDTERYRKQANKALEKYKEENDDFASFRVDRIERVARVRGGEGTGYFVDFSVRNCPRHHFPRHPNVFGFCRADLFYDVEALDLESPKNLVINCEVFDPQEHENINGVPPHLGHPFHWGGHERSSTTKPPFKPHGSRDHHHPHKPHEHGPPPPPDERDHSHGPPLPQGPPPLLPMSCSSCQHATFGTNGAQRHSHNNNSSDLHPHKHHSHEQHPHGHHPHAHHPHEHDTHRQHPHGHHPHGHHPHGHHPHGHHPHGHHPHCHDFQDYGPCDPPPHNQGHCCHGHGPPPGHLRRRGPGKGPRPFHCRQIGSVYRLPPLRKGEVLPLPEANFPSFPLPHHKHPLKPDNQPFPQSVSESCPGKFKSGFPQVSMFFTHTFPK

SEQ ID NO: 1971 - protein, 373 aa, Homo Sapiens
LRPVLPTQSAHDPPAVHLSNGPGQEPIAVMTFDLTKITKTSSSFEVRTWDPEGVIFYGDTNPKDDWFMLGLRDGRPEIQLHNHWAQLTVGAGPRLDDGRWHQVEVKMEGDSVLLEVDGEEVLRLRQVSGPLTSKRHPIMRIALGGLLFPASNLRLPLVPALDGCLRRDSWLDKQAEISASAPTSLRSCDVESNPGIFLPPGTQAEFNLRDIPQPHAEPWAFSLDLGLKQAAGSGHLLALGTPENPSWLSLHLQDQKVVLSSGSGPGLDLPLVLGLPLQLKLSMSRVVLSQGSKMKALALPPLGLAPLLNLWAKPQGRLFLGALPGEDSSTSFCLNGLWAQGQRLDVDQALNRSHEIWTHSCPQSPGNGTDASH

SEQ ID NO: 1972 - protein, 343 aa, Homo Sapiens
ANSSGRWWGIVNVASSTNLLTDSKSLQLVLEPSLQLLSRKQRRLIRQNPGILHSVSGGLQSAVRECKWQFRNRRWNCPTAPGPHLFGKIVNRGCRETAFIFAITSAGVTHSVARSCSEGSIESCTCDYRRRGPGGPDWHWGGCSDNIDFGRLFGREFVDSGEKGRDLRFLMNLHNNEAGRTTVFSEMRQECKCHGMSGSCTVRTCWMRLPTLRAVGDVLRDRFDGASRVLYGNRGSNRASRAELLRLEPEDPAHKPPSPHDLVYFEKSPNFCTYSGRLGTAGTAGRACNSSSPALDGCELLCCGRGHRTRTQRVTERCNCTFHWCCHVSCRNCTHTRVLHECL

SEQ ID NO: 1973 - protein, 496 aa, Homo Sapiens
QYSSNTQQGRTSIVHLFEWRWVDIALECERYLAPKGFGGVQVSPPNENVAIHNPFRPWWERYQPVSYKLCTRSGNEDEFRNMVTRCNNVGVRIYVDAVINHMCGNAVSAGTSSTCGSYFNPGSRDFPAVPYSGWDFNDGKCKTGSGDIENYNDATQVRDCRLSGLLDLALGKDYVRSKIAEYMNHLIDIGVAGFRIDASKHMWPGDIKAILDKLHNLNSNWFPEGSKPFIYQEVIDLGGEPIKSSDYFGNGRVTEFKYGAKLGTVIRKWNGEKMSYLKNWGEGWGFMPSDRALVFVDNHDNQRGHGAGGASILTFWDARLYKMAVGFMLAHPYGFTRVMSSYRWPRYFENGKDVNDWVGPPNDNGVTKEVTINPDTTCGNDWVCEHRWRQIRNMVNFRNVVDGQPFTNWYDNGSNQVAFGRGNRGFIVFNNDDWTFSLTLQTGLPAGTYCDVISGDKINGNCTGIKIYVSDDGKAHFSISNSAEDPFIAIHAESKL

SEQ ID NO: 1974 - protein, 163 aa, Homo Sapiens
VAAKWKDDVIKLCGRELVRAQIAICGMSTWSKRSLSQEDAPQTPRPVAEIVPSFINKDTETIIIMLEFIANLPPELKAALSERQPSLPELQQYVPALKDSNLSFEEFKKLIRNRQSEAADSNPSELKYLGLDTHSQKKRRPYVALFEKCCLIGCTKRSLAKYC

SEQ ID NO: 1975 - protein, 53 aa, Homo Sapiens
QEHPLHGCSASNSSEVDGGENMTWAGARPTLGPGNRSLAGQSGQGKPRGQPNT

SEQ ID NO: 1976 - protein, 57 aa, Homo Sapiens
MWSTRSPNSTAWPLSLEPDPGMASASTTMHTTTIAEPDPGMSGWPDGRMETSTPTIM

SEQ ID NO: 1977 - protein, 52 aa, Homo Sapiens
FTYFVILAENGFLPIHLLGLRVDWDDRWINDVEDSYGQQWTYEQRKIVEFTC

SEQ ID NO: 1978 - protein, 241 aa, Homo Sapiens
EFKPTYQDRVAPPGLTQIPQIQKTEISFRPNDPKSYEAYVLNIVRFLEKYKDSAQRDDMIFEDCGDVPSEPKERGDFNHERGERKVCRFKLEWLGNCSGLNDETYGYKEGKPCIIIKLNRVLGFKPKPPKNESLETYPVMKYNPNVLPVQCTGKRDEDKDKVGNVEYFGLGNSPGFPLQYYPYYGKLLQPKYLQPLLAVQFTNLTMDTEIRIECKAYGENIGYSEKDRFQGRFDVKIEVKS

SEQ ID NO: 1979 - protein, 657 aa, Homo Sapiens [sequence omitted]

SEQ ID NO: 1980 - protein, 663 aa, Homo Sapiens
LEVPTDGNAGLLAEPQIAMFCGRLNMHMNVQNGKWDSDPSGTKTCIDTKEGILQYCQEVYPELQITNVVEANQPVTIQNWCKRGRKQCKTHPHFVIPYRCLVGEFVSDALLVPDKCKFLHQERMDVCETHLHWHTVAKETCSEKSTNLHDYGMLLPCGIDKFRGVEFVCCPLAEESDNVDSADAEEDDSDVWWGGADTDYADGSEDKVVEVAEEEEVAEVEEEEADDDEDDEDGDEVEEEAEEPYEEATERTTSIATTTTTTTESVEEVVREVCSEQAETGPCRAMISRWYFDVTEGKCAPFFYGGCGGNRNNFDTEEYCMAVCGSAIPTTAASTPDAVDKYLETPGDENEHAHFQKAKERLEAKHRERMSQVMREWEEAERQAKNLPKADKKAVIQHFQEKVESLEQEAANERQQLVETHMARVEAMLNDRRRLALENYITALQAVPPRPRHVFNMLKKYVRAEQKDRQHTLKHFEHVRMVDPKKAAQIRSQVMTHLRVIYERMNQSLSLLYNVPAVAEEIQDEVDELLQKEQNYSDDVLANMISEPRISYGNDALMPSLTETKTTVELLPVNGEFSLDDLQPWHSFGADSVPANTENEVEPVDARPAADRGLTTRPGSGLTNIKTEEISEVKMDAEFRHDSGYEVHHQKLVFFAEDVGSNK

SEQ ID NO: 1981 - protein, 169 aa, Homo Sapiens
QAFHLGKCPNPPVQENFDVNKYLGRWYEIEKIPTTFENGRCIQANYSLMENGKIKVLNQELRADGTVNQIEGEATPVNLTEPAKLEVKFSWFMPSAPYWILATDYENYALVYSCTCIIQLFHVDFAWILARNPNLPPETVDSLKNILTSNNIDVKKMTVTDQVNCPKLS

SEQ ID NO: 1982 - protein, 93 aa, Homo Sapiens
MLTELEKALNSIIDVYHKYSLIKGNFHAVYRDDLKKLLETECPQYIRKKGADVWFKELDINTDGAVNFQEFLILVIKMGVAAHKKSHEESHKE

SEQ ID NO: 1983 - protein, 134 aa, Homo Sapiens
STPLMSWPWSPSALRLLQRPPEEPAAHANCHRVALNISFQELGWERWIVYPPSFIFHYCHGGCGLHIPPNLSLPVPGAPPTPAQPYSLLPGAQPCCAALPGTMRPLHVRTTSDGGYSFKYETVPNLLTQHCACI

SEQ ID NO: 1984 - protein, 415 aa, Homo Sapiens
MEDLCVANTLFALNLFKHLAKASPTQNLFLSPWSISSTMAMVYMGSRGSTEDQMAKVLQFNEVGANAVTPMTPENFTSCGFMQQIQKGSYPDAILQAQAADKIHSSFRSLSSAINASTGNYLLESVNKLFGEKSASFREEYIRLCQKYYSSEPQAVDFLECAEEARKKIYSWVKTQTKGKIPNLLPEGSVDGDTRMVLVNAVYFKGKWKTPFEKKLNGLYPFRVNSAQRTPVQMMYLREKLNIGYIEDLKAQILELPYAGDVSMFLLLPDEIADVSTGLELLESEITYDKLNKWTSKDKMAEDEVEVYIPQFKLEEHYELRSILRSMGMEDAFNKGRANFSGMSERNDLFLSEVFHQAMVDVNEEGTEAAAGTGGVMTGRTGHGGPQFVADHPFLFLIMHKITNCILFFGRFSSP

SEQ ID NO: 1985 - protein, 379 aa, Homo Sapiens [sequence omitted]

SEQ ID NO: 1986 - protein, 381 aa, Homo Sapiens
EMKKRVEDLHVGATVAPSSRRDFTFDLYRALASAAPSQNIFFSPVSISMSLAMLSLGAGSSTKMQILEGLGLNLQKSSEKELHRGFQQLLQELNQPRDGFQLSLGNALFTDLVVDLQDTFVSAMKTLYLADTFPTNFRDSAGAMKQINDYVAKQTKGKIVDLLKNLDSNAVVIMVNYIFFKAKWETSFNHKGTQEQDFYVTSETVVRVPMMSREDQYHYLLDRNLSCRVVGVPYQGNATALFILPSEGKMQQVENGLSEKTLRKWLKMFKKRQLELYLPKFSIEGSYQLEKVLPSLGISNVFTSHADLSGISNHSNIQVSEMVHKAVVEVDESGTRAAAATGTIFTFRSARLNSQRLVFNRPFLMFIVDNNILFLGKVNRP

SEQ ID NO: 1987 - protein, 478 aa, Homo Sapiens
NPNATSSSSQDPESLQDRGEGKVATTVISKMLFVEPILEVSSLPTTNSTTNSATKITANTTDEPTTQPTTEPTTQPTIQPTQPTTQLPTDSPTQPTTGSFCPGPVTLCSDLESHSTEAVLGDALVDFSLKLYHAFSAMKKVETNMAFSPFSIASLLTQVLLGAGENTKTNLESILSYPKDFTCVHQALKGFTTKGVTSVSQIFHSPDLAIRDTFVNASRTLYSSSPRVLSNNSDANLELINTWVAKNTNNKISRLLDSLPSDTRLVLLNAIYLSAKWKTTFDPKKTRMEPFHFKNSVIKVPMMNSKKYPVAHFIDQTLKAKVGQLQLSHNLSLVILVPQNLKHRLEDMEQALSPSVFKAIMEKLEMSKFQPTLLTLPRIKVTTSQDMLSIMEKLEFFDFSYDLNLCGLTEDPDLQVSAMQHQTVLELTETGVEAAAASAISVARTLLVFEVQQPFLFMLWDQQHKFPVFMGRVYDPRA

SEQ ID NO: 1988 - protein, 641 aa, Homo Sapiens
EEKPCGFPHVENGRIAQYYYTFKSFYFPMSIDKKLSFFCLAGYTTESGRQEEQTTCTTEGWSPEPRCFKKCTKPDLSNGYISDVKLLYKIQENMRYGCASGYKTTGGKDEEVVQCLSDGWSSQPTCRKEHETCLAPELYNGNYSTTQKTFKVKDKVQYECATGYYTAGGKKTEEVECLTYGWSLTPKCTKLKCSSLRLIENGYFHPVKQTYEEGDVVQFFCHENYYLSGSDLIQCYNFGWYPESPVCEGRRNRCPPPPLPINSKIQTHSTTYRHGEIVHIECELNFEIHGSAEIRCEDGKWTEPPKCIEGQEKVACEEPPFIENGAANLHSKIYYNGDKVTYACKSGYLLHGSNEITCNRGKWTLPPECVENNENCKHPPVVMNGAVADGILASYATGSSVEYRCNEYYLLRGSKISRCEQGKWSSPPVCLEPCTVNVDYMNRNNIEMKWKYEGKVLHGDLIDFVCKQGYDLSPLTPLSELSVQCNRGEVKYPLCTRKESKGMCTSPPLIKHGVIISSTVDTYENGSSVEYRCFDHHFLEGSREAYCLDGMWTTPPLCLEPCTLSFTEMEKNNLLLKWDFDNRPHILHGEYIEFICRGDTYPAELYITGSILRMQCDRGQLKYPRCIPRQSTLSYQEPLRT

SEQ ID NO: 1989 - protein, 581 aa, Homo Sapiens
VTCPEQDKYRTITGMCNNRRSPTLGASNRAFVRWLPAEYEDGFSLPYGWTPGVKRNGFPVALARAVSNEIVRFPTDQLTPDQERSLMFMQWGQLLDHDLDFTPEPAARASFVTGVNCETSCVQQPPCFPLKIPPNDPRIKNQADCIPFFRSCPACPGSNITIRNQINALTSFVDASMVYGSEEPLARNLRNMSNQLGLLAVNQRFQDNGRALLPFDNLHDDPCLLTNRSARIPCFLAGDTRSSEMPELTSMHTLLLREHNRLATELKSLNPRWDGERLYQEARKIVGAMVQIITYRDYLPLVLGPTAMRKYLPTYRSYNDSVDPRIANVFTNAFRYGHTLIQPFMFRLDNRYQPMEPNPRVPLSRVFFASWRVVLEGGIDPILRGLMATPAKLNRQNQIAVDEIRERLFEQVMRIGLDLPALNMQRSRDHGLPGYNAWRRFCGLPQPETVGQLGTVLRNLKLARKLMEQYGTPNNIDIWMGGVSEPLKRKGRVGPLLACIIGTQFRKLRDGDRFWWENEGVFSMQQRQALAQISLPRIICDNTGITTVSKNNIFMSNSYPRDFVNCSTLPALNLASWREAS

SEQ ID NO: 1990 - protein, 484 aa, Homo Sapiens
LVPEKEKDPKYWRDQAQETLKYALELQKLNTNVAKNVIMFLGDGMGVSTVTAARILKGQLHHNPGEETRLEMDKFPFVALSKTYNTNAQVPDSAGTATAYLCGVKANEGTVGVSAATERSRCNTTQGNEVTSILRWAKDAGKSVGIVTTTRVNHATPSAAYAHSADRDWYSDNEMPPEALSQGCKDIAYQLMHNIRDIDVIMGGGRKYMYPKNKTDVEYESDEKARGTRLDGLDLVDTWKSFKPRHKHSHFIWNRTELLTLDPHNVDYLLGLFEPGDMQYELNRNNVTDPSLSEMVVVAIQILRKNPKGFFLLVEGGRIDHGHHEGKAKQALHEAVEMDRAIGQAGSLTSSEDTLTVVTADHSHVFTFGGYTPRGNSIFGLAPMLSDTDKKPFTAILYGNGPGYKVVGGERENVSMVDYAHNNYQAQSAVPLRHETHGGEDVAVFSKGPMAHLLHGVHEQNYVPHVMAYAACIGANLGHCAPAS

SEQ ID NO: 1991 - protein, 484 aa, Homo Sapiens
IIPVEEENPDFWNRQAAEALGAAKKLQPAQTAAKNLIIFLGDGMGVSTVTAARILKGQKKDKLGPETFLAMDRFPYVALSKTYSVDKHVPDSGATATAYLCGVKGNFQTIGLSAAARFNQCNTTRGNEVISVMNRAKKAGKSVGVVTTTRVQHASPAGAYAHTVNRNWYSDADVPASARQEGCQDIATQLISNMDIDVILGGGRKYMFPMGTPDPEYPDDYSQGGTRLDGKNLVQEWLAKRQGARYVWNRTELMQASLDPSVTHLMGLFEPGDMKYEIHRDSTLDPSLMEMTEAALRLLSRNPRGFFLFVEGGRIDHGHHESRAYRALTETIMFDDAIERAGQLTSEEDTLSLVTADHSHVFSFGGYPLRGSSIFGLAPGKARDRKAYTVLLYGNGPGYVLKDGARPDVTESESGSPEYRQQSAVPLDGETHAGEDVAVFARGPQAHLVHGVQEQTFIAHVMAFAACLEPYTACDLAPRAGTTD

SEQ ID NO: 1992 - protein, 185 aa, Homo Sapiens
YSPRTPDRVSEADIQRLLHGVMEQLGIARPRVEYPAHQAMNLVGPQSIEGGAHEGLQHLGPFGNIPNIVAELTGDNIPKDFSEDQGYPDPPNPCPVGKTDDGCLENTPDTAEFSREFQLHQHLFDPEHDYPGLGKWNKKLLYEKMKGGERRKRRSVNPYLQGQRLDNVVAKKSVPHFSDEDKDPE

SEQ ID NO: 1993 - protein, 395 aa, Homo Sapiens
ASPEGKVTACHSSQPNATLYKMSSINADFAFNLYRRFTVETPDKNIFFSPVSISAALVMLSFGACCSTQTEIVETLGFNLTDTPMVEIQHGFQHLICSLNFPKKELELQIGNALFIGKHLKPLAKFLNDVKTLYETEVFSTDFSNISAAKQEINSHVEMQTKGKVVGLIQDLKPNTIMVLVNYIHFKAQWANPFDPSKTEDSSSFLIDKTTTVQVPMMHQMEQYYHLVDMELNCTVLQMDYSKNALALFVLPKEGQMESVEAAMSSKTLKKWNRLLQKGWVDLFVPKFSISATYDLGATLLKMGIQHAYSENADFSGLTEDNGLKLSNAAHKAVLHIGEKGTEAAAVPEVELSDQPENTFLHPIIQIDRSFMLLILERSTRSILFLGKVVNPTEA

SEQ ID NO: 1994 - protein, 480 aa, Homo Sapiens
GSKGPLDQLEKGGETAQSADPQWEQLNNKNLSMPLLPADFHKENTVTNDWIPEGEEDDDYLDLEKIFSEDDDYIDIVDSLSVSPTDSDVSAGNILQLFHGKSRIQRLNILNAKFAFNLYRVLKDQVNTFDNIFIAPVGISTAMGMISLGLKGETHEQVHSILHFKDFVNASSKYEITTIHNLFRKLTHRLFRRNFGYTLRSVNDLYIQKQFPILLDFKTKVREYYFAEAQIADFSDPAFISKTNNHIMKLTKGLIKDALENIDPATQMMILNCIYFKGSWVNKFPVEMTHNHNFRLNEREVVKVSMMQTKGNFLAANDQELDCDILQLEYVGGISMLIVVPHKMSGMKTLEAQLTPRVVERWQKSMTNRTREVLLPKFKLEKNYNLVESLKLMGIRMLFDKNGNMAGISDQRIAIDLFKHQGTITVNEEGTQATTVTTVGFMPLSTQVRFTVDRPFLFLIYEHRTSCLLFMGRVANPSRS

SEQ ID NO: 1995 - protein, 211 aa, Homo Sapiens
RETIESLSSSEESITEYKQKVEKVKHEDQQQGEDEHQDKIYPSFQPQPLIYPFVEPIPYGFLPQNILPLAQPAVVLPVPQPEIMEVPKAKDTVYTKGRVMPVLKSPTIPFFDPQIPKLTDLENLHLPLPLLQPLMQQVPQPIPQTLALPPQPLWSVPQPKVLPIPQQVVPYPQRAVPVQALLLNQELLLNPTHQIYPVTQPLAPVHNPISV

SEQ ID NO: 1996 - protein, 373 aa, Homo Sapiens
RSDQEPLYPVQVSSADARLMVFDKTEGTWRLLCSSRSNARVAGLSCEEMGFLRALTHSELDVRTAGANGTSGFFCVDEGRLPHTQRLLEVISVCDCPRGRFLAAICQDCGRRKLPVDRIVGGRDTSLGRWPWQVSLRYDGAHLCGGSLLSGDWVLTAAHCFPERNRVLSRWRVFAGAVAQASPHGLQLGVQAVVYHGGYLPFRDPNSEENSNDIALVHLSSPLPLTEYIQPVCLPAAGQALVDGKICTVTGWGNTQYYGQQAGVLQEARVPIISNDVCNGADFYGNQIKPKMFCAGYPEGGIDACQGDSGGPFVCEDSISRTPRWRLCGIVSWGTGCALAQKPGVYTKVSDFREWIFQAIKTHSEASGMVTQL

SEQ ID NO: 1997 - protein, 469 aa, Homo Sapiens
GKVLVWPTEFSHWMNIKTILDELVQRGHEVTVLASSASISFDPNSPSTLKFEVYPVSLTKTEFEDIIKQLVKRWAELPKDTFWSYFSQVQEIMWTFNDILRKFCKDIVSNKKLMKKLQESRFDVVLADAVFPFGELLAELLKIPFVYSLRFSPGYAIEKHSGGLLFPPSYVPVVMSELSDQMTFIERVKNMIYVLYFEFWFQIFDMKKWDQFYSEVLGRPTTLSETMAKADIWLIRNYWDFQFPHPLLPNVEFVGGLHCKPAKPLPKEMEEFVQSSGENGVVVFSLGSMVSNTSEERANVIASALAKIPQKVLWRFDGNKPDTLGLNTRLYKWIPQNDLLGHPKTRAFITHGGANGIYEAIYHGIPMVGVPLFADQPDNIAHMKAKGAAVSLDFHTMSSTDLLNALKTVINDPLYKENAMKLSRIHHDQPVKPLDRAVFWIEFVMRHKGAKHLRVAAHDLTWFQYHSLD

SEQ ID NO: 1998 - protein, 574 aa, Homo Sapiens
EDDIIIATKNGKVRGMNLTVFGGTVTAFLGIPYAQPPLGRLRFKKPQSLTKWSDIWNATKYANSCCQNIDQSFPGFHGSEMWNPNTDLSEDCLYLNVWIPAPKPKNATVLIWIYGGGFQTGTSSLHVYDGKFLARVERVIVVSMNYRVGALGFLALPGNPEAPGNMGLFDQQLALQWVQKNIAAFGGNPKSVTLFGESAGAASVSLHLLSPGSHSLFTRAILQSGSFNAPWAVTSLYEARNRTLNLAKLTGCSRENETEIIKCLRNKDPQEILLNEAFVVPYGTPLSVNFGPTVDGDFLTDMPDILLELGQFKKTQILVGVNKDEGTAFLVYGAPGFSKDNNSIITRKEFQEGLKIFFPGVSEFGKESILFHYTDWVDDQRPENYREALGDVVGDYNFICPALEFTKKFSEWGNNAFFYYFEHRSSKLPWPEWMGVMHGYEIEFVFGLPLERRDNYTKAEEILSRSIVKRWANFAKYGNPNETQNNSTSWPVFKSTEQKYLTLNTESTRIMTKLRAQQCRFWTSFFPKVLEMTGNIDEAEWEWKAGFHRWNNYMMDWKNQFNDYTSKKESCVGL

SEQ ID NO: 1999 - protein, 398 aa, Homo Sapiens
LDNGLARTPTMGWLHWERFMCNLDCQEEPDSCISEKLFMEMAELMVSEGWKDAGYEYLCIDDCWMAPQRDSEGRLQADPQRFPHGIRQLANYVHSKGLKLGIYADVGNKTCAGFPGSFGYYDIDAQTFADWGVDLLKFDGCYCDSLENLADGYKHMSLALNRTGRSIVYSCEWPLYMWPFQKPNYTEIRQYCNHWRNFADIDDSWKSIKSILDWTSFNQERIVDVAGPGGWNDPDMLVIGNFGLSWNQQVTQMALWAIMAAPLFMSNDLRHISPQAKALLQDKDVIAINQDPLGKQGYQLRQGDNFEVWERPLSGLAWAVAMINRQEIGGPRSYTIAVASLGKGVACNPACFITQLLPVKRKLGFYEWTSRLRSHINPTGTVLLQLENTMQMSLKDLL

SEQ ID NO: 2000 - protein, 58 aa, Homo Sapiens
VSQRTDGESRAHLGALLARYIQQARKAPSGRMSIVKNLQNLDPSHRISDRDYMGWMDF

SEQ ID NO: 2001 - protein, 755 aa, Homo Sapiens
ATASRGASQAGAPQGRVPEARPNSMVVEHPEFLKAGKEPGLQIWRVEKFDLVPVPTNLYGDFFTGDAYVILKTVQLRNGNLQYDLHYWLGNECSQDESGAAAIFTVQLDDYLNGRAVQHREVQGFESATFLGYFKSGLKYKKGGVASGFKHVVPNEVVVQRLFQVKGRRVVRATEVPVSWESFNNGDCFILDLGNNIHQWCGSNSNRYERLKATQVSKGIRDNERSGRARVHVSEEGTEPEAMLQVLGPKPALPAGTEDTAKEDAANRKLAKLYKVSNGAGTMSVSLVADENPFAQGALKSEDCFILDHGKDGKIFVWKGKQANTEERKAALKTASDFITKMDYPKQTQVSVLPEGGETPLFKQFFKNWRDPDQTDGLGLSYLSSHIANVERVPFDAATLHTSTAMAAQHGMDDDGTGQKQIWRIEGSNKVPVDPATYGQFYGGDSYIILYNYRHGGRQGQIIYNWQGAQSTQDEVAASAILTAQLDEELGGTPVQSRVVQGKEPAHLMSLFGGKPMIIYKGGTSREGGQTAPASTRLFQVRANSAGATRAVEVLPKAGALNSNDAFVLKTPSAAYLWVGTGASEAEKTGAQELLRVLRAQPVQVAEGSEPDGFWEALGGKAAYRTSPRLKDKKMDAHPPRLFACSNKIGRFVIEEVPGELMQEDLATDDVMLLDTWDQVFVWVGKDSQEEEKTEALTSAKRYIETDPANRDRRTPITVVKQGFEPPSFVGWFLGWDDDYWSVDPLDRAMAELAA

SEQ ID NO: 2002 - protein, 509 aa, Homo Sapiens
KIQIQRSGHLNLYLLLDCSQSVSENDFLIFKESASLMVDRIFSFEINVSVAIITFASEPKVLMSVLNDNSRDMTEVISSLENANYKDHENGTGTNTYAALNSVYLMMNNQMRLLGMETMAWQEIRHAIILLTDGKSNMGGSPKTAVDHIREILNINQKRNDYLDIYAIGVGKLDVDWRELNELGSKKDGERHAFILQDTKALHQVFEHMLDVSKLTDTICGVGNMSANASDQERTPWHVTIKPKSQETCRGALISDQWVLTAAHCFRDGNDHSLWRVNVGDPKSQWGKEFLIEKAVISPGFDVFAKKNQGILEFYGDDIALLKLAQKVKMSTHARPICLPCTMEANLALRRPQGSTCRDHENELLNKQSVPAHFVALNGSKLNINLKMGVEWTSCAEVVSQEKTMFPNLTDVREVVTDQFLCSGTQEDESPCKGESGGAVFLERRFRFFQVGLVSWGLYNPCLGSADKNSRKRAPRSKVPPPRDFHINLFRMQPWLRQHLGDVLNFLPL

SEQ ID NO: 2003 - protein, 114 aa, Homo Sapiens
MTCKMSQLERNIETIINTFHQYSVKLGHPDTLNQGEFKELVRKDLQNFLKKENKNEKVIEHIMEDLDTNADKQLSFEEFIMLMARLTWASHEKMHEGDEGPGHHHKPGLGEGTP

SEQ ID NO: 2004 - protein, 448 aa, Homo Sapiens
ADQRRDFIDIESKFALRTPEDTAEDTCHLIPGVAESVATCHFNHSSKTFMVIHGWTVTGMYESWVPKLVAALYKREPDSNVIVVDWLSRAQEHYPVSAGYTKLVGQDVARFINWMEEEFNYPLDNVHLLGYSLGAHAAGIAGSLTNKKVNRITGLDPAGPNFEYAEAPSRLSPDDADFVDVLHTFTRGSPGRSIGIQKPVGHVDIYPNGGTFQPGCNIGEAIRVIAERGLGDVDQLVKCSHERSIHLFIDSLLNEENPSKAYRCSSKEAFEKGLCLSCRKNRCNNLGYEISKVRAKRSSKMYLKTRSQMPYKVFHYQVKIHFSGTESETHTNQAFEISLYGTVAESENIPFTLPEVSTNKTYSFLIYTEVDIGELLMLKLKWKSDSYFSWSDWWSSPGFAIQKIRVKAGETQKKVIFCSREKVSHLQKGKAPAVFVKCHDKSLNKKSG

SEQ ID NO: 2005 - protein, 441 aa, Homo Sapiens
TLEKNVLVVSVVTPGCNQLPTLESVENYTLTINDDQCLLLSETVWGALRGLETFSQLVWKSAEGTFFINKTEIEDFPRFPHRGLLLDTSRHYLPLSSILDTLDVMAYNKLNVFHWHLVDDPSFPYESFTFPELMRKGSYNPVTHIYTAQDVKEVIEYARLRGIRVLAEFDTPGHTLSWGPGIPGLLTPCYSGSEPSGTFGPVNPSLNNTYEFMSTFFLEVSSVFPDFYLHLGGDEVDFTCWKSNPEIQDFMRKKGFGEDFKQLESFYIQTLLDIVSSYGKGYVVWQEVFDNKVKIQPDTIIQVWREDIPVNYMKELELVTKAGFRALLSAPWYLNRISYGPDWKDFYVVEPLAFEGTPEQKALVIGGEACMWGEYVDNTNLVPRLWPRAGAVAERLWSNKLTSDLTFAYERLSHFRCELLRRGVQAQPLNVGFCEQEFEQT

SEQ ID NO: 2006 - protein, 238 aa, Homo Sapiens
IVGGWECEQHSQPWQAALYHFSTFQCGGILVHRQWVLTAAHCISDNYQLWLGRHNLFDDENTAQFVHVSESFPHPGFNMSLLENHTRQADEDYSHDLMLLRLTEPADTITDAVKVVELPTQEPEVGSTCLASGWGSIEPENFSFPDDLQCVDLKILPNDECKKVHVQKVTDFMLCVGHLEGGKDTCVGDSGGPLMCDGVLQGVTSWGYVPCGTPNKPSVAVRVLSYVKWIEDTIAENS

SEQ ID NO: 2007 - protein, 378 aa, Homo Sapiens
SHFNPLSLEELGSNTGIQVFNQIVKSRPHDNIVISPHGIASVLGMLQLGADGRTKKQLAMVMRYGVNGVGKILKKINKAIVSKKNKDIVTVANAVFVKNASEIEVPFVTRNKDVFQCEVRNVNFEDPASACDSINAWVKNETRDMIDNLLSPDLIDGVLTRLVLVNAVYFKGLWKSRFQPENTKKRTFVAADGKSYQVPMLAQLSVFRCGSTSAPNDLWYNFIELPYHGESISMLIALPTESSTPLSAIIPHISTKTIDSWMSIMVPKRVQVILPKFTAVAQTDLKEPLKVLGITDMFDSSKANFAKITRSENLHVSHILQKAKIEVSEDGTKASAATTAILIARSSPPWFIVDRPFLFFIRHNPTGAVLFMGQINKP

SEQ ID NO: 2008 - protein, 379 aa, Homo Sapiens
LFGKLHPGSPEVTMNISQMITYWGYPNEEYEVVTEDGYILEVNRIPYGKKNSGNTGQRPVVFLQHGLLASATNWISNLPNNSLAFILADAGYDVWLGNSRGNTWARRNLYYSPDSVEFWAFSFDEMAKYDLPATIDFIVKKAGQKQLHYVGHSQGTTIGFIAFSTNPSLAKRIKTFYALAPVATVKYTKSLINKLRFVPQSLFKFIFGDKIFYPHNFFDQFLATEVCSREMLNLLCSNALFIICGFDSKNFNTSRLDVYLSHNPAGTSVQNMFHWTQAVKSGKFQAYDWGSPVQNRMHYDQSQPPYYNVTAMNVPIAVWNGGKDLLADPQDVGLLLPKLPNLIYHKEIPFYNHLDFIWAMDAPQEVYNDIVSMISEDKK

SEQ ID NO: 2009 - protein, 491 aa, Homo Sapiens
DAPEEEDHVLVLRKSNFAEALAAHKYLLVEFYAPWCGHCKALAPEYAKAAGKLKAEGSEIRLAKVDATEESDLAQQYGVRGYPTIKFFRNGDTASPKEYTAGREADDIVNWLKKRTGPAATTLPDGAAAESLVESSEVAVIGFFKDVESDSAKQFLQAAEAIDDIPFGITSNSDVFSKYQLDKDGVVLFKKFDEGRNNFEGEVTKENLLDFIKHNQLPLVIEFTEQTAPKIFGGEIKTHILLFLPKSVSDYDGKLSNFKTAAESFKGKILFIFIDSDHTDNQRILEFFGLKKEECPAVRLITLEEEMTKYKPESEELTAERITEFCHRFLEGKIKPHLMSQELPEDWDKQPVKVLVGKNFEDVAFDEKKNVFVEFYAPWCGHCKQLAPIWDKLGETYKDHENIVIAKMDSTANEVEAVKVHSFPTLKFFPASADRTVIDYNGERTLDGFKKFLESGGQDGAGDDDDLEDLEEAEEPDMEEDDDQKAVKDEL

SEQ ID NO: 2010 - protein, 237 aa, Homo Sapiens
IVGGWECEKHSQPWQVLVASRGRAVCGGVLVHPQWVLTAAHCIRNKSVILLGRHSLFHPEDTGQVFQVSHSFPHPLYDMSLLKNRFLRPGDDSSHDLMLLRLSEPAELTDAVKVMDLPTQEPALGTTCYASGWGSIEPEEFLTPKKLQCVDLHVISNDVCAQVHPQKVTKFMLCAGRWTGGKSTCSGDSGGPLVCNGVLQGITSWGSEPCALPERPSLYTKVVHYRKWIKDTIVANP

SEQ ID NO: 2011 - protein, 348 aa, Homo Sapiens
GPIPEVLKNYMDAQYYGEIGIGTPPQCFTVVFDTGSSNLWVPSIHCKLLDIACWIHHKYNSDKSSTYVKNGTSFDIHYGSGSLSGYLSQDTVSVPCQSASSASALGGVKVERQVFGEATKQPGITFIAAKFDGILGMAYPRISVNNVLPVFDNLMQQKLVDQNIFSFYLSRDPDAQPGGELMLGGTDSKYYKGSLSYLNVTRKAYWQVHLDQVEVASGLTLCKEGCEAIVDTGTSLMVGPVDEVRELQKAIGAVPLIQGEYMIPCEKVSTLPAITLKLGGKGYKLSPEDYTLKVSQAGKTLCLSGFMGMDIPPPSGPLWILGDVFIGRYYTVFDRDNNRVGFAEAARL

SEQ ID NO: 2012 - protein, 338 aa, Homo Sapiens
STVHEILCKLSLEGDHSTPPSAYGSVKAYTNFDAERDALNIETAIKTKGVDEVTIVNILTNRSNAQRQDIAFAYQRRTKKELASALKSALSGHLETVILGLLKTPAQYDASELKASMKGLGTDEDSLIEIICSRTNQELQEINRVYKEMYKTDLEKDIISDTSGDFRKLMVALAKGRRAEDGSVIDYELIDQDARDLYDAGVKRKGTDVPKWISIMTERSVPHLQKVFDRYKSYSPYDMLESIRKEVKGDLENAFLNLVQCIQNKPLYFADRLYDSMKGKGTRDKVLIRIMVSRSEVDMLKIRSEFKRKYGKSLYYYIQQDTKGDYQKALLYLCGGDD

SEQ ID NO: 2013 - protein, 182 aa, Homo Sapiens
QKPQRPRRPASPISTIQPKANFDAQQFAGTWLLVAVGSACRFLQEQGHRAEATTLHVAPQGTAMAVSTFRKLDGICWQVRQLYGDTGVLGRFLLQARGARGAVHVVVAETDYQSFAVLYLERAGQLSVKLYARSLPVSDSVLSGFEQRVQEAHLTEDQIFYFPKYGFCEAADQFHVLDEVRR

SEQ ID NO: 2014 - protein, 224 aa, Homo Sapiens
IVGGYNCEENSVPYQVSLNSGYHFCGGSLINEQWVVSAGHCYKSRIQVRLGEHNIEVLEGNEQFINAAKIIRHPQYDRKTLNNDIMLIKLSSRAVINARVSTISLPTAPPATGTKCLISGWGNTASSGADYPDELQCLDAPVLSQAKCEASYPGKITSNMFCVGFLEGGKDSCQGDSGGPVVCNGQLQGVVSWGDGCAQKNKPGVYTKVYNYVKWIKNTIAANS

SEQ ID NO: 2015 - protein, 224 aa, Homo Sapiens
IVGGYICEENSVPYQVSLNSGYHFCGGSLISEQWVVSAGHCYKSRIQVRLGEHNIEVLEGNEQFINAAKIIRHPKYNSRTLDNDILLIKLSSPAVINSRVSAISLPTAPPAAGTESLISGWGNTLSSGADYPDELQCLDAPVLSQAECEASYPGKITNNMFCVGFLEGGKDSCQGDSGGPVVSNGELQGIVSWGYGCAQKNRPGVYTKVYNYVDWIKDTIAANS

SEQ ID NO: 2016 - protein, 162 aa, Homo Sapiens
EVQNQKQPACHENDERPFYQKTAPYVPMYYVPNSYPYYGTNLYQRRPAIAINNPCVPRTYYANPAVVRPHAQIPQRQYLPNSHPPTVVRRPNLHPSFIAIPPKKIQDKIIIPTINTIATVEPTPAPATEPTVDSVVTPEAFSESIITSTPETTTVAVTPPTA

SEQ ID NO: 2017 - protein, 83 aa, Homo Sapiens
SLPCDICKDVVTAAGDMLKDNATEEEILVYLEKTCDWLPKPNMSASCKEIVDSYLPVILDIIKGEMSRPGEVCSALNLCESLQ

SEQ ID NO: 2018 - protein, 435 aa, Homo Sapiens
TQVQQLLVSITLQSECDAFPNISSDESYTLLVKEPVAVLKANRVWGALRGLETFSQLVYQDSYGTFTINESTIIDSPRFSHRGILIDTSRHYLPVKIILKTLDAMAFNKFNVLHWHIVDDQSFPYQSITFPELSNKGSYSLSHVYTPNDVRMVIEYARLRGIRVLPEFDTPGHTLSWGKGQKDLLTPCYSRQNKLDSFGPINPTLNTTYSFLTTFFKEISEVFPDQFIHLGGDEVEFKCWESNPKIQDFMRQKGFGTDFKKLESFYIQKVLDIIATINKGSIVWQEVFDDKAKLAPGTIVEVWKDSAYPEELSRVTASGFPVILSAPWYLDLISYGQDWRKYYKVEPLDFGGTQKQKQLFIGGEACLWGEYVDATNLTPRLWPRASAVGERLWSSKDVRDMDDAYDRLTRHRCRMVERGIAAQPLYAGYCNHENM

SEQ ID NO: 2019 - protein, 220 aa, Homo Sapiens
APRSVDWREKGYVTPVKNQGQCGSCWAFSATGALEGQMFRKTGRLISLSEQNLVDCSGPQGNEGCNGGLMDYAFQYVQDNGGLDSEESYPYEATEESCKYNPKYSVANDTGFVDIPKQEKALMKAVATVGPISVAIDAGHESFLFYKEGIYFEPDCSSEDMDHGVLVVGYGFESTESDNNKYWLVKNSWGEEWGMGGYVKMAKDRRNHCGIASAASYPTV

SEQ ID NO: 2020 - protein, 607 aa, Homo Sapiens
LYFSRDAYWEKLYVDQAAGTPLLYVHALRDAPEEVPSFRLGQHLYGTYRTRLHENNWICIQEDTGLLYLNRSLDHSSWEKLSVRNRGFPLLTVYLKVFLSPTSLREGECQWPGCARVYFSFFNTSFPACSSLKPRELCFPETRPSFRIRENRPPGTFHQFRLLPVQFLCPNISVAYRLLEGEGLPFRCAPDSLEVSTRWALDREQREKYELVAVCTVHAGAREEVVMVPFPVTVYDEDDSAPTFPAGVDTASAVVEFKRKEDTVVATLRVFDADVVPASGELVRRYTSTLLPGDTWAQQTFRVEHWPNETSVQANGSFVRATVHDYRLVLNRNLSISENRTMQLAVLVNDSDFQGPGAGVLLLHFNVSVLPVSLHLPSTYSLSVSRRARRFAQIGKVCVENCQAFSGINVQYKLHSSGANCSTLGVVTSAEDTSGILFVNDTKALRRPKCAELHYMVVATDQQTSRQAQAQLLVTVEGSYVAEEAGCPLSCAVSKRRLECEECGGLGSPTGRCEWRQGDGKGITRNFSTCSPSTKTCPDGHCDVVETQDINICPQDCLRGSIVGGHEPGEPRGIKAGYGTCNCFPEEEKCFCEPEDIQDPLCDELCR

SEQ ID NO: 2021 - protein, 79 aa, Homo Sapiens
FPIPLPYCWLCRALIKRIQAMIPKGALAVAVAQVCRVVPLVAGGICQCLAERYSVILLDTLLGRMLPQLVCRLVLRCSM

SEQ ID NO: 2022 - protein, 128 aa, Homo Sapiens
KESRAKKFQRQHMDSDSSPSSSSTYCNQMMRRRNMTQGRCKPVNTFVHEPLVDVQNVCFQEKVTCKNGQGNCYKSNSSMHITDCRLTNGSRYPNCAYRTSPKERHIIVACEGSPYVPVHFDASVEDST

SEQ ID NO: 2023 - protein, 94 aa, Homo Sapiens
SCYFIPNEGVPGDSTRKCMDLKGNKHPINSEWQTDNCETCTCYETEISCCTLVSTPVGYDKDNCQRIFKKEDCKYIVVEKKDPKKTCSVSEWII

SEQ ID NO: 2024 - protein, 383 aa, Homo Sapiens
MDPNAAYVNMSNHHRGLASANVDFAFSLYKHLVALSPKKNIFISPVSISMALAMLSLGTCGHTRAQLLQGLGFNLTERSETEIHQGFQHLHQLFAKSDTSLEMTMGNALFLDGSLELLESFSADIKHYYESEVLAMNFQDWATASRQINSYVKNKTQGKIVDLFSGLDSPAILVLVNYIFFKGTWTQPFDLASTREENFYVDETTVVKVPMMLQSSTISYLHDAELPCQLVQMNYVGNGTVFFILPDKGKMNTVIAALSRDTINRWSAGLTSSQVDLYIPKVTISGVYDLGDVLEEMGIADLFTNQANFSRITQDAQLKSSKVVHKAVLQLNEEGVDTAGSTGVTLNLTSKPIILRFNQPFIIMIFDHFTWSSLFLARVMNPV

SEQ ID NO: 2025 - protein, 241 aa, Homo Sapiens
VVGGEEARPNSWPWQVSLQYSSNGKWYHTCGGSLIANSWVLTAAHCISSSRTYRVGLGRHNLYVAESGSLAVSVSKIVVHKDWNSNQISKGNDIALLKLANPVSLTDKIQLACLPPAGTILPNNYPCYVTGWGRLQTNGAVPDVLQQGRLLVVDYATCSSSAWWGSSVKTSMICAGGDGVISSCNGDSGGPLNCQASDGRWQVHGIVSFGSRLGCNYYHKPSVFTRVSNYIDWINSVIANN

SEQ ID NO: 2026 - protein, 241 aa, Homo Sapiens
MLGGEEARPNSWPWQVSLQYSSNGQWYHTCGGSLIANSWVLTAAHCISSSGIYRVMLGQHNLYVAESGSLAVSVSKIVVHKDWNSDQVSKGNDIALLKLANPVSLTDKIQLACLPPAGTILPNNYPCYVTGWGRLQTNGALPDDLKQGRLLVVDYATCSSSGWWGSTVKTNMICAGGDGVICTCNGDSGGPLNCQASDGRWEVHGIGSLTSVLGCNYYYKPSIFTRVSNYNDWINSVIANN

SEQ ID NO: 2027 - protein, 238 aa, Homo Sapiens
IVGGRRARPHAWPFMVSLQLRGGHFCGATLIAPNFVMSAAHCVANVNVRAVRVVLGAHNLSRREPTRQVFAVQRIFENGYDPVNLLNDIVILQLNGSATINANVQVAQLPAQGRRLGNGVQCLAMGWGLLGRNRGIASVLQELNVTVVTSLCRRSNVCTLVRGRQAGVCFGDSGSPLVCNGLIHGIASFVRGGCASGLYPDAFAPVAQFVNWIDSIIQRSEDNPCPHPRDPDPASRTH

SEQ ID NO: 2028 - protein, 378 aa, Homo Sapiens
FRTFPGIPKWRKTHLTYRIVNYTPDLPKDAVDSAVEKALKVWEEVTPLTFSRLYEGEADIMISFAVREHGDFYPFDGPGNVLAHAYAPGPGINGDAHFDDDEQWTKDTTGTNLFLVAAHEIGHSLGLFHSANTEALMYPLYHSLTDLTRFRLSQDDINGIQSLYGPPPDSPETPLVPTEPVPPEPGTPANCDPALSFDAVSTLRGEILIFKDRHFWRKSLRKLEPELHLISSFWPSLPSGVDAAYEVTSKDLVFIFKGNQFWAIRGNEVRAGYPRGIHTLGFPPTVRKIDAAISDKEKNKTYFFVEDKYWRFDEKRNSMEPGFPKQIAEDFPGIDSKIDAVFEEFGFFYFFTGSSQLEFDPNAKKVTHTLKSNSWLNC

SEQ ID NO: 2029 - protein, 222 aa, Homo Sapiens
WTGEDSAEPNSDSAEWIRDMYAKVTEIWQEVMQRRDDDGTLHAACQVQPSATLDAAQPRVTGVVLFRQLAPRAKLDAFFALEGFPTEPNSSSRAIHVHQFGDLSQGCESTGPHYNPLAVPHPQHPGDFGNFAVRDGSLWRYRAGLAASLAGPHSIVGRAVVVHAGEDDLGRGGNQASVENGNAGRRLACCVVGVCGPGLWERQAREHSERKKRRRESECKAA

SEQ ID NO: 2030 - protein, 235 aa, Homo Sapiens
IIGGRESRPHSRPYMAYLQIQSPAGQSRCGGFLVREDFVLTAAHCWGSNINVTLGAHNIQRRENTQQHITARRAIRHPQYNQRTIQNDIMLLQLSRRVRRNRNVNPVALPRAQEGLRPGTLCTVAGWGRVSMRRGTDTLREVQLRVQRDRQCLRIFGSYDPRRQICVGDRRERKAAFKGDSGGPLLCNNVAHGIVSYGKSSGVPPEVFTRVSSFLPWIRTTMRSFKLLDQMETPL

SEQ ID NO: 2031 - protein, 699 aa, Homo Sapiens
YDDGICKSSDCIKSAARLIQNMDATTEPCTDFFKYACGGWLKRNVIPETSSRYGNFDILRDELEVVLKDVLQEPKTEDIVAVQKAKALYRSCINESAIDSRGGEPLLKLLPDIYGWPVATENWEQKYGASWTAEKAIAQLNSKYGKKVLINLFVGTDDKNSVNHVIHIDQPRLGLPSRDYYECTGIYKEACTAYVDFMISVARLIRQEERLPIDENQLALEMNKVMELEKEIANATAKPEDRNDPMLLYNKMTLAQIQNNFSLEINGKPFSWLNFTNEIMSTVNISITNEEDVVVYAPEYLTKLKPILTKYSARDLQNLMSWRFIMDLVSSLSRTYKESRNAFRKALYGTTSETATWRRCANYVNGNMENAVGRLYVEAAFAGESKHVVEDLIAQIREVFIQTLDDLTWMDAETKKRAEEKALAIKERIGYPDDIVSNDNKLNNEYLELNYKEDEYFENIIQNLKFSQSKQLKKLREKVDKDEWISGAAVVNAFYSSGRNQIVFPAGILQPPFFSAQQSNSLNYGGIGMVIGHEITHGFDDNGRNFNKDGDLVDWWTQQSASNFKEQSQCMVYQYGNFSWDLAGGQHLNGINTLGENIADNGGLGQAYRAYQNYIKKNGEEKLLPGLDLNHKQLFFLNFAQVWCGTYRPEYAVNSIKTDVHSPGNFRIIGTLQNSAEFSEAFHCRKNSYMNPEKKCRVW

SEQ ID NO: 2032 - protein, 116 aa, Homo Sapiens [sequence omitted]

SEQ ID NO: 2033 - protein, 224 aa, Homo Sapiens
GYLLVKHSQTDQEPMCPVGMNKLWSGYSLLYFEGQEKAHNQDLGLAGSCLARFSTMPFLYCNPGDVCYYASRNDKSYWLSTTAPLPMMPVAEDEIKPYISRCSVCEAPAIAIAVHSQDVSIPHCPAGWRSLWIGYSFLMHTAAGDEGGGQSLVSPGSCLEDFRATPFIECNGGRGTCHYYANKYSFWLTTIPEQSFQGSPSADTLKAGLIRTHISRCQVCMKNL

SEQ ID NO: 2034 - protein, 452 aa, Homo Sapiens
NQEQVSPLTLLKLGNQEPGGQTALKSPPGVCSRDPTPEQTHRLARAMMAFTADLFSLVAQTSTCPNLILSPLSVALALSHLALGAQNHTLQRLQQVLHAGSGPCLPHLLSRLCQDLGPGAFRLAARMYLQKGFPIKEDFLEQSEQLFGAKPVSLTGKQEDDLANINQWVKEATEGKIQEFLSGLPEDTVLLLLNAIHFQGFWRNKFDPSLTQRDSFHLDEQFTVPVEMMQARTYPLRWFLLEQPEIQVAHFPFKNNMSFVVLVPTHFEWNVSQVLANLSWDTLHPPLVWERPTKVRLPKLYLKHQMDLVATLSQLGLQELFQAPDLRGISEQSLVVSGVQHQSTLELSEVGVEAAAATSIAMSRMSLSSFSVNRPFLFFIFEDTTGLPLFVGSVRNPNPSAPRELKEQQDSPGNKDFLQSLKGFPRGDKLFGPDLKLVPPMEEDYPQFGSPK

SEQ ID NO: 2035 - protein, 234 aa, Homo Sapiens
APWQCAPCSAEKLALCPPVSASCSEVTRSAGCGCCPMCALPLGAACGVATARCARGLSCRALPGEQQPLHALTRGQGACVQESDASAPHAAEAGSPESPESTEITEEELLDNFHLMAPSEEDHSILWDAISTYDGSKALHVTNIKKWKEPCRIELYRVVESLAKAQETSGEEISKFYLPNCNKNGFYHSRQCETSMDGEAGLCWCVYPWNGKRIPGSPEIRGDPNCQIYFNVQN

SEQ ID NO: 2036 - protein, 242 aa, Homo Sapiens
VVNGEDAVPYSWPWQVSLQYEKSGSFYHTCGGSLIAPDWVVTAGHCISSSWTYQVVLGEYDRAVKEGPEQVIPINSGDLFVHPLWNRSCVACGNDIALIKLSRSAQLGDAVQLASLPPAGDILPNETPCYITGWGRLYTNGPLPDKLQEALLPVVDYEHCSRWNWWGSSVKKTMVCAGGDIRSGCNGDSGGPLNCPTEDGGWQVHGVTSFVSAFGCNTRRKPTVFTRVSAFIDWIEETIASH

SEQ ID NO: 2037 - protein, 395 aa, Homo Sapiens
RCLNLKSPTAPPDLYFQDSGLSRFLLKSCPLLTKEYIPPLIWGKSGHIQTALYGKMGRVRSPHPYGHRKFITMSDGATSTFDLFEPLAEHCVGDDITMVICPGIANHSEKQYIRTFVDYAQKNGYRCAVLNHLGALPNIELTSPRMFTYGCTWEFGAMVNYIKKTYPLTQLVVVGFSLGGNIVCKYLGETQANQEKVLCCVSVCQGYSALRAQETFMQWDQCQRFYNFLMADNMKKIILSHRQALFGDHVKKPQSLEDTDLSRLYTATSLMQIDDNVMRKFHGYNSLKEYYEEESCMRYLHRIYVPLMLVNAADDPLVHESLLTIPKSLSEKRENVMFVLPLHGGHLGFFEGSVLFPEPLTWMDKLVVEYANAICQWERNKLQCSDTEQVEADLE

SEQ ID NO: 2038 - protein, 242 aa, Homo Sapiens
VVHGEDAVPYSWPWQVSLQYEKSGSFYHTCGGSLIAPDWVVTAGHCISRDLTYQVVLGEYNLAVKEGPEQVIPINSEELFVHPLWNRSCVACGNDIALIKLSRSAQLGDAVQLASLPPAGDILPNKTPCYITGWGRLYTNGPLPDKLQQARLPVVDYKHCSRWNWWGSTVKKTMVCAGGYIRSGCNGDSGGPLNCPTEDGGWQVHGVTSFVSGFGCNFIWKPTVFTRVSAFIDWIEETIASH

SEQ ID NO: 2039 - protein, 121 aa, Homo Sapiens
WSPQEEDRIIEGGIYDADLNDERVQRALHFVISEYNKATEDEYYRRLLRVLRAREQIVGGVNYFFDIEVGRTICTKSQPNLDTCAFHEQPELQKKQLCSFQIYEVPWEDRMSLVNSRCQEA

SEQ ID NO: 2040 - protein, 173 aa, Homo Sapiens
YSLFPNSPKWTSKVVTYRIVSYTRDLPHITVDRLVSKALNMWGKEIPLHFRKVVWGTADIMIGFARGAHGDSYPFDGPGNTLAHAFAPGTGLGGDAHFDEDERWTDGSSLGINFLYAATHELGHSLGMGHSSDPNAVMYPTYGNGDPQNFKLSQDDIKGIQKLYGKRSNSRKK

SEQ ID NO: 2041 - protein, 378 aa, Homo Sapiens
FSSFPGMPKWRKTHLTYRIVNYTPDLPRDAVDSAIEKALKVWEEVTPLTFSRLYEGEADIMISFAVKEHGDFYSFDGPGHSLAHAYPPGPGLYGDIHFDDDEKWTEDASGTNLFLVAAHELGHSLGLFHSANTEALMYPLYNSFTELAQFRLSQDDVNGIQSLYGPPPASTEEPLVPTKSVPSGSEMPAKCDPALSFDAISTLRGEYLFFKDRYFWRRSHWNPEPEFHLISAFWPSLPSYLDAAYEVNSRDTVFIFKGNEFWAIRGNEVQAGYPRGIHTLGFPPTIRKIDAAVSDKEKKKTYFFAADKYWRFDENSQSMEQGFPRLIADDFPGVEPKVDAVLQAFGFFYFFSGSSQFEFDPNARMVTHILKSNSWLHC

SEQ ID NO: 2042 - protein, 134 aa, Homo Sapiens
ACGLVASNLNLKPGECLRVRGEVAPDAKSFVLNLGKDSNNLCLHFNPRFNAHGDANTIVCNSKDGGAWGTEQREAVFPFQPGSVAEVCITFDQANLTVKLPDGYEFKFPNRLNLEAINYMAADGDFKIKCVAFD

SEQ ID NO: 2043 - protein, 162 aa, Homo Sapiens
MDIPQTKQDLELPKLAGTWHSMAMATNNISLMATLKAPLRVHITSLLPTPEDNLEIVLHRWENNSCVEKKVLGEKTENPKKFKINYTVANEATLLDTDYDNFLFLCLQDTTTPIQSMMCQYLARVLVEDDEIMQGFIRAFRPLPRHLWYLLDLKQMEEPCRF

SEQ ID NO: 2044 - protein, 335 aa, Homo Sapiens
SWWYMRATGGSSRVMCDNVPGLVSSQRQLCHRHPDVMRAISQGVAEWTAECQHQFRQHRWNCNTLDRDHSLFGRVLLRSSRESAFVYAISSAGVVFAITRACSQGEVKSCSCDPKKMGSAKDSKGIFDWGGCSDNIDYGIKFARAFVDAKERKGKDARALMNLHNNRAGRKAVKRFLKQECKCHGVSGSCTLRTCWLAMADFRKTGDYLWRKYNGAIQVVMNQDGTGFTVANERFKKPTKNDLVYFENSPDYCIRDREAGSLGTAGRVCNLTSRGMDSCEVMCCGRGYDTSHVTRMTKCGCKFHWCCAVRCQDCLEALDVHTCKAPKNADWTTAT

SEQ ID NO: 2045 - protein, 238 aa, Homo Sapiens
EPQNCSATKSNYLRGTGPYPPSVDWRKKGNFVSPVKNQGACGSCWTFSTTGALESAIAIATGKMLSLAEQQLVDCAQDFNNHGCQGGLPSQAFEYILYNKGIMGEDTYPYQGKDGYCKFQPGKAIGFVKDVANITIYDEEAMVEAVALYNPVSFAFEVTQDFMMYRTGIYSSTSCHKTPDKVNHAVLAVGYGEKNGIPYWIVKNSWGPQWGMNGYFLIERGKNMCGLAACASYPIPLV

SEQ ID NO: 2046 - protein, 248 aa, Homo Sapiens
HTAAQDNCTCPTNKMTVCSPDGPGGRCQCRALGSGMAVDCSTLTSKCLLLKARMSAPKNARTLVRPSEHALVDNDGLYDPDCDPEGRFKARQCNQTSVCWCVNSVGVRRTDKGDLSLRCDELVRTHHILIDLRHRPTAGAFNHSDLDAELRRLFRERYRLHPKFVAAVHYEQPTIQIELRQNTSQKAAGDVDIGDAAYYFERDIKGESLFQGRGGLDLRVRGEPLQVERTLIYYLDEIPPKFSMKRLT

SEQ ID NO: 2047 - protein, 484 aa, Homo Sapiens
VIPAEEENPAFWNRQAAEALDAAKKLQPIQKVAKNLILFLGDGLGVPTVTATRILKGQKNGKLGPETPLAMDRFPYLALSKTYNVDRQVPDSAATATAYLCGVKANFQTIGLSAAARFNQCNTTRGNEVISVMNRAKQAGKSVGVVTTTRVQHASPAGTYAHTVNRNWYSDADMPASARQEGCQDIATQLISNMDIDVILGGGRKYMFPMGTPDPEYPADASQNGIRLDGKNLVQEWLAKHQGAWYVWNRTELMQASLDQSVTHLMGLFEPGDTKYEIHRDPTLDPSLMEMTEAALRLLSRNPRGFYLFVEGGRIDHGHHEGVAYQALTEAVMFDDAIERAGQLTSEEDTLTLVTADHSHVFSFGGYTLRGSSIFGLAPSKAQDSKAYTSILYGNGPGYVFNSGVRPDVNESESGSPDYQQQAAVPLSSETHGGEDVAVFARGPQAHLVHGVQEQSFVAHVMAFAACLEPYTACDLAPPACTTD

SEQ ID NO: 2048 - protein, 608 aa, Homo Sapiens
DVYQEPTDPKFPQQWYLSGVTQRDLNVKAAWAQGYTGHGIVVSILDDGIEKNHPDLAGNYDPGASFDVNDQDPDPQPRYTQMNDNRHGTRCAGEVAAVANNGVCGVGVAYNARIGGVRMLDGEVTDAVEARSLGLNPNHIHIYSASWGPEDDGKTVDGPARLAEEAFFRGVSQGRGGLGSIFVWASGNGGREHDSCNCDGYTNSIYTLSISSATQFGNVPWYSEACSSTLATTYSSGNQNEKQIVTTDLRQKCTESHTGTSASAPLAAGIIALTLEANKNLTWRDMQHLVVQTSKPAHLNANDWATNGVGRKVSHSYGYGLLDAGAMVALAQNWTTVAPQRKCIIDILTEPKDIGKRLEVRKTVTACLGEPNHITRLEHAQARLTLSYNRRGDLAIHLVSPMGTRSTLLAARPHDYSADGFNDWAFMTTHSWDEDPSGEWVLEIENTSEANNYGTLTKFTLVLYGTAPEGLPVPPESSGCKTLTSSQACVVCEEGFSLHQKSCVQHCPPGFAPQVLDTHYSTENDVETIRASVCAPCHASCATCQGPALTDCLSCPSHASLDPVEQTCSRQSQSSRESPPQQQPPRLPPEVEAGQRLRAGLLPSHLPE

SEQ ID NO: 2049 - protein, 314 aa, Homo Sapiens
QDTCRQGHPGIPGNPGHNGLPGRDGRDGAKGDKGDAGEPGRPGSPGKDGTSGEKGERGADGKVEAKGIKGDQGSRGSPGKHGPKGLAGPMGEKGLRGETGPQGQKGNKGDVGPTGPEGPRGNIGPLGPTGLPGPMGPIGKPGPKGEAGPTGPQGEPGVRGIRGWKGDRGEKGKIGETLVLPKSAFTVGLTVLSKFPSSDVPIKFDKILYNEFNHYDTAAGKFTCHIAGVYYFTYHITVFSRNVQVSLVKNGVKILHTKDAYMSSEDQASGGIVLQLKLGDEVWLQVTGGERFNGLFADEDDDTTFTGFLLFSSP

SEQ ID NO: 2050 - protein, 326 aa, Homo Sapiens; identical to SEQ ID NO: 1628

SEQ ID NO: 2051 - protein, 326 aa, Homo Sapiens
VDEQPLENYLDMEYFGTIGIGTPAQDFTVLFDTGSSNLWVPSVYCSSLACTNHNRFNPEDSSTYQSTSETVSITYGTGSMTGILGYDTVQVGGISDTNQIFGLSETEPGSFLYYAPFDGILGLAYPSISSSGATPVFDNIWNQGLVSQDLFSVYLSADDQSGSVVIFGGIDSSYYTGSLNWVPVTVEGYWQITVDSITMNGEAIACAEGCQAIVDTGTSLLTGPTSPIANIQSDIGASENSDGDMVVSCSAISSLPDIVFTINGVQYPVPPSAYILQSEGSCISGFQGMNLPTESGELWILGDVFIRQYFTVFDRTNNQVGLAPVA

SEQ ID NO: 2052 - protein, 104 aa, Homo Sapiens
RSFFSFLGEAFDGARDMWRAYSDMREANYIGSDKYFHARGNYDAAKRGPGGAWAAEVISDARENIQRFFGHGAEDSLADQAANEWGRSGKDPNHFRPAGLPEKY

SEQ ID NO: 2053 - protein, 104 aa, Homo Sapiens
RSFFSFLGEAFDGARDMWRAYSDMREANYIGSDKYFHARGNYDAAKRGPGGAWAAEVISNARENIQRLTGHGAEDSLADQAANKWGRSGRDPNHFRPAGLPEKY

SEQ ID NO: 2054 - protein, 191 aa, Homo Sapiens
VQTVPLSRLFDHAMLQAHRAHQLAIDTYQEFEETYIPKDQKYSFLHDSQTSFCFSDSIPTPSNMEETQQKSNLELLRISLLLIESWLEPVRFLRSMFANNLVYDTSDSDDYHLLKDLEEGIQTLMGRLEDGSRRTGQILKQTYSKFDTNSHNHDALLKNYGLLYCFRKDMDKVETFLRMVQCRSVEGSCGF

SEQ ID NO: 2055 - protein, 191 aa, Homo Sapiens; identical to SEQ ID NO: 2054

SEQ ID NO: 2056 - protein, 72 aa, Homo Sapiens
EDNDEFFMDFLQTLLVGTPEELYEGTLGKYNVNEDAKAAMTELKSCRDGLQPMHKAELVKLLVQVLGSQDGA

SEQ ID NO: 2057 - protein, 131 aa, Homo Sapiens
YPTQRARYQWVRCNPDSNSANCLEEKGPMFELLPGESNKIPRLRTDLFPKTRIQDLNRIFPLSEDYSGSGFGSGSGSGSGSGSGFLTEMEQDYQLVDESDAFHDNLRSLDRNLPSDSQDLGQHGLEEDFML

SEQ ID NO: 2058 - protein, 227 aa, Homo Sapiens
IIGGHEAKPHSRPYMAYLMIWDQKSLKRCGGFLIQDDFVLTAAHCWGSSINVTLGAHNIKEQEPTQQFIPVKRPIPHPAYNPKNFSNDIMLLQLERKAKRTRAVQPLRLPSNKAQVKPGQTCSVAGWGQTAPLGKHSHTLQEVKMTVQEDRKCESDLRHYYDSTIELCVGDPEIKKTSFKGDSGGPLVCNKVAQGIVSYGRNNGMPPRACTKVSSFVHWIKKTMKRH

SEQ ID NO: 2059 - protein, 134 aa, Homo Sapiens
KPPQFTWAQWFETQHINMTSQQCTNAMQVINNYQRRCKNQNTFLLTTFANVVNVCGNPNMTCPSNKTRKNCHHSGSQVPLIHCNLTTPSPQNISNCRYAQTPANMFYIVACDNRDQRRDPPQYPVVPVHLDRII

SEQ ID NO: 2060 - protein, 883 aa, Homo Sapiens
AHPGRPRAVPTQCDVPPNSRFDCAPDKAITQEQCEARGCCYIPAKQGLQGAQMGQPWCFFPPSYPSYKLENLSSSEMGYTATLTRTTPTFFPKDILTLRLDVMMETENRLHFTIKDPANRRYEVPLETPHVHSRAPSPLYSVEFSEEPFGVIVRRQLDGRVLLNTTVAPLFFADQFLQLSTSLPSQYITGLAEHLSPLMLSTSWTRITLWNRDLAPTPGANLYGSHPFYLALEDGGSAHGVFLLNSNAMDVVLQPSPALSWRSTGGILDVYIFLGPEPKSVVQQYLDVVGYPFMPPYWGLGFHLCRWGYSSTAITRQVVENMTRAHFPLDVQWNDLDYMDSRRDFTFNKDGFRDFPAMVQELHQGGRRYMMIVDPAISSSGPAGSYRPYDEGLRRGVFITNETGQPLIGKVWPGSTAFPDFTNPTALAWWEDMVAEFHDQVPFDGMWIDMNEPSNFIRGSEDGCPNNELENPPYVPGVVGGTLQAATICASSHQFLSTHYNLHNLYGLTEAIASHRALVKARGTRPFVISRSTFAGHGRYAGHWTGDVWSSWEQLASSVPEILQFNLLGVPLVGADVCGFLGNTSEELCVRWTQLGAFYPFMRNHNSLLSLPQEPYSFSEPAQQAMRKALTLRYALLPHLYTLFHQAHVAGETVARPLFLEFPKDSSTWTVDHQLLWGEALLITPVLQAGKAEVTGYFPLGTWYDLQTVPVEALGSLPPPPAAPREPAIHSEGQWVTLPAPLDTINVHLRAGYIIPLQGPGLTTTESRQQPMALAVALTKGGEARGELFWDDGESLEVLERGAYTQVIFLARNNTIVNELVRVTSEGAGLQLQKVTVLGVATAPQQVLSNGVPVSNFTYSPDTKVLDICVSLLMGEQFLVSWC

SEQ ID NO: 2061 - protein, 402 aa, Homo Sapiens
KDNATCDGPCGLRFRQNPQGGVRIVGGKAAQHGAWPWMVSLQIFTYNSHRYHTCGGSLLNSRWVLTAAHCFVGKNNVHDWRLVFGAKEITYGNNKPVKAPLQERYVEKIIIHEKYNSATEGNDIALVEITPPISCGRFIGPGCLPHFKAGLPRGSQSCWVAGWGYIEEKAPRPSSILMEARVDLIDLDLCNSTQWYNGRVQPTNVCAGYPVGKIDTCQGDSGGPLMCKDSKESAYVVVGITSWGVGCARAKRPGIYTATWPYLNWIASKIGSNALRVIQSATPPPPTTRPPPIRPPFSHPISAHLPWYFQPPPRPLPPRPPAAQPRPPPSPPPPPPPPASPLPPPPPPPPPTPSSTTKLPQGLSFAKRLQQLIEVLKGKTYSDGKNHYDMETTELPELTSTS

SEQ ID NO: 2062 - protein, 298 aa, Homo Sapiens
IPVKQADSGSSEEKQLYNKYPDAVATWLNPDPSQKQNLLAPQNAVSSEETNDFKQETLPSKSNESHDHMDDMDDEDDDDHVDSQDSIDSNDSDDVDDTDDSHQSDESHHSDESDELVTDFPTDLPATEVFTPVVPTVDTYDGRGDSVVYGLRSKSKKFRRPDIQYPDATDEDITSHMESEELNGAYKAIPVAQDLNAPSDWDSRGKDSYETSQLDDQSAETHSHKQSRLYKRKANDESNEHSDVIDSQELSKVSREFHSHEFHSHEDMLVVDPKSKEEDKHLKFRISHELDSASSEVN

SEQ ID NO: 2063 - protein, 452 aa, Homo Sapiens
APDQDEIQRLPGLAKQPSFRQYSGYLKGSGSKHLHYWFVESQKDPENSPVVLWLNGGPGCSSLDGLLTEHGPFLVQPDGVTLEYNPYSWNLIANVLYLESPAGVGFSYSDDKFYATNDTEVAQSNFEALQDFFRLFPEYKNNKLFLTGESYAGIYIPTLAVLVMQDPSMNLQGLAVGNGLSSYEQNDNSLVYFAYYHGLLGNRLWSSLQTHCCSQNKCNFYDNKDLECVTNLQEVARIVGNSGLNIYNLYAPCAGGVPSHFRYEKDTVVVQDLGNIFTRLPLKRMWHQALLRSGDKVRMDPPCTNTTAASTYLNNPYVRKALNIPEQLPQWDMCNFLVNLQYRRLYRSMNSQYLKLLSSQKYQILLYNGDVDMACNFMGDEWFVDSLNQKMEVQRRPWLVKYGDSGEQIAGFVKEFSHIAFLTIKGAGHMVPTDKPLAAFTMFSRFLNKQPY

SEQ ID NO: 2064 - protein, 113 aa, Homo Sapiens
LPVNSPMNKGDTEVMKCIVEVISDTLSKPSPMPVSQECFETLRGDERILSILRHQNLLKELQDLALQGAKERAHQQKKHSGFEDELSEVLENQSSQAELKEAVEEPSSKDVME

SEQ ID NO: 2065 - protein, 484 aa, Homo Sapiens
IIPVEEENPDFWNREAAEALGAAKKLQPAQTAAKNLIIFLGDGMGVSTVTAARILKGQKKDKLGPELPLAMDRFPYVALSKTYNVDKHVPDSGATATAYLCGVKGNFQTIGLSAAARFNQCNTTRGNEVISVMNRAKKAGKSVGVVTTTRVQHASPAGTYAHTVNRNWYSDADVPASARQEGCQDIATQLISNMDIDVILGGGRKYMFRMGTPDPEYPDDYSQGGTRLDGKNLVQEWLAKRQGARYVWNRTELMQASLDPSVTHLMGLFEPGDMKYEIHRDSTLDPSLMEMTEAALRLLSRNPRGFFLFVEGGRIDHGHHESRAYRALTETIMFDDAIERAGQLTSEEDTLSLVTADHSHVFSFGGYPLRGSSIFGLAPGKARDRKAYTVLLYGNGPGYVLKDGARPDVTESESGSPEYRQQSAVPLDEETHAGEDVAVFARGPQAHLVHGVQEQTFIAHVMAFAACLEPYTACDLAPPAGTTD

SEQ ID NO: 2066 - protein, 74 aa, Homo Sapiens
FARAEAEEDGDLQCLCVKTTSQVRPRHITSLEVIKAGPHCPTAQLIATLKNGRKICLDLQALLYKKIIKEHLES

SEQ ID NO: 2067 - protein, 427 aa, Homo Sapiens
DQTVSDNELQEMSNQGSKYVNKEIQNAVNGVKQIKTLIEKTNEERKTLLSNLEEAKKKKEDALNETRESETKLKELPGVCNETMMALWEECKPCLKQTCMKFYARVCRSGSGLVGRQLEEFLNQSSPFYFWMNGDRIDSLLENDRQQTHMLDVMQDHFSRASSIIDELFQDRFFTREPQDTYHYLPFSLPHRRPHFFFPKSRIVRSLMPFSPYEPLNFHAMFQPFLEMIHEAQQAMDIHFHSPAFQHPPTEFIREGDDDRTVCREIRHNSTGCLRMKDQCDKCREILSVDCSTNNPSQAKLRRELDESLQVAERLTRKYNELLKSYQWKMLNTSSLLEQLNEQFNWVSRLANLTQGEDQYYLRVTTVASHTSDSDVPSGVTEVVVKLFDSDPITVTVPVEVSRKNPKFMETVAEKALQEYRKKHREE

SEQ ID NO: 2068 - protein, 636 aa, Homo Sapiens
EEEDKKEDVGTVVGIDLGTTYSCVGVFKNGRVEIIANDQGNRITPSYVAFTPEGERLIGDAAKNQLTSNPENTVFDAKRLIGRTWNDPSVQQDIKFLPFKVVEKKTKPYIQVDIGGGQTKTFAPEEISAMVLTKMKETAEAYLGKKVTHAVVTVPAYFNDAQRQATKDAGTIAGLNVMRIINEPTAAAIAYGLDKREGEKNILVFDLGGGTFDVSLLTIDNGVFEVVATNGDTHLGGEDFDQRVMEHFIKLYKKKTGKDVRKDNRAVQKLRREVEKAKRALSSQHQARIEIESFYEGEDFSETLTRAKFEELNMDLFRSTMKPVQKVLEDSDLKKSDIDEIVLVGGSTRIPKIQQLVKEFFNGKEPSRGINPDEAVAYGAAVQAGVLSGDQDTGDLVLLDVCPLTLGIETVGGVMTKLIPRNTVVPTKKSQIFSTASDNQPTVTIKVYEGERPLTKDNHLLGTFDLTGIPPAPRGVPQIEVTFEIDVNGILRVTAEDKGTGNKNKITITNDQNRLTPEEIERMVNDAEKFAEEDKKLKERIDTRNELESYAYSLKNQIGDKEKLGGKLSSEDKETMEKAVEEKIEWLESHQDADIEDFKAKKKELEEIVQPIISKLYGSAGPPPTGEEDTAEKDEL

SEQ ID NO: 2069 - protein, 477 aa, Homo Sapiens
LGQSLKPEPFGRRAQAVETNKTLHEMKTRFLLFGETNQGCQIRINHPDTLQECGFNSSLPLVMIIHGWSVDGVLENWIWQMVAALKSQPAQPVNVGLVDWITLAHDHYTIAVRNTRLVGKEVAALLRWLEESVQLSRSHVHLIGYSLGAHVSGFAGSSIGGTHKIGRITGLDAAGPLFEGSAPSNRLSPDDANFVDAIHTFTREHMGLSVGIKQPIGHYDFYPNGGSFQPGCHFLELYRHIAQHGFNAITQTIKCSHERSVHLFIDSLLHAGTQSMAYPCGDMNSFSQGLCLSCKKGRCNTLGYHVRQEPRSKSKRLFLVTRAQSPFKVYHYQLKIQFINQTETPIQTTFTMSLLGTKEKMQKIPITLGKGIASNKTYSFLITLDVDIGELIMIKFKWENSAVWANVWDTVQTIIPWSTGPRHSGLVLKTIRVKAGETQQRMTFCSENTDDLLLRPTQEKIFVKCEIKSKTSKRKIR

SEQ ID NO: 2070 - protein, 221 aa, Homo Sapiens
SEAEGRLREKLFSGYDSSVRPAREVGDRVRVSVGLILAQLISLNEKDEEMSTKVYLDLEWTDYRLSWDPAEHDGIDSLRITAESVWLPDVVLLNNNDGNFDVALDISVVVSSDGSVRWQPPGIYRSSCSIQVTYFPFDWQNCTMVFSSYSYDSSEVSLQTGLGPDGQGHQEIHIHEGTFIENGQWEIIHKPSRLIQPPGDPRGGREGQRQEVIFYLIIRRK

SEQ ID NO: 2071 - protein, 476 aa, Homo Sapiens
CSKGTSHEAGIVCRITKPALLVLNHETAKVIQTAFQRASYPDITGEKAMMLLGQVKYGLHNIQISHLSIASSQVELVEAKSIDVSIQNVSVVFKGTLKYGYTTAWWLGIDQSIDFEIDSAIDLQINTQLTCDSGRVRTDAPDCYLSFHKLLLHLQGEREPGWIKQLFTNFISFTLKLVLKGQICKEINVISNIMADFVQTRAASILSDGDIGVDISLTGDPVITASYLESHHKGHFIYKNVSEDLPLPTFSPTLLGDSRMLYFWFSERVFHSLAKVAFQDGRLMLSLMGDEFKAVLETWGFNTNQEIFQEVVGGFPSQAQVTVHCLKMPKISCQNKGVVVNSSVMVKFLFPRPDQQHSVAYTFEEDIVTTVQASYSKKKLFLSLLDFQITPKTVSNLTESSSESIQSFLQSMITAVGIPEVMSRLEVVFTALMNSKGVSLFDIINPEIITRDGFLLLQMDFGFPEHLLVDFLQSLS

SEQ ID NO: 2072 - protein, 70 aa, Homo Sapiens
EICPSFQRVIETLLMDTPSSYEAAMELFSPDQDMREAGAQLKKLVDTLPQKPRESIIKLMEKIAQSSLCN

SEQ ID NO: 2073 - protein, 126 aa, Homo Sapiens
QPVLHQPPAMSSALGTTIRLTCTLRNDHDIGVYSVYWYQQRPGHPPRFLLRYFSQSDKSQGPQVPPRFSGSKDVARNRGYLSISELQPEDEAMYYCAMGARSSEKEEREREWEEEMEPTAARTRVP

SEQ ID NO: 2074 - protein, 999 aa, Homo Sapiens
QQQEVISPDTTERNNNCPEKTDCPIHVYFVLDTSESVTMQSPTDILLFHMKQFVPQFISQLQNEFYLDQVALSWRYGGLHFSDQVEVFSPPGSDRASFIKNLQGISSFRRGTFTDCALANMTEQIRQDRSKGTVHFAVVITDGHVTGSPCGGIKLQAERAREEGIRLFAVAPNQNLKEQGLRDIASTPHELYRNDYATMLPDSTEIDQDTINRIIKVMKHEAYGECYKVSCLEIPGPSGPKGYRGQKGAKGNMGEPGEPGQKGRQGDPGIEGPIGFPGPKGVPGFKGEKGEFGADGRKGAPGLAGKNGTDGQKGKLGRIGPPGCKGDPGNRGPDGYPGEAGSPGERGDQGGKGDPGRPGRRGPPGEIGAKGSKGYQGNNGAPGSPGVKGAKGGPGPRGPKGEPGRRGDPGTKGSPGSDGPKGEKGDPGPEGPRGLAGEVGNKGAKGDRGLPGPRGPQGALGEPGKQGSRGDPGDAGPRGDSGQPGPKGDPGRPGFSYPGPRGAPGEKGEPGPRGPEGGRGDFGLKGEPGRKGEKGEPADPGPPGEPGPRGPRGVPGPEGEPGPPGDPGLTECDVMTYVRETCGCCDCEKRCGALDVVFVIDSSESIGYTNFTLEKNFVINVVNRLGAIAKDPKSETGTRVGVVQYSHEGTFEAIQLDDERIDSLSSFKEAVKNLEWIAGGTWTPSALKFAYDRLIKESRRQKTRVFAVVITDGRHDPRDDDLNLRALCDRDVTVTAIGIGDMFHEKHESENLYSIACDKPQQVRNMTLFSDLVAEKFIDDMEDVLCPDPQIVCPDLPCQTELSVAQCTQRPVDIVFLLDGSERLGEQNFHKARRFVEQVARRLTLARRDDDPLNARVALLQFGGPGEQQVAFPLSHNLTAIHEALETTQYLNSFSHVGAGVVHAINAIVRSPRGGARRHAELSFVFLTDGVTGNDSLHESAHSMRKQNVVPTVLALGSDVDMDVLTTLSLGDRAAVFHEKDYDSLAQPGFFDRFIRWIC

SEQ ID NO: 2075 - protein, 647 aa, Homo Sapiens
NRRNYYIAAEEISWDYSEFVQRETDIEDSDDIPEDTTYKKVVFRKYLDSTFTKRDPRGEYEEHLGILGPIIRAEVDDVIQVRFKNLASRPYSLHAHGLSYEKSSEGKTYEDDSPEWFKEDNAVQPNSSYTYVWHATERSGPESPGSACRAWAYYSAVNPEKDIHSGLIGPLLICQKGILHKDSNMPMDMREFVLLFMTFDEKKSWYYEKKSRSSWRLTSSEMKKSHEFHAINGMIYSLPGLKMYEQEWVRLHLLNIGGSQDIHVVHFHGQTLLENGNKQHQLGVWPLLPGSFKTLEMKASKPGWWLLNTEVGENQRAGMQTPFLIMDRDCRMPMGLSTGIISDSQIKASEFLGYWEPRLARLNNGGSYNAWSVEKLAAEFASKPWIQVDMQKEVIITGIQTQGAKHYLKSCYTTEFYVAYSSNQINWQIFKGNSTRNVMYFNGNSDASTIKENQFDPPIVARYIRISPTRAYNRPTLRLELQGCEVNGCSTPLGMENGKIENKQITASSFKKSWWGDYWEPFRARLNAQGRVNAWQAKANNNKQWLEIDLLKIKKITAIITQGCKSLSSEMYVKSYTIHYSEQGVEWKPYRLKSSMVDKIFEGNTNTKGHVKNFFNPPIISRFIRVIPKTWNQSIALRLELFGCDIY

SEQ ID NO: 2076 - protein, 139 aa, Homo Sapiens
AVSEHQLLHDKGKSIQDLRRRFFLHHLIAEIHTAEIRATSEVSPNSKPSPNTKNHPVRFGSDDEGRYLTQETNKVETYKEQPLKTPGKKKKGKPGKRKEQEKKKRRTRSAWLDSGVTGSGLEGDHLSDTSTTSLELDSR

SEQ ID NO: 2077 - protein, 234 aa, Homo Sapiens
IIGGNEVTPHSRPYMVLLSLDRKTICAGALIAKDWVLTAAHCNLNKRSQVILGAHSITREEPTKQIMLVKKEFPYPCYDPATREGDLKLLQLTEKAKINKYVTILHLPKKGDDVKPGTMCQVAGWGRTHNSASWSDTLREVNITIIDRKVCNDRNHYNFNPVIGMNMVCAGSLRGGRDSCNGDSGSPLLCEGVFRGVTSFGLENKCGDPRGPGVYILLSKKHLNWIIMTIKGAV

SEQ ID NO: 2078 - protein, 133 aa, Homo Sapiens
RPPQFTRAQWFAIQHISLNPPRCTIAMRAINNYRWRCKNQNTFLRTTFANVVNVCGNQSIRCPHNRTLNNCHRSRFRVPLLHCDLINPGAQNISNCRYADRPGRRFYVVACDNRDPRDSPRYPVVPVHLDTTI

SEQ ID NO: 2079 - protein, 90 aa, Homo Sapiens
FVPIFTYGELQRMQEKERNKGQKKSLSVWQRSGEEGPVDPAEPIREEENEMIKLTAPLEIGMRMNSRQLEKYPATLEGLLSEMLPQHAAK

SEQ ID NO: 2080 - protein, 175 aa, Homo Sapiens
NAPLVNVTLYYEALCGGCRAFLIRELFPTWLLVMEILNVTLVPYGNAQEQNVSGRWEFKCQHGEEECKFNKVEACVLDELDMELAFLTIVCMEEFEDMERSLPLCLQLYAPGLSPDTIMECAMGDRGMQLMHANAQRTDALQPPHEYVPWVTVNGKPLEDQTQLLTLVCQLYQGK

SEQ ID NO: 2081 - protein, 587 aa, Homo Sapiens
QRNQLLQKEPDLRLENVQKFPSPEMIRALEYIENLRQQAHKEESSPDYNPYQGVSVPLQQKENGDESHLPERDSLSEEDWMRIILEALRQAENEPQSAPKENKPYALNSEKNFPMDMSDDYETQQWPERKLKHMQFPPMYEENSRDNPFKRTNEIVEEQYTPQSLATLESVFQELGKLTGPNNQKRERMDEEQKLYTDDEDDIYKANNIAYEDVVGGEDWNPVEEKIESQTQEEVRDSKENIEKNEQINDEMKRSGQLGIQEEGLRKESKDQLSDDVSKVIAYLKRLVNAAGSGRLQNGQNGERATRLFEKPLDSQSIYQLIEISRNLQIPPEDLIEMLKTGEKPNGSVEPERELDLPVDLDDISEADLDHPDLFQNRMLSKSGYPKTPGGAGTEALPDGLSVEDILNLLGMESAANQKTSYFPNPYNQEKVLPRLPYGAGRSRSNQLPKAAWIPHVENRQMAYENLNDKDQELGEYLARMLVKYPEIINSNQVKRVPGQGSSEGDLQEEEQIEQAIKEHLNQGSSQETDKLAPVSKRFPVGPPKNDDTPNRQYWDEDLLMKVLEYLNQEKAEKGREHIAKRAMENM

SEQ ID NO: 2082 - protein, 52 aa, Homo Sapiens
FSYFVILAENGFLPGNLVGIRLNWDDRTVNDLEDSYGQQWTYEQRKVVEFTC

SEQ ID NO: 2083 - protein, 625 aa, Homo Sapiens
VAGAEGPDEDSSNRENAIEDEEEEEEEDDDEEEDDLEVKEENGVLVLNDANFDNFVADKDTVLLEFYAPWCGHCKQFAPEYEKIANILKDKDPPIPVAKIDATSASVLASRFDVSGYPTIKILKKGQAVDYEGSRTQEEIVAKVREVSQPDWTPPPEVTLVLTKENFDEVVNDADIILVEFYAPWCGHCKKLAPEYEKAAKELSKRSPPIPLAKVDATAETDLAKRFDVSGYPTLKIFRKGRPYDYNGPREKYGIVDYMIEQSGPPSKEILTLKQVQEFLKDGDDVIIIGVFKGESDPAYQQYQDAANNLREDYKFHHTFSTEIAKFLKVSQGQLVVMQPEKFQSKYEPRSHMMDVQGSTQDSAIKDFVLKYALPLVGHRKVSNDAKRYTRRPLVVVYYSVDFSFDYRAATQFWRSKVLEVAKDFPEYTFAIADEEDYAGEVKDLGLSESGEDVNAAILDESGKKFAMEPEEFDSDTLREFVTAFKKGKLKPVIKSQPVPKNNKGPVKVVVGKTFDSIVMDPKKDVLIEFYAPWCGHCKQLEPVYNSLAKKYKGQKGLVIAKMDATANDVPSDRYKVEGFPTIYFAPSGDKKNPVKFEGGDRDLEHLSKFIEEHATKLSRTKEEL

SEQ ID NO: 2084 - protein, 517 aa, Homo Sapiens
HPGFFTSIGQMTDLIHTEKDLVTSLKDYIKAEEDKLEQIKKWAEKLDRLTSTATKDPEGFVGHPVNAFKLMKRLNTEWSELENLVLKDMSDGFISNLTIQRQYFPNDEDQVGAAKALLRLQDTYNLDTDTISKGNLPGVKHKSFLTAEDCFELGKVAYTEADYYHTELWMEQALRQLDEGEISTIDKVSVLDYLSYAVYQQGDLDKALLLTKKLLELDPEHQRANGNLKYFEYIMAKEKDVNKSASDDQSDQKTTPKKKGVAVDYLPERQKYEMLCRGEGIKMTPRRQKKLFCRYHDGNRNPKFILAPAKQEDEWDKPRIIRFHDIISDAEIEIVKDLAKPRLRRATISNPITGDLETVHYRISKSAWLSGYENPVVSRINMRIQDLTGLDVSTAEELQVANYGVGGQYEPHFDFARKDEPDAFKELGTGNRIATWLFYMSDVSAGGATVFPEVGASVWPKKGTAVFWYNLFASGEGDYSTRHAACPVLVGNKWVSNKWLHERGQEFRRPCTLSELE

SEQ ID NO: 2085 - protein, 304 aa, Homo Sapiens
ATPALRFVAVGDWGGVPNAPFHTAREMANAKEIARTVQILGADFILSLGDNFYFTGVQDINDKRFQETFEDVFSDRSLRKVPWYVLAGNHDHLGNVSAQIAYSKISKRWNFPSPFYRLHFKIPQTNVSVAIFMLDTVTLCGNSDDFLSQQPERPRDVKLARTQLSWLKKQLAAAREDYVLVAGHYPVWSIAEHGPTHCLVKQLRPLLATYGVTAYLCGHDHNLQYLQDENGVGYVLSGAGNFMDPSKRHQRKVPNGYLRFHYGTEDSLGGFAYVEISSKEMTVTYIEASGKSLFKTRLPRRARP

SEQ ID NO: 2086 - protein, 196 aa, Homo Sapiens
AAIGSCSKEYRVLLGQLQKQTDLMQDTSRLLDPYIRIQGLDVPKLREHCRERPGAFPSEETLRGLGRRGFLQTLNATLGCVLHRLADLEQRLPKAQDLERSGLNIEDLEKLQMARPNILGLRNNIYCMAQLLDNSDTAEPTKAGRGASQPPTPTPASDAFQRKLEGCRFLHGYHRFMHSVGRVFSKWGESPNRSRR

SEQ ID NO: 2087 - protein, 198 aa, Homo Sapiens
GDTQPRFLEQAKCECHFLNGTERVWNLIRYIYNQEEYARYNSDLGEYQAVTELGRPDAEYWNSQKDLLERRRAEVDTYCRYNYGVVESFTVQRRVQPKVTVYPSKTQPLQHHNLLVCSVNGFYPGSIEVRWFRNGQEEKAGVVSTGLIQNGDWTFQTLVMLETVPRSGEVYTCQVEHPSMMSPLTVQWSARSESAQSK

SEQ ID NO: 2088 - protein, 80 aa, Homo Sapiens
RNSKEERIDLDAEEENIQEGPKETIEIETQVPEKKKGIFRRAYDLFCGLEQHGAPKMTEEEEKAMKMKMTDTSEKPLWRT

SEQ ID NO: 2089 - protein, 343 aa, Homo Sapiens
IQFTESCSMDQSAKEPLINYLDMEYFGTISIGSPPQNFTVIFDTGSSNLWVPSVYCTSPACKTHSRFQPSQSSTYSQPGQSFSIQYGTGSLSGIIGADQVSVEGLTVVGQQFGESVTEPGQTFVDAEFDGILGLGYPSLAVGGVTPVFDNMMAQNLVDLPMFSVYMSSNPEGGAGSELIFGGYDHSHFSGSLNWVPVTKQAYWQIALDNIQVGGTVMFCSEGCQAIVDTGTSLITGPSDKIKQLQNAIGAAPVDGEYAVECANLNVMPDVTFTINGVPYTLSPTAYTLLDFVDGMQFCSSGFQGLDIHPPAGPLWILGDVFIRQFYSVFDRGNNRVGLAPAVP

SEQ ID NO: 2090 - protein, 214 aa, Homo Sapiens
TMCSAQDRTDLLNVCMDAKHHKTKPGPEDKLHDQCSPWKKNACCTASTSQELHKDTSRLYNFNWDHCGKMEPACKRHFIQDTCLYECSPNLGPWIQQVNQSWRKERFLDVPLCKEDCQRWWEDCHTSHTCKSNWHRGWDWTSGVNKCPAGALCRTFESYFPTPAALCEGLWSHSYKVSNYSRGSGRCIQMWFDSAQGNPNEEVARFYAAAMHVN

SEQ ID NO: 2091 - protein, 406 aa, Homo Sapiens
LDFNYHRQEGMEAFLKTVAQNYSSVTHLHSIGKSVKGRNLWVLVVGRFPKEHRIGIPEFKYVANMHGDETVGRELLLHLIDYLVTSDGKDPEITNLINSTRIHIMPSMNPDGFEAVKKPDCYYSIGRENYNQYDLNRNFPDAFEYNNVSRQPETVAVMKWLKTETFVLSANLHGGALVASYPFDNGVQATGALYSRSLTPDDDVFQYLAHTYASRNPNMKKGDECKNKMNFPNGVTNGYSWYPLQGGMQDYNYIWAQCFEITLELSCCKYPREEKLPSFWNNNKASLIEYIKQVHLGVKGQVFDQNGNPLPNVIVEVQDRKHICPYRTNKYGEYYLLLLPGSYIINVTVPGHDPHITKVIIPEKSQNFSALKKDILLPFQGQLDSIPVSNPSCPMIPLYRNLPDHS

SEQ ID NO: 2092 - protein, 223 aa, Homo Sapiens
DHTPKYQDRLATPGLMIRPKTENLDVIVNVSDTESWDQHVQKLNKFLEPYNDSIQAQKNDVCRPGRYYEQPDNGVLNYPKRACQFNRTQLGNCSGIGDSTHYGYSTGQPCVFIKMNRVINFYAGANQSMNVTCAGKRDEDAENLGNFVMFPANGNIDLMYFPYYGKKFHVNYTQPLVAVKFLNVTPNVEVNVECRINAANIATDDERDKFAGRVAFKLRINKT

SEQ ID NO: 2093 - protein, 124 aa, Homo Sapiens [sequence omitted]

SEQ ID NO: 2094 - protein, 782 aa, Homo Sapiens
DDEVDVDGTVEEDLGKSREGSRTDDEVVQREEEAIQLDGLNASQIRELREKSEKFAFQAEVNRMMKLIINSLYKNKEIFLRELISNASDALDKIRLISLTDENALSGNEELTVKIKCDKEKNLLHVTDTGVGMTREELVKNLGTIAKSGTSEFLNKMTEAQEDGQSTSELIGQFGVGFYSAFLVADKVIVTSKHNNDTQHIWESDSNEFSVIADPRGNTLGRGTTITLVLKEEASDYLELDTIKNLVKKYSQFINFPIYVWSSKTETVEEPMEEEEAAKEEKEESDDEAAVEEEEEEKKPKTKKVEKTVWDWELMNDIKPIWQRPSKEVEEDEYKAFYKSFSKESDDPMAYIHFTAEGEVTFKSILFVPTSAPRGLFDEYGSKKSDYIKLYVRRVFITDDFHDMMPKYLNFVKGVVDSDDLPLNVSRETLQQHKLLKVIRKKLVRKTLDMIKKIADDKYNDTFWKEFGTNIKLGVIEDHSNRTRLAKLLRFQSSHHPTDITSLDQYVERMKEKQDKIYFMAGSSRKEAESSPFVERLLKKGYEVIYLTEPVDEYCIQALPEFDGKRFQNVAKEGVKFDESEKTKESREAVEKEFEPLLNWMKDKALKDKIEKAVVSQRLTESPCALVASQYGWSGNMERIMKAQAYQTGKDISTNYYASQKKTFEINPRHPLIRDMLRRIKEDEDDKTVLDLAVVLFETATLRSGYLLPDTKAYGDRIERMLRLSLNIDPDAKVEEEPEEEPEETAEDTTEDTEQDEDEEMDVGTDEEEETAKESTAEKDEL

SEQ ID NO: 2095 - protein, 978 aa, Homo Sapiens
MNNPAIKRIGNHITKSPEDKREYRGLELANGIKVLLISDPTTDKSSAALDVHIGSLSDPPNIAGLSHFCEHMLFLGTKKYPKENEYSQFLSEHAGSSNAFTSGEHTNYYFDVSHEHLEGALDRFAQFFLCPLFDESCKDREVNAVDSEHEKNVMNDAWRLFQLEKATGNPKHPFSKFGTGNKYTLETRPNQEGIDVRQELLKFHSAYYSSNLMAVCVLGRESLDDLTNLVVKLFSEVENKNVPLPEFPEHPFQEEHLKQLYKIVPIKDIRNLYVTFPIPDLQKYYKSNPGHYLGHLIGHEGPGSLLSELKSKGWVNTLVGGQKEGARGFMFFIINVDLTEEGLLHVEDIILHMFQYIQKLRAEGPQEWVFQECKDLNAVAFRFKDKERPRGYTSKIAGILHYYPLEEVLTAEYLLEEFRPDLIEMVLDKLRPENVRVAIVSKSFEGKTDRTEEWYGTQYKQEAIPDEVIKKWQNADLNGKFKLPTKNEFIPTNFEILPLEKEATPYPALIKDTAMSKLWFKQDDKFFLPKACLNFEFFSPFAYVDPLHCNMAYLYLELLKDSLNEYAYAAELAGLSYDLQNTIYGMYLSVKGYNDKQPILLKKIIEKMATFEIDEKRFEIIKEAYMRSLNNFRAEQPHQHAMYYLRLLMTEVAWTKDELKEALDDVTLPRLKAFIPQLLSRLHIEALLHGNITKQAALGIMQMVEDTLIEHAHTKPLLPSQLVRYREVQLPDRGWFVYQQRNEVHNNCGIEIYYQTDMQSTSENMFLELFCQIISEPCFNTLRTKEQLGYIVFSGPRRANGIQGLRFIIQSEKPPHYLESRVEAFLITMEKSIEDMTEEAFQKHIQALAIRRLDKPKKLSAECAKYWGEIISQQYNFDRDNTEVAYLKTLTKEDIIKFYKEMLAVDAPRRHKVSVHVLAREMDSCPVVGEFPCQNDINLSQAPALPQPEVIQNMTEFKRGLPLFPLVKPHINFMAAKL

SEQ ID NO: 2096 - protein, 309 aa, Homo Sapiens
ARSTDTFNYATYHTLEEIYDFLDLLVAENPHLVSKIQIGNTYEGRPIYVLKFSTGGSKRPAIWIDTGIHSREWVTQASGVWFAKKITQDYGQDAAFTAILDTLDIFLEIITNPDGFAFTHSTNRMWRKTRSHTAGSLCIGVDPNRNWDAGFGLSGASSNPCSETYRGKFANSEVEVKSIVDFVKDHGNIKAFISIHSYSQLLMYPYGYKTEPVPDQDELDQLSKAAVTALASLYGTKFNYGSIIKAIYQASGSTIDWTYSQGIKYSFTFELRDTGRYGFLLPASQIIPTAKETWLALLTIMEHTLNHPY

SEQ ID NO: 2097 - protein, 307 aa, Homo Sapiens
ATGHSYEKYNKWETIEAWTQQVATENPALISRSVIGTTFEGRAIYLLKVGKAGQNKPAIFMDCGFHAREWISPAFCQWFVREAVRTYGREIQVTELLDKLDFYVLPVLNIDGYIYTWTKSRFWRKTRSTHTGSSCIGTDPNRNFDAGWCEIGASRNPCDETYCGPAAESEKETKALADFIRNKLSSIKAYLTIHSYSQMMIYPYSYAYKLGENNAELNALAKATVKELASLHGTKYTYGPGATTIYPAAGGSDDWAYDQGIRYSFTFELRDTGRYGFLLPESQIRATCEETFLAIKYVASYVLEHLY

SEQ ID NO: 2098 - protein, 308 aa, Homo Sapiens
IPGRHSYAKYNNWEKIVAWTEKMMDKYPEMVSRIKIGSTVEDNPLYVLKIGEKNERRKAIFMDCGIHAREWVSPAFCQWFVYQATKTYGRNKIMTKLLDRMNFYILPVFNVDGYIWSWTKNRMWRKNRSKNQNSKCIGTDLNRNFNASWNSIPNTNDPCADNYRGSAPESEKETKAVTNFIRSHLNEIKVYITFHSYSQMLLFPYGYTSKLPPNHEDLAKVAKIGTDVLSTRYETRYIYGPIESTIYPISGSSLDWAYDLGIKHTFAFELRDKGKFGFLLPESRIKPTCRETMLAVKFIAKYILKHTS

SEQ ID NO: 2099 - protein, 438 aa, Homo Sapiens
VTFRHHRYDDLVRTLYKVQNECPGITRVYSIGRSVEGRHLYVLEFSDHPGIHEPLEPEVKYVGNMHGNEALGRELMLQLSEFLCEEFRNRNQRIVQLIQDTRIHILPSMNPDGYEVAAAQGPNKPGYLVGRNNANGVDLNRNFPDLNTYIYYNEKYGGPNHHLPLPDNWKSQVEPETRAVIRWMHSFNFVLSANLHGGAVVANYPYDKSFEHRVRGVRRTASTPTPDDKLFQKLAKVYSYAHGWMFQGWNCGDYFPDGITNGASWYSLSKGMQDFNYLHTNCFEITLELSCDKFPPEEELQREWLGNREALIQFLEQVHQGIKGMVLDENYNNLANAVISVSGINHDVTSGDHGDYFRLLLPGIYTVSATAPGYDPETVTVTVGPAEPTLVNFHLKRSIPQVSPVRRAPSRRHGVRAKVQPQARKKEMEMRQLQRGPA

SEQ ID NO: 2100 - protein, 489 aa, Homo Sapiens
RPPNIVLIFADDLGYGDLGCYGHPSSTTPNLDQLAAGGLRFTDFYVPVSLCTPSRAALLTGRLPVRMGMYPGVLVPSSRGGLPLEEVTVAEVLAARGYLTGMAGKWHLGVGPEGAFLPPHQGFHRFLGIPYSHDQGPCQNLTCFPPATPCDGGCDQGLVPIPLLANLSVEAQPPWLPGLEARYMAFAHDLMADAQRQDRPFFLYYASHHTHYPQFSGQSFAERSGRGPFGDSLMELDAAVGTLMTAIGDLGLLEETLVIFTADNGPETMRMSRGGCSGLLRCGKGTTYEGGVREPALAFWPGHIAPGVTHELASSLDLLPTLAALAGAPLPNVTLDGFDLSPLLLGTGKSPRQSLFFYPSYPDEVRGVFAVRTGKYKAHFFTQGSAHSDTTADPACHASSSLTAHEPPLLYDLSKDPGENYNLLGGVAGATPEVLQALKQLQLLKAQLDAAVTFGPSQVARGEDPALQICCHPGCTPRPACCHCPDPHA

SEQ ID NO: 2101 - protein, 386 aa, Homo Sapiens
KELKFVTLVFRHGDRSPIDTFPTDPIKESSWPQGFGQLTQLGMEQHYELGEYIRKRYRKFLNESYKHEQVYIRSTDVDRTLMSAMTNLAALFPPEGVSIWNPILLWQPIPVHTVPLSEDQLLYLPFRNCPRFQELESETLKSEEFQKRLHPYKDFIATLGKLSGLHGQDLFGIWSKVYDPLYCESVHNFTLPSWATEDTMTKLRELSELSLLSLYGIHKQKEKSRLQGGVLVNEILNHMKRATQIPSYKKLIMYSAHDTTVSGLQMALDVYNGLLPPYASCHLTELYFEKGEYFVEMYYRNETQHEPYPLMLPGCSPSCPLERFAELAGPVIPQDWSTECMTTNSHQVLKVIFAVAFCLISAVLMVLLFIHIRRGLCWQRESYGNI

SEQ ID NO: 2102 - protein, 210 aa, Homo Sapiens
RIAWARTELLNVCMNAKHHKEKPGPEDKLHEQCRPWRKNACCSTNTSQEAHKDVSYLYRFNWNHCGEMAPACKRHFIQDTCLYECSPNLGPWIQQVDQSWRKERVLNVPLCKEDCEQWWEDCRTSYTCKSNWHKGWNWTSGFNKCAVGAACQPFHFYFPTPTVLCNEIWTHSYKVSNYSRGSGRCIQMWFDPAQGNPNEEVARFYAAAMS

SEQ ID NO: 2103 - protein, 516 aa, Homo Sapiens
VFGVAAGTRRPNVVLLLTDDQDEVLGGMTPLKKTKALIGEMGMTFSSAYVPSALCCPSRASILTGKYPHNHHVVNNTLEGNCSSKSWQKIQEPNTFPAILRSMCGYQTFFAGKYLNEYGAPDAGGLEHVPLGWSYWYALEKNSKYYNYTLSINGKARKHGENYSVDYLTDVLANVSLDFLDYKSNFEPFFMMIATPAPHSPWTAAPQYQKAFQNVFAPRNKNFNIHGTNKHWLIRQAKTPMTNSSIQFLDNAFRKRWQTLLSVDDLVEKLVKRLEFTGELNNTYIFYTSDNGYHTGQFSLPIDKRQLYEFDIKVPLLVRGPGIKPNQTSKMLVANIDLGPTILDIAGYDLNKTQMDGMSLLPILRGASNLTWRSDVLVEYQGEGRNVTDPTCPSLSPGVSQCFPDCVCEDAYNNTYACVRTMSALWNLQYCEFDDQEVFVEVYNLTADPDQITNIAKTIDPELLGKMNYRLMMLQSCSGPTCRTPGVFDPGYRFDPRLMFSNRGSVRTRRFSKHLL

SEQ ID NO: 2104 - protein, 194 aa, Homo Sapiens
CSCSPVHPQQAFCNADVVIRAKAVSEKEVDSGNDIYGNPIKRIQYEIKQIKMFKGPEKDIEFIYTAPSSAVCGVSLDVGGKKEYLIAGKAEGDGKMHITLCDFIVPWDTLSTTQKKSLNHRYQMGCECKITRCPMIPCYISSPDECLWMDWVTEKNINGHQAKFFACIKRSDGSCAWYRGAAPPKQEFLDIEDP

SEQ ID NO: 2105 - protein, 234 aa, Homo Sapiens
STTAVQTPTSGEPLVSTSEPLSSKMYTTSITSDPKADSTGDQTSALPPSTSINEGSPLWTSIGASTGSPLPEPTTYQEVSIKMSSVPQETPHATSHPAVPITANSLGSHTVTGGTITTNSPETSSRTSGAPVTTAASSLETSRGTSGPPLTMATVSLETSKGTSGPPVTMATDSLETSTGTTGPPVTMTTGSLEPSSGASGPQVSSVKLSTMMSPTTSTNASTVPFRNPDENSR

SEQ ID NO: 2106 - protein, 449 aa, Homo Sapiens
KEVCYERLGCFSDDSPWSGITERPLHILPWSPKDVNTRFLLYTNENPNNFQEVAADSSSISGSNFKTNRKTRFIIHGFIDKGEENWLANVCKNLFKVESVNCICVDWKGGSRTGYTQASQNIRIVGAEVAYFVEFLQSAFGYSPSNVHVIGHSLGAHAAGEAGRRTNGTIGRITGLDPAEPCFQGTPELVRLDPSDAKFVDVIHTDGAPIVPNLGFGMSQVVGHLDFFPNGGVEMPGCKKNILSQIVDIDGIWEGTRDFAACNHLRSYKYYTDSIVNPDGFAGFPCASYNVFTANKCFPCPSGGCPQMGHYADRYPGKTNDVGQKFYLDTGDASNFARWRYKVSVTLSGKKVTGHILVSLFGNKGNSKQYEIFKGTLKPDSTHSNEFDSDVDVGDLQMVKFIWYNNVINPTLPRVGASKIIVETNVGKQFNFCSPETVREEVLLTLTPC

SEQ ID NO: 2107 - protein, 649 aa, Homo Sapiens
QRMFEIDYSRDSFLKDGQPFRYISGSIHYSRVPRFYWKDRLLKMKMAGLNAIQTYVPWNFHEPWPGQYQFSEDHDVEYFLRLAHELGLLVILRPGPYICAEWEMGGLPAWLLEKESILLRSSDPDYLAAVDKWLGVLLPKMKPLLYQNGGPVITVQVENEYGSYFACDFDYLRFLQKRFRHHLGDDVVLFTTDGAHKTFLKCGALQGLYTTVDFGTGSNITDAFLSQRKCEPKGPLINSEFYTGWLDHWGQPHSTIKTEAVASSLYDILARGASVNLYMFIGGTNFAYWNGANSPYAAQPTSYDYDAPLSEAGDLTEKYFALRNIIQKFEKVPEGPIPPSTPKFAYGKVTLEKLKTVGAALDILCPSGPIKSLYPLTFIQVKQHYGFVLYRTTLPQDCSNPAPLSSPLNGVHDRAYVAVDGIPQGVLERNNVITLNITGKAGATLDLLVENMGRVNYGAYINDFKGLVSNLTLSSNILTDWTIFPLDTEDAVRSHLGGWGHRDSGHHDEAWAHNSSNYTLPAFYMGNFSIPSGIPDLPQDTFIQFPGWTKGQVWINGFNLGRYWPARGPQLTLFVPQHILMTSAPNTITVLELEWAPCSSDDPELCAVTFVDRPVIGSSVTYDHPSKPVEKRLMPPPPQKNKDSWLDHV

SEQ ID NO: 2108 - protein, 242 aa, Homo Sapiens
QEECVCENYKLAVNCFVNNNRQCQCTSVGAQNTVICSKLAAKCLVMKAEMNGSKLGRRAKPEGALQNNDGLYDPDCDESGLFKAKQCNGTSMCWCVNTAGVRRTDKDTEITCSERVRTYWIIIELKHKAREKPYDSKSLRTALQKEITTRYQLDPKFITSILYENNVITIDLVQNSSQKTQNDVDIADVAYYFEKDVKGESLFHSKKMDLTVNGEQLDLDPGQTLIYYVDEKAPEFSMQGLK

SEQ ID NO: 2109 - protein, 369 aa, Homo Sapiens
DFFRDEAERIMRDSPVIDGHNDLPWQLLDMFNNRLQDERANLTTLAGTHTNIPKLRAGFVGGQFWSVYTPCDTQNKDAVRRTLEQMDVVHRMCRMYPETFLYVTSSAGIRQAFREGKVASLIGVEGGHSIDSSLGVLRALYQLGMRYLTLTHSCNTPWADNWLVDTGDSEPQSQGLSPFGQRVVKELNRLGVLIDLAHVSVATMKATLQLSRAPVIFSHSSAYSVCASRRNVPDDVLRLVKQTDSLVMVNFYNNYISCTNKANLSQVADHLDHIKEVAGARAVGFGGDFDGVPRVPEGLEDVSKYPDLIAELLRRNWTEAEVKGALADNLLRVFEAVEQASNLTQAPEEEPIPLDQLGGSCRTHYGYSS

SEQ ID NO: 2110 - protein, 529 aa, Homo Sapiens
GYRDINEIDINMNDPLFTKQWYLINTGQADGTPGLDLNVAEAWELGYTGKGVTIGIMDDGIDYLHPDLASNYNAEASYDFSSNDPYPYPRYTDDWFNSHGTRCAGEVSAAANNNICGVGVAYNSKVAGIRMLDQPFMTDIIEASSISHMPQLIDIYSASWGPTDNGKTVDGPRELTLQAMADGVNKGRGGKGSIYVWASGDGGSYDDCNCDGYASSMWTISINSAINDGRTALYDESCSSTLASTFSNGRKRNPEAGVATTDLYGNCTLRHSGTSAAAPEAAGVFALALEANLGLTWRDMQHLTVLTSKRNQLHDEVHQWRRNGVGLEFNHLFGYGVLDAGAMVKMAKDWKTVPERFHCVGGSVQDPEKIPSTGKLVLTLTTDACEGKENFVRYLEHVQAVITVNATRRGDLNINMTSPMGTKSILLSRRPRDDDSKVGFDKWPFMTTHTWGEDARGTWTLELGFVGSAPQKGVLKEWTLMLHGTQSAPYIDQVVRDYQSKLAMSKKEELEEELDEAVERSLKSILNKN

SEQ ID NO: 2111 - protein, 222 aa, Homo Sapiens
KDPAFTALLTTQLQVQREIVNKHNELRKAVSPPASNMLKMEWSREVTTNAQRWANKCTLQHSDPEDRKTSTRCGENLYMSSDPTSWSSAIQSWYDEILDFVYGVGPKSPNAVVGHYTQLVWYSTYQVGCGIAYCPNQDSLKYYYVCQYCPAGNNMNRKNTPYQQGTPCAGCPDDCDKGLCTNSCQYQDLLSNCDSLKNTAGCEHELLKEKCKATCLCENKIY

SEQ ID NO: 2112 - protein, 469 aa, Homo Sapiens
GKVLVWAAEYSHWMNIKTILDELIQRGHEVTVLASSASILFDPNNSSALKIEIYPTSLTKTELENFIMQQIKRWSDLPKDTFWLYFSQVQEIMSIFGDITRKFCKDVVSNKKFMKKVQESRFDVIFADAIFPCSELLAELFNIPFVYSLSFSPGYTFEKHSGGFIFPPSYVPVVMSELTDQMTFMERVKNMIYVLYFDFWFEIFDMKKWDQFYSEVLGRPTTLSETMGKADVWLIRNSWNFQFPYPLLPNVDFVGGLHCKPAKPLPKEMEDFVQSSGENGVVVFSLGSMVSNMTEERANVIASALAQIPQKVLWRFDGNKPDTLGLNTRLYKWIPQNDLLGHPKTRAFITHGGANGIYEAIYHGIPMVGIPLFADQPDNIAHMKARGAAVRVDFNTMSSTDLLNALKRVINDPSYKENVMKLSRIQHDQPVKPLDRAVFWIEFVMRHKGAKHLRVAAHDLTWFQYHSLD

SEQ ID NO: 2113 - protein, 434 aa, Homo Sapiens
LQQEDGISFEYHRYPELREALVSVWLQCTAISRIYTVGRSFEGRELLVIELSDNPGVHEPGEPEFKYIGNMHGNEAVGRELLIFLAQYLCNEYQKGNETIVNLIHSTRIHIMPSLNPDGFEKAASQPGELKDWFVGRSNAQGIDLNRNFPDLDRIVYVNEKEGGPNNHLLKNMKKIVDQNTKLAPETKAVIHWIMDIPFVLSANLHGGDLVANYPYDETRSGSAHEYSSSPDDAIFQSLARAYSSFNPAMSDPNRPPCRKNDDDSSFVDGTTNGGAWYSVPGGMQDFNYLSSNCFEITVELSCEKFPPEETLKTYWEDNKNSLISYLEQIHRGVKGFVRDLQGNPIANATISVEGIDHDVTSAKDGDYWRLLIPGNYKLTASAPGYLAITKKVAVPYSPAAGVDFELESFSERKEEEKEELMEWWKMMSETLNF

SEQ ID NO: 2114 - protein, 394 aa, Homo Sapiens
LDNGLLQTPPMGWLAWERFRCNINCDEDPKNCISEQLFMEMADRMAQDGWRDMGYTYLNIDDCWIGGRDASGRLMPDPKRFPHGIPFLADYVHSLGLKLGIYADMGNFTCMGYPGTTLDKVVQDAQTFAEWKVDMLKLDGCFSTPEERAQGYPKMAAALNATGRPIAFSCSWPAYEGGLPPRVNYSLLADICNLWRNYDDIQDSWWSVLSILNWFVEHQDILQPVAGPGHWNDPDMLLIGNFGLSLEQSRAQMALWTVLAAPLLMSTDLRTISAQNMDILQNPLMIKINQDPLGIQGRRIHKEKSLIEVYMRPLSNKASALVFFSCRTDMPYRYHSSLGQLNFTGSVIYEAQDVYSGDIISGLRDETNFTVIINPSGVVMWYLYPIKNLEMSQQ

SEQ ID NO: 2115 - protein, 456 aa, Homo Sapiens
VNPGVVVRISQKGLDYASQQGTAALQKELKRIKIPDYSDSFKIKHLGKGHYSFYSMDIREFQLPSSQISMVPNVGLKFSISNANIKISGKWKAQKRFLKMSGNFDLSIEGMSISADLKLGSNPTSGKPTITCSSCSSHINSVHVHISKSKVGWLIQLFHKKIESALRNKMNSQVCEKVTNSVSSKLQPYFQTLPVMTKIDSVAGINYGLVAPPATTAETLDVQMKGEFYSENHHNPPPFAPPVMEFPAAHDRMVYLGLSDYFFNTAGLVYQEAGVLKMTLRDDMIPKESKFRLTTKFFGTFLPEVAKKFPNMKIQIHVSASTPPHLSVQPTGLTFYPAVDVQAFAVLPNSSLASLFLIGMHTTGSMEVSAESNRLVGELKLDRLLLELKHSNIGPFPVELLQDIMNYIVPILVLPRVNEKLQKGFPLPTPARVQLYNVVLQPHQNFLLFGADVVYK

SEQ ID NO: 2116 - protein, 208 aa, Homo Sapiens
TDTEERLVEHLLDPSRYNKLIRPATNGSELVTVQLMVSLAQLISVHEREQIMTTNVWLTQEWEDYRLTWKPEEFDNMKKVRLPSKHIWLPDVVLYNNADGMYEVSFYSNAVVSYDGSIFWLPPAIYKSACKIEVKHFPFDQQNCTMKFRSWTYDRTEIDLVLKSEVASLDDFTPSGEWDIVALPGRRNENPDDSTYVDITYDFIIRRK

SEQ ID NO: 2117 - protein, 561 aa, Homo Sapiens
ETVHCDLQPVGPERDEVTYTTSQVSKGCVAQAPNAILEVHVLFLEFPTGPSQLELTLQASKQNGTWPREVLLVLSVNSSVFLHLQALGIPLHLAYNSSLVTFQEPPGVNTTELPSFPKTQILEWAAERGPITSAAELNDPQSILLRLGQAQGSLSFCMLEASQDMGRTLEWRPRTPALVRGCHLEGVAGHKEAHILRVLPGHSAGPRTVTVKVELSCAPGDLDAVLILQGPPYVSWLIDANHNMQIWTTGEYSFKIFPEKNIRGFKLPDTPQGLLGEARMLNASIVASFVELPLASIVSLHASSCGGRLQTSPAPIQTTPPKDTCSPELLMSLIQTKCADDAMTLVLKKELVAHLKCTITGLTFWDPSCEAEDRGDKFVLRSAYSSCGMQVSASMISNEAVVNILSSSSPQRKKVHCLNMDSLSFQLGLYLSPHFLQASNTIEPGQQSFVQVRVSPSVSEFLLQLDSCHLDLGPEGGTVELIQGRAAKGNCVSLLSPSPEGDPRFSFLLHFYTVPIPKTGTLSCTVALRPKTGSQDQEVHRTVFMRLNIISPDLSGCTSKG

SEQ ID NO: 2118 - protein, 162 aa, Homo Sapiens
SSFSWDNCDEGKDPAVIRSLTLEPDPIVVPGNVTLSVVGSTSVPLSSPLKVDLVLEKEVAGLWIKIPCTDYIGSCTFEHFCDVLDMLIPTGEPCPEPLRTYGLPCHCPFKEGTYSLPKSEFVVPDLELPSWLTTGNYRIESVLSSSGKRLGCIKIAASLKGI

SEQ ID NO: 2119 - protein, 249 aa, Homo Sapiens
ADNFSLHDALSGSGNPNPQGWPGAWGNQPAGAGGYPGASYPGAYPGQAPPGAYPGQAPPGAYPGAPGAYPGAPAPGVYPGPPSGPGAYPSSGQPSATGAYPATGPYGAPAGPLIVPYNLPLPGGVVPRMLITILGTVKPNANRIALDFQRGNDVAFHFNPRFNENNRRVIVCNTKLDNNWGREERQSVFPFESGKPFKIQVLVEPDHFKVAVNDAHLLQYNHRVKKLNEISKLGISGDIDLTSASYTMI

SEQ ID NO: 2120 - protein, 264 aa, Homo Sapiens
GASSGGLGPVVRCEPCDARALAQCAPPPAVCAELVREPGCGCCLTCALSEGQPCGIYTERCGSGLRCQPSPDEARPLQALLDGRGLCVNASAVSRLRAYLLPAPPAPGNASESEEDRSAGSVESPSVSSTHRVSDPKFHPLHSKIIIIKKGHAKDSQRYKVDYESQSTDTQNFSSESKRETEYGPCRREMEDTLNHLKFLNVLSPRGVHIPNCDKKGFYKKKQCRPSKGRKRGFCWCVDKYGQPLPGYTTKGKEDVHCYSMQSK

SEQ ID NO: 2121 - protein, 290 aa, Homo Sapiens
AEVLFRCPPCTPERLAACGPPPVAPPAAVAAVAGGARMPCAELVREPGCGCCSVCARLEGEACGVYTPRCGQGLRCYPHPGSELPLQALVMGEGTCEKRRDAEYGASPEQVADNGDDHSEGGLVENHVDSTMNMLGGGGSAGRKPLKSGMKELAVFREKVTEQHRQMGKGGKHHLGLEEPKKLRPPPARTPCQQELDQVLERISTMRLPDERGPLEHLYSLHIPNCDKHGLYNLKQCKMSLNGQRGECWCVNPNTGKLIQGAPTIRGDPECHLFYNEQQEARGVHTQRMQ

SEQ ID NO: 2122 - protein, 123 aa, Homo Sapiens
NNATTVAPSVGITRLINSSTAEPVKEEAKTSNPTSSLTSLSVAPTFSPNITLGPTYLTTVNSSDSDNGTTRTASTNSIGITISPNGTWLPDNQFTDARTEPWEGNSSTAATTPETFPPSDETP

SEQ ID NO: 2123 - protein, 220 aa, Homo Sapiens
HSTNEPSNMSYVKETVDRLLKGYDIRLRPDFGGPPVDVGMRIDVASIDMVSEVNMDYTLTMYFQQSWKDKRLSYSGIPLNLTLDNRVADQLCVPDTYFLNDKKSFVHGVTVKNRMIRLHPDGTVLYGLRITTTAACMMDLRRYPLDEQNCTLEIESYGYTTDDIEFYWNGGEGAVTGVNKIELPQFSIVDYKMVSKKVEFTTGAYPRLSLSFRLKRNIGY

SEQ ID NO: 2124 - protein, 234 aa, Homo Sapiens
QKSDDDYEDYASNKTWVLTPKVPEGDVTVILNNLLEGYDNKLRPDIGVKPTLIHTDMYVNSIGPVNAINMEYTIDIFFAQTWYDRRLKFNSTIKVLRLNSNMVGKIWIPDTFFRNSKKADAHWITTPNRMLRIWNDGRVLYTLRLTIDAECQLQLHNFPMDEHSCPLEFSSYGYPREEIVYQWKRSSVEVGDTRSWRLYQFSFVGLRNTTEVVKTTSGDYVVMSVYFDLSRRMG

SEQ ID NO: 2125 - protein, 48 aa, Homo Sapiens
DVAHGILNEAYRKVLDQLSAGKHLQSLVARGVGGSLGGGAGDDAEPLS

SEQ ID NO: 2126 - protein, 463 aa, Homo Sapiens
DKLLVVPQDGSHWLSMKDIVEVLSDRGHEIVVVVPEVNLLLKESKYYTRKIYPVPYDQEELKNRYQSFGNNHFAERSFLTAPQTEYRNNMIVIGLYFINCQSLLQDRDTLNFFKESKFDALFTDPALPCGVILAEYLGLPSVYLFRGFPCSLEHTFSRSPDPVSYIPRCYTKFSDHMTFSQRVANFLVNLLEPYLFYCLFSKYEELASAVLKRDVDIITLYQKVSVWLLRYDFVLEYPRPVMPNMVFIGGINCKKRKDLSQEFEAYINASGEHGIVVFSLGSMVSEIPEKKAMATADALGKIPQTVLWRYTGTRPSNLANNTILVKWLPQNDLLGHPMTRAFITHAGSHGVYESICNGVPMVMMPLFGDQMDNAKRMETKGAGVTLNVLEMTSEDLENALKAVINDKSYKENIMRLSSLHKDRPVEPLDLAVFWVEFVMRHKGAPHLRPAAHDLTWYQYHSLD

SEQ ID NO: 2127 - protein, 543 aa, Homo Sapiens
PSASKEPDNHVYTRAAVAADAKQCSKIGRDALRDGGSAVDAAIAALLCVGLMNAHSMGIGGGLFLTIYNSTTRKAEVINAREVAPRLAFATMFNSSEQSQKGGLSVAVPGEIRGYELAHQRHGRLPWARLFQPSIQLARQGFPVGKGLAAALENKRTVIEQQPVLCEVFCRDRKVLREGERLTLPQLADTYETLAIEGAQAFYNGSLTAQIVKDIQAAGGIVTAEDLNNYRAELIEHPLNISLGDVVLYMPSAPLSGPVLALILNILKGYNFSRESVESPEQKGLTYHRIVEAFRFAYAKRTLLGDPKFVDVTEVVRNMTSEFFAAQLRAQISDDTTHPISYYKPEFYTPDDGGTAHLSVVAEDGSAVSATSTINLYFGSKVRSPVSGILFNNEMDDFSSPSITNEFGVPPSPANFIQPGKQPLSSMCPTIMVGQDGQVRMVVGAAGGTQITTATALAIIYNLWFGYDVKRAVEEPRLHNQLLPNVTTVERNIDQAVTAALETRHHHTQIASTFIAVVQAIVRTAGGWAAASDSRKGGEPAGY

SEQ ID NO: 2128 - protein, 183 aa, Homo Sapiens
QIPLCANLVPVPITNATLDRITGKWFYIASAFRNEEYNKSVQEIQATFFYFTPNKTEDTIFLREYQTRQNQCFYNSSYLNVQRENGTVSRYEGGREHVAHLLFLRDTKTLMFGSYLDDEKNWGLSFYADKPETTKEQLGEFYEALDCLCIPRSDVMYTDWKKDKCEPLEKQHEKERKQEEGES

SEQ ID NO: 2129 - protein, 315 aa, Homo Sapiens
GNCWLRQAKNGRCQVLYKTELSKEECCSTGRLSTSWTEEDVNDNTLFKWMIFNGGAPNCIPCKETCENVDCGPGKKCRMNKKNKPRCVCAPDCSNITWKGPVCGLDGKTYRNECALLKARCKEQPELEVQYQGRCKKTCRDVFCPGSSTCVVDQTNNAYCVTCNRICPEPASSEQYLCGNDGVTYSSACHLRKATCLLGRSIGLAYEGKCIKAKSCEDIQCTGGKKCLWDFKVGRGRCSLCDELCPDSKSDEPVCASDNATYASECAMKEAACSSGVLLEVKHSGSCNSISEDTEEEEEDEDQDYSFPISSILEW

SEQ ID NO: 2130 - protein, 57 aa, Homo Sapiens
AQEPVKGPVSTKPGSCPIILIRCAMLNPPNRCLKDTDCPGIKKCCEGSCGMACFVPQ

SEQ ID NO: 2131 - protein, 1010 aa, Homo Sapiens
ISCGSPPPILNGRISYYSTPIAVGTVIRYSCSGTFRLIGEKSLLCITKDKVDGTWDKPAPKCEYFNKYSSCPEPIVPGGYKIRGSTPYRHGDSVTFACKTNFSMNGNKSVWCQANNMWGPTRLPTCVSVFPLECPALPMIHNGHHTSENVGSIAPGLSVTYSCESGYLLVGEKIINCLSSGKWSAVPPTCEEARCKSLGRFPNGKVKEPPILRVGVTANFFCDEGYRLQGPPSSRCVIAGQGVAWTKMPVCEEIFCPSPPPILNGRHIGNSLANVSYGSIVTYTCDPDPEEGVNFILIGESTLRCTVDSQKTGTWSGPAPRCELSTSAVQCPHPQILRGRMVSGQKDRYTYNDTVIFACMFGFTLKGSKQIRCNAQGTWEPSAPVCEKECQAPPNILNGQKEDRHMVRFDPGTSIKYSCNPGYVLVGEESIQCTSEGVWTPPVPQCKVAACEATGRQLLTKPQHQFVRPDVNSSCGEGYKLSGSVYQECQGTIPWFMEIRLCKEITCPPPPVIYNGAHTGSSLEDFPYGTTVTYTCNPGPERGVEFSLIGESTIRCTSNDQERGTWSGPAPLCKLSLLAVQCSHVHIANGYKISGKEAPYFYNDTVTFKCYSGFTLKGSSQIRCKADNTWDPEIPVCEKGCQSPPGLHHGRHTGGNTVFFVSGMTVDYTCDPGYLLVGNKSIHCMPSGNWSPSAPRCEETCQHVRQSLQELPAGSRVELVNTSCQDGYQLTGHAYQMCQDAENGIWFKKIPLCKVIHCHPPPVIVNGKHTGMMAENFLYGNEVSYECDQGFYLLGEKKLQCRSDSKGHGSWSGPSPQCLRSPPVTRCPNPEVKHGYKLNKTHSAYSHNDIVYVDCNPGFIMNGSRVIRCHTDNTWVPGVPTCIKKAFIGCPPPPKTPNGNHTGGNIARFSPGMSILYSCDQGYLLVGEALLLCTHEGTWSQPAPHCKEVNCSSPADMDGIQKGLEPRKMYQYGAVVTLECEDGYMLEGSPQSQCQSDHQWNPPLAVCRSR

SEQ ID NO: 2132 - protein, 410 aa, Homo Sapiens
EICEVSEENYIRLKPLLNTMIQSNYNRGTSAVNVVLSLKLVGIQIQTLMQKMIQQIKYNVKSRLSDVSSGELALIILALGVCRNAEENLIYDYHLIDKLENKFQAEIENMEAHNGTPLTNYYQLSLDVLALCLFNGNYSTAEVVNHFTPENKNYYFGSQFSVDTGAMAVLALTCVKKSLINGQIKADEGSLKNISIYTKSLVEKILSEKKENGLIGNTFSTGEAMQALFVSSDYYNENDWNCQQTLNTVLTEISQGAFSNPNAAAQVLPALMGKTFLDINKDSSCVSASGNFNISADEPITVTPPDSQSYISVNYSVRINETYFTNVTVLNGSVFLSVMEKAQKMNDTIFGFTMEERSWGPYITCIQGLCANNNDRTYWELLSGGEPLSQGAGSYVVRNGENLEVRWSKY

SEQ ID NO: 2133 - protein, 409 aa, Homo Sapiens
EMCEIPEMDSHLVEKLGQHLLPWMDRLSLEHLNPSIYVGLRLSSLQAGTKEDLYLHSLKLGYQQCLLGSAFSEDDGDCQGKPSMGQLALYLLALRANCEFVRGHKGDRLVSQLKWFLEDEKRAIGHDHKGHPHTSYYQYGLGILALCLHQKRVHDSVVDKLLYAVEPFHQGHHSVDTAAMAGLAFTCLKRSNFNPGRRQRITMAIRTVQEEILKAQTPEGHFGNVYSTPLALQFLMTSPMRGAELGTACLKARVALLASLQDGAFQNALMISQLLPVLNHKTYIDLIFPDCLAPRVMLEPAAETIPQTQEIISVTLQVLSLLPPYRQSISVLAGSTVEDVLKKAHELGGFTYETQASLSGPYLTSVMGKAAGEREFWQLLRDPNTPLLQGIADYRPKDGETIELRLVSW

SEQ ID NO: 2134 - protein, 237 aa, Homo Sapiens
IVGGWECEKHSQPWQVAVYSHGWAHCGGVLVHPQWVLTAAHCLKKNSQVWLGRHNLFEPEDTGQRVPVSHSFPHPLYNMSLLKHQSLRPDEDSSHDLMLLRLSEPAKITDVVKVLGLPTQEPALGTTCYASGWGSIEPEEFLRPRSLQCVSLHLLSNDMCARAYSEKVTEFMLCAGLWTGGKDTCGGDSGGPLVCNGVLQGITSWGPEPCALPEKPAVYTKVVHYRKWIKDTIAANP

SEQ ID NO: 2135 - protein, 222 aa, Homo Sapiens
IVGGRKARPRQFPFLASIQNQGRHFCGGALIHARFVMTAASCFQSQNPGVSTVVLGAYDLRRRERQSRQTFSISSMSENGYDPQQNLNDLMLLQLDREANLTSSVTILPLPLQNATVEAGTRCQVAGWGSQRSGGRLSRFPRFVNVTVTPEDQCRPNNVCTGVLTRRGGICNGDGGTPLVCEGLAHGVASFSLGPCGRGPDFFTRVALFRDWIDGVLNNPGP

SEQ ID NO: 2136 - protein, 245 aa, Homo Sapiens
IVGGQEAPRSKWPWQVSLRVRDRYWMHFCGGSLIHPQWVLTAAHCLGPDVKDLATLRVQLREQHLYYQDQLLPVSRIIVHPQFYIIQTGADIALLELEEPVNISSRVHTVMLPPASETFPPGMPCWVTGWGDVDNDEPLPPPFPLKQVKVPIMENHICDAKYHLGAYTGDDVRIIRDDMLCAGNTRRDSCQGDSGGPLVCKVNGTWLQAGVVSWDEGCAQPNRPGIYTRVTYYLDWIHHYVPKKP

SEQ ID NO: 2137 - protein, 144 aa, Homo Sapiens
ILLSASKSIRNLDDDMVFNTFRLGKGFQKEDTAEKSVIAPSLEQYKNDESSFMNEEENKVSKNTGSKHNFLNHGLPLNLAIKPYLALKGSVAFPAENGVQNTESTQEKREIGDEENSAKFPIGRRDFDMLRCMLGRVYRPCWQV

SEQ ID NO: 2138 - protein, 218 aa, Homo Sapiens
QPEAAQQEAVTAAEHPGLDDFLRQVERLLFLRENIQRLQGDQGEHSASQIFQSDWLSKRQHPGKREEEEEEGVEEEEEEEGGAVGPHKRQHPGRREDEASWSVDVTQHKRQHPGRRSPWLAYAVPKRQHPGRRLADPKAQRSWEEEEEEEEREEDLMPEKRQHPGKRALGGPCGPQGAYGQAGLLLGLLDDLSRSQGAEEKRQHPGRRAAWVREPLEE

SEQ ID NO: 2139 - protein, 226 aa, Homo Sapiens
IIGGHEAKPHSRPYMAFVQFLQEKSRKRCGGILVRKDFVLTAAHCQGSSINVTLGAHNIKEQERTQQFIPVKRPIPHPAYNPKNFSNDIMLLQLERKAKWTTAVRPLRLPSSKAQVKPGQLCSVAGWGYVSMSTLATTLQEVLLTVQKDCQCERLFHGNYSRATEICVGDPKKTQTGFKGDSGGPLVCKDVAQGILSYGNKKGTPPGVYIKVSHFLPWIKRTMKRL

SEQ ID NO: 2140 - protein, 234 aa, Homo Sapiens
SDEHCPELPPVDNSIFVAKEVEGQILGTYVCIKGYHLVGKKTLFCNASKEWDNTTTECRLGHCPDPVLVNGEFSSSGPVNVSDKITFMCNDHYILKGSNRSQCLEDHTWAPPFPICKSRDCDPPGNPVHGYFEGNNFTLGSTISYYCEDRYYLVGVQEQQCVDGEWSSALPVCKLIQEAPKPECEKALLAFQESKNLCEAMENFMQQLKESGMTMEELKYSLELKKAELKAKLL

SEQ ID NO: 2141 - protein, 323 aa, Homo Sapiens
SSPLPLVVNTWPFKNATEAAWRALASGGSALDAVESGCAMCEREQCDGSVGFGGSPDELGETTLDAMIMDGTTMDVGAVGDLRRIKNAIGVARKVLEHTTHTLLVGESATTFAQSMGFINEDLSTSASQALHSDWLARNCQPNYWRNVIPDPSKYCGPYKPPGILKQDIPIHKETEDDRGHDTIGMVVIHKTGHIAAGTSTNGIKFKIHGRVGDSPIPGAGAYADDTAGAAAATGNGDILMRFLPSYQAVEYMRRGEDPTIACQKVISRIQKHFPEFFGAVICANVTGSYGAACNKLSTFTQFSFMVYNSEKNQPTEEKVDCI

SEQ ID NO: 2142 - protein, 136 aa, Homo Sapiens
GKKEKPEKKVKKSDCGEWQWSVCVPTSGDCGLGTREGTRTGAECKQTMKTQRCKIPCNWKKQFGAECKYQFQAWGECDLNTALKTRTGSLKRALHNAECQKTVTISKPCGKLTKPKPQAESKKKKKEGKKQEKMLD

SEQ ID NO: 2143 - protein, 123 aa, Homo Sapiens
VAKKKDKVKKGGPGSECAEWAWGPCTPSSKDCGVGFREGTCGAQTQRIRCRVPCNWKKEFGADCKYKFENWGACDGGTGTKVRQGTLKKARYNAQCQETIRVTKPCTPKTKAKAKAKKGKGKD

SEQ ID NO: 2144 - protein, 301 aa, Homo Sapiens
FSMKNLHRRVKIEDSEENGVFKYRPRYYLYKHAYFYPHLKRFPVQGSSDSSEENGDDSSEEEEEEEETSNEGENNEESNEDEDSEAENTTLSATTLGYGEDATPGTGYTGLAAIQLPKKAGDITNKATKEKESDEEEEEEEEGNENEESEAEVDENEQGINGTSTNSTEAENGNGSSGGDNGEEGEEESVTGANAEDTTETGRQGKGTSKTTTSPNGGFEPTTPPQVYRTTSPPFGKTTTVEYEGEYEYTGANEYDNGYEIYESENGEPRGDNYRAYEDEYSYFKGQGYDGYDGQNYYHHQ

SEQ ID NO: 2145 - protein, 245 aa, Homo Sapiens
RHWGWGLCLIGWNEFILQPIHNLLMGDTKEQRILNHVLQHAEPGNAQSVLEAIDTYCEQKEWAMNVGDKKGKIVDAVIQEHQPSVLLELGAYCGYSAVRMARLLSPGARLITIEINPDCAAITQRMVDFAGVKDKVTLVVGASQDIIPQLKKKYDVDTLDMVFLDHWKDRYLPDTLLLEECGLLRKGTVLLADNVICPGAPDFLAHVRGSSCFECTHYQSFLEYREVVDGLEKAIYKGPGSEAGP

SEQ ID NO: 2146 - protein, 465 aa, Homo Sapiens
HAGKILLIPVDGSHWLSMLGAIQQLQQRGHEIVVLAPDASLYIRDGAFYTLKTYPVPFQREDVKESFVSLGHNVFENDSFLQRVIKTYKKIKKDSAMLLSGCSHLLHNKELMASLAESSFDVMLTDPFLPCSPIVAQYLSLPTVFFLHALPCSLEFEATQCPNPFSYVPRPLSSHSDHMTFLQRVKNMLIAFSQNFLCDVVYSPYATLASEFLQREVTVQDLLSSASVWLFRSDFVKDYPRPIMPNMVFVGGINCLHQNPLSQEFEAYINASGEHGIVVFSLGSMVSEIPEKKAMAIADALGKIPQTVLWRYTGTRPSNLANNTILVKWLPQNDLLGHPMTRAFITHAGSHGVYESICNGVPMVMMPLFGDQMDNAKRMETKGAGVTLNVLEMTSEDLENALKAVINDKSYKENIMRLSSLHKDRPVEPLDLAVFWVEFVMRHKGAPHLRPAAHDLTWYQYHSLD

SEQ ID NO: 2147 - protein, 463 aa, Homo Sapiens
GKVLVVPTDGSPWLSMREALRELHARGHQAVVLTPEVNMHIKEEKFFTLTAYAVPWTQKEFDRVTLGYTQGFFETEHLLKRYSRSMAIMNNVSLALHRCCVELLHNEALIRHLNATSFDVVLTDPVNLCGAVLAKYLSIPAVFFWRYIPCDLDFKGTQCPNPSSYIPKLLTTNSDHMTFLQRVKNMLYPLALSYICHTFSAPYASLASELFQREVSVVDLVSYASVWLFRGDFVMDYPRPIMPNMVFIGGINCANGKPLSQEFEAYINASGEHGIVVFSLGSMVSEIPEKKAMAIADALGKIPQTVLWRYTGTRPSNLANNTILVKWLPQNDLLGHPMTRAFITHAGSHGVYESICNGVPMVMMPLFGDQMDNAKRMETKGAGVTLNVLEMTSEDLENALKAVINDKSYKENIMRLSSLHKDRPVEPLDLAVFWVEFVMRHKGAPHLRPAAHDLTWYQYHSLD

SEQ ID NO: 2148 - protein, 237 aa, Homo Sapiens
DEAIHCPPCSEEKLARCRPPVGCEELVREPGCGCCATCALGLGMPCGVYTPRCGSGLRCYPPRGVEKPLHTLMHGQGVCMELAEIEAIQESLQPSDKDEGDHPNNSFSPCSAHDRRCLQKHFAKIRDRSTSGGKMKVNGAPREDARPVPQGSCQSELHRALERLAASQSRTHEDLYIIPIPNCDRNGNFHPKQCHPALDGQRGKCWCVDRKTGVKLPGGLEPKGELDCHQLADSFRE

SEQ ID NO: 2149 - protein, 266 aa, Homo Sapiens
AESHWCYEVQAESSNYPCLVPVKWGGNCQKDRQSPINIVTTKAKVDKKLGRFFFSGYDKKQTWTVQNNGHSVMMLLENKASISGGGLPAPYQAKQLHLHWSDLPYKGSEHSLDGEHFAMEMHIVHEKEKGTSRNVKEAQDPEDEIAVLAFLVEAGTQVNEGFQPLVEALSNIPKPEMSTTMAESSLLDLLPKEEKLRHYFRYLGSLTTPTCDEKVVWTVFREPIQLHREQILAFSQKLYYDKEQTVSMKDNVRPLQQLGQRTVIKS

SEQ ID NO: 2150 - protein, 367 aa, Homo Sapiens
LTPGNPKWERTNLTYRIRNYTPQLSEAEVERAIKDAFELWSVASPLIFTRISQGEADINIAFYQRDHGDNSPFDGPNGILAHAFQPGQGIGGDAHFDAEETWTNTSANYNLFLVAAHEFGHSLGLAHSSDPGALMYPNYAFRETSNYSLPQDDIDGIQAIYGLSSNPIQPTGPSTPKPCDPSLTFDAITTLRGEILFFKDRYFWRRHPQLQRVEMNFISLFWPSLPTGIQAAYEDFDRDLIFLFKGNQYWALSGYDILQGYPKDISNYGFPSSVQAIDAAVFYRSKTYFFVNDQFWRYDNQRQFMEPGYPKSISGAFPGIESKVDAVFQQEHFFHVFSGPRYYAFDLIAQRVTRVARGNKWLNCRYG

SEQ ID NO: 2151 - protein, 549 aa, Homo Sapiens
GHPSSPPVVDTVHGKVLGKFVSLEGFAQPVAIFLGIPFAKPPLGPLRFTPPQPAEPWSFVKNATSYPPMCTQDPKAGQLLSELFTNRKENIPLKLSEDCLYLNIYTPADLTKKNRLPVMVWIHGGGLMVGAASTYDGLALAAHENVVVVTIQYRLGIWGFFSTGDEHSRGNWGHLDQVAALRWVQDNIASFGGNPGSVTIFGESAGGESVSVLVLSPLAKNLFHRAISESGVALTSVLVKKGDVKPLAEQIAITAGCKTTTSAVMVHCLRQKTEEELLETTLKMKFLSLDLQGDPRESQPLLGTVIDGMLLLKTPEELQAERNFHTVPYMVGINKQEFGWLIPMLMSYPLSEGQLDQKTAMSLLWKSYPLVCIAKELIPEATEKYLGGTDDTVKKKDLFLDLIADVMFGVPSVIVARNHRDAGAPTYMYEFQYRPSFSSDMKPKTVIGDHGDELFSVFGAPFLKEGASEEEIRLSKMVMKFWANFARNGNPNGEGLPHWPEYNQKEGYLQIGANTQAAQKLKDKEVAFWTNLFAKKAVEKPPQTEHIEL

SEQ ID NO: 2152 - protein, 665 aa, Homo Sapiens
NFQNCGPRPCETSVCLDLRDHYLASGNTSVAPCTDFFSFACGRAKETNNSFQELATKNKNRLRRILEVQNSWHPGSGEEKAFQFYNSCMDTLAIEAAGTGPLRQVIEELGGWRISGKWTSLNFNRTLRLLMSQYGHFPFFRAYLGPHPASPHTPVIQIDQPEFDVPLKQDQEQKIYAQIFREYLTYLNQLGTLLGGDPSKVQEHSSLSISITSRLFQFLRPLEQRRAQGKLFQMVTIDQLKEMAPAIDWLSCLQATFTPMSLSPSQSLVVHDVEYLKNMSQLVEEMLLKQRDFLQSHMILGLVVTLSPALDSQFQEARRKLSQKLRELTEQPPMPARPRWMKCVEETGTFFEPTLAALFVREAFGPSTRSAAMKLFTAIRDALITRLRNLPWMNEETQNMAQDKVAQLQVEMGASEWALKPELARQEYNDIQLGSSFLQSVLSCVRSLRARIVQSFLQPHPQHRWKVSPWDVNAYYSVSDHVVVFPAGLLQPPFFHPGYPRAVNFGAAGSIMAHELLHIFYQLLLPGGCLACDNHALQEAHLCLKRHYAAFPLPSRTSFNDSLTFLENAADVGGLAIALQAYSKRLLRHHGETVLPSLDLSPQQIFFRSYAQVMCRKPSPQDSHDTHSPPHLRVHGPLSSTPAFARYFRCARGALLNPSSRCQLW

SEQ ID NO: 2153 - protein, 183 aa, Homo Sapiens
DEKKKGPKVTVKVYFDLRIGDEDVGRVIFGLFGKTVPKTVDNFVALATGEKGFGYKNSKFHRVIKDFMIQGGDFTRGDGTGGKSIYGERFPDENFKLKHYGPGWVSMANAGKDTNGSQFFITTVKTAWLDGKHVVFGKVLEGMEVVRKVESTKTDSRDKPLKDVIIADCGKIEVEKPFAIAKE

SEQ ID NO: 2154 - protein, 671 aa, Homo Sapiens
QLRGDGLGFRNRNNSTGVAGLSEEASAELRHHLHSPRDHPDENKDVSTENGHHFWSHPDREKEDEDVSKEYGHLLPGHRSQDHKVGDEGVSGEEVFAEHGGQARGHRGHGSEDTEDSAEHRHHLPSHRSHSHQDEDEDEVVSSEHHHHILRHGHRGHDGEDDEGEEEEEEEEEEEEASTEYGHQAHRHRGHGSEEDEDVSDGHHHHGPSHRHQGHEEDDDDDDDDDDDDDDDDVSIEYRHQAHRHQGHGIEEDEDVSDGHHHRDPSHRHRSHEEDDNDDDDVSTEYGHQAHRHQDHRKEEVEAVSGEHHHHVPDHRHQGHRDEEEDEDVSTERWHQGPQHVHHGLVDEEEEEEEITVQFGHYVASHQPRGHKSDEEDFQDEYKTEVPHHHHHRVPREEDEEVSAELGHQAPSHRQSHQDEETGHGQRGSIKEMSHHPPGHTVVKDRSHLRKDDSEEEKEKEEDPGSHEEDDESSEQGEKGTHHGSRDQEDEEDEEEGHGLSLNQEEEEEEDKEEEEEEEDEERREERAEVGAPLSPDHSEEEEEEEEGLEEDEPRFTIIPNPLDRREEAGGASSEEESGEDTGPQDAQEYGNYQPGSLCGYCSFCNRCTECESCHCDEENMGEHCDQCQHCQFCYLCPLVCETVCAPGSYVDYFSSSLYQALADMLETPEP

SEQ ID NO: 2155 - protein, 222 aa, Homo Sapiens
ARSAPKPMSPSDFLDKLMGRTSGYDARIRPNFKGPPVNVSCNIFINSFGSIAETTMDYRVNIFLRQQWNDPRLAYNEYPDDSLDLDPSMLDSIWKPDLFFANEKGAHFHEITTDNKLLRISRNGNVLYSIRITLTLACPMDLKNFPMDVQTCIMQLESFGYTMNDLIFEWQEQGAVQVADGLTLPQFILKEEKDLRYCTKHYNTGKFTCIEARFHLERQMGY

SEQ ID NO: 2156 - protein, 229 aa, Homo Sapiens
KDHDSRSGKQPSQTLSPSDFLDKLMGRTSGYDARIRPNFKGPPVNVTCNIFINSFGSVTETTMDYRVNIFLRQQWNDSRLAYSEYPDDSLDLDPSMLDSIWKPDLFFANEKGANFHDVTTDNKLLRISKNGKVLYSIRLTLTLSCPMDLKNFPMDVQTCTMQLESFGYTMNDLIFEWLSDGPVQVAEGLTLPQFILKEEKELGYCTKHYNTGKFTCIEVKFHLERQMGY

SEQ ID NO: 2157 - protein, 172 aa, Homo Sapiens
QNETEPIVLEGKCLVVCDSNPTSDPTGTALGISVRSGSAKVAFSAIRSTNHEPSEMSNRTMIIYFDQVLVNIGNNFDSERSTFIAPRKGIYSFNFHVVKVYNRQTIQVSLMLNGWPVISAFAGDQDVTREAASNGVLIQMEKGDRAYLKLERGNLMGGWKYSTFSGFLVFPL

SEQ ID NO: 2158 - protein, 53 aa, Homo Sapiens
DLRVDTKSRAAWARLLQEHPNARKYKGANKKGLSKGCFGLKLDRIGSMSGLGC

SEQ ID NO: 2159 - protein, 226 aa, Homo Sapiens
IIGGTECKPHSRPYMAYLEIVTSNGPSKFCGGFLIRRNFVLTAAHCAGRSITVTLGAHNITEEEDTWQKLEVIKQFRHPKYNTSTLHHDIMLLKLKEKASLTLAVGTLPFPSQFNFVPPGRMCRVAGWGRTGVLKPGSDTLQEVKLRLMDPQACSHFRDFDHNLQLCVGNPRKTKSAFKGDSGGPLLCAGVAQGIVSYGRSDAKPPAVFTRISHYRPWINQILQAN

SEQ ID NO: 2160 - protein, 67 aa, Homo Sapiens
FTLNLPWTDCGHTWNSPNCTDPKLLNGSVLGNHTKYSKYKFTPAAEFYERGVLHLHESSGIHDIGLP

SEQ ID NO: 2161 - protein, 261 aa, Homo Sapiens
TESRMHWPGREVHEMSKKGSRPQRQRREVHEDAHKQVSPILRRSPDITKSPLTKSEQLLRIDDHDFSMRPGFGGPAIPVGVDVQVESLDSISEVDMDFTMTLYLRHYWKDERLSFPSTNNLSMTFDGRLVKKIWVPDMFFVHSKRSFIHDTTTDNVMLRVQPDGKVLYSLRVTVTAMCNMDFSRFPLDTQTCSLEIESYAYTEDDLMLYWKKGNDSLKTDERISLSQFLIQEFHTTTKLAFYSSTGWYNRLYINFTLRRHI

SEQ ID NO: 2162 - protein, 221 aa, Homo Sapiens
IVGGHEAQPHSRPYMASLQMRGNPGSHFCGGTLIHPSFVLTAAHCLRDIPQRLVNVVLGAHNVRTQEPTQQHFSVAQVFLNNYDAENKLNDVLLIQLSSPANLSASVATVQLPQQDQPVPHGTQCLAMGWGRVGAHDPPAQVLQELNVTVVTFFCRPHNICTFVPRRKAGICFGDSGGPLICDGIIQGIDSFVIWGCATRLFPDFFTRVALYVDWIRSTLR

SEQ ID NO: 2163 - protein, 298 aa, Homo Sapiens
YLELREAADYDPFLLFSANLKRELAGEQPYRRALRCLDMLSLQGQFTFTADRPQLHCAAFFISEPEEFITIHYDQVSIDCQGGDFLKVFDGWILKGEKFPSSQDHPLPSAERYIDFCESGLSRRSIRSSQNVAMIFFRVHEPGNGFTLTIKTDPNLFPCNVISQTPNGKFTLVVPHQHRNCSFSIIYPVVIKISDLTLGHVNGLQLKKSSAGCEGIGDFVELLGGTGLDPSKMTPLADLCYPFHGPAQMKVGCDNTVVRMVSSGKHVNRVTFEYRQLEPYELENPNGNSIGEFCLSGL

SEQ ID NO: 2164 - protein, 213 aa, Homo Sapiens
RCPGCGQGVQAGCPGGCVEEEDGGSPAEGCAEAEGCLRREGQECGVYTPNCAPGLQCHPPKDDEAPLRALLLGRGRCLPARAPAVAEENPKESKPQAGTARPQDVNRRDQQRNPGTSTTPSQPNSAGVQDTEMGPCRRHLDSVLQQLQTEVYRGAQTLYVPNCDHRGFYRKRQCRSSQGQRRGPCWCVDRMGKSLPGSPDGNGSSSCPTGSSG

SEQ ID NO: 2165 - protein, 252 aa, Homo Sapiens
LGSFVHCEPCDEKALSMCPPSPLGCELVKEPGCGCCMTCALAEGQSCGVYTERCAQGLRCLPRQDEEKPLHALLHGRGVCLNEKSYREQVKIERDSREHEEPTTSEMAEETYSPKIFRPKHTRISELKAEAVKKDRRKKLTQSKFVGGAENTAHPRIISAPEMRQESEQGPCRRHMEASLQELKASPRMVPRAVYLPNCDRKGFYKRKQCKPSRGRKRGICWCVDKYGMKLPGMEYVDGDFQCHTFDSSNVE

SEQ ID NO: 2166 - protein, 260 aa, Homo Sapiens
LKIAAFNIQTFGETKMSNATLVSYIVQILSRYDIALVQEVRDSHLTAVGKLLDNLNQDAPDTYHYVVSEPLGRNSYKERYLFVYRPDQVSAVDSYYYDDGCEPCGNDTFNREPAIVRFFSRFTEVREFAIVPLHAAPGDAVAEIDALYDVYLDVQEKWGLEDVMLMGDFNAGCSYVRPSQWSSIRLWTSPTFQWLIPDSADTTATPTHCAYDRIVVAGMLLRGAVVPDSALPFNFQAAYGLSDQLAQAISDHYPVEVMLK

SEQ ID NO: 2167 - protein, 407 aa, Homo Sapiens
SQVSQNCHNGSYEISVLMMGNSAFAEPLKNLEDAVNEGLEIVRGRLQNAGLNVTVNATFMYSDGLIHNSGDCRSSTCEGLDLLRKISNAQRMGCVLIGPSCTYSTFQMYLDTELSYPMISAGSFGLSCDYKETLTRLMSPARKLMYFLVNFWKTNDLPFKTYSWSTSYVYKNGTETEDCFWYLNALEASVSYFSHELGFKVVLRQDKEFQDILMDHNRKSNVIIMCGGPEFLYKLKGDRAVAEDIVIILVDLFNDQYLEDNVTAPDYMKNVLVLTLSPGNSLLNSSFSRNLSPTKRDFALAYLNGILLFGHMLKIFLENGENITTPKFAHAFRNLTFEGYDGPVTLDDWGDVDSTMVLLYTSVDTKKYKVLLTYDTHVNKTYPVDMSPTFTWKNSKLPNDITGRGPQ

SEQ ID NO: 2168 - protein, 244 aa, Homo Sapiens
QPNELSGSIDHQTSVQQLPGEFFSLENPSDAEALYETSSGLNTLSEHGSSEHGSSKHTVAEHTSGEHAESEHASGEPAATEHAEGEHTVGEQPSGEQPSGEHLSGEQPLSELESGEQPSDEQPSGEHGSGEQPSGEQASGEQPSGEHASGEQASGAPISSTSTGTILNCYTCAYMNDQGKCLRGEGTCITQNSQQCMLKKIFEGGKLQFMVQGCENMCPSMNLFSHGTRMQIICCRNQSFCNKI

SEQ ID NO: 2169 - protein, 121 aa, Homo Sapiens
ATGAEGKRKLQIGVKKRVDHCPIKSRKGDVLHMHYTGKLEDGTEFDSSLPQNQPFVFSLGTGQVIKGWDQGLLGMCEGEKRKLVIPSELGYGERGAPPKIPGGATLVFEVELLKIERRTEL

SEQ ID NO: 2170 - protein, 116 aa, Homo Sapiens
AILGRSETQECLFFNANWEKDRTNQTGVEPCYGDKDKRRHCFATWKNISGSIEIVKQGCWLDDINCYDRTDCVEKKDSPEVYFCCCEGNMCNEKFSYFPEMEVTQPTSNPVTPKPP

SEQ ID NO: 2171 - protein, 354 aa, Homo Sapiens
AKLIALTLLGMGLALFRNHQSSYQTRLNALREVQPVELPNCNLVKGIETGSEDLEILPNGLAFISSGLKYPGIKSFNPNSPGKILLMDLNEEDPTVLELGITGSKFDVSSFNPHGISTFTDEDNAMYLLVVNHPDAKSTVELFKFQEEEKSLLHLKTIRHKLLPNLNDIVAVGPEHFYGTNDHYFLDPYLQSWEMYLGLAWSYVVYYSPSEVRVVAEGFDFANGINISPDGKYVYIAELLAHKIHVYEKHANWTLTPLKSLDFNTLVDNISVDPETGDLWVGCHPNGMKIFFYDSENPPASEVLRIQNILTEEPKVTQVYAENGTVLQGSTVASVYKGKLLIGTVFHKALYCEL

SEQ ID NO: 2172 - protein, 399 aa, Homo Sapiens
STQTQSSCSVPSAQEPLVNGIQVLMENSVTSSAYPNPSILIAMNLAGAYNLKAQKLLTYQLMSSDNNDLTIGQLGLTIMALTSSCRDPGDKVSILQRQMENWAPSSPNAEASAFYGPSLAILALCQKNSEATLPIAVRFAKTLLANSSPFNVDTGAMATLALTCMYNKIPVGSEEGYRSLFGQVLKDIVEKISMKIKDNGIIGDIYSTGLAMQALSVTPEPSKKEWNCKKTTDMILNEIKQGKFHNPMSIAQILPSLKGKTYLDVPQVTCSPDHEVQPTLPSNPGPGPTSASNITVIYTINNQLRGVELLFNETINVSVKSGSVLLVVLEEAQRKNPMFKFETTMTSWGLVVSSINNIAENVNHKTYWQFLSGVTPLNEGVADYIPFNHEHITANFTQY

SEQ ID NO: 2173 - protein, 173 aa, Homo Sapiens
AVMPPTPPPQGEYLPDMGLGIDGVKPPHAYGAKKGKNGGPAYEMPAFTAELTAPFPPVGAPVKFNKLLYNGRQNYNPQTGIFTCEVPGVYYFAYHVHCKGGNVWVALFKNNEPVMYTYDEYKKGFLDQASGSAVLLLRPGDRVFLQMPSEQAAGLYAGQYVHSSFSGYLLYPM

SEQ ID NO: 2174 - protein, 400 aa, Homo Sapiens
EPAVYFKEQFLDGDGWTSRWIESKHKSDFGKFVLSSGKFYGDEEKDKGLQTSQDARFYALSASFEPFSNKGQTLVVQFTVKHEQNIDCGGGYVKLFPNSLDQTDMHGDSEYNIMFGPDICGPGTKKVHVIFNYKGKNVLINKDIRCKDDEFTHLYTLIVRPDNTYEVKIDNSQVESGSLEDDWDFLPPKKIKDPDASKPEDWDERAKIDDPTDSKPEDWDKPEHIPDPDAKKPEDWDEEMDGEWEPPVIQNPEYKGEWKPRQIDNPDYKGTWIHPEIDNPEYSPDPSIYAYDNFGVLGLDLWQVKSGTIFDNFLITNDEAYAEEFGNETWGVTKAAEKQMKDKQDEEQRLKEEEEDKKRKEEEEAEDKEDDEDKDEDEEDEEDKEEDEEEDVPGQAKDEL

SEQ ID NO: 2175 - protein, 442 aa, Homo Sapiens
DPVLCFTQYEESSGKCKGLLGGGVSVEDCCLNTAFAYQKRSGGLCQPCRSPRWSLWSTWAPCSVTCSEGSQLRYRRCVGWNGQCSGKVAPGTLEWQLQACEDQQCCPEMGGWSGWGPWEPCSVTCSKGTRTRRRACNHPAPKCGGHCPGQAQESEACDTQQVCPTHGAWATWGPWTPCSASCHGGPHEPKETRSRKCSAPEPSQKPPGKPCPGLAYEQRRCTGLPPCPVAGGWGPWGPVSPCPVTCGLGQTMEQRTCNHPVPQHGGPFCAGDATRTHICNTAVPCPVDGEWDSWGEWSPCIRRNMKSISCQEIPGQQSRGRTCRGRKFDGHRCAGQQQDIRHCYSIQHCPLKGSWSEWSTWGLCMPPCGPNPTRARQRLCTPLLPKYPPTVSMVEGQGEKNVTFWGRPLPRCEELQGQKLVVEEKRPCLHVPACKDPEEEEL

SEQ ID NO: 2176 - protein, 122 aa, Homo Sapiens
GSASAQSRTLAGGIHATDLNDKSVQCALDFAISEYNKVINKDEYYSRPLQVMAAYQQIVGGVNYYFNVKFGRTTCTKSQPNLDNCPFNDQPKLKEEEFCSFQINEVPWEDKISILNYKCRKV

SEQ ID NO: 2177 - protein, 220 aa, Homo Sapiens
QSVNDPGNMSFVKETVDKLLKGYDIRLRPDFGGPPVCVGMNIDIASIDMVSEVNMDYTLTMYFQQYWRDKRLAYSGIPLNLTLDNRVADQLWVPDTYFLNDKKSFVHGVTVKNRMIRLHPDGTVLYGLRITTTAACMMDLRRYPLDELNCTLEIESYGYTTDDIEFYWRGGDKAVTGVERIELPQFSIVEHRLVSRNVVFATGAYPRLSLSFRLKRNIGY

SEQ ID NO: 2178 - protein, 240 aa, Homo Sapiens
RKPKRKRWTGQVEMPKPSHLYKKNLDVTKIRKGKPQQLLRVDEHDFSMRPAFGGPAIPVGVDVQVESLDSISEVDMDFTMTLYLRHYWKDERLAFSSASNKSMTFDGRLVKKIWVPDVFFVHSKRSFTHDTTTDNIMLRVFPDGHVLYSMRITVTAMCNMDFSHFPLDSQTCSLELESYAYTDEDLMLYWKNGDESLKTDEKISLSQFLIQKFHTTSRLAFYSSTGWYNRLYINFTLRRH

SEQ ID NO: 2179 - protein, 576 aa, Homo Sapiens
TRCPDGQFCPVACCLDPGGASYSCCRPLLDKWPTTLSRHLGGPCQVDAHCSAGHSCIFTVSGTSSCCPFPEAVACGDGHHCCPRGFHCSADGRSCFQRSGNNSVGAIQCPDSQFECPDFSTCCVMVDGSWGCCPMPQASCCEDRVHCCPHGAFCDLVHTRCITPTGTHPLAKKLPAQRTNRAVALSSSVMCPDARSRCPDGSTCCELPSGKYGCCPMPNATCCSDHLHCCPQDTVCDLIQSKCLSKENATTDLLTKLPAHTVGDVKCDMEVSCPDGYTCCRLQSGAWGCCPFTQAVCCEDHIHCCPAGFTCDTQKGTCEQGPHQVPWMEKAPAHLSLPDPQALKRDVPCDNVSSCPSSDTCCQLTSGEWGCCPIPEAVCCSDHQHCCPQGYTCVAEGQCQRGSEIVAGLEKMPARRASLSHPRDIGCDQHTSCPVGQTCCPSLGGSWACCQLPHAVCCEDRQHCCPAGYTCNVKARSCEKEVVSAQPATFLARSPHVGVKDVECGEGHFCHDNQTCCRDNRQGWACCPYRQGVCCADRRHCCPAGFRCAARGTKCLRREAPRWDAPLRDPALRQLL

SEQ ID NO: 2180 - protein, 643 aa, Homo Sapiens
SALRDSALNLFNDPMWNQQWYLQDTRMTAALPKLDLHVIPVWQKGITGKGVVITVLDDGLEWNHTDIYANYDPEASYDFNDNDHDPFPRYDPTNENKHGTRCAGEIAMQANNHKCGVGVAYNSKVGGIRMLDGIVTDAIEASSIGFNPGHVDIYSASWGPNDDGKTVEGPGRLAQKAFEYGVKQGRQGKGSIFVWASGNGGRQGDNCDCDGYTDSIYTISISSASQQGLSPWYAEKCSSTLATSYSSGDYTDQRITSADLHNDCTETHTGTSASAPLAAGIFALALEANPNLTWRDMQHLVVWTSEYDPLANNPGWKKNGAGLMVNSRFGFGLLNAKALVDLADPRTWRSVPEKKECVVKDNDFEPRALKANGEVIIEIPTRACEGQENAIKSLEHVQFEATIEYSRRGDLHVTLTSAAGTSTVLLAERERDTSPNGFKNWDFMSVHTWGENPIGTWTLRITDMSGRIQNEGRIVNWKLILHGTSSQPEHMKQPRVYTSYNTVQNDRRGVEKMVDPGEEQPTQENPKENTLVSKSPSSSSVGGRRDELEEGAPSEAMLRLLQSAFSKNSPPKQSPKKSPTAKLNIPYENFYEALEKLNKPSQLKDSEDSLYNDYVDVFYNTKPYKHRDDRLLQALVDILNEEN

SEQ ID NO: 2181 - protein, 323 aa, Homo Sapiens
QNCSGPCRCPDEPAPRCPAGVSLVLDGCGCCRVCAKQLGELCTERDPCDPHKGLFCDFGSPANRKIGVCTAKDGAPCIFGGTVYRSGESFQSSCKYQCTCLDGAVGCMPLCSMDVRLPSPDCPFPRRVKLPGKCCEEWVCDEPKDQTVVGPALAAYRLEDTFGPDPTMIRANCLVQTTEWSACSKTCGMGISTRVTNDNASCRLEKQSRLCMVRPCEADLEENIKKGKKCIRTPKISKPIKFELSGCTSMKTYRAKFCGVCTDGRCCTPHRTTTLPVEFKCPDGEVMKKNMMFIKTCACHYNCPGDNDIFESLYYRKMYGDMA

SEQ ID NO: 2182 - protein, 407 aa, Homo Sapiens
QLHVEHDGESCSNSSHQQILETGEGSPSLKIAPANADFAFRFYYLIASETPGKNIFFSPLSISAAYAMLSLGACSHSRSQILEGLGFNLTELSESDVHRGFQHLLHTLNLPGHGLETRVGSALFLSHNLKFLAKFLNDTMAVYEAKLFHTNFYDTVGTIQLINDHVKKETRGKIVDLVSELKKDVLMVLVNYIYFKALWEKPFISSRTTPKDFYVDENTTVRVPMMLQDQEHHWYLHDRYLPCSVLRMDYKGDATVFFILPNQGKMREIEEVLTPEMLMRWNNLLRKRNFYKKLELHLPKFSISGSYVLDQILPRLGFTDLFSKWADLSGITKQQKLEASKSFHKATLDVDEAGTEAAAATSFAIKFFSAQTNRHILRFNRPFLVVIFSTSTQSVLFLGKVVDPTKP

SEQ ID NO: 2183 - protein, 84 aa, Homo Sapiens
NIGSMISNMNAARAEFQARIDAIKQYMHFRNVSKDMEKRVIKWFDYLWTNKKTVDEKEVLKYLPDKLRAEIAINVHLDTLKKVR

SEQ ID NO: 2184 - protein, 229 aa, Homo Sapiens
LHTKGALPLDTVTFYKVIPKSKFVLVKFDTQYPYGEKQDEFKRLAENSASSDDLLVAEVGISDYGDKLNMELSEKYKLDKESYPVFYLFRDGDFENPVPYTGAVKVGAIQRWLKGQGVYLGMPGCLPVYDALAGEFIRASGVEARQALLKQGQDNLSSVKETQKKWAEQYLKIMGKILDQGEDFPASEMTRIARLIEKNKMSDGKKEELQKSLNILTAFQKKGAEKEEL

SEQ ID NO: 2185 - protein, 481 aa, Homo Sapiens
SDVLELTDDNFESRISDTGSAGLMLVEFFAPWCGHCKRLAPEYEAAATRLKGIVPLAKVDCTANTNTCNKYGVSGYPTLKIFRDGEEAGAYDGPRTADGIVSHLKKQAGPASVPLRTEEEFKKFISDKDASIVGFFDDSFSEAHSEFLKAASNLRDNYRFAHTNVESLVNEYDDNGEGIILFRPSHLTNKFEDKTVAYTEQKMTSGKIKKFIQENIFGICPHMTEDNKDLIQGKDLLIAYYDVDYEKNAKGSNYWRNRVMMVAKKFLDAGHKLNFAVASRKTFSHELSDFGLESTAGEIPVVAIRTAKGEKFVMQEEFSRDGKALERFLQDYFDGNLKRYLKSEPIPESNDGPVKVVVAENFDEIVNNENKDVLIEFYAPWCGHCKNLEPKYKELGEKLSKDPNIVIAKMDATANDVPSPYEVRGFPTIYFSPANKKLNPKKYEGGRELSDFISYLQREATNPPVIQEEKPKKKKKAQEDL

SEQ ID NO: 2186 - protein, 67 aa, Homo Sapiens
SWAIYYLYNSFTTTLPWKQCDNPWNTDRCFSNYSMVNTTNMTSAVVEFWERNMHQMTDGLDKPGQIR

SEQ ID NO: 2187 - protein, 232 aa, Homo Sapiens
RCGLAGAAGGAQRGLSEPSSIAKHEDSLLKDLFQDYERWVRPVEHLNDKIKIKFGLAISQLVDVDEKNQLMTTNVWLKQEWIDVKLRWNPDDYGGIKVIRVPSDSVWTPDIVLFDNADGRFEGTSTKTVIRYNGTVTWTPPANYKSSCTIDVTFFPFDLQNCSMKFGSWTYDGSQVDIILEDQDVDKRDFFDNGEWEIVSATGSKGNRTDSCCWYPYVTYSFVIKRLPLFYT

SEQ ID NO: 2188 - protein, 323 aa, Homo Sapiens
YSREKNQPKPSPKRESGEEFRMEKLNQLWEKAQRLHLPPVRLAELHADLKIQERDELAWKKLKLDGLDEDGEKEARLIRNLNVILAKYGLDGKKDARQVTSNSLSGTQEDGLDDPRLEKLWHKAKTSGKFSGEELDKLWREFLHHKEKVHEYNVLLETLSRTEEIHENVISPSDLSDIKGSVLHSRHTELKEKLRSINQGLDRLRRVSHQGYSTEAEFEEPRVIDLWDLAQSANLTDKELEAFREELKHFEAKIEKHNHYQKQLEIAHEKLRHAESVGDGERVSRSREKHALLEGRTKELGYTVKKHLQDLSGRISRARHNEL

SEQ ID NO: 2189 - protein, 215 aa, Homo Sapiens
RVANAEEKLMDDLLNKTRYNNLIRPATSSSQLISIKLQLSLAQLISVNEREQIMTTNVWLKQEWTDYRLTWNSSRYEGVNILRIPAKRIWLPDIVLYNNADGTYEVSVYTNLIVRSNGSVLWLPPAIYKSACKIEVKYFPFDQQNCTLKFRSWTYDHTEIDMVLMTPTASMDDFTPSGEWDIVALPGRRTVNPQDPSYVDVTYDFIIKRKPLFYT

SEQ ID NO: 2190 - protein, 125 aa, Homo Sapiens
SDSEEEMKALEADFLTNMHTSKISKAHVPSWKMTLLNVCSLVNNLNSPAEETGEVHEEELVARRKLPTALDGFSLEAMLTIYQLHKICHSRAFQHWELIQEDILDTGNDKNGKEEVIKRKIPYIL

SEQ ID NO: 2191 - protein, 100 aa, Homo Sapiens [sequence omitted]

SEQ ID NO: 2192 - protein, 362 aa, Homo Sapiens
QEGLDFPEYDGVDRVINVNAKNYKNVFKKYEVLALLYHEPPEDDKASQRQFEMEELILELAAQVLEDKGVGFGLVDSEKDAAVAKKLGLTEVDSMYVFKGDEVIEYDGEFSADTIVEFLLDVLEDPVELIEGERELQAFENIEDEIKLIGYFKSKDSEHYKAFEDAAEEFHPYIPFFATFDSKVAKKLTLKLNEIDFYEAFMEEPVTIPDKPNSEEEIVNFVEEHRRSTLRKLKPESMYETWEDDMDGIHIVAFAEEADPDGFEFLETLKAVAQDNTENPDLSIIWIDPDDFPLLVPYWEKTFDIDLSAPQIGVVNVTDADSVWMEMDDEEDLPSAEELEDWLEDVLEGEINTEDDDDDDDD

SEQ ID NO: 2193 - protein, 228 aa, Homo Sapiens
QMPTSSVKDETNDNITIFTRILDGLLDGYDNRLRPGLGERITQVRTDIYVTSFGPVSDTEMEYTIDVFFRQSWKDERLRFKGPMQRLPLNNLLASKIWTPDTFFHNGKKSIAHNMTTPNKLLRLEDDGTLLYTMRLTISAECPMQLEDFPMDAHACPLKFGSYAYPNSEVVYVWTNGSTKSVVVAEDGSRLNQYHLMGQTVGTENISTSTGEYTIMTAHFHLKRKIGY

SEQ ID NO: 2194 - protein, 248 aa, Homo Sapiens [sequence omitted]

SEQ ID NO: 2195 - protein, 209 aa, Homo Sapiens
SEAEHRLFERLFEDYNEIIRPVANVSDPVIIHFEVSMSQLVKVDEVNQIMETNLWLKQIWNDYKLKWNPSDYGGAEFMRVPAQKIWKPDIVLYNNAVGDFQVDDKTKALLKYTGEVTWIPPAIFKSSCKIDVTYFPFDYQNCTMKFGSWSYDKAKIDLVLIGSSMNLKDYWESGEWAIIKAPGYKHDIKYNCCEEIYPDITYSLYIRRL

SEQ ID NO: 2196 - protein, 589 aa, Homo Sapiens
MASEIHMTGPMCLIENTNGRLMANPEALKILSAITQPMVVVAIVGLYRTGKSYLMNKLAGKKKGFSLGSTVQSHTKGIWMWCVPHPKKPGHILVLLDTEGLGDVEKGDNQNDSWIFALAVLLSSTFVYNSIGTINQQAMDQLYYVTELTHRIRSKSSPDENENEVEDSADFVSFFPDFVWTLRDFSLDLEADGQPLTPDEYLTYSLKLKKGTSQKDETFNLPRLCIRKFFPKKKCFVFDRPVHRRKLAQLEKLQDEELDPEFVQQVADFCSYIFSNSKTKTLSGGIQVNGPRLESLVLTYVNAISSGDLPCMENAVLALAQIENSAAVQKAIAHYEQQMGQKVQLPTESLQELLDLHRDSEREAIEVFIRSSFKDVDHLFQKELAAQLEKKRDDFCKQNQEASSDRCSGLLQVIFSPLEEEVKAGIYSKPGGYRLFVQKLQDLKKKYYEEPRKGIQAEEILQTYLKSKESMTDAILQTDQTLTEKEKEIEVERVKAESAQASAKMLQEMQRKNEQMMEQKERSYQEHLKQLTEKMENDRVQLLKEQERTLALKLQEQEQLLKEGFQKESRIMKNEIQDLQTKMRRRKAC

SEQ ID NO: 2197 - protein, 496 aa, Homo Sapiens
APQPPNILLLLMDDMGWGDLGVYGEPSRETPNLDRMAAEGLLFPNFYSANPLCSPSRAALLTGRLPIRNGFYTTNAHARNAYTPQEIVGGIPDSEQLLPELLKKAGYVSKIVGKWHLGHRPQFHPLKHGFDEWFGSPNCHFGPYDNKARPNIPVYRDWEMVGRYYEEFPINLKTGEANLTQIYLQEALDFIKRQARHHPFFLYWAVDATHAPVYASKPFLGTSQRGRYGDAVREIDDSIGKILELLQDLHVADNTFVFFTSDNGAALISAPEQGGSNGPFLCGKQTTFEGGMREPALAWWPGHVTAGQVSHQLGSIMDLFTTSLALAGLTPPSDRAIDGLNLLPTLLQGRLMDRPIFYYRGDTLMAATLGQHKAHFWTWTNSWENFRQGIDFCPGQNVSGVTTHNLEDHTKLPLIFHLGRDPGERFPLSFASAEYQEALSRITSVVQQHQEALVPAQPQLNVCNWAVMNWAPPGCEKLGKCLTPPESIPKKCLWSH

SEQ ID NO: 2198 - protein, 119 aa, Homo Sapiens
QDGMYQRFLRQHVHPEETGGSDRYCNLMMQRRKMTLYHCKRFNTFIHEDIWNIRSICSTTNIQCKNGKMNCHEGVVKVTDCRDTGSSRAPNCRYRAIASTRRVVIACEGNPQVPVHFDG

SEQ ID NO: 2199 - protein, 298 aa, Homo Sapiens
NDCPHKKSATLLPSFTVTPTVTESTGTTSHRTTKSHKTTTHRTTTTGTTSHGPTTATHNPTTTSHGNVTVHPTSNSTATSQGPSTATHSPATTSHGNATVHPTSNSTATSPGFTSSAHPEPPPPSPSPSPTSKETIGDYTWTNGSQPCVHLQAQIQIRVMYTTQGGGEAWGISVLNPNKTKVQGSCEGAHPHLLLSFPYGHLSFGFMQDLQQKVVYLSYMAVEYNVSFPHAAQWTFSAQNASLRDLQAPLGQSFSCSNSSIILSPAVHLDLLSLRLQAAQLPHTGVFGQSFSCPSDRS

SEQ ID NO: 2200 - protein, 248 aa, Homo Sapiens
QGESRRQEPGDFVKQDIGGLSPKHAPDIPDDSTDNITIFTRILDRLLDGYDNRLRPGLGDAVTEVKTDIYVTSFGPVSDTDMEYTIDVFFRQTWHDERLKFDGPMKILPLNNLLASKIWTPDTFFHNGKKSVAHNMTTPNKLLRLVDNGTLPYTMRLTIHAECPMHLEDFPMDVHACPLKFGSYAYTTAEVVYSWTLGKNKSVEVAQDGSRLNQYDLLGHVVGTEIIRSSTGEYVVMTTHFHLKRKIG

SEQ ID NO: 2201 - protein, 181 aa, Homo Sapiens
KTETITTEKQSQPTLFTSSMSQVLANSQNTTGNPLGQPTQFSDTFSGQSISPAKVTAGQPTPAVYTSSEKPEAHTSAGQPLAYNTKQPTPIANTSSQQAVFTSARQLPSARTSTTQPPKSFVYTFTQQSSSVQIPSRKQITVHNPSTQPTSTVKNSPRSTPGFILDTTSNKQTPQKNNYNS

SEQ ID NO: 2202 - protein, 202 aa, Homo Sapiens
PPPLLLLLALLPLLPAPGAAAAPAPRPPELQSASAGPSVSLYLSEDEVRRLIGLDAELYYVRNDLISHYALSFSLLVPSETNFLHFTWHAKSKVEYKLGFQVDNVLAMDMPQVNISVQGEVPRTLSVFRVELSCTGKVDSEVMILMQLNLTVNSSKNFTVLNFKRRKMCYKKLEEVKTSALDKNTSRTIYDPVHAAPTTSTR

SEQ ID NO: 2203 - protein, 507 aa, Homo Sapiens
DPASKSRSCGEVRQIYGAKGFSLSDVPQAEISGEHLRICPQGYTCCTSEMEENLANRSHAELETALRDSSRVLQAMLATQLRSFDDHFQHLLNDSERTLQATFPGAFGELYTQNARAFRDLYSELRLYYRGANLHLEETLAEFWARLLERLFKQLHPQLLLPDDYLDCLGKQAEALRPFGEAPRELRLRATRAFVAARSFVQGLGVASDVVRKVAQVPLGPECSRAVMKLVYCAHCLGVPGARPCPDYCRNVLKGCLANQADLDAEWRNLLDSMVLITDKFWGTSGVESVIGSVHTWLAEAINALQDNRDTLTAKVIQGCGNPKVNPQGPGPEEKRRRGKLAPRERPPSGTLEKLVSEAKAQLRDVQDFWISLPGTLCSEKMALSTASDDRCWNGMARGRYLPEVMGDGLANQINNPEVEVDITKPDMTIRQQIMQLKIMTNRLRSAYNGNDVDFQDASDDGSGSGSGDGCLDDLCGRKVSRKSSSSRTPLTHALPGLSEQEGQKTS

SEQ ID NO: 2204 - protein, 463 aa, Homo Sapiens
GKVLVVPTDGSHWLSMREALRDLHARGHQVVVLTLEVNMYIKEENFFTLTTYAISWTQDEFDRLLLGHTQSFFETEHLLMKFSRRMAIMNNMSLIIHRSCVELLHNEALIRHLHATSFDVVLTDPFHLCAAVLAKYLSIPAVFFLRNIPCDLDFKGTQCPNPSSYIPRLLTTNSDHMTFLQRVKNMLYPLALSYLCHAVSAPYASLASELFQREVSVVDLVSHASVWLFRGDFVMDYPRPIMPNMVFIGGINCANGKPLSQEFEAYINASGEHGIVVFSLGSMVSEIPEKKAMAIADALGKIPQTVLWRYTGTRPSNLANNTILVKWLPQNDLLGHPMTRAFITHAGSHGVYESICNGVPMVMMPLFGDQMDNAKRMETKGAGVTLNVLEMTSEDLENALKAVINDKSYKENIMRLSSLHKDRPVEPLDLAVFWVEFVMRHKGAPHLRPAAHDLTWYQYHSLD

SEQ ID NO: 2205 - protein, 112 aa, Homo Sapiens
ESWRSFFKEALQGVGDMGRAYWDIMISNHQNSNRYLYARGNYDAAQRGPGGVWAAKLISRSRVYLQGLIDYYLFGNSSTVLEDSKSNEKAEEWGRSGKDPDRFRPDGLPKKY

SEQ ID NO: 2206 - protein, 188 aa, Homo Sapiens
CTCSPSHPQDAFCNSDIVIRAKVVGKKLVKEGPFGTLVYTIKQMKMYRGFTKMPHVQYIHTEASESLCGLKLEVNKYQYLLTGRVYDGKMYTGLCNFVERWDQLTLSQRKGLNYRYHLGCNCKIKSCYYLPCFVTSKNECLWTDMLSNFGYPGYQSKHYACIRQKGGYCSWYRGWAPPDKSIINATDP

SEQ ID NO: 2207 - protein, 362 aa, Homo Sapiens [sequence omitted]

SEQ ID NO: 2208 - protein, 558 aa, Homo Sapiens
SRHQAPCGPQAFAHAAVAADSKVCSDIGRAILQQQGSPVDATIAALVCTSVVNPQSMGLGGGVIFTIYNVTTGKVEVINARETVPASHAPSLLDQCAQALPLGTGAQWIGVPGELRGYAEAHRRHGRLPWAQLFQPTIALLRGGHVVAPVLSRFLHNSILRPSLQASTLRQLFFNGTEPLRPQDPLPWPALATTLETVATEGVEVFYTGRLGQMLVEDIAKEGSQLTLQDLAKFQPEVVDALEVPLGDYTLYSPPPPAGGAILSFILNVLRGFNFSTESMARPEGRVNVYHHLVETLKFAKGQRWRLGDPRSHPKLQNASRDLLGETLAQLIRQQIDGRGDHQLSHYSLAEAWGHGTGTSHVSVLGEDGSAVAATSTINTPFGAMVYSPRTGIILNNELLDLCERCPRGSGTTPSPAVSGDRVGGAPGRCWPPVPGERSPSSMVPSILINKAQGSKLVIGGAGGELIISAVAQAIMSKLWLGFDLRAAIAAPILHVNSKGCVEYEPNFSQEVQRGLQDRGQNQTQRPFFLNVVQAVSQEGACVYAVSDLRKSGEAAGY

SEQ ID NO: 2209 - protein, 103 aa, Homo Sapiens
SGPRGVQALLCACTSCLQANYTCETDGACMVSIFNLDGMEHHVRTCIPKVELVPAGKPFYCLSSEDLRNTHCCYTDYCNRIDLRVPSGHLKEPEHPSMWGPVE

SEQ ID NO: 2210 - protein, 399 aa, Homo Sapiens
QNPASPPEEGSPDPDSTGALVEEEDPFFKVPVNKLAAAVSNFGYDLYRVRSSTSPTTNVLLSPLSVATALSALSLGAEQRTESIIHRALYYDLISSPDIHGTYKELLDTVTAPQKNLKSASRIVFEKKLRIKSSFVAPLEKSYGTRPRVLTGNPRLDLQEINNWVQAQMKGKLARSTKEIPDEISILLLGVAHFKGQWVTKFDSRKTSLEDFYLDEERTVRVPMMSDPKAVLRYGLDSDLSCKIAQLPLTGSMSIIFFLPLKVTQNLTLIEESLTSEFIHDIDRELKTVQAVLTVPKLKLSYEGEVTKSLQEMKLQSLFDSPDFSKITGKPIKLTQVEHRAGFEWNEDGAGTTPSPGLQPAHLTFPLDYHLNQPFIFVLRDTDTGALLFIGKILDPRGP

SEQ ID NO: 2211 - protein, 252 aa, Homo Sapiens
EAMFCDFPKINHGILYDEEKYKPFSQVPTGEVFYYSCEYNFVSPSKSFWTRITCAEEGWSPTPKCLRLCFFPFVENGHSESSGQTHLEGDTVQIICNTGYRLQNNENNISCVERGWSTPPKCRSTISAEKCGPPPPIDNGDITSFLLSVYAPGSSVEYQCQNLYQLEGNNQITCRNGQWSEPPKCLDPCVISQEIMEKYNIKLKWTNQQKLYSRTGDIVEFVCKSGYHPTKSHSFRAMCQNGKLVYPSCEEK

SEQ ID NO: 2212 - protein, 97 aa, Homo Sapiens
DPVKPSRGPLVTCTCESPHCKGPTCRGAWCTVVLVREEGRHPQEHRGCGNLHRELCRGRPTEFVNHYCCDSHLCNHNVSLVLEATQPPSEQPGTDGQ

SEQ ID NO: 2213 - protein, 140 aa, Homo Sapiens
MDVFMKGLSKAKEGVVAAAEKTKQGVAEAAGKTKEGVLYVGSKTKEGVVHGVATVAEKTKEQVTNVGGAVVTGVTAVAQKTVEGAGSIAAATGFVKKDQLGKNEEGAPQEGILEDMPVDPDNEAYEMPSEEGYQDYEPEA

SEQ ID NO: 2214 - protein, 455 aa, Homo Sapiens
LNFRAPPVIPNVPFLWAWNAPSEFCLGKFDEPLDMSLFSFIGSPRINATGQGVTIFYVDRLGYYPYIDSITGVTVNGGIPQKISLQDHLDKAKKDITFYMPVDNLGMAVIDWEEWRPTWARNWKPKDVYKNRSIELVQQQNVQLSLTEATEKAKQEFEKAGKDFLVETIKLGKLLRPNHLWGYYLFPDCYNHHYKKPGYNGSCFNVEIKRNDDLSWLWNESTALYPSIYLNTQQSPVAATLYVRNRVREAIRVSKIPDAKSPLPVFAYTRIVFTDQVLKFLSQDELVYTFGETVALGASGIVIWGTLSIMRSMKSCLLLDNYMETILNPYIINVTLAAKMCSQVLCQEQGVCIRKNWNSSDYLHLNPDNFAIQLEKGGKFTVRGKPTLEDLEQFSEKFYCSCYSTLSCKEKADVKDTDAVDVCIADGVCIDAFLKPPMETEEPQIFYNASPSTLS

SEQ ID NO: 2215 - protein, 376 aa, Homo Sapiens
GKLTALDPETNMNVSEIISYWGFPSEEYLVETEDGYILCLNRIPHGRKNHSDKGPKPVVFLQHGLLADSSNWVTNLANSSLGFILADAGFDVWMGNSRGNTWSRKHKTLSVSQDEFWAFSYDEMAKYDLPASINFILNKTGQEQVYYVGHSQGTTIGFIAFSQIPELAKRIKMFFALGPVASVAFCTSPMAKLGRLPDHLIKDLFGDKEFLPQSAFLKWLGTHVCTHVILKELCGNLCFLLCGFNERNLNMSRVDVYTTHSPAGTSVQNMLHWSQAVKFQKFQAFDWGSSAKNYFHYNQSYPPTYNVKDMLVPTAVWSGGHDWLADVYDVNILLTQITNLVFHESIPEWEHLDFIWGLDAPWRLYNKIINLMRKYQ

SEQ ID NO: 2216 - protein, 531 aa, Homo Sapiens
QTAPQVLRIGGIFETVENEPVNVEELAFKFAVTSINRNRTLMPNTTLTYDIQRINLFDSFEASRRACDQLALGVAALFGPSHSSSVSAVQSICNALEVPHIQTRWKHPSVDNKDLFYINLYPDYAAISRAILDLVLYYNWKTVTVVYEDSTGLIRLQELIKAPSRYNIKIKIRQLPSGNKDAKPLLKEMKKGKEFYVIFDCSHETAAEILKQILFMGMMTEYYHYFFTTLDLFALDLELYRYSGVNMTGFRLLNIDNPHVSSIIEKWSMERLQAPPRPETGLLDGMMTTEAALMYDAVYMVAIASHRASQLTVSSLQCHRHKPWRLGPRFMNLIKEARWDGLTGHITFNKTNGLRKDFDLDIISLKEEGTEKIGIWNSNSGLNMTDSNKDKSSNITDSLANRTLIVTTILEEPYVMYRKSDKPLYGNDRFEGYCLDLLKELSNILGFIYDVKLVPDGKYGAQNDKGEWNGMVKELIDHRADLAVAPLTITYVREKVIDFSKPFMTLGISILYRKPNGTNPGVFSFLNPLSP

SEQ ID NO: 2217 - protein, 118 aa, Homo Sapiens
GLLDLKSMIEKVTGKNALTNYGFYGCYCGWGGRGTPKDGTDWCCWAHDHCYGRLEEKGCNIRTQSYKYRFAWGVVTCEPGPFCHVNLCACDRKLVYCLKRNLRSYNPQYQYFPNILCS

SEQ ID NO: 2218 - protein, 365 aa, Homo Sapiens
GPVWRKHYITYRINNYTPDMNREDVDYAIRKAFQVWSNVTPLKFSKINTGMADILVVFARGAHGDFHAFDGKGGILAHAFGPGSGIGGDAHFDEDEFWTTHSGGTNLFLTAVHEIGHSLGLGHSSDPKAVMFPTYKYVDINTFRLSADDIRGIQSLYGDPKENQRLPNPDNSEPALCDPNLSFDAVTTVGNKIFFFKDRFFWLKVSERPKTSVNLISSLWPTLPSGIEAAYEIEARNQVFLFKDDKYWLISNLRPEPNYPKSIHSFGFPNFVKKIDAAVFNPRFYRTYFFVDNQYWRYDERRQMMDPGYPKLITKNFQGIGPKIDAVFYSKNKYYYFFQGSNQFEYDFLLQRITKTLKSNSWFGC

SEQ ID NO: 2219 - protein, 231 aa, Homo Sapiens
IVNGENAVLGSWPWQVSLQDSSGFHFCGGSLISQSWVVTAAHCNVSPGRHFVVLGEYDRSSNAEPLQVLSVSRAITHPSWNSTTMNNDVTLLKLASPAQYTTRISPVCLASSNEALTEGLTCVTTGWGRLSGVGNVTPAHLQQVALPLVTVNQCRQYWGSSITDSMICAGGAGASSCQGDSGGPLVCQKGNTWVLIGIVSWGTKNCNVRAPAVYTRVSKFSTWINQVIAYN

SEQ ID NO: 2220 - protein, 146 aa, Homo Sapiens
VPIQKVQDDTKTLIKTIVTRINDISHTQSVSSKQKVTGLDFIPGLHPILTLSKMDQTLAVYQQILTSMPSRNVIQISNDLENLRDLLHVLAFSKSCHLPWASGLETLDSLGGVLEASGYSTEVVALSRLQGSLQDMLWQLDLSPGC

SEQ ID NO: 2221 - protein, 319 aa, Homo Sapiens
IIGAQPLCSQLAGLSQGQKKLCHLYQDHMQYIGEGAKTGIKECQYQFRHRRWNCSTVDNTSVFGRVMQIGSRETAFTYAVSAAGVVNAMSRACREGELSTCGCSRAARPKDLPRDWLWGGCGDNIDYGYRFAKEFVDARERERIHAKGSYESARILMNLHNNEAGRRTVYNLADVACKCHGVSGSCSLKTCWLQLADFRKVGDALKEKYDSAAAMRLNSRGKLVQVNSRFNSPTTQDLVYIDPSPDYCVRNESTGSLGTQGRLCNKTSEGMDGCELMCCGRGYDQFKTVQTERCHCKFHWCCYVKCKKCTEIVDQFVCK

SEQ ID NO: 2222 - protein, 168 aa, Homo Sapiens
APEAQVSVQPNFQQDKFLGRWFSAGLASNSSWLREKKAALSMCKSVVAPATDGGLNLTSTFLRKNQCETRTMLLQPAGSLGSYSYRSPHWGSTYSVSVVETDYDQYALLYSQGSKGPGEDFRMATLYSRTQTPRAELKEKFTAFCKAQGFTEDTIVFLPQTDKCMTEQ

SEQ ID NO: 2223 - protein, 220 aa, Homo Sapiens
SARARTDLLNVCMNAKHHKTQPSPEDELYGQCSPWKKNACCTASTSQELHKDTSRLYNFNWDHCGKMEPTCKRHFIQDSCLYECSPNLGPWIRQVNQSWRKERILNVPLCKEDCERWWEDCRTSYTCKSNWHKGWNWTSGINECPAGALCSTFESYFPTPAALCEGLWSHSFKVSNYSRGSGRCIQMWFDSAQGNPNEEVAKFYAAAMNAGAPSRGIIDS

SEQ ID NO: 2224 - protein, 110 aa, Homo Sapiens
HLPPEEKLRDDRSLRSNSSVNLLDVPSVSIVALNKKSKQIGRKAAEKKRSSKKEASMKKVVRPRTPLSAPCVATRNSCKPPAPACCDPCASCQCRFFRSACSCRVLSLNC

SEQ ID NO: 2225 - protein, 518 aa, Homo Sapiens
ANFPNNIQIGGLFPNQQSQEHAAFRFALSQLTEPPKLLPQIDIVNISDSFEMTYRFCSQFSKGVYAIFGFYERRTVNMLTSFCGALHVCFITPSFPVDTSNQFVLQLRPELQDALISIIDHYKWQKFVYIYDADRGLSVLQKVLDTAAEKNWQVTAVNILTTTEEGYRMLFQDLEKKKERLVVVDCESERLNAILGQIIKLEKNGIGYHYILANLGFMDIDLNKFKESGANVTGFQLVNYTDTIPAKIMQQWKNSDARDHTRVDWKRPKYTSALTYDGVKVMAEAFQSLRRQRIDISRRGNAGDCLANPAVPWGQGIDIQRALQQVRFEGLTGNVQFNEKGRRTNYTLHVIEMKHDGIRKIGYWNEDDKFVPAATDAQAGGDNSSVQNRTYIVTTILEDPYVMLKKNANQFEGNDRYEGYCVELAAEIAKHVGYSYRLEIVSDGKYGARDPDTKAWNGMVGELVYGRADVAVAPLTITLVREEVIDFSKPFMSLGISIMIKKPQKSKPGVFSFLDPLA

SEQ ID NO: 2226 - protein, 524 aa, Homo Sapiens
GFPNTISIGGLFMRNTVQEHSAFRFAVQLYNTNQNTTEKPFHLNYHVDHLDSSNSFSVTNAFCSQFSRGVYAIFGFYDQMSMNTLTSFCGALHTSFVTPSFPTDADVQFVIQMRPALKGAILSLLGHYKWEKFVYLYDTERGFSILQAIMEAAVQNNWQVTARSVGNIKDVQEFRRIIEEMDRRQEKRYLIDCEVERINTILEQVVILGKHSRGYHYMLANLGFTDILLERVMHGGANITGFQIVNNENPMVQQFIQRWVRLDEREFPEAKNAPLKYTSALTHDAILVIAEAFRYLRRQRVDVSRRGSAGDCLANPAVPWSQGIDIERALKMVQVQGMTGNIQFDTYGRRTNYTIDVYEMKVSGSRKAGYWNEYERFVPFSDQQISNDSASSENRTIVVTTILESPYVMYKKNHEQLEGNERYEGYCVDLAYEIAKHVRIKYKLSIVGDGKYGARDPETKIWNGMVGELVYGRADIAVAPLTITLVREEVIDFSKPFMSLGISIMIKKPQKSKPGVFSFLDPLA

SEQ ID NO: 2227 - protein, 749 aa, Homo Sapiens
LTPAEDNSLSQKKKVTVEDLFSEDFKIHDPEAKWISDTEFIYREQKGTVRLWNVETNTSTVLIEGKKIESLRAIRYEISPDREYALFSYNVEPIYQHSYTGYYVLSKIPHGDPQSLDPPEVSNAKLQYAGWGPKGQQLIFIFENNIYYCAHVGKQAIRVVSTGKEGVIYNGLSDWLYEEEILKTHIAHWWSPDGTRLAYAAINDSRVPIMELPTYTGSIYPTVKPYHYPKAGSENPSISLHVIGLNGPTHDLEMMPPDDPRMREYYITMVKWATSTKVAVTWLNRAQNVSILTLCDATTGVCTKKHEDESEAWLHRQNEEPVFSKDGRKFFFIRAIPQGGRGKFYHITVSSSQPNSSNDNIQSITSGDWDVTKILAYDEKGNKIYFLSTEDLPRRRQLYSANTVGNFNRQCLSCDLVENCTYFSASFSHSMDFFLLKCEGPGVPMVTVHNTTDKKKMFDLETNEHVKKAINDRQMPKVEYRDIEIDDYNLPMQILKPATFTDTTHYPLLLVVDGTPGSQSVAEKFEVSWETVMVSSHGAVVVKCEGRGSGFRGTKLLHEVRRRLGLLEEKDQMEAVRTMLKEQYIDRTRVAVFGKDYGGYLSTYILPAKGENQGQTFTCGSALSPITDFKLYASAFSERYLGLHGLDNRAYEMTKVAHRVSALEEQQFLIIHPTADEKIHFQHTAELITQLIRGKANYSLQIYPDESHYFTSSSLKQHLYRSIINFFVECFRIQDKLLTVTAKEDEEED

SEQ ID NO: 2228 - protein, 451 aa, Homo Sapiens
KNYSVLYFQQKVDHFGFNTVKTFNQRYLVADKYWKKNGGSILFYTGNEGDIIWFCNNTGFMWDVAEELKAMLVFAEHRYYGESLPFGDNSFKDSRHLNFLTSEQALADFAELIKHLKRTIPGAENQPVIAIGGSYGGMLAAWFRMKYPHMVVGALAASAPIWQFEDLVPCGVFMKIVTTDFRKSGPHCSESIHRSWDAINRLSNTGSGLQWLTGALHLCSPLTSQDIQHLKDWISETWVNLAMVDYPYASNFLQPLPAWPIKVVCQYLKNPNVSDSLLLQNIFQALNVYYNYSGQVKCLNISETATSSLGTLGWSYQACTEVVMPFCTNGVDDMFEPHSWNLKELSDDCFQQWGVRPRPSWITTMYGGKNISSHTNIVFSNGELDPWSGGGVTKDITDTLVAVTISEGAHHLDLRTKNALDPMSVLLARSLEVRHMKNWIRDFYDSAGKQH

SEQ ID NO: 2229 - protein, 681 aa, Homo Sapiens
QYQTRSPSVCLSEACVSVTSSILSSMDPTVDPCHDFFSYACGGWIKANPVPDGHSRWGTFSNLWEHNQAIIKHLLENSTASVSEAERKAQVYYRACMNETRIEELRAKPLMELIERLGGWNITGPWAKDNFQDTLQVVTAHYRTSPFFSVYVSADSKNSNSNVIQVDQSGLGLPSRDYYLNKTENEKVLTGYLNYMVQLGKLLGGGDEEAIRPQMQQILDFETALANITIPQEKRRDEELIYHKVTAAELQTLAPAINWLPFLNTIFYPVEINESEPIVVYDKEYLEQISTLINTTDRCLLNNYMIWNLVRKTSSFLDQRFQDADEKFMEVMYGTKKTCLPRWKFCVSDTENNLGFALGPMFVKATFAEDSKSIATEIILEIKKAFEESLSTLKWMDEETRKSAKEKADAIYNMIGYPNFIMDPKELDKVFNDYTAVPDLYFENAMRFFNFSWRVTADQLRKAPNRDQWSMTPPMVNAYYSPTKNEIVFPAGILQAPFYTRSSPKALNFGGIGVVVGHELTHAFDDQGREYDKDGNLRPWWKNSSVEAFKRQTECMVEQYSNYSVNGEPVNGRHTLGENIADNGGLKAAYRAYQNWVKKNGAEHSLPTLGLTNNQLFFLGFAQVWCSVRTPESSHEGLITDPHSPSRFRVIGSLSNSKEFSEHFRCPPGSPMNPPHKCEVW

SEQ ID NO: 2230 - protein, 91 aa, Homo Sapiens
SIKPGVTQKVGEIARTGSTPEVSTVDAMLDLIRNMFPENLVQACFQQYKTKREEVKPPSDPEMNMTEESFTAVMTTAISKNKTKEYKIVGM

SEQ ID NO: 2231 - protein, 77 aa, Homo Sapiens
KPGSGAQTLQSSDLGLEDSGPPPVPKETVDSFLDLARNLFPSNLVVAAFRTYATDYKVVTQNSSSGNVTHEKIPIGT

SEQ ID NO: 2232 - protein, 214 aa, Homo Sapiens
LPLRFDWRDKQVVTQVRNQQMCGGCWAFSVVGAVESAYAIKGKPLEDLSVQQVIDCSYNNYGCNGGSTLNALNWLNKMQVKLVKDSEYPFKAQNGLCHYFSGSHSGFSIKGYSAYDFSDQEDEMAKALLTFGPLVVIVDAVSWQDYLGGIIQHHCSSGEANHAVLITGFDKTGSTPYWIVRNSWGSSWGVDGYAHVKMGSNVCGIADSVSSIFV

SEQ ID NO: 2233 - protein, 215 aa, Homo Sapiens
APDSVDYRKKGYVTPVKNQGQCGSCWAFSSVGALEGQLKKKTGKLLNLSPQNLVDCVSENDGCGGGYMTNAFQYVQKNRGIDSEDAYPYVGQEESCMYNPTGKAAKCRGYREIPEGNEKALKRAVARVGPVSVAIDASLTSFQFYSKGVYYDESCNSDNLNHAVLAVGYGIQKGNKHWIIKNSWGENWGNKGYILMARNKNNACGIANLASFPKM

SEQ ID NO: 2234 - protein, 502 aa, Homo Sapiens
AHTGEESVADHHEAEYYVAAVYEHPSILSLNPLALISRQEALELMNQNLDIYEQQVMTAAQKDVQIIVFPEDGIHGFNFTRTSIYPFLDFMPSPQVVRWNPCLEPHRFNDTEVLQRLSCMAIRGDMFLVANLGTKEPCHSSDPRCPKDGRYQFNTNVVFSNNGTLVDRYRKHNLYFEAAFDVPLKVDLITFDTPFAGRFGIFTCFDILFFDPAIRVLRDYKVKHVVYPTAWMNQLPLLAAIEIQKAFAVAFGINVLAANVHHPVLGMTGSGIHTPLESFWYHDMENPKSHLIIAQVAKNPVGLIGAENATGETDPSHSKFLKILSGDPYCEKDAQEVHCDEATKWNVNAPPTFHSEMMYDNFTLVPVWGKEGYLHVCSNGLCCYLLYERPTLSKELYALGVFDGLHTVHGTYYIQVCALVRCGGLGFDTCGQEITEATGIFEFHLWGNFSTSYIFPLFLTSGMTLEVPDQLGWENDHYFLRKSRLSSGLVTAALYGRLYERD

SEQ ID NO: 2235 - protein, 491 aa, Homo Sapiens [sequence omitted]

SEQ ID NO: 2236 - protein, 578 aa, Homo Sapiens
LPTQPRDIENFNSTQKFIEDNIEYITIIAFAQYVQEATFEEMEKLVKDMVEYKDRCMADKTLPECSKLPNNVLQEKICAMEGLPQKHNFSHCCSKVDAQRRLCFFYNKKSDVGFLPPFPTLDPEEKCQAYESNRESLLNHFLYEVARRNPFVFAPTLLTVAVHFEEVAKSCCEEQNKVNCLQTRAIPVTQYLKAFSSYQKHVCGALLKFGTKVVHFIYIAILSQKFPKIEFKELISLVEDVSSNYDGCCEGDVVQCIRDTSKVMNHICSKQDSISSKIKECCEKKIPERGQCIINSNKDDRPKDLSLREGKFTDSENVCQERDADPDTFFAKFTFEYSRRHPDLSIPELLRIVQIYKDLLRNCCNTENPPGCYRYAEDKFNETTEKSLKMVQQECKHFQNLGKDGLKYHYLIRLTKIAPQLSTEELVSLGEKMVTAFTTCCTLSEEFACVDNLADLVFGELCGVNENRTINPAVDHCCKTNFAFRRPCFESLKADKTYVPPPFSQDLFTFHADMCQSQNEELQRKTDRFLVNLVKLKHELTDEELQSLFTNFANVVDKCCKAESPEVCFNEESPKIGN

SEQ ID NO: 2237 - protein, 214 aa, Homo Sapiens
HVETRAHAEERLLKKLFSGYNKWSRPVANISDVVLVRFGLSIAQLIDVDEKNQMMTTNVWVKQEWHDYKLRWDPADYENVTSIRIPSELIWRPDIVLYNNADGDFAVTHLTKAHLFHDGRVQWTPPAIYKSSCSIDVTFFPFDQQNCTMKFGSWTYDKAKIDLVNMHSRVDQLDFWESGEWVIVDAVGTYNTRKYECCAEIYPDITYAFVIRRL

SEQ ID NO: 2238 - protein, 368 aa, Homo Sapiens
YNVFPRTLKWSKMNLTYRIVNYTPDMTHSEVEKAFKKAFKVWSDVTPLNFTRLHDGIADIMISFGIKEHGDFYPFDGPSGLLAHAFPPGPNYGGDAHFDDDETWTSSSKGYNLFLVAAHEFGHSLGLDHSKDPGALMFPIYTYTGKSHFMLPDDDVQGIQSLYGPGDEDPNPKHPKTPDKCDPSLSLDAITSLRGETMIFKDRFFWRLHPQQVDAELFLTKSFWPELPNRIDAAYEHPSHDLIFIFRGRKFWALNGYDILEGYPKKISELGLPKEVKKISAAVHFEDTGKTLLFSGNQVWRYDDTNHIMDKDYPRLIEEDFPGIGDKVDAVYEKNGYIYFFNGPIQFEYSIWSNRIVRVMPANSILWC

SEQ ID NO: 2239 - protein, 63 aa, Homo Sapiens
DTIPTYLQWMSYISYVRYGFEGVILSIYGLDREDLHCDIDETCHFQKSEAILRELDVENAKLY

SEQ ID NO: 2240 - protein, 202 aa, Homo Sapiens
DKTLPVFPKGNEVQIKVLNIGNNTMNISLPGEMVTLGPMSQTNAFMTFDVNKLTRINISSPGSPVTAVTDDFKQGQRHTLLVWAPNHYQVVKDGLNQKPEKGENGIRFVNTFNELITITMSGKVYANISSYNASTYQFFPSGIKGFTISSTEIPPQCQPNFNTFYLEFGSAYTYIVQRKNDSCPEVKVFEDISANTVNMALQ

SEQ ID NO: 2241 - protein, 218 aa, Homo Sapiens
RRSRNTTRPALLRLSDYLLTNYRKGVRPVRDWRKPTTVSIDVIVYAILNVDEKNQVLTTYIWYRQYWTDEFLQWNPEDFDNITKLSIPTDSIWVPDILINEFVDVGKSPNIPYVYIRHQGEVQNYKPLQVVTACSLDIYNFPFDVQNCSLTFTSWLHTIQDINISLWRLPEKVKSDRSVFMNQGEWELLGVLPYFREFSMESSNYYAEMKFYVVIRRR

SEQ ID NO: 2242 - protein, 57 aa, Homo Sapiens [sequence omitted]

SEQ ID NO: 2243 - protein, 170 aa, Homo Sapiens
RPKLPLRYPERLQNPSESSEPIPLESREEYMNGMNRQRNILREKQTDEIKDTRNESTQNCVVAEPEKMESSISSSSEEMSLSKCAEQFCRLNEYNQLQLQAVHAQEQIRRMNENSHVQVPFQQLNQLAAYPYAVWYYPQIMQYVPFPPFSDISNPTAHENYEKNNVMLQW

SEQ ID NO: 2244 - protein, 219 aa, Homo Sapiens
SVNDPSNMSLVKETVDRLLKGYDIRLRPDFGGPPVAVGMNIDIASIDMVSEVNMDYTLTMYFQQAWRDKRLSYNVIPLNLTLDNRVADQLWVPDTYFLNDKKSFVHGVTVKNRMIRLHPDGTVLYGLRITTTAACMMDLRRYPLDEQNCTLEIESYGYTTDDIEFYWRGDDNAVTGVTKIELPQFSIVDYKLITKKVVFSTGSYPRLSLSFKLKRNIGY

SEQ ID NO: 2245 - protein, 136 aa, Homo Sapiens
MSNVPHKSSLPEGIRPGTVLRIRGLVPPNASRFHVNLLCGEEQGSDAALHFNPRLDTSEVVFNSKEQGSWGREERGPGVPFQRGQPFEVLIIASDDGFKAVVGDAQYHHFRHRLPLARVRLVEVGGDVQLDSVRIF

SEQ ID NO: 2246 - protein, 416 aa, Homo Sapiens
GAQDSPAPGSRFVCTALPPEAVHAGCPLPAMPMQGGAQSPEEELRAAVLQLRETVVQQKETLGAQREAIRELTGKLARCEGLAGGKARGAGATGKDTMGDLPRDPGHVVEQLSRSLQTLKDRLESLEHQLRANVSNAGLPGDFREVLQQRLGELERQLLRKVAELEDEKSLLHNETSAHRQKTESTLNALLQRVTELERGNSAFKSPDAFKVSLPLRTNYLYGKIKKTLPELYAFTICLWLRSSASPGIGTPFSYAVPGQANEIVLIEWGNNPIELLINDKVAQLPLFVSDGKWHHICVTWTTRDGMWEAFQDGEKLGTGENLAPWHPIKPGGVLILGQEQDTVGGRFDATQAFVGELSQFNIWDRVLRAQEIVNIANCSTNMPGNIIPWVDNNVDVFGGASKWPVETCEERLLDL

SEQ ID NO: 2247 - protein, 71 aa, Homo Sapiens
VKSFTTTLPWATCGHTWNTPDCVEIFRHEDCANASLANLTCDQLADRRSPVIEFWENKVLRLSGGLEVPGA

SEQ ID NO: 2248 - protein, 305 aa, Homo Sapiens
SGNFNFGAYHTLEEISQEMDNLVAEHPGLVSKVNIGSSFENRPMNVLKFSTGGDKPAIWLDAGIHAREWVTQATALWTANKIVSDYGKDPSITSILDALDIFLLPVTNPDGYVFSQTKNRMWRKTRSKVSGSLCVGVDPNRNWDAGFGGPGASSNPCSDSYHGPSANSEVEVKSIVDFIKSHGKVKAFITLHSYSQLLMFPYGYKCTKLDDFDELSEVAQKAAQSLRSLHGTKYKVGPICSVIYQASGGSIDWSYDYGIKYSFAFELRDTGRYGFLLPARQILPTAEETWLGLKAIMEHVRDHPY

SEQ ID NO: 2249 - protein, 211 aa, Homo Sapiens
ANILPDIENEDFIKDCVRIHNKFRSEVKPTASDMLYMTWDPALAQIAKAWASNCQFSHNTRLKPPHKLHPNFTSLGENIWTGSVPIFSVSSAITNWYDEIQDYDFKTRICKKVCGHYTQVVWADSYKVGCAVQFCPKVSGFDALSNGAHFICNYGPGGNYPTWPYKRGATCSACPNNDKCLDNLCVNRQRDQVKRYYSVVYPGWPIYPRNR

SEQ ID NO: 2250 - protein, 73 aa, Homo Sapiens
AWALFYLFSSFTSELPWTTCNNFWNTEHCTDFLNHSGAGTVTPFENFTSPVMEFWERRVLGITSGIHDLGSLR

SEQ ID NO: 2251 - protein, 74 aa, Homo Sapiens
AWAIFYLSNCFTTELPWATCGHEWNTENCVEFQKLNVSNYSHVSLQNATSPVMEFWEHRVLAISDGIEHIGNLR

SEQ ID NO: 2252 - protein, 77 aa, Homo Sapiens
SSMTHVLPWAYCNNPWNTHDCAGVLDASNLTNGSRPAALPSNLSHLLNHSLQRTSPSEEYWRLYVLKLSDDIGNFGE

SEQ ID NO: 2253 - protein, 246 aa, Homo Sapiens
KEKSSKKGKGKKKQYLCPSQQSAEDLARVPANSTSNILNRLLVSYDPRIRPNFKGIPVDVVVNIFINSFGSIQETTMDYRVNIFLRQKWNDPRLKLPSDFRGSDALTVDPTMYKCLWKPDLFFANEKSANFHDVTQENILLFIFRDGDVLVSMRLSITLSCPLDLTLFPMDTQRCKMQLESFGYTTDDLRFIWQSGDPVQLEKIALPQFDIKKEDIEYGNCTKYYKGTGYYTCVEVIFTLRRQVGF

SEQ ID NO: 2254 - protein, 223 aa, Homo Sapiens
QNQKEEKLCTENFTRILDSLLDGYDNRLRPGFGGPVTEVKTDIYVTSFGPVSDVEMEYTMDVFFRQTWIDKRLKYDGPIEILRLNNMMVTKVWTPDTFFRNGKKSVSHNMTAPNKLFRIMRNGTILYTMRLTISAECPMRLVDFPMDGHACPLKFGSYAYPKSEMIYTWTKGPEKSVEVPKESSSLVQYDLIGQTVSSETIKSITGEYIVMTVYFHLRRKMGY

SEQ ID NO: 2255 - protein, 213 aa, Homo Sapiens
DAAQEPTGNNAEICLLPLDYGPCRALLLRYYYDRYTQSCRQFLYGGCEGNANNFYTWEACDDACWRIEKVPKVCRLQVSVDDQCEGSTEKYFFNLSSMTCEKFFSGGCHRNRIENRFPDEATCMGFCAPKKIPSFCYSPKDEGLCSANVTRYYFNPRYRTCDAFTYTGCGGNDNNFVSREDCKRACAKALKKKKKMPKLRFASRIRKIRKKQF

SEQ ID NO: 2256 - protein, 449 aa, Homo Sapiens
QQYLPLPTPKVIGIDLGTTYCSVGVFFPGTGKVKVIPDENGHISIPSMVSFTDNDVYVGYESVELADSNPQNTIYDAKRFIGKIFTAEELEAEIGRYPFKVLNKNGMVEFSVTSNETITVSPEYVGSRLLLKLKEMAEAYLGMPVANAVISVPAEFDLKQRNSTIEAANLAGLKILRVINEPTAAAMAYGLHKADVFHVLVIDLGGGTLDVSLLNKQGGMFLTRAMSGNNKLGGQDFNQRLLQYLYKQIYQTYGFVPSRKEEIHRLRQAVEMVKLNLTLHQSAQLSVLLTVEEQDRKEPHSSDTELPKDKLSSADDHRVNSGFGRGLSDKKSGESQVLFETEISRKLFDTLNEDLFQKILVPIQQVLKEGHLEKTEIDEVVLVGGSTRIPRIRQVIQEFFGKDPNTSVDPDLAVVTGVAIQAGIDGGFWPLQVSALEIPNKHLQKTNFN

SEQ ID NO: 2257 - protein, 326 aa, Homo Sapiens
TQRCPPQCPGRCPATPPTCAPGVRAVLDGCSCCLVCARQRGESCSDLEPCDESSGLYCDRSADPSKQTGICTAVEGDNCVFDGVIYRSGEKFQPSCKFQCTCRDGQIGCVPRCQLDVLLPEPNCPAPRKVEVPGECCEKWICGPDEEDSLGGLTLAAYRPEATLGVEVSDSSVNCIEQTTEWTACSKSCGMGFSTRVTNRNRQCEMLKQTRLCMVRPCEQEPEQPTDKKGKKCLRTKKSLKAIHLQFKNCTSLHTYKPRFCGVCSDGRCCTPHNTKTIQAEFQCSPGQIVKKPVMVIGTCTCHTNCPKNNEAFLQELELKTTRGKM

SEQ ID NO: 2258 - protein, 64 aa, Homo Sapiens
AHNKFHDFADRKDWDAFHPTLVAEGLFAFANVLSYLRLFFMYTTSSILGPLQISMGQMLQDFGK

SEQ ID NO: 2259 - protein, 284 aa, Homo Sapiens
FRICAFNAQRLTLAKVAREQVMDTLVRILARCDIMVLQEVVDSSGSAIPLLLRELNRFDGSGPYSTLSSPQLGRSTYMETYVYFYRSHKTQVLSSYVYNDEDDVFAREPFVAQFSLPSNVLPSLVLVPLHTTPKAVEKELNALYDVFLEVSQHWQSKDVILLGDFNADCASLTKKRLDKLELRTEPGFHWVIADGEDTTVRASTHCTYDRVVLHGERCRSLLHTAAAFDFPTSFQLTEEEALNISDHYPVEVELKLSQAHSVQPLSLTVLLLLSLLSPQLCPAA

SEQ ID NO: 2260 - protein, 377 aa, Homo Sapiens
MAEGNHRKKPLKVLESLGKDFLTGVLDNLVEQNVLNWKEEEKKKYYDAKTEDKVRVMADSMQEKQRMAGQMLLQTFFNIDQISPNKKAHPNMEAGPPESGESTDALKLCPHEEFLRLCKERAEEIYPIKERNNRTRLALIICNTEFDHLPPRNGADFDITGMKELLEGLDYSVDVEENLTARDMESALRAFATRPEHKSSDSTFLVLMSHGILEGICGTVHDEKKPDVLLYDTIFQIFNNRNCLSLKDKPKVIIVQACRGANRGELWVRDSPASLEVASSQSSENLEEDAVYKTHVEKDFIAFCSSTPHNVSWRDSTMGSIFITQLITCFQKYSWCCHLEEVFRKVQQSFETPRAKAQMPTIERLSMTRYFYLFPGN

SEQ ID NO: 2261 - protein, 158 aa, Homo Sapiens
TQDCSFQHSPISSDFAVKIRELSDYLLQDYPVTVASNLQDEELCGGLWRLVLAQRWMERLKTVAGSKMQGLLERVNTEIHFVTKCAFQPPPSCLRFVQTNISRLLQETSEQLVALKPWITRQNFSRCLELQCQPDSSTLPPPWSPRPLEATAPTAPQP

SEQ ID NO: 2262 - protein, 224 aa, Homo Sapiens
IIDGAPCARGSHPWQVALLSGNQLHCGGVLVNERWVLTAAHCKMNEYTVHLGSDTLGDRRAQRIKASKSFRHPGYSTQTHVNDLMLVKLNSQARLSSMVKKVRLPSRCEPPGTTCTVSGWGTTTSPDVTFPSDLMCVDVKLISPQDCTKVYKDLLENSMLCAGIPDSKKNACNGDSGGPLVCRGTLQGLVSWGTFPCGQPNDPGVYTQVCKFTKWINDTMKKHR

SEQ ID NO: 2263 - protein, 238 aa, Homo Sapiens
IIGGKEVSPHSRPFMASIQYGGHHVCGGVLIDPQWVLTAAHCQYRFTKGQSPTVVLGAHSLSKNEASKQTLEIKKFIPFSRVTSDPQSNDIMLVKLQTAAKLNKHVKMLHIRSKTSLRSGTKCKVTGWGATDPDSLRPSDTLREVTVTVLSRKLCNSQSYYNGDPFITKDMVCAGDAKGQKDSCKGDSGGPLICKGVFHAIVSGGHECGVATKPGIYTLLTKKYQTWIKSNLVPPHTN

SEQ ID NO: 2264 - protein, 430 aa, Homo Sapiens
YAIQGLKWQHNEITFCIQNYTPKVGEYATYEAIRKAFRVWESATPLRFREVPYAYIREGHEKQADIMIFFAEGFHGDSTPFDGEGGFLAHAYFPGPNIGGDTHFDSAEPWTVRNEDLNGNDIFLVAVHELGHALGLEHSSDPSAIMAPFYQWMDTENFVLPDDDRRGIQQLYGGESGFPTKMPPQPRTTSRPSVPDKPKNPTYGPNICDGNFDTVAMLRGEMFVFKERWFWRVRNNQVMDGYPMPIGQFWRGLPASINTAYERKDGKFVFFKGDKHWVFDEASLEPGYPKHIKELGRGLPTDKIDAALFWMPNGKTYFFRGNKYYRFNEELRAVDSEYPKNIKVWEGIPESPRGSFMGSDEVFTYFYKGNKYWKFNNQKLKVEPGYPKSALRDWMGCPSGGRPDEGTEEETEVIIIEVDEEGGGAVSAAA

SEQ ID NO: 2265 - protein, 111 aa, Homo Sapiens
MSSESKEQHNVSPRDSAEGNDSYPSGIHLELQRESSTDFKQFETNDQCRPYHRILIERQEKSDTNFKEFVIKKLQKNCQCSPAKAKNMILGFLPVLQWLPKYDLKKNILGD

SEQ ID NO: 2266 - protein, 400 aa, Homo Sapiens
AEVKKPAAAAAPGTAEKLSPKAATLAERSAGLAFSLYQAMAKDQAVENILVSPVVVASSLGLVSLGGKATTASQAKAVLSAEQLRDEEVHAGLGELLRSLSNSTARNVTWKLGSRLYGPSSVSFADDFVRSSKQHYNCEHSKINFRDKRSALQSINEWAAQTTDGKLPEVTKDVERTDGALLVNAMFFKPHWDEKFHHKMVDNRGFMVTRSYTVGVMMMHRTGLYNYYDDEKEKLQIVEMPLAHKLSSLIILMPHHVEPLERLEKLLTKEQLKIWMGKMQKKAVAISLPKGVVEVTHDLQKHLAGLGLTEAIDKNKADLSRMSGKKDLYLASVFHATAFELDTDGNPFDQDIYGREELRSPKLFYADHPFIFLVRDTQSGSLLFIGRLVRPKGDKMRDEL

SEQ ID NO: 2267 - protein, 279 aa, Homo Sapiens
DPPAPLPLVIWHGMGDSCCNPLSMGAIKKMVEKKIPGIYVLSLEIGKTLMEDVENSFFLNVNSQVTTVCQALAKDPKLQQGYNAMGFSQGGQFLRAVAQRCPSPPMINLISVGGQHQGVFGLPRCPGESSHICDFIRKTLNAGAYSKVVQERLVQAEYWHDPIKEDVYRNHSIFLADINQERGINESYKKNLMALKKFVMVKFLNDSIVDPVDSEWFGFYRSGQAKETIPLQETSLYTQDRLGLKEMDNAGQLVFLATEGDHLQLSEEWFYAHIIPFLG

SEQ ID NO: 2268 - protein, 232 aa, Homo Sapiens
IIGGREVIPHSRPYMASLQRNGSHLCGGVLVHPKWVLTAAHCLAQRMAQLRLVLGLHTLDSPGLTFHIKAAIQHPRYKPVPALENDLALLQLDGKVKPSRTIRPLALPSKRQVVAAGTRCSMAGWGLTHQGGRLSRVLRELDLQVLDTRMCNNSRFWNGSLSPSMVCLAADSKDQAPCKGDSGGPLVCGKGRVLAGVLSFSSRVCTDIFKPPVATAVAPYVSWIRKVTGRSA

SEQ ID NO: 2269 - protein, 234 aa, Homo Sapiens
CLYVLMQTVDPYTPDYQDQLRSPGVTLRPDVYGEKGLEIVYNVSDNRTWADLTQTLHAFLAGYSPAAQEDSINCTSEQYFFQESFRAPNHTKFSCKFTADMLQNCSGLADPNFGFEEGKPCFIIKMNRIVKFLPSNGSAPRVDCAFLDQPRELGQPLQVKYYPPNGTFSLHYFPYYGKKAQPHYSNPLVAAKLLNIPRNAEVAIVCKVMAEHVTFNNPHDPYEGKVEFKLKIEK

SEQ ID NO: 2270 - protein, 461 aa, Homo Sapiens
RTYLSWEVSVSLSVGFKTMDFPAVTICNASPFKYSKIKHLLKDLDELMEAVLERILAPELSHANATRNLNFSIWNHTPLVLIDERNPHHPMVLDLFGDNHNGLTSSSASEKICNAHGCKMAMRLCSLNRTQCTFRNFTSATQALTEWYILQATNIFAQVPQQELVEMSYPGEQMILACLFGAEPCNYRNFTSIFYPHYGNCYIFNWGMTEKALPSANPGTEFGLKLILDIGQEDYVPFLASTAGVRLMLHEQRSYPFIRDEGIYAMSGTETSIGVLVDKLQRMGEPYSPCTVNGSEVPVQNFYSDYNTTYSIQACLRSCFQDHMIRNCNCGHYLYPLPRGEKYCNNRDFPDWAHCYSDLQMSVAQRETCIGMCKESCNDTQYKMTISMADWPSEASEDWIFHVLSQERDQSTNITLSRKGIVKLNIYFQEFNYRTIEESAANNIVWLLSNLGGQFGFWMGG

SEQ ID NO: 2271 - protein, 465 aa, Homo Sapiens
SFYTVSVSIKVHFRKLDFPAVTICNINPYKYSTVRHLLADLEQETREALKSLYGFPESRKRREAESWNSVSEGKQPRFSHRIPLLIFDQDEKGKARDFFTGRKRKVGGSIIHKASNVMHIESKQVVGFQLCSNDTSDCATYTFSSGINAIQEWYKLHYMNIMAQVPLEKKINMSYSAEELLVTCFFDGVSCDARNFTLFHHPMHGNCYTFNNRENETILSTSMGGSEYGLQVILYINEEEYNPFLVSSTGAKVIIHRQDEYPFVEDVGTEIETAMVTSIGMHLTESFKLSEPYSQCTEDGSDVPIRNIYNAAYSLQICLHSCFQTKMVEKCGCAQYSQPLPPAANYCNYQQHPNWMYCYYQLHRAFVQEELGCQSVCKEACSFKEWTLTTSLAQWPSVVSEKWLLPVLTWDQGRQVNKKLNKTDLAKLLIFYKDLNQRSIMESPANSIEMLLSNFGGQLGLWMSC

SEQ ID NO: 2272 - protein, 288 aa, Homo Sapiens
YEKGYQTSSGLISSVSVKLKGLAVTQLPGLGPQVWDVADYVFPAQGDNSFVVMTNFIVTPKQTQGYCAEHPEGGICKEDSGCTPGKAKRKAQGIRTGKCVAFNDTVKTCEIFGWCPVEVDDDIPRPALLREAENFTLFIKNSISFPRFKVNRRNLVEEVNAAHMKTCLFHKTLHPLCPVFQLGYVVQESGQNFSTLAEKGGVVGITIDWHCDLDWHVRHCRPIYEFHGLYEEKNLSPGFNFRFARHFVENGTNYRHLFKVFGIRFDILVDGKAGKFDIIPTMTTIGSG

SEQ ID NO: 2273 - protein, 542 aa, Homo Sapiens
QPPPPPPDATCHQVRSFFQRLQPGLKWVPETPVPGSDLQVCLPKGPTCCSRKMEEKYQLTARLNMEQLLQSASMELKFLIIQNAAVFQEAFEIVVRHAKNYTNAMFKNNYPSLTPQAFEFVGEFFTDVSLYILGSDINVDDMVNELFDSLFPVIYTQLMNPGLPDSALDINECLRGARRDLKVFGNFPKLIMTQVSKSLQVTRIFLQALNLGIEVINTTDHLKFSKDCGRMLTRMWYCSYCQGLMMVKPCGGYCNVVMQGCMAGVVEIDKYWREYILSLEELVNGMYRIYDMENVLLGLFSTIHDSIQYVQKNAGKLTTTIGKLCAHSQQRQYRFAYYPEDLFIDKKVLKVAHVEHEETLSSRRRELIQKLKSFISFYSALPGYICSHSPVAENDTLCWNGQELVERYSQKAARNGMKNQFNLHELKMKGPEPVVSQIIDKLKHINQLLRTMSMPKGRVLDKNLDEEGFESGDCGDDEDECIGGSGDGMIKVKNQLRFLAELAYDLDVDDAPGNSQQATPKDNEISTFHNLGNVHSPLKLLT

SEQ ID NO: 2274 - protein, 65 aa, Homo Sapiens
SLPVYMYFNLWTICRNTTLVEGANLCLDLRQFGIVTIGEEKKICTVSENFLRMCESTELNMTFHL

SEQ ID NO: 2275 - protein, 48 aa, Homo Sapiens
MTPTDFTSPIPNMADDYGSESTSSMEDYVNFNFTDFYCEKNNVRQFAS

SEQ ID NO: 2276 - protein, 482 aa, Homo Sapiens
RPRNALLLLADDGGFESGAYNNSAIATPHLDALARRSLLFRNAFTSVSSCSPSRASLLTGLPQHQNGMYGLHQDVHHFNSFDKVRSLPLLLSQAGVRTGIIGKKHVGPETVYPFDFAYTEENGSVLQVGRNITRIKLLVRKFLQTQDDRPFFLYVAFHDPHRCGHSQPQYGTFCEKFGNGESGMGRIPDWTPQAYDPLDVLVPYFVPNTPAARADLAAQYTTVGRMDQGVGLVLQELRDAGVLNDTLVIFTSDNGIPFPSGRTNLYWPGTAEPLLVSSPEHPKRWGQVSEAYVSLLDLTPTILDWFSIPYPSYAIFGSKTIHLTGRSLLPALEAEPLWATVFGSQSHHEVTMSYPMRSVQHRHFRLVHNLNFKMPFPIDQDFYVSPTFQDLLNRTTAGQPTGWYKDLRHYYYRARWELYDRSRDPHETQNLATDPRFAQLLEMLRDQLAKWQWETHDPWVCAPDGVLEEKLSPQCQPLHNEL

SEQ ID NO: 2277 - protein, 560 aa, Homo Sapiens
KTANAFKPNILLIMADDLGTGDLGCYGNNTLRTPNIDQLAEEGVRLTQHLAAAPLCTPSRAAFLTGRHSFRSGMDASNGYRALQWNAGSGGLPENETTFARILQQHGYATGLIGKWHQGVNCASRGDHCHHPLNHGFDYFYGMPFTLTNDCDPGRPPEVDAALRAQLWGYTQFLALGILTLAAGQTCGFFSVSARAVTGMAGVGCLFFISWYSSFGFVRRWNCILMRNHDVTEQPMVLEKTASLMLKEAVSYIERHKHGPFLLFLSLLHVHIPLVTTSAFLGKSQHGLYGDNVEEMDWLIGKVLNAIEDNGLKNSTFTYFTSDHGGHLEARDGHSQLGGWNGIYKGGKGMGGWEGGIRVPGIFHWPGVLPAGRVIGEPTSLMDVFPTVVQLVGGEVPQDRVIDGHSLVPLLQGAEARSAHEFLFHYCGQHLHAARWHQKDSGSVWKVHYTTPQFHPEGAGACYGRGVCPCSGEGVTHHRPPLLFDLSRDPSEARPLTPDSEPLYHAVIARVGAAVSEHRQTLSPVPQQFSMSNILWKPWLQPCCGHFPFCSCHEDGDGTP

SEQ ID NO: 2278 - protein, 558 aa, Homo Sapiens
DISASRPNILLLMADDLGIGDVGCYGNNTMRTPNIDRLAEDGVKLTQHISAASLCTPSRAAFLTGRYPVRSGMVSSIGYRVLQWTGASGGLPTNETTFAKILKEKGYATGLIGKWHLGLNCESASDHCHHPLHHGFDHFYGMPFSLMGDCARWELSEKRVNLEQKLNFLFQVLALVALTLVAGKLTHLIPVSWMPVIWSALSAVLLLASSYFVGALIVHADCFLMRNHTITEQPMCFQRTTPLILQEVASFLKRNKHGPFLLFVSFLHVHIPLITMENFLGKSLHGLYGDNVEEMDWMVGRILDTLDVEGLSNSTLIYFTSDHGGSLENQLGNTQYGGWNGIYKGGKGMGGWEGGIRVPGIFRWPGVLPAGRVIGEPTSLMDVFPTVVRLAGGEVPQDRVIDGQDLLPLLLGTAQHSDHEFLMHYCERFLHAARWHQRDRGTMWKVHFVTPVFQPEGAGACYGRKVCPCFGEKVVHHDPPLLFDLSRDPSETHILTPASEPVFYQVMERVQQAVWEHQRTLSPVPLQLDRLGNIWRPWLQPCCGPFPLCWCLREDDPQ

SEQ ID NO: 2279 - protein, 542 aa, Homo Sapiens
SLAGGSPGAAEAPGSAQVAGLCGRLTLHRDLRTGRWEPDPQRSRRCLRDPQRVLEYCRQMYPELQIARVEQATQAIPMERWCGGSRSGSCAHPHHQVVPFRCLPGEFVSEALLVPEGCRFLHQERMDQCESSTRRHQEAQEACSSQGLILHGSGMLLPCGSDRFRGVEYVCCPPPGTPDPSGTAVGDPSTRSWPPGSRVEGAEDEEEEESFPQPVDDYFVEPPQAEEEEETVPPPSSHTLAVVGKVTPTPRPTDGVDIYFGMPGEISEHEGFLRAKMDLEERRMRQINEVMREWAMADNQSKNLPKADRQALNEHFQSILQTLEEQVSGERQRLVETHATRVIALINDQRRAALEGFLAALQADPPQAERVLLALRRYLRAEQKEQRHTLRHYQHVAAVDPEKAQQMRFQVHTHLQVIEERVNQSLGLLDQNPHLAQELRPQIQELLHSEHLGPSELEAPAPGGSSEDKGGLQPPDSKDDTPMTLPKGSTEQDAASPEKEKMNPLEQYERKVNASVPRGFPFHSSEIQRDELAPAGTGVSRE

SEQ ID NO: 2280 - protein, 51 aa, Homo Sapiens
YFQSGNNEEPYVSITKKRQMPKNGLSEEIEKEVGQAEGKLITHRSAFSRAS

SEQ ID NO: 2281 - protein, 417 aa, Homo Sapiens
LPYKIGVVGPWACDSLFSKALPEVAARLAIERINRDPSFDLSYSFEYVILNEDCQTSRALSSFISHHQMASGFIGPTNPGYCEAASLLGNSWDKGIFSWACVNYELDNKISYPTFSRTLPSPIRVLVTVMKYFQWAHAGVISSDEDIWVHTANRVASALRSHGLPVGVVLTTGQDSQSMRKALQRIHQADRIRIIIMCMHSALIGGETQMHLLECAHDLKMTDGTYVFVPYDALLYSLPYKHTPYRVLRNNPKLREAYDAVLTITVESQEKTFYQAFTEAAARGEIPEKLEFDQVSPLFGTIYNSIYFIAQAMNNAMKENGQAGAASLVQHSRNMQFHGFNQLMRTDSNGNGISEYVILDTNLKEWELHSTYTVDMEMELLRFGGTPIHFPGGRPPRADAKCWFAEGKICHGGIDPA

SEQ ID NO: 2282 - protein, 214 aa, Homo Sapiens
VAAQNSAEVVRCLNSALQVGCGAFACLENSTCDTDGMYDICKSFLYSAAKFDTQGKAFVKESLKCIANGVTSKVFLAIRRCSTFQRMIAEVQEECYSKLNVCSIAKRNPEAITEVVQLPNHFSNRYYNRLVRSLLECDEDTVSTIRDSLMEKIGPNMASLFHILQTDHCAQTHPRADFNRRRTNEPQKLKVLLRNLRGEEDSPSHIKRTSHESA

SEQ ID NO: 2283 - protein, 273 aa, Homo Sapiens
QSHPITRRDLFSQEIQLDMALASFDDQYAGCAAAMTAALPDLNHTEFQANQVYADSWTLASSQWQERQARWPEWSLSPTRPSPPPLGFRDEHGVALLAYTANSPLHKEFNAAVREAGRSRAHYLHHFSFKTLHFLLTEALQLLGSGQRPPRCHQVFRGVHGLRFRPAGPRATVRLGGFASASLKHVAAQQFGEDTFFGIWTCLGAPIKGYSFFPGEEEVLIPPFETFQVINASRLAQGPARIYLRALGKHSTYNCEYIKDKKCKSGPCHLDNS

SEQ ID NO: 2284 - protein, 439 aa, Homo Sapiens
DTPANCTYLDLLGTWVFQVGSSGSQRDVNCSVMGPQEKKVVVYLQKLDTAYDDLGNSGHFTIIYNQGFEIVLNDYKWFAFFKYKEEGSKVTTYCNETMTGWVHDVLGRNWACFTGKKVGTASENVYVNTAHLKNSQEKYSNRLYKYDHNFVKAINAIQKSWTATTYMEYETLTLGDMIRRSGGHSRKIPRPKPAPLTAEIQQKILHLPTSWDWRNVHGINFVSPVRNQASCGSCYSFASMGMLEARIRILTNNSQTPILSPQEVVSCSQYAQGCEGGFPYLIAGKYAQDFGLVEEACFPYTGTDSPCKMKEDCFRYYSSEYHYVGGFYGGCNEALMKLELVHHGPMAVAFEVYDDFLHYKKGIYHHTGLRDPFNPFELTNHAVLLVGYGTDSASGMDYWIVKNSWGTGWGENGYFRIRRGTDECAIESIAVAATPIPKL

SEQ ID NO: 2285 - protein, 64 aa, Homo Sapiens
QEPPGAACSQNTNKTCEECLKNVSCLWCNTNKACLDYPVTSVLPPASLCKLSSARWGVCWVNFE

SEQ ID NO: 2286 - protein, 225 aa, Homo Sapiens
NEDKDPAFTALLTTQTQVQREIVNKHNELRRAVSPPARNMLKMEWNKEAAANAQKWANQCNYRHSNPKDRMTSLKCGENLYMSSASSSWSQAIQSWFDEYNDFDFGVGPKTPNAVVGHYTQVVWYSSYLVGCGNAYCPNQKVLKYYYVCQYCPAGNWANRLYVPYEQGAPCASCPDNCDDGLCTNGCKYEDLYSNCKSLKLTLTCKHQLVRDSCKASCNCSNSIY

SEQ ID NO: 2287 - protein, 452 aa, Homo Sapiens
KEVCYGQLGCFSDEKPWAGTLQRPVKLLPWSPEDIDTRFLLYTNENPNNFQLITGTEPDTIEASNFQLDRKTRFIIHGFLDKAEDSWPSDMCKKMFEVEKVNCICVDWRHGSRAMYTQAVQNIRVVGAETAFLIQALSTQLGYSLEDVHVIGHSLGAHTAAEAGRRLGGRVGRITGLDPAGPCFQDEPEEVRLDPSDAVFVDVIHTDSSPIVPSLGFGMSQKVGHLDFFPNGGKEMPGCKKNVLSTITDIDGIWEGIGGFVSCNHLRSFEYYSSSVLNPDGFLGYPCASYDEFQESKCFPCPAEGCPKMGHYADQFKGKTSAVEQTFFLNTGESGNFTSWRYKVSVTLSGKEKVNGYIRIALYGSNENSKQYEIFKGSLKPDASHTCAIDVDFNVGKIQKVKFLWNKRGINLSEPKLGASQITVQSGEDGTEYNFCSSDTVEENVLQSLYPC

SEQ ID NO: 2288 - protein, 223 aa, Homo Sapiens
TMWVMLQTLNDEVPKYRDQIPSPGLMVFPKPVTALEYTFSRSDPTSYAGYIEDLKKFLKPYTLEEQKNLTVCPDGALFEQKGPVYVACQFPISLLQACSGMNDPDFGYSQGNPCILVKMNRIIGLKPEGVPRIDCVSKNEDIPNVAVYPHNGMIDLKYFPYYGKKLHVGYLQPLVAVQVSFAPNNTGKEVTVECKIDGSANLKSQDDRDKFLGRVMFKITARA

SEQ ID NO: 2289 - protein, 568 aa, Homo Sapiens
HRVHDDKPNIVLIMVDDLGIGDLGCYGNDTMRTPHIDRLAREGVRLTQHISAASLCSPSRSAFLTGRYPIRSGMVSSGNRRVIQNLAVPAGLPLNETTLAALLKKQGYSTGLIGKWHQGLNCDSRSDQCHHPYNYGFDYYYGMPFTLVDSCWPDPSRNTELAFESQLWLCVQLVAIAILTLTFGKLSGWVSVPWLLIFSMILFIFLLGYAWFSSHTSPLYWDCLLMRGHEITEQPMKAERAGSIMVKEAISFLERHSKETFLLFFSFLHVHTPLPTTDDFTGTSKHGLYGDNVEEMDSMVGKILDAIDDFGLRNNTLVYFTSDHGGHLEARRGHAQLGGWNGIYKGGKGMGGWEGGIRVPGIVRWPGKVPAGRLIKEPTSLMDILPTVASVSGGSLPQDRVIDGRDLMPLLQGNVRHSEHEFLFHYCGSYLHAVRWIPKDDSGSVWKAHYVTPVFQPPASGGCYVTSLCRCFGEQVTYHNPPLLFDLSRDPSESTPLTPATEPLYDFVIKKVANALKEHQETIVPVTYQLSELNQGRTWLKPCCGVFPFCLCDKEEEVSQPRGPNEKR

SEQ ID NO: 2290 - protein, 643 aa, Homo Sapiens
YVLDDSDGLGREFDGIGAVSGGGATSRLLVNYPEPYRSQILDYLFKPNFGASLHILKVEIGGDGQTTDGTEPSHMHYALDENYFRGYEWWLMKEAKKRNPNITLIGLPWSFPGWLGKGFDWPYVNLQLTAYYVVTWIVGAKRYHDLDIDYIGIWNERSYNANYIKILRKMLNYQGLQRVKIIASDNLWESISASMLLDAELFKVVDVIGAHYPGTHSAKDAKLTGKKLWSSEDFSTLNSDMGAGCWGRILNQNYINGYMTSTIAWNLVASYYEQLPYGRCGLMTAQEPWSGHYVVESPVWVSAHTTQFTQPGWYYLKTVGHLEKGGSYVALTDGLGNLTIIIETMSHKHSKCIRPFLPYFNVSQQFATFVLKGSFSEIPELQVWYTKLGKTSERFLFKQLDSLWLLDSDGSFTLSLHEDELFTLTTLTTGRKGSYPLPPKSQPFPSTYKDDFNVDYPFFSEAPNFADQTGVFEYFTNIEDPGEHHFTLRQVLNQRPITWAADASNTISIIGDYNWTNLTTKCDVYIETPDTGGVFIAGRVNKGGILIRSARGIFFWIFANGSYRVTGDLAGWIIYALGRVEVTAKKWYTLTLTIKGHFASGMLNDKSLWTDIPVNFPKNGWAAIGTHSFEFAQFDNFLVEATR

SEQ ID NO: 2291 - protein, 471 aa, Homo Sapiens; identical to SEQ ID NO: 1869

SEQ ID NO: 2292 - protein, 166 aa, Homo Sapiens
QGQYDLDPLPPFPDHVQYTHYSDQIDNPDYYDYQEVTPRPSEEQFQFQSQQQVQQEVIPAPTPEPGNAELEPTEPGPLDCREEQYPCTRLYSIHRPCKQCLNEVCFYSLRRVYVINKEICVRTVCAHEELLRADLCRDKFSKCGVMASSGLCQSVAASCARSCGSC

SEQ ID NO: 2293 - protein, 98 aa, Homo Sapiens
EAQEGTLSPPPKLKMSRWSLVRGRMKELLETVVNRTRDGWQWFWSPSTFRGFMQTYYDDHLRDLGPLTKAWFLESKDSLLKKTHSLCPRLVCGDKDQG

SEQ ID NO: 2294 - protein, 476 aa, Homo Sapiens
EFPGCKIRVTSKALELVKQEGLRFLEQELETITIPDLRGKEGHFYYNISEVKVTELQLTSSELDFQPQQELMLQITNASLGLRFRRQLLYWFFYDGGYINASAEGVSIRTGLELSRDPAGRMKVSNVSCQASVSRMHAAFGGTFKKVYDFLSTFITSGMRFLLNQQICPVLYHAGTVLLNSLLDTVPVRSSVDELVGIDYSLMKDPVASTSNLDMDFRGAFFPLTERNWSLPNRAVEPQLQEEERMVYVAFSEFFFDSAMESYFRAGALQLLLVGDKVPHDLDMLLRATYFGSIVLLSPAVIDSPLKLELRVLAPPRCTIKPSGTTISVTASVTIALVPPDQPEVQLSSMTMDARLSAKMALRGKALRTQLDLRRFRIYSNHSALESLALIPLQAPLKTMLQIGVMPMLNERTWRGVQIPLPEGINFVHEVVTNHAGFLTIGADLHFAKGLREVIEKNRPADVRASTAPTPSTAAV

SEQ ID NO: 2295 - protein, 234 aa, Homo Sapiens
VSGIRGDALERFCLQQPLDCDDIYAQGYQSDGVYLIYPSGPSVPVPVFCDMTTEGGKWTVFQKRFNGSVSFFRGWNDYKLGFGRADGEYWLGLQNMHLLTLKQKYELRVDLEDFENNTAYAKYADFSISPNAVSAEEDGYTLFVAGFEDGGVGDSLSYHSGQKFSTFDRDQDLFVQNCAALSSGAFWFRSCHFANLNGFYLGGSHLSYANGINWAQWKGFYYSLKRTEMKIRRA

SEQ ID NO: 2296 - protein, 116 aa, Homo Sapiens
GIDCQGGSRMCCRQEFFVDFREIGWHDWIIQPEGYAMNFCIGQCPLHIAGMPGIAASFHTAVLNLLKANTAAGTTGGGSCCVPTARRPLSLLYYDRDSNIVKTDIPDMVVEACGCS

SEQ ID NO: 2297 - protein, 158 aa, Homo Sapiens
LRPGDCEVCISYLGRFYQDLKDRDVTFSPATIENELIKFCREARGKENRLCYYIGATDDAATKIINEVSKPLAHHIPVEKICEKLKKKDSQICELKYDKQIDLSTVDLKKLRVKELKKILDDWGETCKGCAEKSDYIRKINELMPKYAPKAASARTDL

SEQ ID NO: 2298 - protein, 136 aa, Homo Sapiens
QRDFDLADALDDPEPTKKPNSDIYPKPKPPYYPQPENPDSGGNIYPRPKPRPQPQPGNSGNSGGYFNDVDRDDGRYPPRPRPRPPAGGGGGGYSSYGNSDNTHGRGGYRPNSRYGNTYGGDHHSTYGNPEGNMVAK

SEQ ID NO: 2299 - protein, 279 aa, Homo Sapiens
LHEKAYQVRDTAIESSVVTKVKGSGLYANRVMDVSDYVTPPQGTSVFVIITKMIVTENQMQGFCPESEEKYRCVSDSQCGPERLPGGGILTGRCVNYSSVLRTCEIQGWCPTEVDTVETPIMMEAENFTIFIKNSIRFPLFNFEKGNLLPNLTARDMKTCRFHPDKDPFCPILRVGDVVKFAGQDFAKLARTGGVLGIKIGWVCDLDKAWDQCIPKYSFTRLDSVSEKSSVSPGYNFRFAKYYKMENGSEYRTLLKAFGIRFDVLVYGNAGKFNIIPTI

SEQ ID NO: 2300 - protein, 334 aa, Homo Sapiens
SYPIWWSLAVGPQYSSLGSQPILCASIPGLVPKQLRFCRNYVEIMPSVAEGIKIGIQECQHQFRGRRWNCTTVHDSLAIFGPVLDKATRESAFVHAIASAGVAFAVTRSCAEGTAAICGCSSRHQGSPGKGWKWGGCSEDIEFGGMVSREFADARENRPDARSAMNRHNNEAGRQAIASHMHLKCKCHGLSGSCEVKTCWWSQPDFRAIGDFLKDKYDSASEMVVEKHRESRGWVETLRPRYTYFKVPTERDLVYYEASPNFCEPNPETGSFGTRDRTCNVSSHGIDGCDLLCCGRGHNARAERRREKCRCVFHWCCYVSCQECTRVYDVHTCK

SEQ ID NO: 2301 - protein, 329 aa, Homo Sapiens
SNWLYLAKLSSVGSISEEETCEKLKGLIQRQVQMCKRNLEVMDSVRRGAQLAIEECQYQFRNRRWNCSTLDSLPVFGKVVTQGTREAAFVYAISSAGVAFAVTRACSSGELEKCGCDRTVHGVSPQGFQWSGCSDNIAYGVAFSQSFVDVRERSKGASSSRALMNLHNNEAGRKAILTHMRVECKCHGVSGSCEVKTCWRAVPPFRQVGHALKEKFDGATEVEPRRVGSSRALVPRNAQFKPHTDEDLVYLEPSPDFCEQDMRSGVLGTRGRTCNKTSKAIDGCELLCCGRGFHTAQVELAERCSCKFHWCCFVKCRQCQRLVELHTCR

SEQ ID NO: 2302 - protein, 325 aa, Homo Sapiens
ALSSVVALGANIICNKIPGLAPRQRAICQSRPDAIIVIGEGAQMGINECQYQFRFGRWNCSALGEKTVFGQELRVGSREAAFTYAITAAGVAHAVTAACSQGNLSNCGCDREKQGYYNQAEGWKWGGCSADVRYGIDFSRRFVDAREIKKNARRLMNLHNNEAGRKVLEDRMQLECKCHGVSGSCTTKTCWTTLPKFREVGHLLKEKYNAAVQVEVVRASRLRQPTFLRIKQLRSYQKPMETDLVYIEKSPNYCEEDAATGSVGTQGRLCNRTSPGADGCDTMCCGRGYNTHQYTKVWQCNCKFHWCCFVKCNTCSERTEVFTCK

SEQ ID NO: 2303 - protein, 53 aa, Homo Sapiens
QWRVSAFIENNIVVFENFWEGLWMNCVRQANIRMQCKIYDSLLALSPDLQAAR

SEQ ID NO: 2304 - protein, 56 aa, Homo Sapiens
NWRKLRLITFNRNEKNLTVYTGLWVKCARYDGSSDCLMYDTTWYSSVDQLDLRVLQ

SEQ ID NO: 2305 - protein, 53 aa, Homo Sapiens
QWRVSAFVGSNIIVFERLWEGLWMNCIRQARVRLQCKFYSSLLALPPALETAR

SEQ ID NO: 2306 - protein, 436 aa, Homo Sapiens
TQHGIRLPLRSGLGGAPLGLRLPRETDEEPEEPGRRGSFVEMVDNLRGKSGQGYYVEMTVGSPPQTLNILVDTGSSNFAVGAAPHPFLHRYYQRQLFSTYRDLRKGVYVPYTQGKWEGELGTDLVSIPHGPNVTVRANIAAITESDKFFINGSNWEGILGLAYAEIARPDDSLEPFFDSLVKQTHVPNLFSLQLCGAGFPLNQSEVLASVGGSMIIGGIDHSLYTGSLWYTPIRREWYYEVIIVRVEINGQDLKMDCKEYNYDKSIVDSGTTNLRLPKKVFEAAVKSIKAASSTEKFPDGFWLGEQLVCWQAGTTPWNIFPVISLYLMGEVTNQSFRITILPQQYLRPVEDVATSQDDCYKFAISQSSTGTVMGAVIMEGFYVVFDRARKRIGFAVSACHVHDEFRTAAVEGPFVTLDMEDCGYNIPQTDESTLMT

SEQ ID NO: 2307 - protein, 122 aa, Homo Sapiens
KEVSWREFMKQHYLSPSREFREYKCDVLMRENEALKDKSSHMFIYISWYKIEHICTSDNWMDRFRNAYVWVQNPLKVLKCHQENSKNSYTESRSFNYIEFHCSMDGYVDSIEDLKMVEPIGN

SEQ ID NO: 2308 - protein, 53 aa, Homo Sapiens
DMWSTQDLYDNPVTSVFQYEGLWRSCVRQSSGFTECRPYFTILGLPAMLQAVR

SEQ ID NO: 2309 - protein, 53 aa, Homo Sapiens
NWKVNVDVDSNIITAIVQLHGLWMDCTWYSTGMFSCALKHSILSLPIHVQAAR

SEQ ID NO: 2310 - protein, 229 aa, Homo Sapiens
MRKVVLITGASSGIGLALCKRLLAEDDELHLCLACRNMSKAEAVCAALLASHPTAEVTIVQVDVSNLQSVFRASKELKQRFQRLDCIYLNAGIMPNPQLNIKALFFGLFSRKVIHMFSTAEGLLTQGDKITADGLQEVFETNVFGHFILIRELEPLLCHSDNPSQLIWTSSRSARKSNFSLEDFQHSKGKEPYSSSKYATDLLSVALNRNFNQQGLYSNVACPGTALTN

SEQ ID NO: 2311 - protein, 384 aa, Homo Sapiens
HFDCSGKYRCRSSFKCIELIARCDGVSDCKDGEDEYRCVRVGGQNAVLQVFTAASWKTMCSDDWKGHYANVACAQLGFPSYVSSDNLRVSSLEGQFREEFVSIDHLLPDDKVTALHHSVYVREGCASGHVVTLQCTACGHRRGYSSRIVGGNMSLLSQWPWQASLQFQGYHLCGGSVITPLWIITAAHCVYDLYLPKSWTIQVGLVSLLDNPAPSHLVEKIVYHSKYKPKRLGNDIALMKLAGPLTFNEMIQPVCLPNSEENFPDGKVCWTSGWGATEDGGDASPVLNHAAVPLISNKICNHRDVYGGIISPSMLCAGYLTGGVDSCQGDSGGPLVCQERRLWKLVGATSFGIGCAEVNKPGVYTRVTSFLDWIHEQMERDLKT

SEQ ID NO: 2312 - protein, 53 aa, Homo Sapiens
SWKTSSYVGASIVTAVGFSKGLWMECATHSTGITQCDIYSTLLGLPADIQAAQ

SEQ ID NO: 2313 - protein, 66 aa, Homo Sapiens
SEAASLSPKKVDCSIYKKYPVVAIPCPITYLPVCGSDYITYGNECHLCTESLKSNGRVQFLHDGSC

SEQ ID NO: 2314 - protein, 114 aa, Homo Sapiens
TPTCEPATPLCCRRDHYVDFQELGWRDWILQPEGYQLNYCSGQCPPHLAGSPGIAASFHSAVFSLLKANNPWPASTSCCVPTARRPLSLLYLDHNGNVVKTDVPDMVVEACGCS

SEQ ID NO: 2315 - protein, 86 aa, Homo Sapiens
AVITGACERDVQCGAGTCCAISLWLRGLRMCTPLGREGEECHPGSHKIPFFRKRKHHTCPCLPNLLCSRFPDGRYRCSMDLKNINF

SEQ ID NO: 2316 - protein, 250 aa, Homo Sapiens
ANLTNGGKSELLKSGSSKSTLKHIWTESSKDLSISRLLSQTFRGKENDTDLDLRYDTPEPYSEQDLWDWLRNSTDLQEPRPRAKRRPIVKTGKFKKMFGWGDFHSNIKTVKLNLLITGKIVDHGNGTFSVYFRHNSTGQGNVSVSLVPPTKIVEFDLAQQTVIDAKDSKSFNCRIEYEKVDKATKNTLCNYDPSKTCYQEQTQSHVSWLCSKPFKVICIYISFYSTDYKLVQKVCPDYNYHSDTPYFPSG

SEQ ID NO: 2317 - protein, 206 aa, Homo Sapiens
ELIPDAPLSSAAYSIRSIGERPVLKAPVPKRQKCDHWTPCPSDTYAYRLLSGGGRSKYAKICFEDNLLMGEQLGNVARGINIAIVNYVTGNVTATRCFDMYEGDNSGPMTKFIQSAAPKSLLFMVTYDDGSTRLNNDAKNAIEALGSKEIRNMKFRSSWVFIAAKGLELPSEIQREKINHSDAKNNRYSGWPAEIQIEGCIPKERS

SEQ ID NO: 2318 - protein, 271 aa, Homo Sapiens
LTDFSGYLTKLLQNHTTYACDGDYLNLQCPRHSTISVQSAFYGQDYQMCSSQKPASQREDSLTCVAATTFQKVLDECQNQRACHLLVNSRVFGPDLCPGSSKYLLVSFKCQPNELKNKTVCEDQELKLHCHESKFLNIYSATYGRRTQERDICSSKAERLPPFDCLSYSALQVLSRRCYGKQRCKIIVNNHHFGSPCLPGVKKYLTVTYACVPKNILTAIDPAIANLKPSLKQKDGINFDPSGSKVLRKDGILVSNSLAAFAYIRAHPERA

SEQ ID NO: 2319 - protein, 56 aa, Homo Sapiens; identical to SEQ ID NO: 349

SEQ ID NO: 2320 - protein, 456 aa, Homo Sapiens
CQELLETVGTLARIDKDELGKAIQNSLVGEPILQNVLGSVTAVNRGLLGSGGLLGGGGLLGHGGVFGVVEELSGLKIEELTLPKVLLKLLPGFGVQLSLHTKVGMHCSGPLGGLLQLAAEVNVTSRVALAVSSRGTPILILKRCSTLLGHISLFSGLLPTPLFGVVEQMLFKVLPGLLCPVVDSVLGVVNELLGAVLGLVSLGALGSVEFSLATLPLISNQYIELDINPIVKSVAGDIIDFPKSRAPAKVPPKKDHTSQVMVPLYLFNTMFGLLQTNGALDMDITPELVPSDVPLTTTDLAALLPEALGKLPLHQQLLLFLRVREAPTVTLHNKKALVSLPANIHVLFYVPKGTPESLFELNSVMTVRAQLAPSATKLHISLSLERLSVKVASSFTHAFDGSRLEEWLSHVVGAVYAPKLNVALDVGISLPKVLNINFSNSVLEIVENAVVLTVAS

SEQ ID NO: 2321 - protein, 179 aa, Homo Sapiens
QEVDTDFDFPEEDKKEEFEECLEKFFSTGPARPPTKEKVKRRVLIEPGMPLNHIEYCNHEIMGKNVYYKHRWVAEHYFLLMQYDELQKICYNRFVPCKNGIRKCNRSKGLVEGVYCNLTEASEIPACKYESLYRKGYVLITCSWQNEMQKRIPHTINDLVEPPEHRSFLSEDGVFVIPP

SEQ ID NO: 2322 - protein, 463 aa, Homo Sapiens
AYRHPDFPLLEKAQQLLQSTGSPYSTNCWLCTSSSTETPGTAYPASPREWTSIEAELHISYRWDPNLKGLMRPANSLLSTVKQDFPDIRQKPPIFGPIFTNINLMGIAPICVMAKRKNGTNVGTLPSTVCNVTFTVDSNQQTYQTYTHNQFRHQPRFPKPPNITFPQGTLLDKSSRFCQGRPSSCSTRNFWFRPADYNQCLQISNLSSTAEWVLLDQTRNSLFWENKTKGANQSQTPCVQVLAGMTIATSYLGISAVSEFFGTSLTPLFHFHISTCLKTQGAFYICGQSIHQCLPSNWTGTCTIGYVTPDIFIAPGNLSLPIPIYGNSPLPRVRRAIHFIPLLAGLGILAGTGTGIAGITKASLTYSQLSKEIANNIDTMAKALTTMQEQIDSLAAVVLQNRRGLDMLTAAQGGICLALDEKCCFWVNQSGKVQDNIRQLLNQASSLRERATQGWLNWEGTWK

SEQ ID NO: 2323 - protein, 235 aa, Homo Sapiens
WPGLPRRPCVHCCRPAWPPGPYARVSDRDLWRGDLWRGLPRVRPTIDIEILKGEKGEAGVRGRAGRSGKEGPPGARGLQGRRGQKGQVGPPGAACRRAYAAFSVGRREGLHSSDHFQAVPFDTELVNLDGAFDLAAGRFLCTVPGVYFLSLNVHTWNYKETYLHIMLNRRPAAVLYAQPSERSVMQAQSLMLLLAAGDAVWVRMFQRDRDNAIYGEHGDLYITFSGHLVKPAAEL

SEQ ID NO: 2324 - protein, 77 aa, Homo Sapiens
ATLGGPEEESTIENYASRPEAFNTPFLNIDKLRSAFKADEFLNWHALFESIKRKLPFLNWDAFPKLKGLRSATPDAQ

SEQ ID NO: 2325 - protein, 106 aa, Homo Sapiens
VDVTTTEAFDSGVIDVQSTPTVREEKSATDLTAKLLLLDELVSLENDVIETKKKRSFSGFGSPLDRLSAGSVDHKGKQRKVVDHPKRRFGIPMDRIGRNRLSNSRG

SEQ ID NO: 2326 - protein, 130 aa, Homo Sapiens
KVFERCELARTLKRLGMDGYRGISLANWMCLAKWESGYNTRATNYNAGDRSTDYGIFQINSRYWCNDGKTPGAVNACHLSCSALLQDNIADAVACAKRVVRDPQGIRAWVAWRNRCQNRDVRQYVQGCGV

SEQ ID NO: 2327 - protein, 132 aa, Homo Sapiens
EPVQFKDCGSVDGVIKEVNVSPCPTQPCQLSKGQSYSVNVTFTSNIQSKSSKAVVHGILMGVPVPFPIPEPDGCKSGINCPIQKDKTYSYLNKLPVKSEYPSIKLVVEWQLQDDKNQSLFCWEIPVQIVSHL

SEQ ID NO: 2328 - protein, 143 aa, Homo Sapiens
VWLGRLDPEQLLGPWYVLAVASREKGFAMEKDMKNVVGVVVTLTPENNLRTLSSQHGLGGCDQSVMDLIKRNSGWVFENPSIGVLELWVLATNFRDYAIIFTQLEFGDEPFNTVELYSLTETASQEAMGLFTKWSRSLGFLSQ

SEQ ID NO: 2329 - protein, 164 aa, Homo Sapiens
VNPTVFFDIAVDGEPLGRVSFELFADKVPKTAENFRALSTGEKGFGYKGSCFHRIIPGFMCQGGDFTRHNGTGGKSIYGEKFEDENFILKHTGPGILSMANAGPNTNGSQFFICTAKTEWLDGKHVVFGKVKEGMNIVEAMERFGSRNGKTSKKITIADCGQLE

SEQ ID NO: 2330 - protein, 323 aa, Homo Sapiens
SSEAETQQPPAAPPAAPALSAADTKPGTTGSGAGSGGPGGLTSAAPAGGDKKVIATKVLGTVKWFNVRNGYGFINRNDTKEDVFVHQTAIKKNNPRKYLRSVGDGETVEFDVVEGEKGAEAANVTGPGGVPVQGSKYAADRNHYRRYPRRRGPPRNYQQNYQNSESGEKNEGSESAPEGQAQQRRPYRRRRFPPYYMRRPYGRRPQYSNPPVQGEVMEGADNQGAGEQGRPVRQNMYRGYRPRFRRGPPRQRQPREDGNEEDKENQGDETQGQQPPQRRYRRNFNYRRRRPENPKPQDGKETKAADPPAENSSAPEAEQGGAE

SEQ ID NO: 2331 - protein, 522 aa, Homo Sapiens
EGVQTCEEVRKLFQWRLLGAVRGLPDSPRAGPDLQVCISKKPTCCTRKMEERYQIAARQDMQQFLQTSSSTLKFLISRNAAAFQETLETLIKQAENYTSILFCSTYRNMALEAAASVQEFFTDVGLYLFGADVNPEEFVNRFFDSLFPLVYNHLINPGVTDSSLEYSECIRMARRDVSPFGNIPQRVMGQMGRSLLPSRTFLQALNLGIEVINTTDYLHFSKECSRALLKMQYCPHCQGLALTKPCMGYCLNVMRGCLAHMAELNPHWHAYIRSLEELSDAMHGTYDIGHVLLNFHLLVNDAVLQAHLNGQKLLEQVNRICGRPVRTPTQSPRCSFDQSKEKHGMKTTTRNSEETLANRRKEFINSLRLYRSFYGGLADQLCANELAAADGLPCWNGEDIVKSYTQRVVGNGIKAQSGNPEVKVKGIDPVINQIIDKLKHVVQLLQGRSPKPDKWELLQLGSGGGMVEQVSGDCDDEDGCGGSGSGEVKRTLKITDWMPDDMNFSDVKQIHQTDTGSTLDTT

SEQ ID NO: 2332 - protein, 358 aa, Homo Sapiens
HYHHVTKLDEVAASQLTFPAVTLCNLNEFRFSQVSKNDLYHAGELLALLNNRYEIPDTQMADEKQLEILQDKANFRSFKPKPFNMREFYDRAGHDIRDMLLSCHFRGEVCSAEDFKVVFTRYGKCYTFNSGRDGRPRLKTMKGGTGNGLEIMLDIQQDEYLPVWGETDETSFEAGIKVQIHSQDEPPFIDQLGFGVAPGFQTFVACQEQRLIYLPPPWGTCKAVTMDSDLDFFDSYSITACRIDCETRYLVENCNCRMVHMPGDAPYCTPEQYKECADPALDFLVEKDQEYCVCEMPCNLTRYGKELSMVKIPSKASAKYLAKKFNKSEQYIGENILVLDIFFEVLNYETIEQKKAYE

SEQ ID NO: 2333 - protein, 59 aa, Homo Sapiens
SSTLPTDYWKVSTIDGTVITTATYWANLWKACVTDSTGVSNCKDFPSMLALDGYIQACR

SEQ ID NO: 2334 - protein, 600 aa, Homo Sapiens
QGLLSLQAKQEYCLKPECIEAAAAILSKVNLSVDPCDNFFRFACDGWISNNPIPEDMPSYGVYPWLRHNVDLKLKELLEKSISRRRDTEAIQKAKILYSSCMNEKAIEKADAKPLLHILRHSPFRWPVLESNIGPEGVWSERKFSLLQTLATFRGQYSNSVFIRLYVSPDDKASNEHILKLDQATLSLAVREDYLDNSTEAKSYRDALYKFMVDTAVLLGANSSRAEHDMKSVLRLEIKIAEIMIPHENRTSEAMYNKMNISELSAMIPQFDWLGYIKKVIDTRLYPHLKDISPSENVVVRVPQYFKDLFRILGSERKKTIANYLVWRMVYSRIPNLSRRFQYRWLEFSRVIQGTTTLLPQWDKCVNFIESALPYVVGKMFVDVYFQEDKKEMMEELVEGVRWAFIDMLEKENEWMDAGTKRKAKEKARAVLAKVGYPEFIMNDTHVNEDLKAIKFSEADYFGNVLQTRKYLAQSDFFWLRKAVPKTEWFTNPTTVNAFYSASTNQIRFPAGELQKPFFWGTEYPRSLSYGAIGVIVGHEFTHGFDNNGRKYDKNGNLDPWWSTESEEKFKEKTKCMINQYSNYYWKKAGLNVKGKRTLG

SEQ ID NO: 2335 - protein, 198 aa, Homo Sapiens
GDTRPRFLELRKSECHFFNGTERVRYLDRYFHNQEEFLRFDSDVGEYRAVTELGRPVAESWNSQKDLLEQKRGRVDNYCRHNYGVGESFTVQRRVHPQVTVYPAKTQPLQHHNLLVCSVSGFYPGSIEVRWFRNGQEEKAGVVSTGLIQNGDWTFQTLVMLETVPRSGEVYTCQVEHPSVTSALTVEWRARSESAQSK

SEQ ID NO: 2336 - protein, 817 aa, Homo Sapiens
CGLSTHVEIGHRALEFLQLHNGRVNYRELLLEHQDAYQAGIVFPDCFYPSICKGGKFHDVSESTHWTPFLNASVHYIRENYPLPWEKDTEKLVAFLFGITSHMAADVSWHSLGLEQGFLRTMGAIDFHGSYSEAHSAGDFGGDVLSQFEFNFNYLARRWYVPVKDLLGIYEKLYGRKVITENVIVDCSHIQFLEMYGEMLAVSKLYPTYSTKSPFLVEQFQEYFLGGLDDMAFWSTNIYHLTSFMLENGTSDCNLPENPLFIACGGQQNHTQGSKMQKNDFHRNLTTSLTESVDRNINYTERGVFFSVNSWTPDSMSFIYKALERNIRTMFIGGSQLSQKHVSSPLASYFLSFPYARLGWAMTSADLNQDGHGDLVVGAPGYSRPGHIHIGRVYLIYGNDLGLPPVDLDLDKEAHRILEGFQPSGRFGSALAVLDFNVDGVPDLAVGAPSVGSEQLTYKGAVYVYFGSKQGGMSSSPNITISCQDIYCNLGWTLLAADVNGDSEPDLVIGSPFAPGGGKQKGIVAAFYSGPSLSDKEKLNVEAANWTVRGEEDFSWFGYSLHGVTVDNRTLLLVGSPTWKNASRLGHLLHIRDEKKSLGRVYGYFPPNGQSWFTISGDKAMGKLGTSLSSGHVLMNGTLKQVLLVGAPTYDDVSKVAFLTVTLHQGGATRMYALTSDAQPLLLSTFSGDRRFSRFGGVLHLSDLDDDGLDEIIMAAPLRIADVTSGLIGGEDGRVYVYNGKETTLGDMTGKCKSWITPCPEEKAQYVLISPEASSRFGSSLITVRSKAKNQVVIAAGRSSLGARLSGALHVYSLGSD

SEQ ID NO: 2337 - protein, 178 aa, Homo Sapiens
QDSTSDLIPAPPLSKVPLQQNFQDNQFQGKWYVVGLAGNAILREDKDPQKMYATIYELKEDKSYNVTSVLFRKKKCDYWIRTFVPGCQPGEFTLGNIKSYPGLTSYLVRVVSTNYNQHAMVFFKKVSQNREYFKITLYGRTKELTSELKENFIRFSKSLGLPENHIVFPVPIDQCIDG

SEQ ID NO: 2338 - protein, 445 aa, Homo Sapiens
EKLHTQPSCPAVCQPTRCPALPTCALGTTPVFDLCRCCRVCPAAEREVCGGAQGQPCAPGLQCLQPLRPGFPSTCGCPTLGGAVCGSDRRTYPSMCALRAENRAARRLGKVPAVPVQWGNCGDTGTRSAGPLRRNYNFIAAVVEKVAPSVVHVQLWGRLLHGSRLVPVYSGSGFIVSEDGLIITNAHVVRNQQWIEVVLQNGARYEAVVKDIDLKLDLAVIKIESNAELPVLMLGRSSDLRAGEFVVALGSPFSLQNTATAGIVSTKQRGGKELGMKDSDMDYVQIDATINYGNSGGPLVNLDGDVIGVNSLRVTDGISFAIPSDRVRQFLAEYHEHQMKGKAFSNKKYLGLQMLSLTVPLSEELKMHYPDFPDVSSGVYVCKVFEGTAAQSSGLRDHDVIVNINGKPITTTTDVVKALDSDSLSMAVLRGKDNLLLTVIPETIN

SEQ ID NO: 2339 - protein, 436 aa, Homo Sapiens
REPPAAPCPARCDVSRCPSPRCPGGYVPDLCNCCLVCAASEGEPCGGPLDSPCGESLECVRGLCRCRWSHAVCGTDGHTYANVCALQAASRRALQLSGTPVRQLQKGACPLGLHQLSSPRYKFNFIADVVEKIAPAVVHIELFLRHPLFGRNVPLSSGSGFIMSEAGLIITNAHVVSSNSAAPGRQQLKVQLQNGDSYEATIKDIDKKSDIATIKIHPKKKLPVLLLGHSADLRPGEFVVAIGSPFALQNTVTTGIVSTAQREGRELGLRDSDMDYIQTDAIINYGNSGGPLVNLDGEVIGINTLKVTAGISFAIPSDRITRFLTEFQDKQIKDWKKRFIGIRMRTITPSLVDELKASNPDFPEVSSGIYVQEVAPNSPSQRGGIQDGDIIVKVNGRPLVDSSELQEAVLTESPLLLEVRRGNDDLLFSIAPEVVM

SEQ ID NO: 2340 - protein, 260 aa, Homo Sapiens
WGFKDGIFHNSIWLERAAGVYHREARSGKYKLTYAEAKAVCEFEGGHLATYKQLEAARKIGFHVCAAGWMAKGRVGYPIVKPGPNCGFGKTGIIDYGIRLNRSERWDAYCYNPHAKECGGVFTDPKQIFKSPGFPNEYEDNQICYWHIRLKYGQRIHLSFLDFDLEDDPGCLADYVEIYDSYDDVHGFVGRYCGDELPDDIISTGNVMTLKFLSDASVTAGGFQIKYVAMDPVSKSSQGKNTSTTSTGNKNFLAGRFSHL

SEQ ID NO: 2341 - protein, 109 aa, Homo Sapiens
KTDSSFIMDSDPRRCMRHHYVDSISHPLYKCSSKMVLLARCEGHCSQASRSEPLVSFSTVLKQPFRSSCHCCRPQTSKLKALRLRCSGGMRLTATYRYILSCHCEECNS

SEQ ID NO: 2342 - protein, 347 aa, Homo Sapiens
TDCPCPEPELCRPIRHHPDFEVFVFDVGQKTWKSYDWSQITTVATFGKYDSELMCYAHSKGARVVLKGDVSLKDIIDPAFRASWIAQKLNLAKTQYMDGINIDIEQEVNCLSPEYDALTALVKETTDSFHREIEGSQVTFDVAWSPKNIDRRCYNYTGIADACDFLFVMSYDEQSQIWSECIAAANAPYNQTLTGYNDYIKMSINPKKLVMGVPWYGYDYTCLNLSEDHVCTIAKVPFRGAPCSDAAGRQVPYKTIMKQINSSISGNLWDKDQRAPYYNYKDPAGHFHQVWYDNPQSISLKATYIQNYRLRGIGMWNANCLDYSGDAVAKQQTEEMWEVLKPKLLQR

SEQ ID NO: 2343 - protein, 75 aa, Homo Sapiens
ESLQERADEATTQKQSGEDNQDLAISFAGNGLSALRTSGSQARATCYCRTGRCATRESLSGVCEISGRLYRLCCR

SEQ ID NO: 2344 - protein, 559 aa, Homo Sapiens
QKGGSKGQLPSGSSQFPHGKKGQHYFGQKDQQHTKSKGSFSIQHTYHVDINDHDWTRKSQQYDLNALHKATKSKQHLGGSQQLLNYKQEGRDHDKSKGHFHMIVIHHKGGQAHHGTQNPSQDQGNSPSGKGLSSQCSNTEKRLWVHGLSKEQASASGAQKGRTQGGSQSSYVLQTEELVVNKQQRETKNSHQNKGHYQNVVDVREEHSSKLQTSLHPAHQDRLQHGPKDIFTTQDELLVYNKNQHQTKNLNQDQEHGRKAHKISYPSSRTEERQLHHGEKSVQKDVSKGSISIQTEEKIHGKSQNQVTIHSQDQEHGHKENKISYQSSSTEERHLNCGEKGIQKGVSKGSISIQTEEQIHGKSQNQVRIPSQAQEYGHKENKISYQSSSTEERRLNSGEKDVQKGVSKGSISIQTEEKIHGKSQNQVTIPSQDQEHGHKENKMSYQSSSTEERRLNYGGKSTQKDVSQSSISFQIEKLVEGKSQIQTPNPNQDQWSGQNAKGKSGQSADSKQDLLSHEQKGRYKQESSESHNIVITEHEVAQDDHLTQQYNEDRNPIST

SEQ ID NO: 2345 - protein, 499 aa, Homo Sapiens
EWIKFAAACREGEDNSKRNPIAKIHSDCAANQQVTYRISGVGIDQPPYGIFVINQKTGEINITSIVDREVTPFFIIYCRALNSMGQDLERPLELRVRVLDINDNPPVFSMATFAGQIEENSNANTLVMILNATDADEPNNLNSKIAFKIIRQEPSDSPMFIINRNTGEIRTMNNFLDREQYGQYALAVRGSDRDGGADGMSAECECNIKILDVNDNIPYMEQSSYTIEIQENTLNSNLLEIRVIDLDEEFSANWMAVIFFISGNEGNWFEIEMNERTNVGILKVVKPLDYEAMQSLQLSIGVRNKAEFHHSIMSQYKLKASAISVTVLNVIEGPVFRPGSKTYVVTGNMGSNDKVGDFVATDLDTGRPSTTVRYVMGNNPADLLAVDSRTGKLTLKNKVTKEQYNMLGGKYQGTILSIDDNLQRTCTGTININIQSFGNDDRTNTEPNTKITTNTGRQESTSSTNYDTSTTSTDSSQVYSSEPGNGAKDLLSDNVHFGP

SEQ ID NO: 2346 - protein, 94 aa, Homo Sapiens
VTVQDGNFSFSLESVKKLKDLQEPQEPRVGKLRNFAPIPGEPVVPILCSNPNFPEELKPLCKEPNAQEILQRLEEIAEDPGTCEICAYAACTGC

SEQ ID NO: 2347 - protein, 709 aa, Homo Sapiens
KGDAKPEDNLLVLTVATKETEGFRRFKRSAQFFNYKIQALGLGEDWNVEKGTSAGGGQKVRLLKKALEKHADKEDLVILFTDSYDVLFASGPRELLKKFRQSRSQVVFSAEELIYPDRRLETKYPVVSDGKRFLGSGGFIGYAPNLSKLVAEWEGQDSDSDQLFYTKIFLDPEKREQINITLDHRCRIFQNLDGALDEVVLKFEMGHVRARNLAYDTLPVLIHGNGPTKLQLNYLGNYIPRFWTFETGCTVCDEGLRSLKGIGDEALPTVLVGVFIEQPTPFVSLFFQRLLRLHYPQKHMRLFIHNHEQHHKAQVEEFLAQHGSEYQSVKLVGPEVRMANADARNMGADLCRQDRSCTYYFSVDADVALTEPNSLRLLIQQNKNVIAPLMTRHGRLWSNFWGALSADGYYARSEDYVDIVQGRRVGVWNVPYISNIYLIKGSALRGELQSSDLFHHSKLDPDMAFCANIRQQDVFMFLTNRHTLGHLLSLDSYRTTHLHNDLWEVFSNPEDWKEKYIHQNYTKALAGKLVETPCPDVYWFPIFTEVACDELVEEMEHFGQWSLGNNKDNRIQGGYENVPTIDIHMNQIGFEREWHKFLLEYIAPMTEKLYPGYYTRAQFDLAFVVRYKPDEQPSLMPHHDASTFTINIALNRVGVDYEGGGCRFLRYNCSIRAPRKGWTLMHPGRLTHYHEGLPTTRGTRYIAVSFVDP

SEQ ID NO: 2348 - protein, 411 aa, Homo Sapiens
AVFTVGVLGPWACDPIFSRARPDLAARLAAARLNRDPGLAGGPRFEVALLPEPCRTPGSLGAVSSALARVSGLVGPVNPAACRPAELLAEEAGIALVPWGCPWTQAEGTTAPAVTPAADALYALLRAFGWARVALVTAPQDLWVEAGRSLSTALRARGLPVASVTSMEPLDLSGAREALRKVRDGPRVTAVIMVMHSVLLGGEEQRYLLEAAEELGLTDGSLVFLPFDTIHYALSPGPEALAALANSSQLRRAHDAVLTLTRHCPSEGSVLDSLRRAQERRELPSDLNLQQVSPLFGTIYDAVFLLARGVAEARAAAGGRWVSGAAVARHIRDAQVPGFCGDLGGDEEPPFVLLDTDAAGDRLFATYMLDPARGSFLSAGTRMHFPRGGSAPGPDPSCWFDPNNICGGGLE

SEQ ID NO: 2349 - protein, 312 aa, Homo Sapiens
QVKPCDFPDIKHGGLFHENMRRPYFPVAVGKYYSYYCDEHFETPSGSYWDYIHCTQNGWSPAVPCLRKCYFPYLENGYNQNYGRKFVQGNSTEVACHPGYGLPKAQTTVTCTEKGWSPTPRCIRVRTCSKSDIEIENGFISESSSIYILNKEIQYKCKPGYATADGNSSGSITCLQNGWSAQPICINSSEKCGPPPPISNGDTTSFLLKVYVPQSRVEYQCQPYYELQGSNYVTCSNGEWSEPPRCIHPCIITEENMNKNNIKLKGRSDRKYYAKTGDTIEFMCKLGYNANTSILSFQAVCREGIVEYPRCE

SEQ ID NO: 2350 - protein, 106 aa, Homo Sapiens
EKPSPCQCSRLSPHNRTNCGFPGITSDQCFDNGCCFDSSVTGVPWCFHPLPKQESDQCVMEVSDRRNCGYPGISPEECASRKCCFSNFIFEVPWCFFPKSVEDCHY

SEQ ID NO: 2351 - protein, 312 aa, Homo Sapiens
EATFCDFPKINHGILYDEEKYKPFSQVPTGEVFYYSCEYNFVSPSKSFWTRITCTEEGWSPTPKCLRLCFFPFVENGHSESSGQTHLEGDTVQIICNTGYRLQNNENNISCVERGWSTPPKCRSTDTSCVNPPTVQNAHILSRQMSKYPSGERVRYECRSPYEMFGDEEVMCLNGNWTEPPQCKDSTGKCGPPPPIDNGDITSFPLSVYAPASSVEYQCQNLYQLEGNKRITCRNGQWSEPPKCLHPCVISREIMENYNIALRWTAKQKLYLRTGESAEFVCKRGYRLSSRSHTLRTTCWDGKLEYPTCAKR

SEQ ID NO: 2352 - protein, 662 aa, Homo Sapiens
VFYAERYQMPTGIKGPLPNTKTQFFIPYTIKSKGIAVRGEQGTPGPPGPAGPRGHPGPSGPPGKPGYGSPGLQGEPGLPGPPGPSAVGKPGVPGLPGKPGERGPYGPKGDVGPAGLPGPRGPPGPPGIPGPAGISVPGKPGQQGPTGAPGPRGFPGEKGAPGVPGMNGQKGEMGYGAPGRPGERGLPGPQGPTGPSGPPGVGKRGENGVPGQPGIKGDRGFPGEMGPIGPPGPQGPPGERGPEGIGKPGAAGAPGQPGIPGTKGLPGAPGIAGPPGPPGFGKPGLPGLKGERGPAGLPGGPGAKGEQGPAGLPGKPGLTGPPGNMGPQGPKGIPGSHGLPGPKGETGPAGPAGYPGAKGERGSPGSDGKPGYPGKPGLDGPKGNPGLPGPKGDPGVGGPPGLPGPVGPAGAKGMPGHNGEAGPRGAPGIPGTRGPIGPPGIPGFPGSKGDPGSPGPPGPAGIATKGLNGPTGPPGPPGPRGHSGEPGLPGPPGPPGPPGQAVMPEGFIKAGQRPSLSGTPLVSANQGVTGMPVSAFTVILSKAYPAIGTPIPFDKILYNRQQHYDPRTGIFTCQIPGIYYFSYHVHVKGTHVWVGLYKNGTPVMYTYDEYTKGYLDQASGSAIIDLTENDQVWLQLPNAESNGLYSSEYVHSSFSGFLVAPM

SEQ ID NO: 2353 - protein, 103 aa, Homo Sapiens
MEDEKPKVNPKLYMCVCEGLSCGNEDHCEGQQCFSSLSINDGFHVYQKGCFQVYEQGKMTCKTPPSPGQAVECCQGDWCNRNITAQLPTKGKSFPGTQNFHLE

SEQ ID NO: 2354 - protein, 139 aa, Homo Sapiens
DKNTTQHPNVTTLAPISNVTSAPVTSLPLVTTPAPETCEGRNSCVSCFNVSVVNTTCFWIECKDESYCSHNSTVSDCQVGNTTDFCSVSTATPVPTANSTAKPTVQPSPSTTSKTVTTSGTTNNTVTPTSQPVRKSTFD

SEQ ID NO: 2355 - protein, 208 aa, Homo Sapiens
IAENEDALLRHLFQGYQKWVRPVLHSNDTIKVYFGLKISQLVDVDEKNQLMTTNVWLKQEWTDHKLRWNPDDYGGIHSIKVPSESLWLPDIVLFENADGRFEGSLMTKVIVKSNGTVVWTPPASYKSSCTMDVTFFPFDRQNCSMKFGSWTYDGTMVDLILINENVDRKDFFDNGEWEILNAKGMKGNRRDGVYSYPFITYSFVLRRL

SEQ ID NO: 2356 - protein, 602 aa, Homo Sapiens
IDVSQLVNPAFPGTVTCDEREITVEFPSSPGTKKWHASVVDPLGLDMPNCTYILDPEKLTLRATYDNCTRRVHGGHQMTIRVMNNSAALRHGAVMYQFFCPAMQVEETQGLSASTICQKDFMSFSLPRVFSGLADDSKGTKVQMGWSIEVGDGARAKTLTLPEAMKEGFSLLIDNHRMTFHVPFNATGVTHYVQGNSHLYMVSLKLTFISPGQKVIFSSQAICAPDPVTCNATHMTLTIPEFPGKLKSVSFENQNIDVSQLHDNGIDLEATNGMKLHFSKTLLKTKLSEKCLLHQFYLASLKLTFLLRPETVSMVIYPECLCESPVSIVTGELCTQDGFMDVEVYSYQTQPALDLGTLRVGNSSCQPVFEAQSQGLVRFHIPLNGCGTRYKFEDDKVVYENEIHALWTDFPPSKISRDSEFRMTVKCSYSRNDMLLNINVESLTPPVASVKLGPFTLILQSYPDNSYQQPYGENEYPLVRFLRQPIYMEVRVLNRDDPNIKLVLDDCWATSTMDPDSFPQWNVVVDGCAYDLDNYQTTFHPVGSSVTHPDHYQRFDMKAFAFVSEAHVLSSLVYFHCSALICNRLSPDSPLCSVTCPVSSRH

SEQ ID NO: 2357 - protein, 617 aa, Homo Sapiens
LPEGVANGIEVYSTKINSKVTSRFAHNVVTMRAVNRADTAKEVSFDVELPKTAFITNFTLTIDGVTYPGNVKEKEVAKKQYEKAVSQGKTAGLVKASGRKLEKFTVSVNVAAGSKVTFELTYEELLKRHKGKYEMYLKVQPKQLVKHFEIEVDIFEPQGISMLDAEASFITNDLLGSALTKSFSGKKGHVSFKPSLDQQRSCPTCTDSLLNGDFTITYDVNRESPGNVQIVNGYFVHFFAPQGLPVVPKNVAFVIDISGSMAGRKLEQTKEALLRILEDMQEEDYLNFILFSGDVSTWKEHLVQATPENLQEARTFVKSMEDKGMTNINDGLLRGISMLNKAREEHRIPERSTSIVIMLTDGDANVGESRPEKIQENVRNAIGGKFPLYNLGFGNNLNYNFLENMALENHGFARRIYEDSDADLQLQGFYEEVANPLLTGVEMEYPENAILDLTQNTYQHFYDGSEIVVAGRLVDEDMNSFKADVKGHGATNDLTFTEEVDMKEMEKALQERDYIFGNYIERLWAYLTIEQLLEKRKNAHGEEKENLTARALDLSLKYHFVTPLTSMVVTKPEDNEDERAIADKPGEDAEATPVSPAMSYLTSYQPPQNPYYYVDGD

SEQ ID NO: 2358 - protein, 649 aa, Homo Sapiens
GYIEALAANAGTGFAVAEPQIAMFCGKLNMHVNIQTGKWEPDPTGTKSCFETKEEVLQYCQEMYPELQITNVMEANQRVSIDNWCRRDKKQCKSRFVTPFKCLVGEFVSDVLLVPEKCQFFHKERMEVCENHQHWHTVVKEACLTQGMTLYSYGMLLPCGVDQFHGTEYVCCPQTKIIGSVSKEEEEEDEEEEEEEDEEEDYDVYKSEFPTEADLEDFTEAAVDEDDEDEEEGEEVVEDRDYYYDTFKGDDYNEENPTEPGSDGTMSDKEITHDVKAVCSQEAMTGPCRAVMPRWYFDLSKGKCVRFIYGGCGGNRNNFESEDYCMAVCKAMIPPTPLPTNDVDVYFETSADDNEHARFQKAKEQLEIRHRNRMDRVKKEWEEAELQAKNLPKAERQTLIQHFQAMVKALEKEAASEKQQLVETHLARVEAMLNDRRRMALENYLAALQSDPPRPHRILQALRRYVRAENKDRLHTIRHYQHVLAVDPEKAAQMKSQVMTHLHVIEERRNQSLSLLYKVPYVAQEIQEEIDELLQEQRADMDQFTASISETPVDVRVSSEESEEIPPFHPFHPFPALPENEGSGVGEQDGGLIGAEEKVINSKNKVDENMVIDETLDVKEMIFNAERVGGLEEERESVGPLREDFSLSS

SEQ ID NO: 2359 - protein, 162 aa, Homo Sapiens
PIIMGSNIGTSVTNTIVALMQAGDRTDFRRAFAGATVHDCFNWLSVLVLLPLEAATGYLHHITRLVVASFNIHGGRDAPDLLKIITEPFTKLIIQLDESVITSIATGDESLRNHSLIQIWCHPDSLQAPTSMSRAEANSSQTLGNATMEKCNHIFVDTGLPD

SEQ ID NO: 2360 - protein, 224 aa, Homo Sapiens
LNEEERLIRHLFQEKGYNKELRPVAHKEESVDVALALTLSNLISLKEVEETLTTNVWIEHGWTDNRLKWNAEEFGNISVLRLPPDMVWLPEIVLENNNDGSFQISYSCNVLVYHYGFVYWLPPAIFRSSCPISVTYFPFDWQNCSLKFSSLKYTAKEITLSLKQDAKENRTYPVEWIIIDPEGFTENGEWEIVHRPARVNVDPRAPLDSPSRQDITFYLIIRRK

SEQ ID NO: 2361 - protein, 209 aa, Homo Sapiens
LHTDGDKAFVDFLSDEIKEERKIQKHKTLPKMSGGWELELNGTEAKLVRKVAGEKITVTFNINNSIPPTFDGEEEPSQGQKVEEQEPELTSTPNFVVEVIKNDDGKKALVLDCHYPEDEVGQEDEAESDIFSIREVSFQSTGESEWKDTNYTLNTDSLDWALYDHLMDFLADRGVDNTFADELVELSTALEHQEYITFLEDLKSFVKSQ

SEQ ID NO: 2362 - protein, 918 aa, Homo Sapiens
TRSCDSSGDGGPGTAPAPSHLPSSTASPSGPPAQDQDICPASEDESGQWKNFRLPDFVNPVHYDLHVKPLLEEDTYTGTVSISINLSAPTRYLWLHLRETRITRLPELKRPSGDQVQVRRCFEYKKQEYVVVEAEEELTPSSGDGLYLLTMEFAGWLNGSLVGFYRTTYTENGRVKSIVATDHEPTDARKSFPCFDEPNKKATYTISITHPKEYGALSNMPVAKEESVDDKWTRTTFEKSVPMSTYLVCFAVHQFDSVKRISNSGKPLTIYVQPEQKHTAEYAANITKSVFDYFEEYFAMNYSLPKLDKIAIPDFGTGAMENWGLITYRETNLLYDPKESASSNQQRVATVVAHELVHQWFGNIVTMDWWEDLWLNEGFASFFEFLGVNHAETDWQMRDQMLLEDVLPVQEDDSLMSSHPIIVTVTTPDEITSVFDGISYSKGSSILRMLEDWIKPENFQKGCQMYLEKYQFKNAKTSDFWAALEEASRLPVKEVMDTWTRQMGYPVLNVNGVKNITQKRFLLDPRANPSQPPSDLGYTWNIPVKWTEDNITSSVLFNRSEKEGITLNSSNPSGNAFLKINPDHIGFYRVNYEVATWDSIATALSLNHKTFSSADRASLIDDAFALARAQLLDYKVALNLTKYLKREENFLPWQRVISAVTYIISMFEDDKELYPMIEEYFQGQVKPIADSLGWNDAGDHVTKLLRSSVLGFACKMGDREALNNASSLFEQWLNGTVSLPVNLRLLVYRYGMQNSGNEISWNYTLEQYQKTSLAQEKEKLLYGLASVKNVTLLSRYLDLLKDTNLIKTQDVFTVIRYISYNSYGKNMAWNWIQLNWDYLVNRYTLNNRNLGRIVTIAEPFNTELQLWQMESFFAKYPQAGAGEKPREQVLETVKNNIEWLKQHRNTIREWFFNLLESG

SEQ ID NO: 2363 - protein, 183 aa, Homo Sapiens
QYGDYGYPYQQYHDYSDDGWVNLNRQGFSYQCPQGQVIVAVRSIFSKKEGSDRQWNYACMPTPQSLGEPTECWWEEINRAGMEWYQTCSNNGLVAGFQSRYFESVLDREWQFYCCRYSKRCPYSCWLTIEYPGHYGEEMDMISYNYDYYIRGATTTFSAVERDRQWKFIMCRMTEYDCEFANV

SEQ ID NO: 2364 - protein, 577 aa, Homo Sapiens
ALSPKCLDWWQEGPMYQIYPRSFKDSNKDGNGDLKGIQDKLDYITALNIKTVWITSFYKSSLKDFRYGVEDFREVDPIFGTMEDFENLVAAIHDKGLKLIIDFIPNHTSDKHIWFQLSRTRTGKYTDYYIWHDCTHENGKTIPPNNWLSVYGNSSWHFDEVRNQCYFHQFMKEQPDLNFRNPDVQEEIKEILRFWLTKGVDGFSLDAVKFLLEAKHLRDEIQVNKTQIPDTVTQYSELYHDFTTTQVGMHDIVRSFRQTMDQYSTEPGRYRFMGTEAYAESIDRTVMYYGLPFIQEADFPFNNYLSMLDTVSGNSVYEVITSWMENMPEGKWPNWMIGGPDSSRLTSRLGNQYVNVMNMLLFTLPGTPITYYGEEIGMGNIVAANLNESYDINTLRSKSPMQWDNSSNAGFSEASNTWLPTNSDYHTVNVDVQKTQPRSALKLYQDLSLLHANELLLNRGWFCHLRNDSHYVVYTRELDGIDRIFIVVLNFGESTLLNLHNMISGLPAKIRIRLSTNSADKGSKVDTSGIFLDKGEGLIFEHNTKNLLHRQTAFRDRCFVSNRACYSSVLNILYTSC

SEQ ID NO: 2365 - protein, 397 aa, Homo Sapiens
DMKGHFDPAKCRYALGMQDRTIPDSDISASSSWSDSTAARHSRLESSDGDGAWCPAGSVFPKEEEYLQVDLQRLHLVALVGTQGRHAGGLGKEFSRSYRLRYSRDGRRWMGWKDRWGQEVISGNEDPEGVVLKDLGPPMVARLVHFYPRADRVMSVCLRVELYGCLWRDGLLSYTAPVGQTMYLSEAVYLNDSTYDGHTVGGLQYGGLGQLADGVVGLDDFRKSQELRVWPGYDYVGWSNHSFSSGYVEMEFEFDRLRAFQAMQVHCNNMHTLGARLPGGVECRFRRGPAMAWEGEPMRHNLGGNLGDPRARAVSVPLGGRVARFLQCRFLFAGPWLLFSEISFISDVVNNSSPALGGTFPPAPWWPPGPPPTNFSSLELEPRGQQPVAKAEGSPTA

SEQ ID NO: 2366 - protein, 567 aa, Homo Sapiens
VNDGDMRLADGGATNQGRVEIFYRGQWGTVCDNLWDLTDASVVCRALGFENATQALGRAAFGQGSGPIMLDEVQCTGTEASLADCKSLGWLKSNCRHERDAGVVCTNETRSTHTLDLSRELSEALGQIFDSQRGCDLSISVNVQGEDALGFCGHTVILTANLEAQALWKEPGSNVTMSVDAECVPMVRDLLRYFYSRRIDITLSSVKCFHKLASAYGARQLQGYCASLFAILLPQDPSFQMPLDLYAYAVATGDALLEKLCLQFLAWNFEALTQAEAWPSVPTDLLQLLLPRSDLAVPSELALLKAVDTWSWGERASHEEVEGLVEKIRFPMMLPEELFELQFNLSLYWSHEALFQKKTLQALEFHTVPFQLLARYKGLNLTEDTYKPRIYTSPTWSAFVTDSSWSARKSQLVYQSRRGPLVKYSSDYFQAPSDYRYYPYQSFQTPQHPSFLFQDKRVSWSLVYLPTIQSCWNYGFSCSSDELPVLGLTKSGGSDRTIAYENKALMLCEGLFVADVTDFEGWKAAIPSALDTNSSKSTSSFPCPAGHFNGFRTVIRPFYLTNSSGVD

SEQ ID NO: 2367 - protein, 557 aa, Homo Sapiens
RWAPIPASLMENSLGPFPQHVQQIQSDAAQNYTIFYSISGPGVDKEPFNLFYIEKDTGDIFCTRSIDREKYEQFALYGYATTADGYAPEYPLPLIIKIEDDNDNAPYFEHRVTIFTVPENCRSGTSVGKVTATDLDEPDTLHTRLKYKILQQIPDHPKHFSIHPDTGVITTTTPFLDREKCDTYQLIMEVRDMGGQPFGLFNTGTITISLEDENDNPPSFTETSYVTEVEENRIDVEILRMKVQDQDLPNTPHSKAVYKILQGNENGNFIISTDPNTNEGVLCVVKPLNYEVNRQVILQVGVINEAQFSKAASSQTPTMCTTTVTVKIIDSDEGPECHPPVKVIQSQDGFPAGQELLGYKALDPEISSGEGLRYQKLGDEDNWFEINQHTGDLRTLKVLDRESKFVKNNQYNISVVAVDAVGRSCTGTLVVHLDDYNDHAPQIDKEVTICQNNEDFAVLKPVDPDGPENGPPFQFFLDNSASKNWNIEEKDGKTAILRQRQNLDYNYYSVPIQIKDRHGLVATHMLTVRVCDCSTPSECRMKDKSTRDVRPNVILGR

SEQ ID NO: 2368 - protein, 418 aa, Homo Sapiens
RHLDALAGGAGPNHGNFLDNDQWLSTVSQYDRDKYWNRFRDDDYFRNWNPNKPFDKALDPSKDPCLKVKCSPHKVCVTQDYQTALCVSRKHLLPRQKKGNVAQKHWVGPSNLVKCKPCPVAQSAMVCGSDGHSYTSKCKLEFHACSTGKSLATLCDGPCPCLPEPEPPKHKAERSACTDKELRNLASRLKDWFGALHEDANRVIKPTSSNTAQGRFDTSILPICKDSLGWMFNKLDMNYDLLLDPSEINAIYLDKYEPCIKPLFNSCDSFKDGKLSNNEWCYCFQKPGGLPCQNEMNRIQKLSKGKSLLGAFIPRCNEEGYYKATQCHGSTGQCWCVDKYGNELAGSRKQGAVSCEEEQETSGDFGSGGSVVLLDDLEYERELGPKDKEGKLRVHTRAVTEDDEDEDDDKEDEVGYIW

SEQ ID NO: 2369 - protein, 290 aa, Homo Sapiens
LEDCAQEQMRLRAQVRLLETRVKQQQVKIKQLLQENEVQFLDKGDENTVIDLGSKRQYADCSEIFNDGYKLSGFYKIKPLQSPAEFSVYCDMSDGGGWTVIQRRSDGSENFNRGWKDYENGFGNFVQKHGEYWLGNKNLHFLTTQEDYTLKIDLADFEKNSRYAQYKNFKVGDEKNFYELNIGEYSGTAGDSLAGNFHPEVQWWASHQRMKFSTWDRDHDNYEGNCAEEDQSGWWFNRCHSANLNGVYYSGPYTAKTDNGIVWYTWHGWWYSLKSVVMKIRPNDFIPNVI

SEQ ID NO: 2370 - protein, 72 aa, Homo Sapiens
ETSPILTEKQAKQLLRSRRQDRPSKPGFPDEPMREYMHHLLALEHRAEEQFLEHWLNPHCKPHCDRNRIHPV

SEQ ID NO: 2371 - protein, 113 aa, Homo Sapiens
ACPASADLKHSDGTRTCAKLYDKSDPYYENCCGGAELSLESGADLPYLPSNWANTASSLVVAPRCELTVWSRQGKAGKTHKFSAGTYPRLEEYRRGILGDWSNAISALYCRCS

SEQ ID NO: 2372 - protein, 265 aa, Homo Sapiens
GARARWRGEGTSAHLRDIFLGRCAEYRALLSPEQRNKNCTAIWEAFKVALDKDPCSVLPSDYDLFINLSRHSIPRDKSLFWENSHLLVNSFADNTRRFMPLSDVLYGRVADFLSWCRQKNDSGLDYQSCPTSEDCENNPVDSFWKRASIQYSKDSSGVIHVMLNGSEPTGAYPIKGFFADYEIPNLQKEKITRIEIWVMHEIGGPNVESCGEGSMKVLEKRLKDMGFQYSCINDYRPVKLLQCVDHSTHPDCALKSAAAATQRKA

SEQ ID NO: 2373 - protein, 113 aa, Homo Sapiens
NSEACRDGLRAVMECRNVTHLLQQELTEAQKGFQDVEAQAATCNHTVMALMASLDAEKAQGQKKVEELEGEITTLNHKLQDASAEVERLRRENQVLSVRIADKKYYPSSQDSS

SEQ ID NO: 2374 - protein, 288 aa, Homo Sapiens
EEELRSKSKICANVFCGAGRECAVTEKGEPTCLCIEQCKPHKRPVCGSNGKTYLNHCELHRDACLTGSKIQVDYDGHCKEKKSVSPSASPVVCYQSNRDELRRRIIQWLEAEIIPDGWFSKGSNYSEILDKYFKNFDNGDSRLDSSEFLKFVEQNETAINITTYPDQENNKLLRGLCVDALIELSDENADWKLSFQEFLKCLNPSFNPPEKKCALEDETYADGAETEVDCNRCVCACGNWVCTAMTCDGKNQKGAQTQTEEEMTRYVQELQKHQETAEKTKRVSTKEI

SEQ ID NO: 2375 - protein, 735 aa, Homo Sapiens
LRPSRVHNSEENTMRALTLKDILNGTFSYKTFFPNWISGQEYLHQSADNNIVLYNIETGQSYTILSNRTMKSVNASNYGLSPDRQFVYLESDYSKLWRYSYTATYYIYDLSNGEFVRGNELPRPIQYLCWSPVGSKLAYVYQNNIYLKQRPGDPPFQITFNGRENKIFNGIPDWVYEEEMLATKYALWWSPNGKFLAYAEFNDTDIPVIAYSYYGDEQYPRTINIPYPKAGAKNPVVRIFIIDTTYPAYVGPQEVPVPAMIASSDYYFSWLTWVTDERVCLQWLKRVQNVSVLSICDFREDWQTWDCPKTQEHIEESRTGWAGGFFVSTPVFSYDAISYYKIFSDKDGYKHIHYIKDTVENAIQITSGKWEAINIFRVTQDSLFYSSNEFEEYPGRRNIYRISIGSYPPSKKCVTCHLRKERCQYYTASFSDYAKYYALVCYGPGIPISTLHDGRTDQEIKILEENKELENALKNIQLPKEEIKKLEVDEITLWYKMILPPQFDRSKKYPLLIQVYGGPCSQSVRSVFAVNWISYLASKEGMVIALVDGRGTAFQGDKLLYAVYRKLGVYEVEDQITAVRKFIEMGFIDEKRIAIWGWSYGGYVSSLALASGTGLFKCGIAVAPVSSWEYYASVYTERFMGLPTKDDNLEHYKNSTVMARAEYFRNVDYLLIHGTADDNVHFQNSAQIAKALVNAQVDFQAMWYSDQNHGLSGLSTNHLYTHMTHFLKQCFSLSD

SEQ ID NO: 2376 - protein, 657 aa, Homo Sapiens
HKLVCYFTNWAHSRPGPASILPHDLDPFLCTHLIFAFASMNNNQIVAKDLQDEKILYPEFNKLKERNRELKTLLSIGGWNFGTSRFTTMLSTFANREKFIASVISLLRTHDFDGLDLFFLYPGLRGSPMHDRWTFLFLIEELLFAFRKEALLTMRPRLLLSAAVSGVPHIVQTSYDVRFLGRLLDFINVLSYDLHGSWERFTGHNSPLFSLPEDPKSSAYAMNYWRKLGAPSEKLIMGIPTYGRTFRLLKASKNGLQARAIGPASPGKYTKQEGFLAYFEICSFVWGAKKHWIDYQYVPYANKGKEWVGYDNAISFSYKAWFIRREHFGGAMVWTLDMDDVRGTFCGTGPFPLVYVLNDILVRAEFSSTSLPQFWLSSAVNSSSTDPERLAVTTAWTTDSKILPPGGEAGVTEIHGKCENMTITPRGTTVTPTKETVSLGKHTVALGEKTEITGAMTMTSVGHQSMTPGEKALTPVGHQSVTTGQKTLTSVGYQSVTPGEKTLTPVGHQSVTPVSHQSVSPGGTTMTPVHFQTETLRQNTVAPRRKAVAREKVTVPSRNISVTPEGQTMPLRGENLTSEVGTHPRMGNLGLQMEAENRMMLSSSPVIQLPEQTPLAFDNRFVPIYGNHSSVNSVTPQTSPLSLKKEIPENSAVDEEA

SEQ ID NO: 2377 - protein, 166 aa, Homo Sapiens
SKPIDVSRLDLRIGCIITARKHPDADSLYVEEVDVGEIAPRTVVSGLVNHVPLEQMQNRMVILLCNLKPAKMRGVLSQAMVMCASSPEKIEILAPPNGSVPGDRITFDAFPGEPDKELNPKKKIWEQIQPDLHTNDECVATYKGVPFEVKGKGVCRAQTMSNSGIK

SEQ ID NO: 2378 - protein, 532 aa, Homo Sapiens
MPHVIRIGGIFEYADGPNAQVMNAEEHAFRFSANIINRNRTLLPNTTLTYDIQRIHFHDSFEATKKACDQLALGVVAIFGPSQGSCTNAVQSICNALEVPHIQLRWKHHPLDNKDTFYVNLYPDYASLSHAILDLVQYLKWRSATVVYDDSTGLIRLQELIMAPSRYNIRLKIRQLPIDSDDSRPLLKEMKRGREFRIIFDCSHTMAAQILKQAMAMGMMTEYYHFIFTTLDLYALDLEPYRYSGVNLTGFRILNVDNPHVSAIVEKWSMERLQAAPRSESGLLDGVMMTDAALLYDAVHIVSVCYQRAPQMTVNSLQCHRHKAWRFGGRFMNFIKEAQWEGLTGRIVFNKTSGLRTDFDLDIISLKEDGLEKVGVWSPADGLNITEVAKGRGPNVTDSLTNRSLIVTTVLEEPFVMFRKSDRTLYGNDRFEGYCIDLLKELAHILGFSYEIRLVEDGKYGAQDDKGQWNGMVKELIDHKADLAVAPLTITHVREKAIDFSKPFMTLGVSILYRKPNGTNPSVFSFLNPLSP

SEQ ID NO: 2379 - protein, 500 aa, Homo Sapiens
QEQGARSPSEEPPEEEIPKEDGILVLSRHTLGLALREHPALLVEFYAPWCGHCQALAPEYSKAAAVLAAESMVVTLAKVDGPAQRELAEEFGVTEYPTLKFFRNGNRTHPEEYTGPRDAEGIAEWLRRRVGPSAMRLEDEAAAQALIGGRDLVVIGFFQDLQDEDVATFLALAQDALDMTFGLTDRPRLFQQFGLTKDTVVLFKKFDEGRADFPVDEELGLDLGDLSRFLVTHSMRLVTEFNSQTSAKIFAARILNHLLLFVNQTLAAHRELLAGFGEAAPRFRGQVLFVVVDVAADNEHVLQYFGLKAEAAPTLRLVNLETTKKYAPVDGGPVTAASITAFCHAVLNGQVKPYLLSQEIPPDWDQRPVKTLVGKNFEQVAFDETKNVFVKFYAPWCTHCKEMAPAWEALAEKYQDHEDIIIAELDATANELDAFAVHGFPTLKYFPAGPGRKVIEYKSTRDLETFSKFLDNGGVLPTEEPPEEPAAPFPEPPANSTMGS

SEQ ID NO: 2380 - protein, 420 aa, Homo Sapiens
FDWQYINPVAHMKSSAWVNKIQVLMAAASFGQTKIPRGNGPYSVGCTDLMFDHTNKGTFLRLYYPSQDNDRLDTLWIPNKEYFWGLSKFLGTHWLMGNILRLLFGSMTTPANWNSPLRPGEKYPLVVFSHGLGAFRTLYSAIGIDLASHGFIVAAVEHRDRSASATYYFKDQSAAEIGDKSWLYLRTLKQEEETHIRNEQVRQRAKECSQALSLILDIDHGKPVKNALDLKFDMEQLKDSIDREKIAVIGHSFGGATVIQTLSEDQRFRCGIALDAWMFPLGDEVYSRIPQPLFFINSEYFQYPANIIKMKKCYSPDKERKMITIRGSVHQNFADFTFATGKIIGHMLKLKGDIDSNAAIDLSNKASLAFLQKHLGLHKDFDQWDCLIEGDDENLIPGTNINTTNQHIMLQNSSGIEKYN

SEQ ID NO: 2381 - protein, 132 aa, Homo Sapiens
VLLTKGEIRCYCDAAHCVATGYMCKSELSACFSRLLDPQNSNSPLTHGCLDSLASTTDICQAKQARNHSGTTIPTLECCHEDMCNYRGLHDVLSPPRGEASGQGNRYQHDGSRNLITKVQELTSSKELWFRA

SEQ ID NO: 2382 - protein, 234 aa, Homo Sapiens
WETEERPRTREEECHFYAGGQVYPGEASRVSVADHSLHLSKAKISKPAPYWEGTAVIDGEFKELKLTDYRGKYLVFFFYPLDFTFVCPTEIIAFGDRLEEFRSINTEVVACSVDSQFTHLAWINTPRRQGGLGPIRIPLLSDLTHQISKDYGVYLEDSGHTLRGLFIIDDKGILRQITLNDLPVGRSVDETLRLVQAFQYTDKHGEVCPAGWKPGSETIIPDPAGKLKYFDKLN

SEQ ID NO: 2383 - protein, 473 aa, Homo Sapiens
GVNADVEKHLELGKKLLAAGQLADALSQFHAAVDGDPDNYIAYYRRATVFLAMGKSKAALPDLTKVIQLKMDFTAARLQRGHLLLKQGKLDEAEDDFKKVLKSNPSENEEKEAQSQLIKSDEMQRLRSQALNAFGSGDYTAAIAFLDKILEVCVWDAELRELRAECFIKEGEPRKAISDLKAASKLKNDNTEAFYKISTLYYQLGDHELSLSEVRECLKLDQDHKRCFAHYKQVKKLNKLIESAEELIRDGRYTDATSKYESVMKTEPSIAEYTVRSKERICHCFSKDEKPVEAIRVCSEVLQMEPDNVNALKDRAEAYLIEEMYDEAIQDYETAQEHNENDQQIREGLEKAQRLLKQSQKRDYYKILGVKRNAKKQEIIKAYRKLALQWHPDNFQNEEEKKKAEKKFIDIAAAKEVLSDPEMRKKFDDGEDPLDAESQQGGGGNPFHRSWNSWQGFNPFSSGGPFRFKFHFN

SEQ ID NO: 2384 - protein, 445 aa, Homo Sapiens
AKLVCYFTNWAQYRQGEARFLPKDLDPSLCTHLIYAFAGMTNHQLSTTEWNDETLYQEFNGLKKMNPKLKTLLAIGGWNFSTQKFTDMVATANNRQTFVNSAIRFLRKYSFDGLDLDWEYPGSQGSPAVDKERFTTLVQDLANAFQQEAQTSGKERLLLSAAVPAGQTYVDAGYEVDKIAQNLDFVNLMAYDFHGSWEKVTGHNSPLYKRQEESGAAASLNVDAAVQQWLQKGTPASKLILGMPTYGRSFTLASSSDTRVGAPATGSGTPGPFTKEGGMLAYYEVCSWKGATKQRIQDQKVPYIFRDNQWVGFDDVESFKTKVSYLKQKGLGGAMVWALDLDDFAGFSCNQGRYPLIQTLRQELSLPYLPSGTPELEVPKPGQPSEPEHGPSPGQDTFCQGKADGLYPNPRERSSFYSCAAGRLFQQSCPTGLVFSNSCKCCTWN

SEQ ID NO: 2385 - protein, 205 aa, Homo Sapiens
QHYLHIRPAPSDNLPLVDLIEHPDPIFDPKEKDLNETLLRSLLGGHYDPGFMATSPPEDRPGGGGGAAGGAEDLAELDQLLRQRPSGAMPSEIKGLEFSEGLAQGKKQRLSKKLRRKLQMWLWSQTFCPVLYAWNDLGSRFWPRYVKVGSCFSKRSCSVPEGMVCKPSKSVHLTVLRWRCQRRGGQRCGWIPIQYPIISECKCSC

SEQ ID NO: 2386 - protein, 75 aa, Homo Sapiens
GSGCPLLENVISKTINPQVSKTEYKELLQEFIDDNATTNAIDELKECFLNQTDETLSNVEVFMQLIYDSSLCDLF

SEQ ID NO: 2387 - protein, 497 aa, Homo Sapiens
LPVTRYQNNESEDSEEWKGHLAQAPTPPLESSESSEGSKVSSEEQANEDPSDSTQSEEGLGSDDHQYIYRLAGGFSRSTGKGGDDKDDDEDDSGDDTFGDDDSGPGPKDRQEGGNSRLGSDEDSDDTIQASEESAPQGQDSAQDTTSESRELDNEDRVDSKPEGGDSTQESESEEHWVGGGSDGESSHGDGSELDDEGMQSDDPESIRSERGNSRMNSAGMKSKESGENSEQANTQDSGGSQLLEHPSRKIFRKSRISEEDDRSELDDNNTMEEVKSDSTENSNSRDTGLSQPRRDSKGDSQEDSKENLSQEESQNVDGPSSESSQEANLSSQENSSESQEEVVSESRGDNPDPTTSYVEDQEDSDSSEEDSSHTLSHSKSESREEQADSESSESLNFSEESPESPEDENSSSQEGLQSHSSSAESQSEESHSEEDDSDSQDSSRSKEDSNSTESKSSSEEDGQLKNIEIESRKLTVDAYHNKPIGDQDDNDCQDGY

SEQ ID NO: 2388 - protein, 152 aa, Homo Sapiens
IPLGVNSQRGDDVTQATPETFTEDPNLVNDPATDETVLAVLADIAPSTDDLASLSEKNTTAECWDEKFTCTRLYSVHRPVKQCIHQLCFTSLRRMYIVNKEICSRLVCKEHEAMKDELCRQMAGLPPRRLRRSNYFRLPPCENVDLQRPNGL

SEQ ID NO: 2389 - protein, 303 aa, Homo Sapiens
EVEKTACPSGKKAPEIDESLIFYKKWELEACVDAALLATQMDRVNAIPFTYEQLDVLKHKLDELYPQGYPESVIQHLGYLFLKMSPEDIRKWNVTSLETLKALLEVNKGHEMSPQVATLIDRFVKGRGQLDKDTLDTLTAFYPGYLCSLSPEELSSVPPSSIWAVRPQDLDTCDPRQLDVLYPKARLAFQNMNGSEYFVKIQSFLGGAPTEDLKALSQQNVSMDLATFMKLRTDAVLPLTVAEVQKLLGPHVEGLKAEERHRPVRDWILRQRQDDLDTLGLGLQGGIPNGYLVLDLSMQEALS

SEQ ID NO: 2390 - protein, 587 aa, Homo Sapiens
GGVGSLNLEELSEMRYGIEILPLPVMGGQSQSSDVVIVSSKYKQRYECRLPAGAIHFQREREEETPAYQGPGIPELLSPMRDAPCLLKTKDWWTYEFCYGRHIQQYHMEDSEIKGEVLYLGYYQSAFDWDDETAKASKQHRLKRYHSQTYGNGSKCDLNGRPREAEVRFLCDEGAGISGDYIDRVDEPLSCSYVLTIRTPRLCPHPLLRPPPSAAPQAILCHPSLQPEEYMAYVQRQADSKQYGDKIIEELQDLGPQVWSETKSGVAPQKMAGASPTKDDSKDSDFWKMLNEPEDQAPGGEEVPAEEQDPSPEAADSASGAPNDFQNNVQVKVIRSPADLIRFIEELKGGTKKGKPNIGQEQPVDDAAEVPQREPEKERGDPERQREMEEEEDEDEDEDEDEDERQLLGEFEKELEGILLPSDRDRLRSEVKAGMERELENIIQETEKELDPDGLKKESERDRAMLALTSTLNKLIKRLEEKQSPELVKKHKKKRVVPKKPPPSPQPTGKIEIKIVRPWAEGTEEGARWLTDEDTRNLKEIFFNILVPGAEEAQKERQRQKELESNYRRVWGSPGGEGTGDLDEFDF

SEQ ID NO: 2391 - protein, 171 aa, Homo Sapiens
AGPPPIQDGEFTFLLPAGRKQCFYQSAPANASLETEYQVIGGAGLDVDFTLESPQGVLLVSESRKADGVHTVEPTEAGDYKLCFDNSFSTISEKLVFFELIFDSLQDDEEVEGWAEAVEPEEMLDVKMEDIKESIETMRTRLERSIQMLTLLRAFEARDRNLQEGNLERVN

SEQ ID NO: 2392 - protein, 212 aa, Homo Sapiens
ASKAPVCQEITVPMCRGIGYNLTHMPNQFNHDTQDEAGLEVHQFWPLVEIQCSPDLRFFLCSMYTPICLPDYHKPLPPCRSVCERAKAGCSPLMRQYGFAWPERMSCDRLPVLGRDAEVLCMDYNRSEATTAPPRPFPAKPTLPGPPGAPASGGECPAGGPFVCKCREPFVPILKESHPLYNKVRTGQVPNCAVPCYQPSFSADERTFATFW

SEQ ID NO: 2393 - protein, 51 aa, Homo Sapiens
TARFLAFLQATKAQQYVDSYVQESDLSEVTLPPEIQYFTYARDKWLPSDPQ

SEQ ID NO: 2394 - protein, 336 aa, Homo Sapiens
EVLDMADNAFDDEYLKCTDRMEIKYVPQLLKEEKASHQQLDTVWENAKAKWAARKTQIFLPMNFKDNHGIALMAYISEAQEQTPFYHLFSEAVKMAGQSREDYIYGFQFKAFHFYLTRALQLLRKPCEASSKTVVYRTSQGTSFTFGGLNQARFGHFTLAYSAKPQAANDQLTVLSIYTCLGVDIENFLDKESERITLIPLNEVFQVSQEGAGNNLILQSINKTCSHYECAFLGGLKTENCIENLEYFQPIYVYNPGEKNQKLEDHSEKNWKLEDHGEKNQKLEDHGVKILEPTQIPGMKIPEPFPLPEDKSQGNINNPTPGPVPVPGPKSHPSAS

SEQ ID NO: 2395 - protein, 96 aa, Homo Sapiens
MGAVLGVFSLASWVPCLCSGASCLLCSCCPNSKNSTVTRLIYAFILLLSTVVSYIMQRKEMETYLKKIPGFCEGGFKIHEADINADKDCDVLVGYK

SEQ ID NO: 2396 - protein, 227 aa, Homo Sapiens
MSSNVYYYTRMMSQLFLDTPVSKTEKTNFKTLSSMEDFWKFTEGSLLDGLYWKMQPSNQTEADNRSFIFYENLLLGVPRIRQLRVRNGSCSIPQDLRDEIKECYDVYSVSSEDRAPFGPRNGTAWIYTSEKDLNGSSHWGIIATYSGAGYYLDLSRTREETAAQVASLKKNVWLDRGTRATFIDFSVYNANINLFCVVRLLVEFPATGGVIPSWQFQPLKLIRYVTT

SEQ ID NO: 2397 - protein, 285 aa, Homo Sapiens
MRICSFNVRSFGESKQEDKNAMDVIVKVIKRCDIILVMEIKDSNNRICPILMEKLNRNSRRGITYNYVISSRLGRNTYKEQYAFLYKEKLVSVKRSYHYHDYQDGDADVFSREPFVVWFQSPHTAVKDFVIIPLHTTPETSVKEIDELVEVYTDVKHRWKAENFIFMGDFNAGCSYVPKKAWKNIRLRTDPRFVWLIGDQEDTTVKKSTNCAYDRIVLRGQEIVSSVVPKSNSVFDFQKAYKLTEEEALDVSDHFPVEFKLQSSRAFTNSKKSVTLRKKTKSKRS

SEQ ID NO: 2398 - protein, 119 aa, Homo Sapiens
SGRGEAETRECIYYNANWELERTNQSGLERCEGEQDKRLHCYASWRNSSGTIELVKKGCWLDDFNCYDRQECVATEENPQVYFCCCEGNFCNERFTHLPEAGGPEVTYEPPPTAPTLLT

SEQ ID NO: 2399 - protein, 162 aa, Homo Sapiens
SLPTEDCENEKEQAVHNVVQLLPGVGTFYNLGTALYYATQNCLGKARERGRDGAIDLGYDLLMTMAGMSGGPMGLAISAALKPALRSGVQQLIQYYQDQKDANISQPETTKEGLRAISDVSDLEETTTLASFISEVVSSAPYWGWAIIKSYDLDPGAGSLEI

SEQ ID NO: 2400 - protein, 828 aa, Homo Sapiens
AEGWEEGPPTVLSDSPWTNISGSCKGRCFELQEAGPPDCRCDNLCKSYTSCCHDFDELCLKTARGWECTKDRCGEVRNEENACHCSEDCLARGDCCTNYQVVCKGESHWVDDDCEEIKAAECPAGFVRPPLIIFSVDGFRASYMKKGSKVMPNIEKLRSCGTHSPYMRPVYPTKTFPNLYTLATGLYPESHGIVGNSMYDPVFDATFHLRGREKFNHRWWGGQPLWITATKQGVKAGTFFWSVVIPHERRILTILQWLTLPDHERPSVYAFYSEQPDFSGHKYGPFGPEMTNPLREIDKIVGQLMDGLKQLKLHRCVNVIFVGDHGMEDVTCDRTEFLSNYLTNVDDITLVPGTLGRIRSKFSNNAKYDPKAIIANLTCKKPDQHFKPYLKQHLPKRLHYANNRRIEDIHLLVERRWHVARKPLDVYKKPSGKCFFQGDHGFDNKVNSMQTVFVGYGPTFKYKTKVPPFENIELYNVMCDLLGLKPAPNNGTHGSLNHLLRTNTFRPTMPEEVTRPNYPGIMYLQSDFDLGCTCDDKVEPKNKLDELNKRLHTKGSTEERHLLYGRPAVLYRTRYDILYHTDFESGYSEIFLMPLWTSYTVSKQAEVSSVPDHLTSCVRPDVRVSPSFSQNCLAYKNDKQMSYGFLFPPYLSSSPEAKYDAFLVTNMVPMYPAFKRVWNYFQRVLVKKYASERNGVNVISGPIFDYDYDGLHDTEDKIKQYVEGSSIPVPTHYYSIITSCLDFTQPADKCDGPLSVSSFILPHRPDNEESCNSSEDESKWVEELMKMHTARVRDIEHLTSLDFFRKTSRSYPEILTLKTYLHTYESEI

SEQ ID NO: 2401 - protein, 659 aa, Homo Sapiens
QRVGLPGPPGPPGPPGKPGQDGIDGEAGPPGLPGPPGPKGAPGKPGKPGEAGLPGLPGVDGLTGRDGPPGPKGAPGERGSLGPPGPPGLGGKGLPGPPGEAGVSGPPGGIGLRGPPGPSGLPGLPGPPGPPGPPGHPGVLPEGATDLQCPSICPPGPPGPPGMPGFKGPTGYKGEQGEVGKDGEKGDPGPPGPAGLPGSVGLQGPRGLRGLPGPLGPPGDRGPIGFRGPPGIPGAPGKAGDRGERGPEGFRGPKGDLGRPGPKGTPGVAGPSGEPGMPGKDGQNGVPGLDGQKGEAGRNGAPGEKGPNGLPGLPGRAGSKGEKGERGRAGELGEAGPSGEPGVPGDAGMPGERGEAGHRGSAGALGPQGPPGAPGVRGFQGQKGSMGDPGLPGPQGLRGDVGDRGPGGAAGPKGDQGIAGSDGLPGDKGELGPSGLVGPKGESGSRGELGPKGTQGPNGTSGVQGVPGPPGPLGLQGVPGVPGITGKPGVPGKEASEQRIRELCGGMISEQIAQLAAHLRKPLAPGSIGRPGPAGPPGPPGPPGSIGHPGARGPPGYRGPTGELGDPGPRGNQGDRGDKGAAGAGLDGPEGDQGPQGPQGVPGTSKDGQDGAPGEPGPPGDPGLPGAIGAQGTPGICDTSACQGAVLGGVGEKSGSRSS

SEQ ID NO: 2402 - protein, 293 aa, Homo Sapiens
LQLWDTWADEAEKALGPLLARDRRQATEYEYLDYDFLPETEPPEMLRNSTDTTPLTGPGTPESTTVEPAARRSTGLDAGGAVTELTTELANMGNLSTDSAAMEIQTTQPAATEAQTTPLAATEAQTTRLTATEAQTTPLAATEAQTTPPAATEAQTTQPTGLEAQTTAPAAMEAQTTAPAAMEAQTTPPAAMEAQTTQTTAMEAQTTAPEATEAQTTQPTATEAQTTPLAAMEALSTEPSATEALSMEPTTKRGLFIPFSVSSVTHKGIPMAASNLSVNYPVGAPDHISVKQC

SEQ ID NO: 2403 - protein, 295 aa, Homo Sapiens
GKAEELHYPLGERRSDYDREALLGVQEDVDEYVKLGHEEQQKRLQAIIKKIDLDSDGFLTESELSSWIQMSFKHYAMQEAKQQFVEYDKNSDDTVTWDEYNIQMYDRVIDFDENTALDDAEEESFRKLHLKDKKRFEKANQDSGPGLSLEEFIAFEHPEEVDYMTEFVIQEALEEHDKNGDGFVSLEEFLGDYRWDPTANEDPEWILVEKDRFVNDYDKDNDGRLDPQELLPWVVPNNQGIAQEEALHLIDEMDLNGDKKLSEEEILENPDLFLTSEATDYGRQLHDDYFYHDEL

SEQ ID NO: 2404 - protein, 416 aa, Homo Sapiens
NNETEEIKDERAKDVCPVRLESRGKCEEAGECPYQVSLPPLTIQLPKQFSRIEEVFKEVQNLKEIVNSLKKSCQDCKLQADDNGDPGRNGLLLPSTGAPGEVGDNRVRELESEVNKLSSELKNAKEEINVLHGRLEKLNLVNMNNIENYVDSKVANLTFVVNSLDGKCSKCPSQEQIQSRPVQHLIYKDCSDYYAIGKRSSETYRVTPDPKNSSFEVYCDMETMGGGWTVLQARLDGSTNFTRTWQDYKAGFGNLRREFWLGNDKIHLLTKSKEMILRIDLEDFNGVELYALYDQFYVANEFLKYRLHVGNYNGTAGDALRFNKHYNHDLKFFTTPDKDNDRYPSGNCGLYYSSGWWFDACLSANLNGKYYHQKYRGVRNGIFWGTWPGVSEAHPGGYKSSFKEAKMMIRPKHFKP

SEQ ID NO: 2405 - protein, 191 aa, Homo Sapiens; identical to SEQ ID NO: 2054

SEQ ID NO: 2406 - protein, 122 aa, Homo Sapiens
NNIYWREFIKLHYLSPSREFKEYKCDVLMREKEALKGKSFHMFIYSLWFKIQRACINEKGSDRYRNAYVWAPGALKVLECHWEKYNNRYTESRSFSYIEFHCGVDGYVDNIEDLRIIEPISN

SEQ ID NO: 2407 - protein, 94 aa, Homo Sapiens
EKTGVCPELQADQNCTQECVSDSECADNLKCCSAGCATFCSLPNDKEGSCPQVNINFPQLGLCRDQCQVDSQCPGQMKCCRNGCGKVSCVTPNF

SEQ ID NO: 2408 - protein, 648 aa, Homo Sapiens
IPTNARLLSDHSKPTAETVASDNTAIPSLRAEAEENEKETAVSTEDDSHHKAEKSSVLKSKEESHEQSAEQGKSSSQELGLKDQEDSDGHLSVNLEYAPTEGTSDIKEDMSEPQEKKLSENTDFLAPGVSSFTDSNQQESITKREENQEQPRNYSHHQLNRSSKHSQGLRDQGNQEQDPNISNGEEEEEKEPGEVGTHNDNQERKTELPREHANSKQEEDNTQSDDILEESDQPTQVSKMQEDEFDQGNQEQEDNSNAEMEEENASNVNKHIQETEWQSQEGKTGLEAISNHKETEEKTVSEALLMEPTDDGNTTPRNHGVDDDGDDDGDDGGTDGPRHSASDDYFIPSQAFLEAERAQSIAYHLKIEEQREKVHENENIGTTEPGEHQEAKKAENSSNEEETSSEGNMRVHAVDSCMSFQCKRGHICKADQQGKPHCVCQDPVTCPPTKPLDQVCGTDNQTYASSCHLFATKCRLEGTKKGHQLQLDYFGACKSIPTCTDFEVIQFPLRMRDWLKNILMQLYEANSEHAGYLNEEQRNKVKKIYLDEKRLLAGDHPIDLLLRDFKKNYHMYVYPVHWQFSELDQHPMDRVLTHSELAPLRASLVPMEHCITRFFEECDPNKDKHITLKEWGHCFGIKEEDIDENLLF

SEQ ID NO: 2409 - protein, 201 aa, Homo Sapiens
AEGSPGTPDESTPPPRKKKKDIRDYNDADMARLLEQWEKDDDIEEGDLPEHKRPSAPVDFSKIDPSKPESILKMTKKGKTLMMFVTVSGSPTEKETEEITSLWQGSLFNANYDVQRFIVGSDRAIFMLRDGSYAWEIKDFLVGQDRCADVTLEGQVYPGKGGGSKEKNKTKQDKGKKKKEGDLKSRSSKEENRAGNKREDL

SEQ ID NO: 2410 - protein, 50 aa, Homo Sapiens
AHHYSQLTQFTCETTLDSCQCKLPSSEPLSRTFVYRDVTDCTSVTGTFKL

SEQ ID NO: 2411 - protein, 554 aa, Homo Sapiens
LGDHNFLRREIKIEGDLVLGGLFPINEKGTGTEECGRINEDRGIQRLEAMLFAIDEINKDDYLLPGVKLGVHILDTCSRDTYALEQSLEFVRASLTKVDEAEYMCPDGSYAIQENIPLLIAGVIGGSYSSVSIQVANLLRLFQIPQISYASTSAKLSDKSRYDYFARTVPPDFYQAKAMAEILRFFNWTYVSTVASEGDYGETGIEAFEQEARLRNICIATAEKVGRSNIRKSYDSVIRELLQKPNARVVVLFMRSDDSRELIAAASRANASFTWVASDGWGAQESIIKGSEHVAYGAITLELASQPVRQFDRYFQSLNPYNNHRNPWFRDFWEQKFQCSLQNKRNHRRVCDKHLAIDSSNYEQESKIMFVVNAVYAMAHALHKMQRTLCPNTTKLCDAMKILDGKKLYKDYLLKINFTAPFNTNKDADSIVKFDTFGDGMGRYNVFNFQNVGGKYSYLKVGHWAETLSLDVNSIHWSRNSVPTSQCSDACAPNEMKNMQPGDVCCWICIPCEPYEYLADEFTCMDCGSGQWPTADLTGCYDLPEDYIRWEDAW

SEQ ID NO: 2412 - protein, 1119 aa, Homo Sapiens
VTVRDKTEESCPILRIEGHQLTYDNINKLEVSGFDLGDSFSLRRAFCESDKTCFKLGSALLIRDTIKIFPKGLPEEYSVAAMFRVRRNAKKERWFLWQVLNQQNIPQISIVVDGGKKVVEFMFQATEGDVLNYIFRNRELRPLFDRQWHKLGISIQSQVISLYMDCNLIARRQTDEKDTVDFHGRTVIATRASDGKPVDIELHQLKIYCSANLIAQETCCEISDTKCPEQDGFGNIASSWVTAHASKMSSYLPAKQELKDQCQCIPNKGEAGLPGAPGSPGQKGHKGEPGENGLHGAPGFPGQKGEQGFEGSKGETGEKGEQGEKGDPALAGLNGENGLKGDLGPHGPPGPKGEKGDTGPPGPPALPGSLGIQGPQGPPGKEGQRGRRGKTGPPGKPGPPGPPGPPGIQGIHQTLGGYYNKDNKGNDEHEAGGLKGDKGETGLPGFPGSVGPKGQKGEPGEPFTKGEKGDRGEPGVIGSQGVKGEPGDPGPPGLIGSPGLKGQQGSAGSMGPRGPPGDVGLPGEHGIPGKQGIKGEKGDPGGIIGPPGLPGPKGEAGPPGKSLPGEPGLDGNPGAPGPRGPKGERGLPGVHGSPGDIGPQGIGIPGRTGAQGPAGEPGIQGPRGLPGLPGTPGTPGNDGVPGRDGKPGLPGPPGDPIALPLLGDIGALLKNFCGNCQASVPGLKSNKGEEGGAGEPGKYDSMARKGDIGPRGPPGIPGREGPKGSKGERGYPGIPGEKGDEGLQGIPGIPGAPGPTGPPGLMGRTGHPGPTGAKGEKGSDGPPGKPGPPGPPGIPFNERNGMSSLYKIKGGVNVPSYPGPPGPPGPKGDPGPVGEPGAMGLPGLEGFPGVKGDRGPAGPPGIAGMSGKPGAPGPPGVPGEPGERGPVGDIGFPGPEGPSGKPGINGKDGIPGAQGIMGKPGDRGPKGERGDQGIPGDRGSQGERGKPGLTGMKGAIGPMGPPGNKGSMGSPGHQGPPGSPGIPGIPADAVSFEEIKKYINQEVLRIFEERMAVFLSQLKLPAAMLAAQAYGRPGPPGKDGLPGPPGDPGPQGYRGQKGERGEPGIGLPGSPGLPGTSALGLPGSPGAPGPQGPPGPSGRCNPEDCLYPVSHAHQRTGGN

SEQ ID NO: 2413 - protein, 885 aa, Homo Sapiens
RGILESIQRFSLLPTYLPVTYHINNADVSFFLKEANQDIMRNSSLQSRVESFLIYKSRRLPVLNASYGPFSIEQVVPQDLMLPSNPFGFTNKFSLNWKLKAHILRDKVYLSRPKVQVLFHIMGRDWDDRSAGEKLPCLRVFAFRETREVRGSCRLQGDLGLCVAELELLSSWFSPPTVVAGRRKSVDQPEGTPVELYYTVHPGGERGDCVREDARRSNGIRTGHSDIDESGPPLQRIGSIFLYQTHRKPSLRELRLDNSVAIHYIPKTVRKGDVLTFPVSISRNSTEDRFTLRAKVKKGVNIIGVRASSPSIWDVKERTDYTGKYAPAVIVCQKKAAGSENSADGASYEVMQIDVEVEEPGDLPATQLVTWQVEYPGEITSDLGVSKIYVSPKDLIGVVPLAMEAEILNTAILTGKTVAVPVKVVSVEDDGTVTELLESVECRSSDEDVIKVSDRCDYVFVNGKEMKGKVNVVVNFTYQHLSSPLEMTVWVPRLPLQIEVSDTELNQIKGWRVPIVSSRRPAGDSEEEEDDERRGRGCTLQYQHAMVRVLTQFVAEAAGPGGHLAHLLGSDWQVDITELINDFMQVEEPRIAKLQGGQILMGQELGMTTIQILSPLSDTILAEKTITVLDEKVTITDLGVQLVTGLSLSLQLSPGSNRAIFATAVAQELLQRPKQEAAISCWVQFSDGSVTPLDIYDGKDFSLMATSLDEKVVSIHQDPKFKWPIIAAETEGQGTLVKVEMVISESCQKSKRKSVLAVGTANIKVKFGQNDANPNTSDSRHTGAGVHMENNVSDRRPKKPLQEWGSQEGQYYGSSSMGLMEGRGTTTDRSILQKKKGQESLLDDNSHLQTIPSDLTSFPAQVDLPRSNGEMDGNDLMQASKGLSD

SEQ ID NO: 2414 - protein, 127 aa, Homo Sapiens
SSPGAPAISAASFLQDLIHRYGEGDSLTLQQLKALLNHLDVGVGRGNVTQHVQGHRNLSTCFSSGDLFTAHNFSEQSRIGSSELQEFCPTILQQLDSRACTSENQENEENEQTEEGRPSAVEVWGYG

SEQ ID NO: 2415 - protein, 596 aa, Homo Sapiens
AAVQAAEVKVDGSEPKLSKNELKRRLKAEKKVAEKEAKQKELSEKQLSQATAAATNHTTDNGVGPEEESVDPNQYYKIRSQAIHQLKVNGEDPYPHKFHVDISLTDFIQKYSHLQPGDHLTDITLKVAGRIHAKRASGGKLIFYDLRGEGVKLQVMANSRNYKSEEEFIHINNKLRRGDIIGVQGNPGKTKKGELSIIPYEITLLSPCLHMLPHLHFGLKDKETRYRQRYLDLILNDFVRQKFIIRSKIITYIRSFLDELGFLEIETPMMNIIPGGAVAKPFITYHNELDMNLYMRIAPELYHKMLVVGGIDRVYEIGRQFRNEGIDLTHNPEFTTCEFYMAYADYHDLMEITEKMVSGMVKHITGSYKVTYHPDGPEGQAYDVDFTPPFRRINMVEELEKALGMKLPETNLFETEETRKILDDICVAKAVECPPPRTTARLLDKLVGEFLEVTCINPTFICDHPQIMSPLAKWHRSKEGLTERFELFVMKKEICNAYTELNDPMRQRQLFEEQAKAKAAGDDEAMFIDENFCTALEYGLPPTAGWGMGIDRVAMFLTDSNNIKEVLLFPAMKPEDKKENVATTDTLESTTVGTSV

SEQ ID NO: 2416 - protein, 758 aa, Homo Sapiens
NNHYDKILAHSRIRGRDQGPNVCALQQILGTKKKYFSTCKNWYKKSICGQKTTVLYECCPGYMRMEGMKGCPAVLPIDHVYGTLGIVGATTTQRYSDASKLREEIEGKGSFTYFAPSNEAWDNLDSDIRRGLESNVNVELLNALHSHMINKRMLTKDLKNGMIIPSMYNNLGLFINHYPNGVVTVNCARIIHGNQIATNGVVHVIDRVLTQIGTSIQDFIEAEDDLSSFRAAAITSDILEALGRDGHFTLFAPTNEAFEKLPRGVLERIMGDKVASEALMKYHILNTLQCSESIMGGAVFETLEGNTIEIGCDGDSITVNGIKMVNKKDIVTNNGVIHLIDQVLIPDSAKQVIELAGKQQTTFTDLVAQLGLASALRPDGEYTLLAPVNNAFSDDTLSMDQRLLKLILQNHILKVKVGLNELYNGQILETIGGKQLRVFVYRTAVCIENSCMEKGSKQGRNGAIHIFREIIKPAEKSLHEKLKQDKRFSTFLSLLEAADLKELLTQPGDWTLFVPTNDAFKGMTSEEKEILIRDKNALQNIILYHLTPGVFIGKGFEPGVTNILKTTQGSKIFLKEVNDTLLVNELKSKESDIMTTNGVIHVVDKLLYPADTPVGNDQLLEILNKLIKYIQIKFVRGSTFKEIPVTVYKPIIKKYTKIIDGVPVEITEKETREERIITGPEIKYTRISTGGGETEETLKKLLQEEVTKVTKFIEGGDGHLFEDEEIKRLLQGDTPVRKLQANKKVQGSRRRLREGRSQ

SEQ ID NO: 2417 - protein, 424 aa, Homo Sapiens
QTPNYTRPVFLCGGDVKGESGYVASEGFPNLYPPNKECIWTITVPEGQTVSLSFRVFDLELHPACRYDALEVFAGSGTSGQRLGRFCGTFRPAPLVAPGNQVTLRMTTDEGTGGRGFLLWYSGRATSGTEHQFCGGRLEKAQGTLTTPNWPESDYPPGISCSWHIIAPPDQVIALTFEKFDLEPDTYCRYDSVSVFNGAVSDDSRRLGKFCGDAVPGSISSEGNELLVQFVSDLSVTADGFSASYKTLPRGTAKEGQGPGPKRGTEPKVKLPPKSQPPEKTEESPSAPDAPTCPKQCRRTGTLQSNFCASSLVVTATVKSMVREPGEGLAVTVSLIGAYKTGGLDLPSPPTGASLKFYVPCKQCPPMKKGVSYLLMGQVEENRGPVLPPESFVVLHRPNQDQILTNLSKRKCPSQPVRAAASQD

SEQ ID NO: 2418 - protein, 354 aa, Homo Sapiens
MGRLVAVGLLGIALALLGERLLALRNRLKASREVESVDLPHCHLIKGIEAGSEDIDILPNGLAFFSVGLKFPGLHSFAPDKPGGILMMDLKEEKPRARELRISRGFDLASFNPHGISTFIDNDDTVYLFVVNHPEFKNTVEIFKFEEAENSLLHLKTVKHELLPSVNDITAVGPAHFYATNDHYFSDPFLKYLETYLNLHWANVVYYSPNEVKVVAEGFDSANGINISPDDKYIYVADILAHEIHVLEKHTNMNLTQLKVLELDTLVDNLSIDPSSGDIWVGCHPNGQKLFVYDPNNPPSSEVLRIQNILSEKPTVTTVYANNGSVLQGSSVASVYDGKLLIGTLYHRALYCEL

SEQ ID NO: 2419 - protein, 354 aa, Homo Sapiens
MGKLVALVLLGVGLSLVGEMFLAFRERVNASREVEPVEPENCHLIEELENGSEDIDILPSGLAFISSGLKYPGMPNFAPDEPGKIFLMDLNEQNPRAQALEISGGFDKELFNPHGISIFIDKDNTVYLYVVNHPHMKSTVEIFKFEEQQRSLVYLKTIKHELLKSVNDIVVLGPEQFYATRDHYFTNSLLSFFEMILDLRWTYVLFYSPREVKVVAKGFCSANGITVSADQKYVYVADVAAKNIHIMEKHDNWDLTQLKVIQLGTLVDNLTVDPATGDILAGCHPNPMKLLNYNPEDPPGSEVLRIQNVLSEKPRVSTVYANNGSVLQGTSVASVYHGKILIGTVFHKTLYCEL

SEQ ID NO: 2420 - protein, 302 aa, Homo Sapiens
KPTVRKERVVRPDSELGERPPEDNQSFQYDHEAFLGKEDSKTFDQLTPDESKERLGKIVDRIDNDGDGFVTTEELKTWIKRVQKRYIFDNVAKVWKDYDRDKDDKISWEEYKQATYGYYLGNPAEFHDSSDHHTFKKMLPRDERRFKAADLNGDLTATREEFTAFLHPEEFEHMKEIVVLETLEDIDKNGDGFVDQDEYIADMFSHEENGPEPDWVLSEREQFNEFRDLNKDGKLDKDEIRHWILPQDYDHAQAEARHLVYESDKNKDEKLTKEEILENWNMFVGSQATNYGEDLTKNHDEL

SEQ ID NO: 2421 - protein, 439 aa, Homo Sapiens
CGPGRGFGKRRHPKKLTPLAYKQFIPNVAEKTLGASGRYEGKISRNSERFKELTPNYNPDIIFKDEENTGADRLMTQRCKDKLNALAISVMNQWPGVKLRVTEGWDEDGHHSEESLHYEGRAVDITTSDRDRSKYGMLARLAVEAGFDWVYYESKAHIHCSVKAENSVAAKSGGCFPGSATVHLEQGGTKLVKDLSPGDRVLAADDQGRLLYSDFLTFLDRDDGAKKVFYVIETREPRERLLLTAAHLLFVAPHNDSATGEPEASSGSGPPSGGALGPRALFASRVRPGQRVYVVAERDGDRRLLPAAVHSVTLSEEAAGAYAPLTAQGTILINRVLASCYAVIEEHSWAHRAFAPFRLAHALLAALAPARTDRGGDSGGGDRGGGGGRVALTAPGAADAPGAGATAGIHWYSQLLYQIGTWLLDSEALHPLGMAVKSS

SEQ ID NO: 2422 - protein, 496 aa, Homo Sapiens
KSIGTFSDPCKDPTRITSPNDPCLTGKGDSSGFSSYSGSSSSGSSISSARSSGGGSSGSSSGSSIAQGGSAGSFKPGTGYSQVSYSSGSGSSLQGASGSSQLGSSSSHSGSSGSHSGSSSHSSSSSSFQFSSSSFQVGNGSALPTNDNSYRGILNPSQPGQSSSSSQTFGVSSSGQSVSSNQRPCSSDIPDSPCSGGPIVSHSGPYIPSSHSVSGGQRPVVVVVDQHGSGAPGVVQGPPCSNGGLPGKPCPPITSVDKSYGGYEVVGGSSDSYLVPGMTYSKGKIYPVGYFTKENPVKGSPGVPSFAAGPPISEGKYFSSNPIIPSQSAASSAIAFQPVGTGGVQLCGGGSTGSKGPCSPSSSRVPSSSSISSSSGLPYHPCGSASQSPCSPPGTGSFSSSSSSQSSGKIILQPCGSKSSSSGHPCMSVSSLTLTGGPDGSPHPDPSAGAKPCGSSSAGKIPCRSIRDILAQVKPLGPQLADPEVFLPQGELLDSP

SEQ ID NO: 2423 - protein, 119 aa, Homo Sapiens
EPLEKVASVGNSRPTGQQLESLGLLAPGEQSLPCTERKPAATARLSRRGTSLSPPPESSGSPQQPGLSAPHSRQIPAPQGAVLVQREKDLPNYNWNSFGLRFGKREAAPGNHGRSAGRG

SEQ ID NO: 2424 - protein, 71 aa, Homo Sapiens
QPGAASAAINASVGAAGSAENAPSKEVLDSFLDLARNIFPSNLVSAAFRSYSTTYEERNITGTRVKVPVGQ

SEQ ID NO: 2425 - protein, 364 aa, Homo Sapiens
YKLVCYFTNWSQDRQEPGKFTPENIDPFLCSHLIYSFASIENNKVIIKDKSEVMLYQTINSLKTKNPKLKILLSIGGYLFGSKGFHPMVDSSTSRLEFINSIILFLRNHNFDGLDVSWIYPDQKENTHFTVLIHELAEAFQKDFTKSTKERLLLTVGVSAGRQMIDNSYQVEKLAKDLDFINLLSFDFHGSWEKPLITGHNSPLSKGWQDRGPSSYYNVEYAVGYWIHKGMPSEKVVMGIPTYGHSFTLASAETTVGAPASGPGAAGPITESSGFLAYYEICQFLKGAKITRLQDQQVPYAVKGNQWVGYDDVKSMETKVQFLKNLNLGGAMIWSIDMDDFTGKSCNQGPYPLVQAVKRSLGSL

SEQ ID NO: 2426 - protein, 410 aa, Homo Sapiens
QDFGPTRFICTSVPVDADMCAASVAAGGAEELRSSVLQLRETVLQQKETILSQKETIRELTAKLGRCESQSTLDPGAGEARAGGGRKQPGSGKNTMGDLSRTPAAETLSQLGQTLQSLKTRLENLEQYSRLNSSSQTNSLKDLLQSKIDELERQVLSRVNTLEEGKGGPRNDTEERVKIETALTSLHQRISELEKGQKDNRPGDKFQLTFPLRTNYMYAKVKKSLPEMYAFTVCMWLKSSATPGVGTPFSYAVPGQANELVLIEWGNNPMEILINDKVAKLPFVINDGKWHHICVTWTTRDGVWEAYQDGTQGGSGENLAPYHPIKPQGVLVLGQEQDTLGGGFDATQAFVGELAHFNIWDRKLTPGEVYNLATCSTKALSGNVIAWAESHIEIYGGATKWTFEACRQIN

SEQ ID NO: 2427 - protein, 214 aa, Homo Sapiens
KGCVGCATEERLFHKLFSHYNQFIRPVENVSDPVTVHFEVAITQLANVDEVNQIMETNLWLRHIWNDYKLRWDPMEYDGIETLRVPADKIWKPDIVLYNNAVGDFQVEGKTKALLKYNGMITWTPPAIFKSSCPMDITFFPFDHQNCSLKFGSWTYDKAEIDLLIIGSKVDMNDFWENSEWEIIDASGYKHDIKYNCCEEIYTDITYSFYIRRL

SEQ ID NO: 2428 - protein, 121 aa, Homo Sapiens
RPQERMVGELRDLSPDDPQVQKAAQAAVASYNMGSNSIYYFRDTHIIKAQSQLVAGIKYFLTMEMGSTDCRKTRVTGDHVDLTTCPLAAGAQQEKLRCDFEVLVVPWQNSSQLLKHNCVQM

SEQ ID NO: 2429 - protein, 226 aa, Homo Sapiens
ETTTQGPGVLLPLPKGACTGWMAGIPGHPGHNGAPGRDGRDGTPGEKGEKGDPGLIGPKGDIGETGVPGAEGPRGFPGIQGRKGEPGEGAYVYRSAFSVGLETYVTIPNMPIRFTKIFYNQQNHYDGSTGKFHCNIPGLYYFAYHITVYMKDVKVSLFKKDKAMLFTYDQYQENNVDQASGSVLLHLEVGDQVWLQVYGEGERNGLYADNDNDSTFTGFLLYHDTN

SEQ ID NO: 2430 - protein, 56 aa, Homo Sapiens
AQFVSSVPRCDLVDLGEGKICFCCEEFQPAKCTDKENALKLFPVQPCSAVHLLLKK

SEQ ID NO: 2431 - protein, 378 aa, Homo Sapiens
EQQVPLVLWSSDRDLWAPAADTHEGHITSDLQLSTYLDPALELGPRNVLLFLQDKLSIEDFTAYGGVFGNKQDSAFSNLENALDLAPSSLVLPAVDWYAVSTLTTYLQEKLGASPLHVDLATLRELKLNASLPALLLIRLPYTASSGLMAPREVLTGNDEVIGQVLSTLKSEDVPYTAALTAVRPSRVARDVAVVAGGLGRQLLQKQPVSPVIHPPVSYNDTAPRILFWAQNFSVAYKDQWEDLTPLTFGVQELNLTGSFWNDSFARLSLTYERLFGTTVTFKFILANRLYPVSARHWFTMERLEVHSNGSVAYFNASQVTGPSIYSFHCEYVSSLSKKGSLLVARTQPSPWQMMLQDFQIQAFNVMGEQFSYASDCA

SEQ ID NO: 2432 - protein, 82 aa, Homo Sapiens
GSMISNMNASRAEFQAKIDSIKQYMQFRKVTKDLETRVIRWFDYLWANKKTVDEKEVLKSLPDKLKAEIAINVHLDTLKKVR

SEQ ID NO: 2433 - protein, 118 aa, Homo Sapiens
QSTDNDVNYEDFTFTIPDVEDSSQRPDQGPQRPPPEGLLPRPPGDSGNQDDGPQQRPPKPGGHHRHPPPPPFQNQQRPPQRGHRQLSLPRFPSVSLQEASSFFRRDRPARHPQEQPLW

SEQ ID NO: 2434 - protein, 223 aa, Homo Sapiens
KLEVEGNFYSENVSRILDNLLEGYDNRLRPGFGGAVTEVKTDIYVTSFGPVSDVEMEYTMDVFFRQTWTDERLKFGGPTEILSLNNLMVSKIWTPDTFFRNGKKSIAHNMTTPNKLFRIMQNGTILYTMRLTINADCPMRLVNFPMDGHACPLKFGSYAYPKSEIIYTWKKGPLYSVEVPEESSSLLQYDLIGQTVSSETIKSNTGEYVIMTVYFHLQRKMGY

SEQ ID NO: 2435 - protein, 526 aa, Homo Sapiens
SVHFNDPKYPQQWHLNNRRSPGRDINVTGVWERNVTGRGVTVVVVDDGVEHTIQDIAPNYSPEGSYDLNSNDPDPMPHPDVENGNHHGTRCAGEIAAVPNNSFCAVGVAYGSRIAGIRVLDGPLTDSMEAVAFNKHYQINDIYSCSWGPDDDGKTVDGPHQLGKAALQHGVIAGRQGFGSIFVVASGNGGQHNDNCNYDGYANSIYTVTIGAVDEEGRMPFYAEECASMLAVTFSGGDKMLRSIVTTDWDLQKGTGCTEGHTGTSAAAPLAAGMIALMLQVRPCLTWRDVQHIIVFTATRYEDRRAEWVTNEAGFSHSHQHGFGLLNAWRLVNAAKIWTSVPYLASYVSPVLKENKAIPQSPRSLEVLWNVSRMDLEMSGLKTLEHVAVTVSITHPRRGSLELKLFCPSGMMSLIGAPRSMDSDPNGFNDWTFSTVRCWGERARGTYRLVIRDVGDESFQVGILRQWQLTLYGSVWSAVDIRDRQRLLESAMSGKYLHDDFALPCPPGLKIPEEDGYTITPNTLKT

SEQ ID NO: 2436 - protein, 48 aa, Homo Sapiens
VPIYEKKYGQVPMCDAGEQCAVRKGARIGKLCDCPRGTSCNSFLLKCL

SEQ ID NO: 2437 - protein, 63 aa, Homo Sapiens
MGNCLHRAELSPSTENSSQLDFEDVWNSSYGVNDSFPDGDYGANLEAAAPCHSCNLLDDSALP

SEQ ID NO: 2438 - protein, 232 aa, Homo Sapiens
WAVIRIGPNGCDSMEFHESGLLRFKQVSDMGVIHPLYKSTVGGRRNENLVITGNNQPIVFQQGTTKLSVENNKTSITSDIGMQFFDPRTQNILFSTDYETHEFHLPSGVKSLNVQKASTERITSNATSDLNIKVDGRAIVRGNEGVFIMGKTIEFHMGGNMELKAENSIILNGSVMVSTTRLPSSSSGDQLGSGDWVRYKLCMCADGTLFKVQVTSQNMGCQISDNPCGNTH

SEQ ID NO: 2439 - protein, 267 aa, Homo Sapiens
QQTTLHPLVGRVFVHTLDHETFLSLPEHVAVPPAVHITYHAHLQGHPDLPRWLRYTQRSPHHPGFLYGSATPEDRGLQVIEVTAYNRDSFDTTRQRLVLEIGDPEGPLLPYQAEFLVRSHDAEEVLPSTPASRFLSALGGLWEPGELQLLNVTSALDRGGRVPLPIEGRKEGVYIKVGSASPFSTCLKMVASPDSHARCAQGQPPLLSCYDTLAPHFRVDWCNVTLVDKSVPEPADEVPTPGDGILEHDPFFCPPTEAPDRDFLVDA

SEQ ID NO: 2440 - protein, 521 aa, Homo Sapiens
ASEGGFTATGQRQLRPEHFQEVGYAAPPSPPLSRSLPMDHPDSSQHGPPFEGQSQVQPPPSQEATPLQQEKLLPAQLPAEKEVGPPLPQEAVPLQKELPSLQHPNEQKEGMPAPFGDQSHPEPESWNAAQHCQQDRSQGGWGHRLDGFPPGRPSPDNLNQICLPNRQHVVYGPWNLPQSSYSHLTRQGETLNFLEIGYSRCCHCRSHTNRLECAKLVWEEAMSRFCEAEFSVKTRPHWCCTRQGEARFSCFQEEAPQPHYQLRACPSHQPDISSGLELPFPPGVPTLDNIKNICHLRRFRSVPRNLPATDPLQRELLALIQLEREFQRCCRQGNNHTCTWKAWEDTLDKYCDREYAVKTHHHLCCRHPPSPTRDECFARRAPYPNYDRDILTIDISRVTPNLMGHLCGNQRVLTKHKHIPGLIHNMTARCCDLPFPEQACCAEEEKLTFINDLCGPRRNIWRDPALCCYLSPGDEQVNCFNINYLRNVALVSGDTENAKGQGEQGSTGGTNISSTSEPKEE

SEQ ID NO: 2441 - protein, 287 aa, Homo Sapiens
AEAPCGVAPQARITGGSSAVAGQWPWQVSITYEGVHVCGGSLVSEQWVLSAAHCFPSEHHKEAYEVKLGAHQLDSYSEDAKVSTLKDIIPHPSYLQEGSQGDIALLQLSRPITFSRYIRPICLPAANASFPNGLHCTVTGWGHVAPSVSLLTPKPLQQLEVPLISRETCNCLYNIDAKPEEPHFVQEDMVCAGYVEGGKDACQGDSGGPLSCPVEGLWYLTGIVSWGDACGARNRPGVYTLASSYASWIQSKVTELQPRVVPQTQESQPDSNLCGSHLAFSSAPAQG

SEQ ID NO: 2442 - protein, 132 aa, Homo Sapiens [sequence omitted]

SEQ ID NO: 2443 - protein, 107 aa, Homo Sapiens
GPMPKLADRKLCADQECSHPISMAVALQDYMAPDCRFLTIHRGQVVYVFSKLKGRGRLFWGGSVQGDYYGDLAARLGYFPSSIVREDQTLKPGKVDVKTDKWDFYCQ

SEQ ID NO: 2444 - protein, 333 aa, Homo Sapiens
VSPSASAWPEEKNYHQPAILNSSALRQIAEGTSISEMWQNDLQPLLIERYPGSPGSYAARQHIMQRIQRLQADWVLEIDTFLSQTPYGYRSFSNIISTLNPTAKRHLVLACHYDSKYFSHWNNRVFVGATDSAVPCAMMLELARALDKKLLSLKTVSDSKPDLSLQLIFFDGEEAFLHWSPQDSLYGSRHLAAKMASTPHPPGARGTSQLHGMDLLVLLDLIGAPNPTFPNFFPNSARWFERLQAIEHELHELGLLKDHSLEGRYFQNYSYGGVIQDDHIPFLRRGVPVLHLIPSPFPEVWHTMDDNEENLDESTIDNLNKILQVFVLEYLHL

SEQ ID NO: 2445 - protein, 377 aa, Homo Sapiens
QRLPRMQEDSPLGGGSSGEDDPLGEEDLPSEEDSPREEDPPGEEDLPGEEDLPGEEDLPEVKPKSEEEGSLKLEDLPTVEAPGDPQEPQNNAHRDKEGDDQSHWRYGGDPPWPRVSPACAGRFQSPVDIRPQLAAFCPALRPLELLGFQLPPLPELRLRNNGHSVQLTLPPGLEMALGPGREYRALQLHLHWGAAGRPGSEHTVEGHRFPAEIHVVHLSTAFARVDEALGRPGGLAVLAAFLEEGPEENSAYEQLLSRLEEIAEEGSETQVPGLDISALLPSDFSRYFQYEGSLTTPPCAQGVIWTVFNQTVMLSAKQLHTLSDTLWGPGDSRLQLNFRATQPLNGRVIEASFPAGVDSSPRAAEPVQLNSCLAAGD

SEQ ID NO: 2446 - protein, 378 aa, Homo Sapiens
KAQVNPAICRYPLGMSGGQIPDEDITASSQWSESTAAKYGRLDSEEGDGAWCPEIPVEPDDLKEFLQIDLHTLHFITLVGTQGRHAGGHGIEFAPMYKINYSRDGTRWISWRNRHGKQVLDGNSNPYDIFLKDLEPPIVARFVRFIPVTDHSMNVCMRVELYGCVWLDGLVSYNAPAGQQFVLPGGSIIYLNDSVYDGAVGYSMTEGLGQLTDGVSGLDDFTQTHEYHVWPGYDYVGWRNESATNGYIEIMFEFDRIRNFTTMKVHCNNMFAKGVKIFKEVQCYFRSEASEWEPNAISFPLVLDDVNPSARFVTVPLHHRMASAIKCQYHFADTWMMFSEITFQSDAAMYNNSEALPTSPMAPTTYDPMLKVDDSNTR

SEQ ID NO: 2447 - protein, 737 aa, Homo Sapiens
GRGGDGGEPSQLPHCPSVSPSAQPWTHPGQSQLFADLSREELTAVMRFLTQRLGPGLVDAAQARPSDNCVFSVELQLPPKAAALAHLDRGSPPPAREALAIVFFGRQPQPNVSELVVGPLPHPSYMRDVTVERHGGPLPYHRRPVLFQEYLDIDQMIFNRELPQASGLLHHCCFYKHRGRNLVTMTTAPRGLQSGDRATWFGLYYNISGAGFFLHHVGLELLVNHKALDPARWTIQKVFYQGRYYDSLAQLEAQFEAGLVNVVLIPDNGTGGSWSLKSPVPPGPAPPLQFYPQGPRFSVQGSRVASSLWTFSFGLGAFSGPRIFDVRFQGERLVYEISLQEALAIYGGNSPAAMTTRYVDGGFGMGKYTTPLTRGVDCPYLATYVDWHFLLESQAPKTIRDAFCVFEQNQGLPLRRHHSDLYSHYFGGLAETVLVVRSMSTLLNYDYVWDTVFHPSGAIEIRFYATGYISSAFLFGATGKYGNQVSEHTLGTVHTHSAHFKVDLDVAGLENWVWAEDMVFVPMAVPWSPEHQLQRLQVTRKLLEMEEQAAFLVGSATPRYLYLASNHSNKWGHPRGYRIQMLSFAGEPLPQNSSMARGFSWERYQLAVTQRKEEEPSSSSVFNQNDPWAPTVDFSDFINNETIAGKDLVAWVTAGFLHIPHAEDIPNTVTVGNGVGFFLRPYNFFDEDPSFYSADSIYFRGDQDAGACEVNPLACLPQAAACAPDLPAFSHGGFSHN

SEQ ID NO: 2448 - protein, 777 aa, Homo Sapiens
TKDISINIYHSETKDIDNPPRNETTESTEKMYKMSTMRRIFDLAKHRTKRSAFFPTGVKVCPQESMKQILDSLQAYYRLRVCQEAVWEAYRIFLDRIPDTGEYQDWVSICQQETFCLFDIGKNFSNSQEHLDLLQQRIKQRSFPDRKDEISAEKTLGEPGETIVISTDVANVSLGPFPLTPDDTLLNEILDNTLNDTKMPTTERETEFAVLEEQRVELSVSLVNQKFKAELADSQSPYYQELAGKSQLQMQKIFKKLPGFKKIHVLGFRPKKEKDGSSSTEMQLTAIFKRHSAEAKSPASDLLSFDSNKIESEEVYHGTMEEDKQPEIYLTATDLKRLISKALEEEQSLDVGTIQFTDEIAGSLPAFGPDTQSELPTSFAVITEDATLSPELPPVEPQLETVDGAEHGLPDTSWSPPAMASTSLSEAPPFFMASSIFSLTDQGTTDTMATDQTMLVPGLTIPTSDYSAISQLALGISHPPASSDDSRSSAGGEDMVRDLDEMDLSDTPAPSEVPELSEYVSVPDHFLEDTTPVSALQYITTSSMTIAPKGRELVVFFSLRVANMAFSNDLFNKSSLEYRALEQQFTQLLVPYLRSNLTGFKQLEILNFRNGSVIVNSKMKFAKSVPYNLTKAVHGVLEDFRSAAAQQLHLEIDSYSLNIEPADQADPCKFLACGEFAQCVKNEWTEEAECRCKPGYDSQGSLDGLEPGLCGPGTKECEVLQGKGAPCRLPDHSENQAYKTSVKKFQNQQNNKVISKRNSELLTVEYEEFNHQDWEGN

SEQ ID NO: 2449 - protein, 450 aa, Homo Sapiens
KEVCYERLGCFKDGLPWTRTFSTELVGLPWSPEKINTRFLLYTIHNPNAYQEISAVNSSTIQASYFGTDKITRINIAGWKTDGKWQRDMCNVLLQLEDINCINLDWINGSREYIHAVNNLRVVGAEVAYFIDVLMKKFEYSPSKVHLIGHSLGAHLAGEAGSRIPGLGRITGLDPAGPFFHNTPKEVRLDPSDANFVDVIHTNAARILFELGVGTIDACGHLDFYPNGGKHMPGCEDLITPLLKFNFNAYKKEMASFFDCNHARSYQFYAESILNPDAFIAYPCRSYTSFKAGNCFFCSKEGCPTMGHFADRFHFKNMKTNGSHYFLNTGSLSPFARWRHKLSVKLSGSEVTQGTVFLRVGGAIGKTGEFAIVSGKLEPGMTYTKLIDADVNVGNITSVQFIWKKHLFEDSQNKLGAEMVINTSGKYGYKSTFCSQDIMGPNILQNLKPC

SEQ ID NO: 2450 - protein, 100 aa, Homo Sapiens
QPTMTQTSSSQGGLGGLSLTTEPVSSNPGYIPSSEANRPSHLSSTGTPGAGVPSSGRDGGTSRDTFQTVPPNSTTMSLSMREDATILPSPTSETVLTVAA

SEQ ID NO: 2451 - protein, 111 aa, Homo Sapiens
SSEWSVGQVSTNTSYKAFSSEWISADIGLQVGLGGVNITLTGTPVQQLNETINYNEEFTWRLGENYAEEYAKALEKGLPDPVLYLAEKFTPRSPCGLYRQYRLAGHYTSAM

SEQ ID NO: 2452 - protein, 106 aa, Homo Sapiens
VGTVNTNTSYKAFSAARVTARVRLLVGLEGINITLTGTPVHQLNETIDYNEQFTWRLKENYAAEYANALEKGLPDPVLYLAEKFTPSSPCGLYHQYHLAGHYASAT

SEQ ID NO: 2453 - protein, 71 aa, Homo Sapiens
GIFNKRDFTRWPKPRCKMYIPLDPDYNADCPNVTAPVCASNGHTFQNECFFCVEQREFHYRIKFEKYGKCD

SEQ ID NO: 2454 - protein, 199 aa, Homo Sapiens
HGCLHCHSNFSKKFSFYRHHVNFKSWWVGDIPVSGALLTDWSDDTMKELHLAIPAKITREKLDQVATAVYQMMDQLYQGKMYFPGYFPNELRNIFREQVHLIQNAIIESRIDCQHRCGIFQYETISCNNCTDSHVACFGYNCESSAQWKSAVQGLLNYINNWHKQDTSMSLVSPALRCLEPPHLANLTLEDAAECLKQH

SEQ ID NO: 2455 - protein, 817 aa, Homo Sapiens
CGQAPLDPVYLPAALELLDAPEHFRVQQVGHYPPANSSLSSRSETFLLLQPWPRAQPLLRASYPPFATQQVVPPRVTEPHQRPVPWDVRAVSVEAAVTPAEPYARVLFHLKGQDWPPGSGSLPCARLHATHPAGTAHQACRFQPSLGACVVELELPSHWFSQASTTRAELAYTLEPAAEGPGGCGSGEENDPGEQALPVGGVELRPADPPQYQEVPLDEAVTLRVPDMPVRPGQLFSATLLLRHNFTASLLTLRIKVKKGLHVTAARPAQPTLWTAKLDRFKGSRHHTTLITCHRAGLTEPDSSPLELSEFLWVDFVVENSTGGGVAVTRPVTWQLEYPGQAPEAEKDKMVWEILVSERDIRALIPLAKAEELVNTAPLTGVPQHVPVRLVTVDGGGALVEVTEHVGCESANTQVLQVSEACDAVFVAGKESRGARGVRVDFWWRRLRASLRLTVWAPLLPLRIELTDTTLEQVRGWRVPGPAEGPAEPAAEASDEAERRARGCHLQYQRAGVRFLAPFAAHPLDGGRRLTHLLGPDWLLDVSHLVAPHARVLDSRVASLEGGRVVVGREPGVTSIEVRSPLSDSILGEQALAVTDDKVSVLELRVQPVMGISLTLSRGTAHPGEVTATCWAQSALPAPKQEVALSLWLSFSDHTVAPAELYDRRDLGLSVSAEEPGAILPAEEQGAQLGVVVSGAGAEGLPLHVALHPPEPCRRGRHRVPLASGTAWLGLPPASTPAPALPSSPAWSPPATEATMGGKRQVAGSVGGNTGVRGKFERAEEEARKEETEAREEEEEEEEEMVPAPQHVTELELGMYA

SEQ ID NO: 2456 - protein, 215 aa, Homo Sapiens
LNRRKKQVGTGLGGNCTGCIICSEENGCSTCQQRLFLFIRREGIRQYGKCLHDCPPGYFGIRGQEVNRCKKCGATCESCFSQDFCIRCKRQFYLYKGKCLPTCPPGTLAHQNTRECQGECELGPWGGWSPCTHNGKTCGSAWGLESRVREAGRAGHEEAATCQVLSESRKCPIQRPCPGERSPGQKKGRKDRRPRKDRKLDRRLDVRPRQPGLQP

SEQ ID NO: 2457 - protein, 111 aa, Homo Sapiens
FQPPQLGRTNMHYSKLPRTAIETEFKQNVGPPPKDLTTEVYFPSIKSRSHLPAVFYNQYFKHPKCVGEYGPKNGAERQIEEWKVLPTTMMFSMLADCVLKSTPIPILGVAM

SEQ ID NO: 2458 - protein, 631 aa, Homo Sapiens
EMDEVGVQKCKNALKLPVLEVLPGGGWDNLRNVDMGRVMELTYSNCRTTEDGQYIIPDEIFTIPQKQSNLEMNSEILESWANYQSSTSYSINTELSLFSKVNGKFSTEFQRMKTLQVKDQAITTRVQVRNLVYTVKINPTLELSSGFRKELLDISDRLENNQTRMATYLAELLVLNYGTHVTTSVDAGAALIQEDHLRASFLQDSQSSRSAVTASAGLAFQNTVNFKFEENYTSQNVLTKSYLSNRTNSRVQSIGGVPFYPGITLQAWQQGITNHLVAIDRSGLPLHFFINPNMLPDLPGPLVKKVSKTVETAVKRYYTFNTYPGCTDLNSPNFNFQANTDDGSCEGKMTNFSFGGVYQECTQLSGNRDVLLCQKLEQKNPLTGDFSCPSGYSPVHLLSQIHEEGYNHLECHRKCTLLVFCKTVCEDVFQVAKAEFRAFWCVASSQVPENSGLLFGGLFSSKSINPMTNAQSCPAGYFPLRLFENLKVCVSQDYELGSRFAVPFGGFFSCTVGNPLVDPAISRDLGALSLKKCPGGFSQHPALISDGCQVSYCVKSGLFTGGSLPPARLPPFTRPPLMSQAATNTVIVTNSENARSWIKDSQTHQWRLGEPIELRRAMNVIHGDGGGLSGG

SEQ ID NO: 2459 - protein, 424 aa, Homo Sapiens
KSISCLKPARLPIYQRKPFIAAWNAPTDQCLIKYNLRLNLKMFPVIGSPLAKARGQNVTIFYVNRLGYYPWYTSQGVPINGGLPQNISLQVHLEKADQDINYYIPAEDFSGLAVIDWEYWRPQWARNWNSKDVYRQKSRKLISDMGKNVSATDIEYLAKVTFEESAKAFMKETIKLGIKSRPKGLWGYYLYPDCHNYNVYAPNYSGSCPEDEVLRNNELSWLWNSSAALYPSIGVWKSLGDSENILRFSKFRVHESMRISTMTSHDYALPVFVYTRLGYRDEPLFFLSKQDLVSTIGESAALGAAGIVIWGDMNLTSSKANCTKVKQFVSSDLGSYIANVTRAAEVCSLHLCRNNGRCIRKMWNAPSYLHLNPASYHIEASEDGEFTVKGKASDTDLAVMADTFSCHCYQGYEGADCREIKTAD

SEQ ID NO: 2460 - protein, 243 aa, Homo Sapiens
SRGIKGKRQRRISAEGSQACAKGCELCSEVNGCLKCSPKLFILLERNDIRQVGVCLPSCPPGYFDARNPDMNKCIKCKIEHCEACFSHNFCTKCKEGLYLHKGRCYPACPEGSSAANGTMECSSPAQCEMSEWSPWGPCSKKQQLCGFRRGSEERTRRVLHAPVGDHAACSDTKETRRCTVRRVPCPEGQKRRKGGQGRRENANRNLARKESKEAGAGSRRRKGQQQQQQQGTVGPLTSAGPA

SEQ ID NO: 2461 - protein, 565 aa, Homo Sapiens
QTDATPAVTTEGLNSTEAALATFGTFPSTRPPGTPRAPGPSSGPRPTPVTDVAVLCVCDLSPAQCDINCCCDPDCSSVDFSVFSACSVPVVTGDSQFCSQKAVIYSLNFTANPPQRVFELVDQINPSIFCIHITNYKPALSFINPEVPDENNFDTLMKTSDGFTLNAESYVSFTTKLDIPTAAKYEYGVPLQTSDSFLRFPSSLTSSLCTDNNPAAFLVNQAVKCTRKINLEQCEEIEALSMAFYSSPEILRVPDSRKKVPITVQSIVIQSLNKTLTRREDTDVLQPTLVNAGHFSLCVNVVLEVKYSLTYTDAGEVTKADLSFVLGTVSSVVVPLQQKFEIHFLQENTQPVPLSGNPGYVVGLPLAAGFQPHKGSGIIQTTNRYGQLTILHSTTEQDCLALEGVRTPVLFGYTMQSGCKLRLTGALPCQLVAQKVKSLLWGQGFPDYVAPFGNSQAQDMLDWVPIHFITQSFNRKDSCQLPGALVIEVKWTKYGSLLNPQAKIVNVTANLISSSFPEANSGNERTILISTAVTFVDVSAPAEAGFRAPPAINARLPFNFFFPFV

SEQ ID NO: 2462 - protein, 298 aa, Homo Sapiens
SPSIPLEKLAQAPEQPGQEKREHASRDGPGRVNELGRPARDEGGSGRDWKSKSGRGLAGREPWSKLKQAWVSQGGGAKAGDLQVRPRGDTPQAEALAAAAQDAIGPELAPTPEPPEEYVYPDYRGKGCVDESGFVYAIGEKFAPGPSACPCLCTEEGPLCAQPECPRLHPRCIHVDTSQCCPQCKERKNYCEFRGKTYQTLEEFVVSPCERCRCEANGEVLCTVSACPQTECVDPVYEPDQCCPICKNGPNCFAETAVIPAGREVKTDECTICHCTYEEGTWRIERQAMCTRHECRQM

SEQ ID NO: 2463 - protein, 198 aa, Homo Sapiens
GDTRPRFLQQDKYECHFFNGTERVRFLHRDIYNQEEDLRFDSDVGEYRAVTELGRPDAEYWNSQKDFLEDRRAAVDTYCRHNYGVGESFTVQRRVEPKVTVYPARTQTLQHHNLLVCSVNGFYPGSIEVRWFRNSQEEKAGVVSTGLIQNGDWTFQTLVMLETVPRSGEVYTCQVEHPSVTSPLTVEWRAQSESAQSK

SEQ ID NO: 2464 - protein, 57 aa, Homo Sapiens
MFGNDGVKVRTCTSQKAVCFFGCPPGYRWIAFCHNILSCCKNMTRFQPPQAKDPWVH

SEQ ID NO: 2465 - protein, 53 aa, Homo Sapiens
GPNVYIQKIFASCWRLQGTCRPKCLKNEQYRILCDTIHLCCVNPKYLPILTGK

SEQ ID NO: 2466 - protein, 79 aa, Homo Sapiens
GLFRSHNGKSREPWNPCELYQGMCRNACREYEIQYLTCPNDQKCCLKLSVKITSSKNVKEDYDSNSNLSVTNSSSYSHI

SEQ ID NO: 2467 - protein, 61 aa, Homo Sapiens
QTAPDGWIRRCYYGTGRCRKSCKEIERKKEKCGEKHICCVPKEKDKLSHIHDQKETSELYI

SEQ ID NO: 2468 - protein, 66 aa, Homo Sapiens
GPSVPQKKTREVAERKRECQLVRGACKPECNSWEYVYYYCNVNPCCAVWEYQKPIINKITSKLHQK

SEQ ID NO: 2469 - protein, 113 aa, Homo Sapiens
MKLLTTICRLKLEKMYSKTNTSSTIFEKARHGTEKISTARSEGHHITFSRWKSCTAIGGRCKNQCDDSEFRISYCARPTTHCCVTECDPTDPNNWIPKDSVGTQEWYPKDSRH

SEQ ID NO: 2470 - protein, 352 aa, Homo Sapiens
MEASSSGITNGKTKVFHPEGGVDLQGYQLDMQILPDGPKSDVDFSEILNAIQEMAKDVNILFDELEAVSSPCKDDDSLLHPGNLTSTSDDASRLEAGGETVPERNKSNGLYFRDGKCRIDYILVYRKSNPQTEKREVFERNIRAEGLQMEKESSLINSDIIFVKLHAPWEVLGRYAEQMNVRMPFRRKIYYLPRRYKFMSRIDKQISRFRRWLPKKPMRLDKETLPDLEENDCYTAPFSQQRIHHFIIHNKETFFNNATRSRIVHHILQRIKYEEGKNKIGLNRLLTNGSYEAAFPLHEGSYRSKNSIRTHGAENHRHLLYECWASWGVWYKYQPLDLVRRYFGEKIGLYFA

SEQ ID NO: 2471 - protein, 129 aa, Homo Sapiens
CVFCRLPAHDLSGRLARLCSQMEARQKECGASPDFSAFALDEVSMNKVTEKTHRVLRVMEIKEAVSSLPSYWSWLRKTKLPEYTREALCPPACRGSTTLYNCSTCKGTEVSCWPRKRCFPGSQDLWEAK

SEQ ID NO: 2472 - protein, 72 aa, Homo Sapiens
AHFRVCEPYTDHKGRYHFGFHCPRLSDNKTFILCCHHNNTVFKYCCNETEFQAVMQANLTASSEGYMHNNYT

SEQ ID NO: 2473 - protein, 461 aa, Homo Sapiens
AKILTISTVGGSHYLLMDRVSQILQDHGHNVTMLNHKRGPFMPDFKKEEKSYQVISWLAPEDHQREFKKSFDFFLEETLGGRGKFENLLNVLEYLALQCSHFLNRKDIMDSLKNENFDMVIVETFDYCPFLIAEKLGKPFVAILSTSFGSLEFGLPIPLSYVPVFRSLLTDHMDFWGRVKNFLMFFSFCRRQQHMQSTFDNTIKEHFTEGSRPVLSHLLLKAELWFINSDFAFDFARPLLPNTVYVGGLMEKPIKPVPQDLENFIAKFGDSGFVLVTLGSMVNTCQNPEIFKEMNNAFAHLPQGVIWKCQCSHWPKDVHLAANVKIVDWLPQSDLLAHPSIRLFVTHGGQNSIMEAIQHGVPMVGIPLFGDQPENMVRVEAKKFGVSIQLKKLKAETLALKMKQIMEDKRYKSAAVAASVILRSHPLSPTQRLVGWIDHVLQTGGATHLKPYVFQQPWHEQ

SEQ ID NO: 2474 - protein, 208 aa, Homo Sapiens
GFQGTAAIWPSLFNVNLSKKVQESIQIPNNGSAPLLVDVRVFVSNVFNVDILRYTMSSMLLLRLSWLDTRLAWNTSAHPRHAITLPWESLWTPRLTILEALWVDWRDQSPQARVDQDGHVKLNLALTTETNCNFELLHFPRDHSNCSLSFYALSNTAMELEFQAHVVNEIVSVKREYVVYDLKTQVPPQQLVPCFQVTLRLKNTALKS

SEQ ID NO: 2475 - protein, 104 aa, Homo Sapiens
AAGPNRCDTIYQGFAECLIRLGDSMGRGGELETICRSWNDFHACASQVLSGCPEEAAAVWESLQQEARQAPRPNNLHTLCGAPVHVRERGTGSETNQETLRATA

SEQ ID NO: 2476 - protein, 120 aa, Homo Sapiens
KPLQSDEYALLTRNVERDKYANFTINFTMENQIHTGMEYDNGRFIGVKFKSVTFKDSVFKSCTFEDVTSVNTYFKNCTFIDTVFDNTDFEPYKFIDSEFKNCSFFHNKTGCQITFDDDYS

SEQ ID NO: 2477 - protein, 163 aa, Homo Sapiens
QGQEAGGRPGADCEVCKEFLNRFYKSLIDRGVNFSLDTIEKELISFCLDTKGKENRLCYYLGATKDAATKILSEVTRPMSVHMPAMKICEKLKKLDSQICELKYEKTLDLASVDLRKMRVAELKQILHSWGEECRACAEKTDYVNLIQELAPKYAATHPKTEL

SEQ ID NO: 2478 - protein, 73 aa, Homo Sapiens
CLDIDKLLANVVFDVSQDLLKEELARYNPSPLTEESFLNVQQCFANVSVTERFAHSVVIKKILQSNDCIEAAF

SEQ ID NO: 2479 - protein, 97 aa, Homo Sapiens
KGKFVGYPGDPVYWLGKYRNEECDPGGCLLELTTQLTIIMGGKAIWNNIQEVLLPWIMNLIGRFHRVSGSEKITPRWEQDYHLQPMGKLGLFYEYLE

SEQ ID NO: 2480 - protein, 105 aa, Homo Sapiens
MASHNTLQNFTAAIPTHHCRPPADANLSKNGGLEVWLPRDRQGQPESCLRFTSPQWGLPFLNGTEANGTGATEPCTDGWIYDNSTFPSTIVTEWDLVCSHRALRQ

SEQ ID NO: 2481 - protein, 106 aa, Homo Sapiens
ELMPSGAILQNKRENLPRVCHALAFLGMARCQDLFLVRLQGWKLGTRFQDGPRSTPQEEGGSPQRKRGMPVQIHFLLKSFLSSPITFAFISLARTVSLATAICKIV

SEQ ID NO: 2482 - protein, 202 aa, Homo Sapiens
MCFRTKLSVSWVPLFLLLSRVFSTETDKPSAQDSRSRGSSGQPADLLQVLSAGDHPPHNHSRSLIKTLLEKTGCPRRRNGMQGDCNLCFEPDALLLIAGGNFEDQLREEVVQRVSLLLLYYIIHQEEICSSKLNMSNKEYKFYLHSLLSLRQDEDSSFLSQNETEDILAFTRQYFDTSQSQCMETKTLQKKSGIVSSEGANE

SEQ ID NO: 2483 - protein, 906 aa, Homo Sapiens
LSLEAPTVGKGQAPGIEETDGELTAAPTPEQPERGVHFVTTAPTLKLLNHHPLLEEFLQEGLEKGDEELRPALPFQPDPPAPFTPSPLPRLANQDSRPVFTSPTPAMAAVPTQPQSKEGPWSPESESPMLRITAPLPPGPSMAVPTLGPGEIASTTPPSRAWTPTQEGPGDMGRPWVAEVVSQGAGIGIQGTITSSTASGDDEETTTTTTIITTTITTVQTPGPCSWNFSGPEGSLDSPTDLSSPTDVGLDCFFYISVYPGYGVEIKVQNISLREGETVTVEGLGGPDPLPLANQSFLLRGQVIRSPTHQAALRFQSLPPPAGPGTFHFHYQAYLLSCHFPRRPAYGDVTVTSLHPGGSARFHCATGYQLKGARHLTCLNATQPFWDSKEPVCIGECPGVIRNATTGRIVSPGFPGNYSNNLTCHWLLEAPEGQRLHLHFEKVSLAEDDDRLIIRNGDNVEAPPVYDSYEVEYLPIEGLLSSGKHFFVELSTDSSGAAAGMALRYEAFQQGHCYEPFVKYGNFSSSTPTYPVGTTVEFSCDPGYTLEQGSIIIECVDPHDPQWNETEPACRAVCSGEITDSAGVVLSPNWPEPYGRGQDCIWGVHVEEDKRIMLDIRVLRIGPGDVLTFYDGDDLTARVLGQYSGPRSHFKLFTSMADVTIQFQSDPGTSVLGYQQGFVIHFFEVPRNDTCPELPEIPNGWKSPSQPELVHGTVVTYQCYPGYQVVGSSVLMCQWDLTWSEDLPSCQRVTSCHDPGDVEHSRRLISSPKFPVGATVQYICDQGFVLMGSSILTCHDRQAGSPKWSDRAPKCLLEQLKPCHGLSAPENGARSPEKQLHPAGATIHFSCAPGYVLKGQASIKCVPGHPSHWSDPPPICRAASLDGFYNSRSLDVAKAPAASSTLDAAH

SEQ ID NO: 2484 - protein, 415 aa, Homo Sapiens
DAPPTPQPKCADFQSANLFEGTDLKVQFLLFVPSNPSCGQLVEGSSDLQNSGFNATLGTKLIIHGFRVLGTKPSWIDTFIRTLLRATNANVIAVDWIYGSTGVYFSAVKNVLGVSESSIHIIGVSLGAHVGGMVGQLFGGQLGQITGLDPAGPEYTRASVEERLDAGDALFVEAIHTDTDNLGIRIPVGHVDYFVNGGQDQPGCPTFFYAGYSYLICDHMRAVHLYISALENSCPLMAFPCASYKAFLAGRCLDCFNPFLLSCPRIGLVEQGGVKIEPLPKEVKVYLLTTSSAPYCMHHSLVEFHLKELRNKDTNIEVTFLSSNITSSSKITIPKQQRYGKGIIAHATPQCQINQVKFKFQSSNRVWKKDRTTIIGKFCTALLPVNDREKMVCLPEPVNLQASVTVSCDLKIACV

SEQ ID NO: 2485 - protein, 267 aa, Homo Sapiens
EVPEESSRMAGSGARSEEGRRQHAFVPEPFDGANVVPNLWLHSFEVINDLNHWDHITKLRFLKESLRGEALGVYNRLSPQDQGDYGTVKEALLKAFGVPGAAPSHLPKEIVFANSMGKGYYLKGKIGKVPVRFLVDSGAQVSVVHPNLWEEVTDGDLDTLQPFENVVKVANGAEMKILGVWDTAVSLGKLKLKAQFLVANASAEEAIIGTDVLQDHNAILDFEHRTCTLKGKKFRLLPVGGSLEDEFDLELIEEDPSSEEGRQELSH

SEQ ID NO: 2486 - protein, 67 aa, Homo Sapiens
IECAKQTKQMVDCSHYKKLPPGQQRFCHHMYDPICGSDGKTYKNDCFFCSKVKKTDGTLKFVHFGKC

SEQ ID NO: 2487 - protein, 140 aa, Homo Sapiens
MDSRIPYDDYPVVFLPAYENPPAWIPPHERVHHPDYNNELTQFLPRTITLKKPPGAQLGFNIRGGKASQLGIFISKVIPDSDAHRAGLQEGDQVLAVNDVDFQDIEHSKAVEILKTAREISMRVRFFPYNYHRQKERTVH

SEQ ID NO: 2488 - protein, 447 aa, Homo Sapiens
RGFPRPLENSEIPMIPGAHPKGSVGSEPQAFDVFPENPRADSHRNSDVRHAPAEEMPEKPVASPLGPALYGPKAAQGAQRERLPVTDDLQMAQGPSSHGWTGPLDSQELLEQEAVAPHPVGHPHLTFIPTTPRRQLRVATVPPSLQHEGQEGQWPPRDEGLKAKTKSRVPPTSPSDHQGPPHTLVSHSGTVKRPVLEGQGGFEEHLQEAAQGPHFTQQDPAAPDVGSVPPVEVVYSQEPGAQPDLALARSLPPAEELPVETPKRAGAEVSWEVSSPGPPPKQADLPDAKDSPGPQPTDPPASEAPDRPSKPERAAMNGADPISPQRVRGAVEAPGTPKSLIPGPSDPGPAVNRTESPMGALQPDEAEEWPGRPQSHPPAPPVQAPSTSRRGLIRVTTQRALGQPPPPEPTASSMASAPASSPPANATAPPLRWGPLRRVLSFSWELH

SEQ ID NO: 2489 - protein, 550 aa, Homo Sapiens
LEEEEEGALLAQAGEKLEPSTTSTSQPHLIFILADDQGFRDVGYHGSEIKTPTLDKLAAEGVKLENYYVQPICTPSRSQFITGKYQIHTGLQHSIIRPTQPNCLPLDNATLPQKLKEVGYSTHMVGKWHLGFYRKECMPTRRGFDTFFGSLLGSGDYYTHYKCDSPGMCGYDLYENDNAAWDYDNGIYSTQMYTQRVQQILASHNPTKPIFLYIAYQAVHSPLQAPGRYFEHYRSIININRRRYAAMLSCLDEAINNVTLALKTYGFYNNSIIIYSSDNGGQPTAGGSNWPLRGSKGTYWEGGIRAVGFVHSPLLKNKGTVCKELVHITDWYPTLISLAEGQIDEDIQLDGYDIWETISEGLRSPRVDILHNIDPIYTKAKNGSWAAGYGIWNTAIQSAIRVQHWKLLTGNPGYSDWVPPQSFSNLGPNRWHNERITLSTGKSVWLFNITADPYERVDLSNRYPGIVKKLLRRLSQFNKTAVPVRYPPKDPRSNPRLNGGVWGPWYKEETKKKKPSKNQAEKKQKKSKKKKKKQQKAVSGSTCHSGVTCG

SEQ ID NO: 2490 - protein, 546 aa, Homo Sapiens
KPSFVADGPGEAGEQPSAAPPQPPHIIFILTDDQGYHDVGYHGSDIETPTLDRLAAKGVKLENYYIQPICTPSRSQLLTGRYQIHTGLQHSIIRPQQPNCLPLDQVTLPQKLQEAGYSTHMVGKWHLGFYRKECLPTRRGFDTFLGSLTGNVDYYTYDNCDGPGVCGFDLHEGENVAWGLSGQYSTMLYAQRASHILASHSPQRPLFLYVAFQAVHTPLQSPREYLYRYRTMGNVARRKYAAMVTCMDEAVRNITWALKRYGFYNNSVIIFSSDNGGQTFSGGSNWPLRGRKGTYWEGGVRGLGFVHSPLLKRKQRTSRALMHITDWYPTLVGLAGGTTSAADGLDGYDVWPAISEGRASPRTEILHNIDPLYNHAQHGSLEGGFGIWNTAVQAAIRVGEWKLLTGDPGYGDWIPPQTLATFPGSWWNLERMASVRQAVWLFNISADPYEREDLAGQRPDVVRTLLARLAEYNRTAIPVRYPAENPRAHPDFNGGAWGPWASDEEEEEEEGRARSFSRGRRKKKCKICKLRSFFRKLNTRLMSQRI

SEQ ID NO: 2491 - protein, 136 aa, Homo Sapiens
MDIKMQIGSRNFYTLSIDYPRVNYPKGFRGYCNGLMSYMRGKMQNSDCPKIHYVIHAPWKAIQKFCKYSDSFCENYNEYCTLTQDSLPITVCSLSHQQPPTSCYYNSTLTNQKLYLLCSRKYEADPIGIAGLYSGI

SEQ ID NO: 2492 - protein, 127 aa, Homo Sapiens
EAVMSTLEHLHVDYPQNDVPVPARYCNHMIIQRVIREPDHTCKKEHVFIHERPRKINGICISPKKVACQNLSAIFCFQSETKFKMTVCQLIEGTRYPACRYHYSPTEGFVLVTCDDLRPDSFLGYVK

SEQ ID NO: 2493 - protein, 190 aa, Homo Sapiens
LHMATAVLEESDQPLNEFWSSDSQDKAEATEEGDGTQTTETLVLSNKEVVQPGWPEDPILGEDEVGGNKMLRASALFQSNKDYLRLDQTDRECNDMMAHKMKEPSQSCIAQYAFIHEDLNTVKAVCNSPVIACELKGGKCHKSSRPFDLTLCELSQPDQVTPNCNYLTSVIKKHIIITCNDMKRQLPTGQ

SEQ ID NO: 2494 - protein, 61 aa, Homo Sapiens
QVTPVMKCWGKSGRCRTTCKESEVYYILCKTEAKCCVDPKYVPVKPKLTDTNTSLESTSAV

SEQ ID NO: 2495 - protein, 322 aa, Homo Sapiens
GSPVLRNFTFAVSWRTEKILYRLDVGWPKHPEYFTGTTFCVAVDSLNGLVYIGQRGDNIPKILVFTEDGYFLRAWNYTVDTPHGIFAASTLYEQSVWITDVGSGFFGHTVKKYSSFGDLVQVLGTPGKKGTSLNPLQFDNPAELYVEDTGDIYIVDGDGGLNNRLIKLSQDFMILWLHGENGTGPAKFNIPHSVTLDSAGRVWVADRGNKRIQVFDKDTGEWLGAWNNCFTEEGPSSVRFTPDGKYLIVAQLNLSRLSVVAAPPVGSIGECSVISTIQLADQVLPHLLEVDRKTGAVYVAEIGAKQVQKYVPLNSYVPSFGS

SEQ ID NO: 2496 - protein, 75 aa, Homo Sapiens
AEPFSPPRGDSAQSTACDRHMAVQRRLDVMEEMVEKTVDHLGTEVKGLLGLLEELAWNLPPGPFSPAPDLLGDGF

SEQ ID NO: 2497 - protein, 405 aa, Homo Sapiens
VEATSVLLPTDIKFGIVFDAGSSHTSLFLYQWLANKENGTGVVSQALACQVEGPGISSYTSNAAQAGESLQGCLEEALVLIPEAQHRKTPTFLGATAGMRLLSRKNSSQARDIFAAVTQVLGRSPVDFWGAELLAGQAEGAFGWITVNYGLGTLVKYSFTGEWIQPPEEMLVGALDMGGASTQITFVPGGPILDKSTQADFRLYGSDYSVYTHSYLCFGRDQMLSRLLVGLVQSRPAALLRHPCYLSGYQTTLALGPLYESPCVHATPPLSLPQNLTVEGTGNPGACVSAIRELFNFSSCQGQEDCAFDGVYQPPLRGQFYVEASYPGQDRWLRDYCASGLYILTLLHEGYGFSEETWPSLEFRKQAGGVDIGWTLGYMLNLTGMIPADAPAQWRAESYGVWVAK

SEQ ID NO: 2498 - protein, 123 aa, Homo Sapiens
RMSSLSFLNIEKTEILFFTKTEETILVSSSYENKRPNSSHLFVKIEDPKILQMVNVAKKISSDATNFTINLVTDEEGETNVTIQLWDSEGRQERLIEEIKNVKVKVLKQKDSLLQAPMHIDRN

SEQ ID NO: 2499 - protein, 94 aa, Homo Sapiens
DPRDLKSCNRPCVWSRLLKPNSSLSNLETAYFPQNLRFLRPWYFSRSHLNYHQKAPARWEWLYSIYRKGTKAQRRNVLRSPCAPPQPSWPCSVI

SEQ ID NO: 2500 - protein, 893 aa, Homo Sapiens
ATEARLHPEGSSRKQQRAQSPARPRDSSLRQTIAATRSPVGAGTKLNSVRQQQLQQQQQQGNKTGSRTGPPASIRGGGGGAEKATPLAPKGAAPGAVQPVAGAEAAPAATLAALGGRRPGPPEEPPRELESVPSKLGEPPPLGEGGGGGGEGGGAGGGSGEREGGAPQPPPPRGWRGKGVRAQQRGGSGGEGASPSPSSSSAGKTPGTGSRNSGSGVAGGGSGGGGSYWKEGCLQSELIQFHLKKERAAAAAAAAQMHAKNGGGSSSRSSPVSGPPAVCETLAVASASPMAAAAEGPQQSAEGSASGGGMQAAAPPSSQPHPQQLQEQEEMQEEMEKLREENETLKNEIDELRTEMDEMRDTFFEEDACQLQEMRHELERANKNCRILQYRLRKAERKRLRYAQTGEIDGELLRSLEQDLKVAKDVSVRLHHELENVEEKRTTTEDENEKLRQQLIEVEIAKQALQNELEKMKELSLKRRGSKDLPKSEKKAQQTPTEEDNEDLKCQLQFVKEEAALMRKKMAKIDKEKDRFEHELQKYRSFYGDLDSPLPKGEAGGPPSTREAELKLRLRLVEEEANILGRKIVELEVENRGLKAELDDLRGDDFNGSANPLMREQSESLSELRQHLQLVEDETELLRRNVADLEEQNKRITAELNKYKYKSGGHDSARHHDNAKTEALQEELKAARLQINELSGKVMQLQYENRVLMSNMQRYDLASHLGIRGSPRDSDAESDAGKKESDDDSRPPHRKREGPIGGESDSEEVRNIRCLTPTRSFYPAPGPWPKSFSDRQQMKDIRSEAERLGKTIDRLIADTSTIITEARIYVANGDLFGLMDEEDDGSRIREHELLYRINAQMKAFRKELQTFIDRLEVPKSADDRGAEEPISVSQMFQ

SEQ ID NO: 2501 - protein, 194 aa, Homo Sapiens
SGCRAGTGARGAGAEGREGEACGTVGLLLEHSFEIDDSANFRKRGSLLWNQQDGTLSLSQRQLSEEERGRLRDVAALNGLYRVRIPRRPGALDGLEAGGYVSSFVPACSLVESHLSDQLTLHVDVAGNVVGVSVVTHPGGCRGHEVEDVDLELFNTSVQLQPPTTAPGPETAAFIERLEMEQAQKAKNPQEQKS

SEQ ID NO: 2502 - protein, 380 aa, Homo Sapiens
YDKKGNNANPEANMNISQIISYWGYPYEEYDVTTKDGYILGIYRIPHGRGCPGRTAPKPAVYLQHGLIASASNWICNLPNNSLAFLLADSGYDVWLGNSRGNTWSRKHLKLSPKSPEYWAFSLDEMAKYDLPATINFIIEKTGQKRLYYVGHSQGTTIAFIAFSTNPELAKKIKIFFALAPVVTVKYTQSPMKKLTTLSRRVVKVLFGDKMFHPHTLFDQFIATKVCNRKLFRRICSNFLFTLSGFDPQNLNMSRLDVYLSHNPAGTSVQNMLHWAQAVNSGQLQAFDWGNSDQNMMHFHQLTPPLYNITKMEVPTAIWNGGQDIVADPKDVENLLPQIANLIYYKLIPHYNHVDFYLGEDAPQEIYQDLIILMEEYLQN

SEQ ID NO: 2503 - protein, 427 aa, Homo Sapiens
QAMEGVKCGGVLSAPSGNFSSPNFPRLYPYNTECSWLIVVAEGSSVLLTFHAFDLEYHDTCSFDFLEIYNGASPDKGNLLGRFCGKVPPPPFTSSWHVMSVIFHSDKHVASHGFSAGYQKDVCGGVLTGLSGVLTSPEYPNNYPNSMECHWVIRAAGPAHVKLVFVDFQVEGNEECTYDYVAVLGGPGPTRGHHYCGSTRPPTLVSLGHELQVVFKSDFNIGGRGFKAYYFSGECQEVYMAMRGNFSSPQYPSSYPNNIRCHWTIRLPPGYQVKVFFLDLDLEEPNSLTKTCDFDHLAAFDGASEEAPLLGNWCGHHLPPPVTSSHNQLLLLLHTDRSTTRRGFSVAYIGGQLGCGSGSTEGEGEALQPQSLQSPSSIPPVCPAPPMNGLLQLLLHWLHPCPLSGPLRLDGTAPACFHYCRASFPSF

SEQ ID NO: 2504 - protein, 131 aa, Homo Sapiens
WCSEEEMGGNNKIVQDPMFLATVEFALNTFNVQSKEEHAYRLLRVLSSWREDSMDRKWRGKMVFSMNLQLRQTVCRKFEDDIDNCPFQESLELNNVRQGISFPQVHSCGCCMGCGVGTGAADKAIPRDKGK

SEQ ID NO: 2505 - protein, 728 aa, Homo Sapiens
IVLTGTSEPPDAQTVAPAEDETLQNEADNQENVLSQLLGDYDKVKAMSEGSDCQCKCVVRPLGRDACQRINAGASRKEDFYTVETITSGSSCKCACVAPPSALNPCEGDFRLQKLREADSQDLKLSTIIDMLEGAFYGLDLLKLHSVTTKLVGRVDKLEEEVSKNLTKENEQIKEDMEEIRTEMNKRGKENCSENILDSMPDIRSALQRDAAAAYAHPEYEERFLQEETVSQQINSIELLQTRPLALPEVVKSQRPLQRQVHLRGRPASQPTVIRGITYYKAKVSEEENDIEEQQDEFFSGDNGVDLLIEDQLLRHNGLMTSVTRRPAATRQGHSTAVTSDLNARTAPWSSALPQPSTSDPSIANHASVGPTLQTTSVSPDPTRESVLQPSPQVPATTVAHTATQQPAAPAPPAVSPREALMEAMHTVPVPPTTVRTDSLGKDAPAGWGTTPASPTLSPEEEDDIRNVIGRCKDTLSTITGPTTQNTYGRNEGAWMKDPLAKDERIYVTNYYYGNTLVEFRNLENFKQGRWSNSYKLPYSWIGTGHVVYNGAFYYNRAFTRNIIKYDLKQRYVAAWAMLHDVAYEEATPWRWQGHSDVDFAVDENGLWLIYPALDDEGFSQEVIVLSKLNAADLSTQKETTWRTGLRRNFYGNCFVICGVLYAVDSYNQRNANISYAFDTHTNTQIVPRLLFENEYSYTTQIDYNPKDRLLYAWDNGHQVTYHVIFAY

SEQ ID NO: 2506 - protein, 52 aa, Homo Sapiens
LDVSTTIYNRCKHAAANSSPPENSNITGLYATANPVPSQHPCFKPWSYIPDG

SEQ ID NO: 2507 - protein, 174 aa, Homo Sapiens
GFGRTGLVLAAAVESERSAEQKAIIRVIPLKMDPTGKLNLTLEGVFAGVAEITPAEGKLMQSHPLYLCNASDDDNLEPGFISIVKLESPRRAPRPCLSLASKARMAGERGASAVLFDITEDRAAAEQLQQPLGLTWPVVLIWGNDAEKLMEFVYKNQKAHVRIELKEPPAWPDY

SEQ ID NO: 2508 - protein, 88 aa, Homo Sapiens
GFRATQRYDDCFSTNILTLINGFDLPEGNVTQENFVDMQQRCNASDPAAYAQLVFQTCDINAFLSEAVEGTGLAFIVFTEAITKMPLS

SEQ ID NO: 2509 - protein, 455 aa, Homo Sapiens
GPLQSGEESTGTNIGEALGHGLGDALSEGVGKAIGKEAGGAAGSKVSEALGQGTREAVGTGVRQVPGFGAADALGNRVGEAAHALGNTGHEIGRQAEDVIRHGADAVRGSWQGVPGHNGAWETSGGHGIFGSQGGLGGQGQGNPGGLGTPWVHGYPGNSAGSFGMNPQGAPWGQGGNGGPPNFGTNTQGAVAQPGYGSVRASNQNEGCTNPPPSGSGGGSSNSGGGSGSQSGSSGSGSNGDNNNGSSSGGSSSGSSSGGSSGGSSGGSSGNSGGSRGDSGSESSWGSSTGSSSGNHGGSGGGNGHKPGCEKPGNEARGSGESGIQNSETSPGMFNFDTFWKNFKSKLGFINWDAINKNQVPPPSTRALLYFSRLWEDFKQNTPFLNWKAIIEGADASSLQKRAGRADQNYNYNQHAYPTAYGGKYSVKTPAKGGVSPSSSASRVQPGLLQWVKFW

SEQ ID NO: 2510 - protein, 328 aa, Homo Sapiens
VRGAPCEAVRIPMCRHMPWNITRMPNHLHHSTQENAILAIEQYEELVDVNCSAVLRFFLCAMYAPICTLEFLHDPIKPCKSVCQRARDDCEPLMKMYNHSWPESLACDELPVYDRGVCISPEAIVTDLPEDVKWIDITPDMMVQERPLDVDCKRLSPDRCKCKKVKPTLATYLSKNYSYVIHAKIKAVQRSGCNEVTTVVDVKEIFKSSSPIPRTQVPLITNSSCQCPHILPHQDVLIMCYEWRSRMMLLENCLVEKWRDQLSKRSIQWEERLQEQRRTVQDKKKTAGRTSRSNPPKPKGKPPAPKPASPKKNIKTRSAQKRTNPKRV

SEQ ID NO: 2511 - protein, 245 aa, Homo Sapiens
CGVPAIHPVLSGLSRIVNGEDAVPGSWPWQVSLQDKTGFHFCGGSLISEDWVVTAAHCGVRTSDVVVAGEFDQGSDEENIQVLKIAKVFKNPKFSILTVNNDITLLKLATPARFSQTVSAVCLPSADDDFPAGTLCATTGWGKTKYNANKTPDKLQQAALPLLSNAECKKSWGRRITDVMICAGASGVSSCMGDSGGPLVCQKDGAWTLVGIVSWGSRTCSTTTPAVYARVTKLIPWVQKILAAN

SEQ ID NO: 2512 - protein, 545 aa, Homo Sapiens
LPVKKPRLRGPRPGSLTRLAEVSASPDPRPLKEEEEAPLLPRTHLQAEPHQHGCWTVTEPAAMTPGNTTPPRTPEVTPLRLELQKLPGLANTTLSTPNPDTQASASPDPRPLREEEEARLLPRTHLQAELHQHGCWTVTEPAALTPGNATPPRTQEVTPLLLELQKLPELVHATLSTPNPDNQVTIKVVEDPQAEVSIDLLAEPSNPPPQDTLSWLPALWSFLWGDYKGEEKDRAPGEKGEEKEEDEDYPSEDIEGEDQEDKEEDEEEQALWFNGTTDNWDQGWLAPGDWVFKDSVSYDYEPQKEWSPWSPCSGNCSTGKQQRTRPCGYGCTATETRTCDLPSCPGTEDKDTLGLPSEEWKLLARNATDMHDQDVDSCEKWLNCKSDFLIKYLSQMLRDLPSCPCAYPLEAMDSPVSLQDEHQGRSFRWRDASGPRERLDIYQPTARFCLRSMLSGESSTLAAQHCCYDEDSRLLTRGKGAGMPNLISTDFSPKLHFKFDTTPWILCKGDWSRLHAVLPPNNGRACTDNPLEEEYLAQLQEAKEY

SEQ ID NO: 2513 - protein, 408 aa, Homo Sapiens
APLASSCAGACGTSFPDGLTPEGTQASGDKDIPAINQGLILEETPESSFLIEGDIIRPSPFRLLSATSNKWPMGGSGVVEVPFLLSSKYDEPSRQVILEALAEFERSTCIRFVTYQDQRDFISIIPMYGCFSSVGRSGGMQVVSLAPTCLQKGRGIVLHELMHVLGFWHEHTRADRDRYIRVNWNEILPGFEINFIKSRSSNMLTPYDYSSVMHYGRLAFSRRGLPTITPLWAPSVHIGQRWNLSASDITRVLQLYGCSPSGPRPRGRGSHAHSTGRSPAPASLSLQRLLEALSAESRSPDPSGSSAGGQPVPAGPGESPHGWESPALKKLSAEASARQPQTLASSPRSRPGAGAPGVAQEQSWLAGVSTKPTVPSSEAGIQPVPVQGSPALPGGCVPRNHFKGMSED

SEQ ID NO: 2514 - protein, 76 aa, Homo Sapiens
SVSGPRHWWPPRGIIKVKCPYEKVNLSWYNGTVNPCPGLYQPICGTNFITYDNPCILCVESLKSHGRIRFYHDGKC

SEQ ID NO: 2515 - protein, 123 aa, Homo Sapiens
TPFPSLAPPIMLLVDGKQQMVVVCLVLDVAPPGLDSPIWFSAGNGSALDAFTYGPSPATDGTWTNLAHLSLPSEELASWEPLVCHTGPGAEGHSRSTQPMHLSGEASTARTCPQEPLRGTPGG

SEQ ID NO: 2516 - protein, 69 aa, Homo Sapiens
TRGSSTGAHISPQFPASGVNQTPVVDCRKVCGLNVSDRCDFIRTNPDCHSDGGYLDYLEGIFCHFPPSL

SEQ ID NO: 2517 - protein, 204 aa, Homo Sapiens
RKRRFPFIGEDDNDDGHPLHPSLNIPYGIRNLPPPLYYRPVNTVPSYPGNTYTDTGLPSYPWILTSPGFPYVYHIRGFPLATQLNVPPLPPRGFPFVPPSRFFSAAAAPAAPPIAAEPAAAAPLTATPVAAEPAAGAPVAAEPAAEAPVGAEPAAEAPVAAEPAAEAPVGVEPAAEEPSPAEPATAKPAAPEPHPSPSLEQANQ

SEQ ID NO: 2518 - protein, 637 aa, Homo Sapiens
YSVSLRKAERLRAELLDLKAGGFSIRNQKGEQVFRLAFRSGALDLDSCSRDGALLGCSLTADGLPLHFFIQTVRPKDTVMCYRVRWEEAAPGRAVEHAMFLGDAAAHWYGGAEMRTQHWPIRLDGQQEPQPFVTSDVYSSDAAFGGILERYWLSSRAAAIKVNDSVPFHLGWNSTERSLRLQARYHDTPYKPPAGRAAAPELSYRVCVGSDVTSIHKYMVRRYFNKPSRVPAPEAFRDPIWSTWALYGRAVDQDKVLRFAQQIRLHHFNSSHLEIDDMYTPAYGDFDFDEVKFPNASDMFRRLRDAGFRVTLWVHPFVNYNSSRFGEGVERELFVREPTGRLPALVRWWNGIGAVLDFTHPKARDWFQGHLRRLRSRYSVASFKFDAGEVSYLPRDFSTYRPLPDPSVWSRRYTEMALPFFSLAEVRVGYQSQNISCFFRLVDRDSVWGYDLGLRSLIPAVLTVSMLGYPFILPDMVGGNAVPQRTAGGDVPERELYIRWLEVAAFMPAMQFSIPPWRYDAEVVAIAQKFAALRASLVAPLLLELAGEVTDTGDPIVRPLWWIAPGDETAHRIDSQFLIGDTLLVAPVLEPGKQERDVYLPAGKWRSYKGELFDKTPVLLTDYPVDLDEIAYFTWAS

SEQ ID NO: 2519 - protein, 201 aa, Homo Sapiens
SPSIRQKKLMHKLQEEKAFREEMKIFREKIEDFREEMWTFRGKIHAFRGQILGFWEEERPFWEEEKTFWKEEKSFWEMEKSFREEEKTFWKKYRTFWKEDKAFWKEDNALWERDRNLLQEDKALWEEEKALWVEERALLEGEKALWEDKTSLWEEENALWEEERAFWMENNGHVAGEQMLEDGPHNANRGQRLLAFSRGRA

SEQ ID NO: 2520 - protein, 592 aa, Homo Sapiens
KVYLGLFSGSSPNPFSEDVKRPPAPLVTDKEARKKVLKQAFSANQVPEKLDVVVIGSGFGGLAAAAILAKAGKRVLVLEQHTKAGGCCHTFGKNGPEFDTGIHYIGRMEEGSIGRFILDQITEGQLDWAPLSSPFDIMVLEGPNGRKEYPMYSGEKAYIQGLKEKFPQEEAIIDKYIKLVKVVSSGAPHAILLKFLPLPVVQLLDRCGLLTRFSPFLQASTQSLAEVLQQLGASSELQAVLSYIFPTYGVTPNHSAFSMHALLVNHYMKGGFYPRGGSSEIAFHTIPVIQRAGGAVLTKATVQSVLLDSAGKACGVSVKKGHELVNIYCPIVVSNAGLFNTYEHLLPGNARCLPGVKQQLGTVRPGLGMTSVFICLRGTREDLHLPSTNYYVYYDTDMDQAMERYVSMPREEAAEHIPLLFFAFPSAKDPTWEDRFPGRSTMIMLIPTAYEWFEEWQAELKGKRGSDYETFKNSFVEASMSVVLKLFPQLEGKVESVTAGSPLTNQFYLAAPRGACYGADHDLGRLHPCVMASLRAQSPIPNLYLTGQDIFTCGLVGALQGALLCSSAILKRNLYSDLKNLDSRIRAQKKKN

SEQ ID NO: 2521 - protein, 559 aa, Homo Sapiens
QPSSSPSGAVPTSLELQRGTDGGTLQSPSEATATRPAVPGLPTVVPTLVTPSAPGNRTVDLFPVLPICVCDLTPGACDINCCCDRDCYLLHPRTVFSFCLPGSVRSSSWVCVDNSVIFRSNSPFPSRVFMDSNGIRQFCVHVNNSNLNYFQKLQKVNATNFQALAAEFGGESFTSTFQTQSPPSFYRAGDPILTYFPKWSVISLLRQPAGVGAGGLCAESNPAGFLESKSTTCTRFFKNLASSCTLDSALNAASYYNFTVLKVPRSMTDPQNMEFQVPVILTSQANAPLLAGNTCQNVVSQVTYEIETNGTFGIQKVSVSLGQTNLTVEPGASLQQHFILRFRAFQQSTAASLTSPRSGNPGYIVGKPLLALTDDISYSMTLLQSQGNGSCSVKRHEVQFGVNAISGCKLRLKKADCSHLQQEIYQTLHGRPRPEYVAIFGNADPAQKGGWTRILNRHCSISAINCTSCCLIPVSLEIQVLWAYVGLLSNPQAHVSGVRFLYQCQSIQDSQQVTEVSLTTLVNFVDITQKPQPPRGQPKMDWKWPFDFFPFKVAFSRGV

SEQ ID NO: 2522 - protein, 461 aa, Homo Sapiens
AKILTISTLGGSHYLLLDRVSQILQEHGHNVTMLHQSGKFLIPDIKEEEKSYQVIRWFSPEDHQKRIKKHFDSYIETALDGRKESEALVKLMEIFGTQCSYLLSRKDIMDSLKNENYDLVFVEAFDFCSFLIAEKLVKPFVAILPTTFGSLDFGLPSPLSYVPVFPSLLTDHMDFWGRVKNFLMFFSFSRSQWDMQSTFDNTIKEHFPEGSRPVLSHLLLKAELWFVNSDFAFDFARPLLPNTVYIGGLMEKPIKPVPQDLDNFIANFGDAGFVLVAFGSMLNTHQSQEVLKKMHNAFAHLPQGVIWTCQSSHWPRDVHLATNVKIVDWLPQSDLLAHPSIRLFVTHGGQNSVMEAIRHGVPMVGLPVNGDQHGNMVRVVAKNYGVSIRLNQVTADTLTLTMKQVIEDKRYKSAVVAASVILHSQPLSPAQRLVGWIDHILQTGGATHLKPYAFQQPWHEQ

SEQ ID NO: 2523 - protein, 67 aa, Homo Sapiens
MGAQVRLPPGEPCREGYVLSLVCPNSSQAWCEITNVSQLLASPVLYTDLNYSINNLSISANVENKYS

SEQ ID NO: 2524 - protein, 368 aa, Homo Sapiens
GDCQQPAQCRIQKCTTDFVSLTSHLNSAVDGFDSEFCKALRAYAGCTQRTSKACRGNLVYHSAVLGISDLMSQRNCSKDGPTSSTNPEVTHDPCNYHSHAGAREHRRGDQNPPSYLFCGLFGDPHLRTFKDNFQTCKVEGAWPLIDNNYLSVQVTNVPVVPGSSATATNKITIIFKAHHGCTDQKVYQAVTDDLPAAFVDGTTSGGDSDAKSLRIVERESGHYVEMHARYIGTTVFVRQVGRYLTLAIRMPEDLAMSYEESQDLQLCVNGCPLSERIDDGQGQVSAILGHSLPRTSLVQAWPGYTLETANTQCHEKMPVKDIYFQSCVFDLLTTGDANFTAAAHSALEDVEALHPRKERWHIFPSSGN

SEQ ID NO: 2525 - protein, 383 aa, Homo Sapiens
FYTPMPDNIEESWKIMALDAIAKTCTFTAMCFENMRIMRYEEFISMIFRLDYTQPLSDEYITVTDTTFVDIPVRLYLPKRKSETRRRAVIYFHGGGFCFGSSKQRAFDFLNRWTANTLDAVVVGVDYRLAPQHHFPAQFEDGLAAVKFFLLEKILTKYGVDPTRICISGDSSGGNLATAVTQQVQNDAEIKHKIKMQVLLYPGLQITDSYLPSHRENEHGIVLTRDVAIKLVSLYFTKDEALPWAMRRNQHMPLESRHLFKFVNWSILLPEKYRKDYVYTEPILGGLSYSLPGLTDSRALPLLANDSQLQNLPLTYILTCQHDLLRDDGLMYVTRLRNVGVQVVHEHIEDGIHGALSFMTSPFYLRLGLRIRDMYVSWLDKNL

SEQ ID NO: 2526 - protein, 178 aa, Homo Sapiens
MAPVGGGGRPVGGPARGRLLLAAPVLLVLLWALGARGQGSPQQGTIVGMRLASCNKSCGTNPDGIIFVSEGSTVNLRLYGYSLGNISSNLISFTEVDDAETLHKSTSCLELTKDLVVQQLVNVSRRNTSGVLVVLTKFLRRSESMKLYALCTRAQPDGPWLKWTDKDSLLFMVEEPGR

SEQ ID NO: 2527 - protein, 305 aa, Homo Sapiens
SPPAGLLSLLTSGQGALDQEALGGLLNTLADRVHCTNGPCGKCLSVEDALGLGEPEGSGLPPGPVLEARYVARLSAAAVLYLSNPEGTCEDTRAGLWASHADHLLALLESPKALTPGLSWLLQRMQARAAGQTPKTACVDIPQLLEEAVGAGAPGSAGGVLAALLDHVRSGSCFHALPSPQYFVDFVFQQHSSEVPMTLAELSALMQRLGVGREAHSDHSHRHRGASSRDPVPLISSSNSSSVWDTVCLSARDVMAAYGLSEQAGVTPEAWAQLSPALLQQQLSGACTSQSRPPVQDQLSQSERY

SEQ ID NO: 2528 - protein, 323 aa, Homo Sapiens
ELSRSDLSLIQQQQQQQQQQQQQQQQKQLEEAEEERTEVPGATSTLTVPVSVFMLKVQVNDIISRQYLSQAVVEVFVNYTKTNSTVTKSNGAVLIKVPYKLGLSLTIIAYKDGYVLTPLPWKTRRMPIYSSVTLSLFPQSQANIWLFEDTVLITGKLADAKSQPSVQFSKALIKLPDNHHISNVTGYLTVLQQFLKVDNFLHTTGITLNKPGFENIELTPLAAICVKIYSGGKELKVNGSIQVSLPLLRLNDISAGDRIPAWTFDMNTGAWINHGRGMVKEHNNHLIWTYDAPHLGYWIAAPLPGTRGSGINEDSKDITAYHT

SEQ ID NO: 2529 - protein, 53 aa, Homo Sapiens
NYEELENSGDTTVESERPNKVTIPSTFAAVTIKETLNANINSTNFAPDENQLE

SEQ ID NO: 2530 - protein, 59 aa, Homo Sapiens
DQVDWSRLYRDTGLVKMSRKPRASSPFSNNHPSTPKRFPRQPRREKGPVKEVPGTKGSP

SEQ ID NO: 2531 - protein, 151 aa, Homo Sapiens
GSAQGPPKPRLQTLRMTLPSPHMPRPNQTILVDVARNAATITVTPPQSNHSWAVLFDGQSGCICYRPEEHQVCFLRLMEDSDRETLRLLVDTSKVQEAWVPSQDTHHTQELLAVQGSLEVDPAQAGALVQRLCMRTPIYWARRAEGPRRQR

SEQ ID NO: 2532 - protein, 343 aa, Homo Sapiens
RKGFWDYFSQTSGDKGRVEQIHQQKMAREPATLKDSLEQDLNNMNKFLEKLRPLSGSEAPRLPQDPVGMRRQLQEELEEVKARLQPYMAEAHELVGWNLEGLRQQLKPYTMDLMEQVALRVQELQEQLRVVGEDTKAQLLGGVDEAWALLQGLQSRVVHHTGRFKELFHPYAESLVSGIGRHVQELHRSVAPHAPASPARLSRCVQVLSRKLTLKAKALHARIQQNLDQLREELSRAFAGTGTEEGAGPDPQMLSEEVRQRLQAFRQDTYLQIAAFTRAIDQETEEVQQQLAPPPPGHSAFAPEFQQTDSGKVLSKLQARLDDLWEDITHSLHDQGHSHLGDP

SEQ ID NO: 2533 - protein, 538 aa, Homo Sapiens
MAGPPALPPPETAAAATTAAAASSSAASPHYQEWILDTIDSLRSRKARPDLERICRMVRRRHGPEPERTRAELEKLIQQRAVLRVSYKGSISYRNAARVQPPRRGATPPAPPRAPRGAPAAAAAAAPPPTPAPPPPPAPVAAAAPARAPRAAAAAATAPPSPGPAQPGPRAQRAAPLAAPPPAPAAPPAVAPPAGPRRAPPPAVAAREPPLPPPPQPPAPPQQQQPPPPQPQPPPEGGAVRAGGAARPVSLREVVRYLGGSGGAGGRLTRGRVQGLLEEEAAARGRLERTRLGALALPRGDRPGRAPPAASARPSRSKRGGEERVLEKEEEEDDDEDEDEEDDVSEGSEVPESDRPAGAQHHQLNGERGPQSAKERVKEWTPCGPHQGQDEGRGPAPGSGTRQVFSMAAMNKEGGTASVATGPDSPSPVPLPPGKPALPGADGTPFGCPPGRKEKPSDPVEWTVMDVVEYFTEAGFPEQATAFQEQEIDGKSLLLMQRTDVLTGLSIRLGPALKIYEHHIKVLQQGHFEDDDPDGFLG

SEQ ID NO: 2534 - protein, 252 aa, Homo Sapiens
RPPPFLFCPLSSQRTESPYKPVHLGLGPTDKVAAIAMARIIDLVPWDDGSTHVYASPAILLPMERQRNQLAGVKQQLYHPALPTLRHMDRDTVKACLPDEHCQSTTYCRKDEFDNAHFTLLGVPNKPLQCLDITATGQKLRNRYHEGKLAPIAPGINRVDWPCFTRAIEDWSHFVSSAGEFKLPCLRKRAEGLSGYAVRYLKPDVTQTWRYCLNQNPSLDRYGQKPLPFDSLNTFRSFGSSYSRVNYLTPWH

SEQ ID NO: 2535 - protein, 59 aa, Homo Sapiens
TGPGMTLQLKLKESFLTNSSYESSFLELLEKLCLLLHLPSGTSVTLHHARSQHHVVCNT

SEQ ID NO: 2536 - protein, 331 aa, Homo Sapiens
YPSITVTPDEEQNLNHYIQVLENLVRSVPSGEPGREKKSNSPKHVYSIASKGSKFKELVTHGDASTENDVLTNPISEETTTFPTGGFTPEIGKKKHTESTPFWSIKPNNVSIVLHAEEPYIENEEPEPEPEPAAKQTEAPRMLPVVTESSTSPYVTSYKSPVTTLDKSTGIGISTESEDVPQLSGETAIEKPEEFGKHPESWNNDDILKKILDINSQVQQALLSDTSNPAYREDIEASKDHLKRSLALAAAAEHKLKTMYKSQLLPVGRTSNKIDDIETVINMLCNSRSKLYEYLDIKCVPPEMREKAATVFNTLKNMCRSRRVTALLKVY

SEQ ID NO: 2537 - protein, 156 aa, Homo Sapiens
SMCHRWSRAVLFPAAHRPKRSSSLPLNPVLQTSLEEVELLYEFLLAELEISPDLQISIKDEELASLRKASDFRTVCNNVIPKSIPDIRRLSASLSSHPGILKKEDFERTVLTLAYTAYRTALSHGHQKDIWAQSLVSLFQALRHDLMRSSQPGVPP

SEQ ID NO: 2538 - protein, 464 aa, Homo Sapiens
GRASLQHGQAAEKGPHRSRDTAEPSFPEIPLDGTLAPPESQGNGSTLQPNVVYITLRSKRSKPANIRGTVKPKRRKKHAVASAAPGQEALVGPSLQPQEAAREADAVAPGYAQGANLVKIGERPWRLVRGPGVRAGGPDFLQPSSRESNIRIYSESAPSWLSKDDIRRMRLLADSAVAGLRPVSSRSGARLLVLEGGAPGAVLRCGPSPCGLLKQPLDMSEVFAFHLDRILGLNRTLPSVSRKAEFIQDGRPCPIILWDASLSSASNDTHSSVKLTWGTYQQLLKQKCWQNGRVPKPESGCTEIHHHEWSKMALFDFLLQIYNRLDTNCCGFRPRKEDACVQNGLRPKCDDQGSAALAHIIQRKHDPRHLVFIDNKGFFDRSEDNLNFKLLEGIKEFPASAVSVLKSQHLRQKLLQSLFLDKVYWESQGGRQGIEKLIDVIEHRAKILITYINAHGVKVLPMNE

SEQ ID NO: 2539 - protein, 238 aa, Homo Sapiens
LPTSAPLSVSLPTNIVPPTTIWTSSPQNTDADTASPSNGTHNNSVLPVTASAPTSLLPKNISIESREEEITSPGSNWEGTNTDPSPSGFSSTSGGVHLTTTLKEHSSGTPEAGVAATLSQSAAEPPTLISPQAPASSPSSLSTSPPEVFSASVTTNHSSTVTSTQPTGAPTAPESPTEESSSDHTPTSHATAEPVPQEKTPPTTVSGKVMCELIDMETTTTFPRVIMQEVEHALSSGS

SEQ ID NO: 2540 - protein, 77 aa, Homo Sapiens
SGEYCHGWLDAQGVWRIGFQCPERFDGGDATICCGSCALRYCCSSAEARLDQGGCDNDRQQGAGEPGRADKDGPDGS

SEQ ID NO: 2541 - protein, 263 aa, Homo Sapiens
VEHEEVAQRVIKLHRGRGVAAMQSRQWVRDSCRKLSGLLRQKNAVLNKLKTAIGAVEKDVGLSDEEKLFQVHTFEIFQKELNESENSVFQAVYGLQRALQGDYKDVVNMKESSRQRLEALREAAIKEETEYMELLAAEKHQVEALKNMQHQNQSLSMLDEILEDVRKAADRLEEEIEEHAFDDNKSVKGVNFEAVLRVEEEEANSKQNITKREVEDDLGLSMLIDSQNNQYILTKPRDSTIPRADHHFIKDIVTIGMLSLPCG

SEQ ID NO: 2542 - protein, 112 aa, Homo Sapiens
GKGARGFGRGALIRLNIWPAVQGACKQLEVCEHCVEGDRARNLSSCMWEQCRPEEPGHCVAQSEVVKEGCSIYNRSEACPAAHHHPTYEPKTVTTGSPPVPEAHSPGFDGAS

SEQ ID NO: 2543 - protein, 190 aa, Homo Sapiens
SKIPSITDPHFIDNCIEAHNEWRGKVNPPAADMKYMIWDKGLAKMAKAWANQCKFEHNDCLDKSYKCYAAFEYVGENIWLGGIKSFTPRHAITAWYNETQFYDFDSLSCSRVCGHYTQLVWANSFYVGCAVAMCPNLGGASTAIFVCNYGPAGNFANMPPYVRGESCSLCSKEEKCVKNLCKNPFLKPTG

SEQ ID NO: 2544 - protein, 519 aa, Homo Sapiens
RKGSPEEASFYYGTFPLGFSWGVGSSAYQTEGAWDQDGKGPSIWDVFTHSGKGKVLGNETADVACDGYYKVQEDIILLRELHVNHYRFSLSWPRLLPTGIRAEQVNKKGIEFYSDLIDALLSSNITPIVTLHHWDLPQLLQVKYGGWQNVSMANYFRDYANLCFEAFGDRVKHWITFSDPRAMAEKGYETGHHAPGLKLRGTGLYKAAHHIIKAHAKAWHSYNTTWRSKQQGLVGISLNCDWGEPVDISNPKDLEAAERYLQFCLGWFANPIYAGDYPQVMKDYIGRKSAEQGLEMSRLPVFSLQEKSYIKGTSDFLGLGHFTTRYITERNYPSRQGPSYQNDRDLIELVDPNWPDLGSKWLYSVPWGFRRLLNFAQTQYGDPPIYVMENGASQKFHCTQLCDEWRIQYLKGYINEMLKAIKDGANIKGYTSWSLLDKFEWEKGYSDRYGFYYVEFNDRNKPRYPKASVQYYKKIIIANGFPNPREVESWYLKALETCSINNQMLAAEPLLSHMQMVTE

SEQ ID NO: 2545 - protein, 468 aa, Homo Sapiens
GKVLVWPCDMSHWLNVKVILEELIVRGHEVTVLTHSKPSLIDYRKPSALKFEVVHMPQDRTEENEIFVDLALNVLPGLSTWQSVIKLNDFFVEIRGTLKMMCESFIYNQTLMKKLQETNYDVMLIDPVIPCGDLMAELLAVPFVLTLRISVGGNMERSCGKLPAPLSYVPVPMTGLTDRMTFLERVKNSMLSVLFHFWIQDYDYHFWEEFYSKALGRPTTLCETVGKAEIWLIRTYWDFEFPQPYQPNFEFVGGLHCKPAKALPKEMENFVQSSGEDGIVVFSLGSLFQNVTEEKANIIASALAQIPQKVLWRYKGKKPSTLGANTRLYDWIPQNDLLGHPKTKAFITHGGMNGIYEAIYHGVPMVGVPIFGDQLDNIAHMKAKGAAVEINFKTMTSEDLLRALRTVITDSSYKENAMRLSRIHHDQPVKPLDRAVFWIEFVMRHKGAKHLRSAAHDLTWFQHYSIDV

SEQ ID NO: 2546 - protein, 57 aa, Homo Sapiens
QGGQVDCGEFQDTKVYCTRESNPHCGSDGQTYGNKCAFCKAIVKSGGKISLKHPGKC

SEQ ID NO: 2547 - protein, 129 aa, Homo Sapiens
KIYTRCKLAKIFSRAGLDNYWGFSLGNWICMAYYESGYNTTAPTVLDDGSIDYGIFQINSFAWCRRGKLKENNHCHVACSALITDDLTDAIICARKIVKETQGMNYWQGWKKHCEGRDLSEWKKGCEVS

SEQ ID NO: 2548 - protein, 397 aa, Homo Sapiens
RRKLLVFLLDGFRSDYISDEALESLPGFKEIVSRGVKVDYLTPDFPSLSYPNYYTLMTGRHCEVHQMIGNYMWDPTTNKSFDIGVNKDSLMPLWWNGSEPLWVTLTKAKRKVYMYYWPGCEVEILGVRPTYCLEYKNVPTDINFANAVSDALDSFKSGRADLAAIYHERIDVEGHHYGPASPQRKDALKAVDTVLKYMTKWIQERGLQDRLNVIIFSDHGMTDIFWMDKVIELNKYISLNDLQQVKDRGPVVSLWPAPGKHSEIYNKLSTVEHMTVYEKEAIPSRFYYKKGKFVSPLTLVADEGWFITENREMLPFWMNSTGRREGWQRGWHGYDNELMDMRGIFLAFGPDFKSNFRAAPIRSVDVYNVMCNVVGITPLPNNGSWSRVMCMLKGRAS

SEQ ID NO: 2549 - protein, 268 aa, Homo Sapiens
QPFSPLAPEPVLSGAHTWRSLIHHIRLMSLPIAKKYMSENKGVPLHGGDEDRPFPDFDPWWTNDCEQNESEPIPANCTGCAQKHLKVMLLEDAPRKFERLHPLVIKTGKPLLEEEIQHFLCQYPEATEGFSEGFFAKWWRCFPERWFPFPYPWRRPLNRSQMLRELFPVFTHLPFPKDASLNKCSFLHPEPVVGSKMHKMPDLFIIGSGEAMLQLIPPFQCRRHCQSVAMPIEPGDIGYVDTTHWKVYVIARGVQPLVICDGTAFSEL

SEQ ID NO: 2550 - protein, 412 aa, Homo Sapiens
APVQSQGSQNKLLLVSFDGFRWNYDQDVDTPNLDAMARDGVKARYMTPAFVTMTSPCHFTLVTGKYIENHGVVHNMYYNTTSKVKLPYHATLGIQRWWDNGSVPIWITAQRQGLRAGSFFYPGGNVTYQGVAVTRSRKEGIAHNYKNETEWRANIDTVMAWFTEEDLDLVTLYFGEPDSTGHRYGPESPERREMVRQVDRTVGYLRESIARNHLTDRLNLIITSDHGMTTVDKRAGDLVEFHKFPNFTFRDIEFELLDYGPNGMLLPKEGRLEKVYDALKDAHPKLHVYKKEAFPEAFHYANNPRVTPLLMYSDLGYVIHGRINVQFNNGEHGFDNKDMDMKTIFRAVGPSFRAGLEVEPFESVHVYELMCRLLGIVPEANDGHLATLLPMLHTESALPPDGRPTLLPKGRS

SEQ ID NO: 2551 - protein, 164 aa, Homo Sapiens
EVLLQPDFNAEKFSGLWYVVSMASDCRVFLGKKDHLSMSTRAIRPTEEGGLHVHMEFPGADGCNQVDAEYLKVGSEGHFRVPALGYLDVRIVDTDYSSFAVLYIYKELEGALSTMVQLYSRTQDVSPQALKSFQDFYPTLGLPKDMMVMLPQSDACNPESKEAP

SEQ ID NO: 2552 - protein, 542 aa, Homo Sapiens
TGPEVAQPEVDTTLGRVRGRQVGVKGTDRLVNVFLGIPFAQPPLGPDRFSAPHPAQPWEGVRDASTAPPMCLQDVESMNSSRFVLNGKQQIFSVSEDCLVLNVYSPAEVPAGSGRPVMVWVHGGALITGAATSYDGSALAAYGDVVVVTVQYRLGVLGFFSTGDEHAPGNQGFLDVVAALRWVQENIAPFGGDLNCVTVFGGSAGGSIISGLVLSPVAAGLFHRAITQSGVITTPGIIDSHPWPLAQKIANTLACSSSSPAEMVQCLQQKEGEELVLSKKLKNTIYPLTVDGTVFPKSPKELLKEKPFHSVPFLMGVNNHEFSWLIPRGWGLLDTMEQMSREDMLAISTPVLTSLDVPPEMMPTVIDEYLGSNSDAQAKCQAFQEFMGDVFINVPTVSFSRYLRDSGSPVFFYEFQHRPSSFAKIKPAWVKADHGAEGAFVFGGPFLMDESSRLEATEEEKQLSLTMMAQWTHFARTGDPNSKALPPWPQFNQAEQYLEINPVPRAGQKFREAWMQFWSETLPSKIQQWHQKQKNRKAQEDL

SEQ ID NO: 2553 - protein, 514 aa, Homo Sapiens
EQRRRAAKAPNVVLVVSDSFDGRLTFHPGSQVVKLPFINFMKTRGTSFLNAYTNSPICCPSRAAMWSGLFTHLTESWNNFKGLDPNYTTWMDVMERHGYRTQKFGKLDYTSGHHSISNRVEAWTRDVAFLLRQEGRPMVNLIRNRTKVRVMERDWQNTDKAVNWLRKEAINYTEPFVIYLGLNLPHPYPSPSSGENFGSSTFHTSLYWLEKVSHDAIKIPKWSPLSEMHPVDYYSSYTKNCTGRFTKKEIKNIRAFYYAMCAETDAMLGEIILALHQLDLLQKTIVIYSSDHGELAMEHRQFYKMSMYEASAHVPLLMMGPGIKAGLQVSNVVSLVDIYPTMLDIAGIPLPQNLSGYSLLPLSSETFKNEHKVKNLHPPWILSEFHGCNVNASTYMLRTNHWKYIAYSDGASILPQLFDLSSDPDELTNVAVKFPEITYSLDQKLHSIINYPKVSASVHQYNKEQFIKWKQSIGQNYSNVIANLRWHQDWQKEPRKYENAIDQWLKTHMNPRAV

SEQ ID NO: 2554 - protein, 252 aa, Homo Sapiens
AQIIGGHEVTPHSRPYMASVRFGGQHHCGGFLLRARWVVSAAHCFSHRDLRTGLVVLGAHVLSTAEPTQQVFGIDALTTHPDYHPMTHANDICLLRLNGSAVLGPAVGLLRLPGRRARPPTAGTRCRVAGWGFVSDFEELPPGLMEAKVRVLDPDVCNSSWKGHLTLTMLCTRSGDSHRRGFCSADSGGPLVCRNRAHGLVSFSGLWCGDPKTPDVYTQVSAFVAWIWDVVRRSSPQPGPLPGTTRPPGEAA

SEQ ID NO: 2555 - protein, 374 aa, Homo Sapiens
PAMVHYIYQRFRVLEQGLEKCTQATRAYIQEFQEFSKNISVMLGRCQTYTSEYKSAVGNLALRVERAQREIDYIQYLREADECIVSEDKTLAEMLLQEAEEEKKIRTLLNASCDNMLMGIKSLKIVKKMMDTHGSWMKDAVYNSPKVYLLIGSRNNTVWEFANIRAFMEDNTKPAPRKQILTLSWQGTGQVIYKGFLFFHNQATSNEIIKYNLQKRTVEDRMLLPGGVGRALVYQHSPSTYIDLAVDEHGLWAIHSGPGTHSHLVLTKIEPGTLGVEHSWDTPCRSQDAEASFLLCGVLYVVYSTGGQGPHRITCIYDPLGTISEEDLPNLFFPKRPRSHSMIHYNPRDKQLYAWNEGNQIIYKLQTKRKLPLK

SEQ ID NO: 2556 - protein, 490 aa, Homo Sapiens
DLGDVGPPIPSPGFSSFPGVDSSSSFSSSSRSGSSSSRSLGSGGSVSQLFSNFTGSVDDRGTCQCSVSLPDTTFPVDRVERLEFTAHVLSQKFEKELSKVREYVQLISVYEKKLLNLTVRIDIMEKDTISYTELDFELIKVEVKEMEKLVIQLKESFGGSSEIVDQLEVEIRNMTLLVEKLETLDKNNVLAIRREIVALKTKLKECEASKDQNTPVVHPPPTPGSCGHGGVVNISKPSVVQLNWRGFSYLYGAWGRDYSPQHPNKGLYWVAPLNTDGRLLEYYRLYNTLDDLLLYINARELRITYGQGSGTAVYNNNMYVNMYNTGNIARVNLTTNTIAVTQTLPNAAYNNRFSYANVAWQDIDFAVDENGLWVIYSTEASTGNMVISKLNDTTLQVLNTWYTKQYKPSASNAFMVCGVLYATRTMNTRTEEIFYYYDTNTGKEGKLDIVMHKMQEKVQSINYNPFDQKLYVYNDGYLLNYDLSVLQKPQ

SEQ ID NO: 2557 - protein, 68 aa, Homo Sapiens
DDVPQEPVPTLWNEPAELPSGEGPVESTSPGREPVDTGPPAPTVAPGPEDSTAQERLDQGGGSLGPGA

SEQ ID NO: 2558 - protein, 193 aa, Homo Sapiens
LPQLKPALGLPPTKLAPDQGTLPNQQQSNQVFPSLSLIPLTQMLTLGPDLHLLNPAAGMTPGTQTHPLTLGGLNVQQQLHPHVLPIFVTQLGAQGTILSSEELPQIFTSLIIHSLFPGGILPTSQAGANPDVQDGSLPAGGAGVNPATQGTPAGRLPTPSGTDDDFAVTTPAGIQRSTHAIEEATTESANGIQ

SEQ ID NO: 2559 - protein, 375 aa, Homo Sapiens
KPGDQILDWQYGVTQAFPHTEEEVEVDSHAYSHRWKRNLDFLKAVDTNRASVGQDSPEPRSFTDLLLDDGQDNNTQIERVNLSFDFPFYGHFLREITVATGGFIYTGEVVHRMLTATQYIAPLMANFDPSVSRNSTVRYFDNGTALVVQWDHVHLQDNYNLGSFTFQATLLMDGRIIFGYKEIPVLVTQISSTNHPVKVGLSDAFVVVHRIQQIPNVRRRTIYEYHRVELQMSKITNISAVEMTPLPTCLQFNRCGPCVSSQIGFNCSWCSKLQRCSSGFDRHRQDWVDSGCPEESKEKMCENTEPVETSSRTTTTVGATTTQFRVLTTTRRAVTSQFPTSLPTEDDTKIALHLKDNGASTDDSAAEKKGGTLHA

SEQ ID NO: 2560 - protein, 299 aa, Homo Sapiens
RSIGVVEEKVSQNLGTNLPQLGQPSSTGPSNSEHPQPALDPRSNDLARVPLKLSVPASDGFPPAGGSAVQRWPPSWGLPAMDSWPPEDPWQMMAAAAEDRLGEALPEELSYLSSAAALAPGSGPLPGESSPDATGLSPKASLLHQDSESRRLPRSNSLGAGGKILSQRPPWSLIHRVLPDHPWGTLNPSVSWGGGGPGTGWGTRPMPHPEGIWGINNQPPGTSWGNINRYPGGSWGNINRYPGGSWGNINRYPGGSWGNIHLYPGINNPFPPGVLRPPGSSWNIPAGFPNPPSPRLQWG

SEQ ID NO: 2561 - protein, 86 aa, Homo Sapiens
CCMKRKKKTANPENNLSYWNNTITMDYFNRHAVELPREIQSLETSEDQLSEPRSPANGDYRDTGMVLVNPFCQETLFVGNDQVSEI

SEQ ID NO: 2562 - protein, 631 aa, Homo Sapiens
NKETAKKIKRPKFTVPQINCDVKAGKIIDPEFIVKCPAGCQDPKYHVYGTDVYASYSSVCGAAVHSGVLDNSGGKILVRKVAGQSGYKGSYSNGVQSLSLPRWRESFIVLESKPKKGVTYPSALTYSSSKSPAAQAGETTKAYQRPPIPGTTAQPVTLMQLLAVTVAVATPTTLPRPSPSAASTTSIPRPQSVGHRSQEMDLWSTATYTSSQNRPRADPGIQRQDPSGAAFQKPVGADVSLDCKIDLSFLIDGSTSIGKRRFRIQKQLLADVAQALDIGPAGPLMGVVQYGDNPATHFNLKTHTNSRDLKTAIEKITQRGGLSNVGRAISFVTKNFFSKANGNRSGAPNVVVVMVDGWPTDKVEEASRLARESGINIFFITIEGAAENEKQYVVEPNFANKAVCRTNGFYSLHVQSWFGLHKTLQPLVKRVCDTDRLACSKTCLNSADIGFVIDGSSSVGTGNFRTVLQFVTNLTKEFEISDTDTRIGAVQYTYEQRLEFGFDKYSSRPDIINAIKRVGYWSGGTSTGAAINFALEQLFKKSKPNKRKLMILITDGRSYDDVRIPAMAAHLKGVITYAIGVAWAAQEELEVIATHPARDHSFFVDEFDNLYQYVPRIIQNICTEFNSQPRN

SEQ ID NO: 2563 - protein, 79 aa, Homo Sapiens
ATVRNEDKWKPLNNPRNRDLFFRRLQAYFKGRGLDLGTFPNPFPTNENPRPLSFQSELTASASADYEEQKNSFHNYLKG

SEQ ID NO: 2564 - protein, 102 aa, Homo Sapiens
RPRGRRGARVTDKEPKPLLFLPAAGAGRTPSGSRSAEIFPRDSNLKDKFIKHFTGPVTFSPECSKHFHRLYYNTRECSTPAYYKRCARLLTRLAVSPLCSQT

SEQ ID NO: 2565 - protein, 445 aa, Homo Sapiens
RLRGPWGRAVGERTLPGAQDRDDGEEADGGGPADQFSDGREPLPGGCSLVCKPSALAQCLLRALRRSEALEAGPRSWFSGPHLQTLCHFVLPVAPGPELAREYLQLADDGLVALDWVVGPCVRGRRITSAGGLPAVLLVIPNAWGRLTRNVLGLCLLALERGYYPVIFHRRGHHGCPLVSPRLQPFGDPSDLKEAVTYIRFRHPAAPLFAVSEGSGSALLLSYLGECGSSSYVTGAACISPVLRCREWFEAGLPWPYERGFLLYQKIALSRYATALEDTVDTSRLFRSRSLREFEEALFCHTKSFPISWDAYWDRNDPLRDVDEAAVPVLCICSADDPVCGPPDHTLTTELFHSNPYFFLLLSRHGGHCGFLRQEPLPAWSHEVILESFRALTEFFRTEERIKGLSRHRASFLGGRRRGGALQRREVSSSSNLEEIFNWKRSYTR

SEQ ID NO: 2566 - protein, 1290 aa, Homo Sapiens
GPPVPASSSTKLLMTSYSMRSTVVSRYAHTLVTSVLFNPHAEAHEAIFDLDLPHLAFISNFTMTINNKVYIAEVKEKHQAKKIYEEAHQQGKTAAHVGIRDRESEKFRISTSLAAGTEVTFSLAYEELLQRHQGQYQLVVSLRPGQLVKRLSIEVTVSERTGISYVHIPPLRTGRLRTNAHASEVDSPPSTRIERGETCVRITYCPTLQDQSSISGSGIMADFLVQYDVVMEDIIGDVQIYDDYFIHYFAPRGLPPMEKNVVFVIDVSSSMFGTKMEQTKTAMNVILSDLQANDYFNIISFSDTVNVWKAGGSIQATIQNVHSAKDYLHCMEADGWTDVNSALLAAASVLNHSNQEPGRGPSVGRIPLIIFLTDGEPTAGVTTPSVILSNVRQALGHRVSLFSLAFGDDADFTLLRRLSLENRGIARRIYEDTDAALQLKGLYEEISMPLLADVRLNYLGGLVGASPWAVFPNYFGGSELVVAGQVQPGKQELGIHLAARGPKDQLLVAHHSEGATNNSQKAFGCPGEPAPNVAHFIRRLWAYVTIGELLDAHFQARDTTTRHLLAAKVLNLSLEYNFVTPLTSLVMVQPKQASEETRRQTSTSAGPDTIMPSSSSRHGLGVSTAQPALVPKVISPKSRPVKPKFYLSSTTTASTKKMLSSKELEPLGESPHTLSMPTYPKAKIPAQQDSGTLAQPTLRTKPTILVPSNSGTLLPLKPGSLSHQNPDILPTNSRTQVPPVKPGIPASPKADTVKCVTPLHSKPGAPSHPQLGALTSQAPKGLPQSRPGVSTLQVPKYPLHTRPRVPAPKTRNNMPHLGPGILLSKTPKILLSLKPSAPPHQISTSISLSKPETPNPHMPQTPLPPRPDRPRPPLPESLSTFPNTISSSTGPSSTTTTSVLGEPLPMPFTPTLPPGRFWHQYDLLPGPQRTRQVLGPSRPGVPTMSLLNSSRPTPEGSPPNLPILLPSSILPEAISLLLLPEELELLSESMVESKFVESLNPPAFYTFLTPDEDGSPNWDGNSEEILGGAGGSMESQGSSVGLAKGTLPSIFTFSSSVDGDPHFVIQIPHSEEKICFTLNGHPGDLLQLIEDPKAGLHVSGKLLGAPPRPGHKDQTRTYFQIITVTTDKPRAYTITISRSSISLRGEGTLRLSWDQPALLKRPQLELYVAAAARLTLRLGPYLEFLVLRHRYRHPSTLQLPHLGFYVANGSGLSPSARGLIGQFQHADIRLVTGPMGPCLRRHHGPDVPVILGKRLLKDSPRLLPRWASCWLVKRSHVELLLGHPYLSYVL

SEQ ID NO: 2567 - protein, 423 aa, Homo Sapiens
RARPDMFCLFHGKRYSPGESWHPYLEPQGLMYCLRCTCSEGAHVSCYRLHCPPVHCPQPVTEPQQCCPKCVEPHTPSGLRAPPKSCQHNGTMYQHGEIFSAHELFPSRLPNQCVLCSCTEGQIYCGLTTCPEPGCPAPLPLPDSCCQACKDEASEQSDEEDSVQSLHGVRHPQDPCSSDAGRKRGPGTPAPTGLSAPLSFIPRHFRPKGAGSTTVKIVLKEKHKKACVHGGKTYSHGEVWHPAFRAFGPLPCILCTCEDGRQDCQRVTCPTEYPCRHPEKVAGKCCKICPEDKADPGHSEISSTRCPKAPGRVLVHTSVSPSPDNLRRFALEHEASDLVEIYLWKLVKDEETEAQRGEVPGPRPHSQNLPLDSDQESQEARLPERGTALPTARWPPRRSLERLPSPDPGAEGHGQSRQSDQDI

SEQ ID NO: 2568 - protein, 183 aa, Homo Sapiens
FKNDATEILYSHVVKPVPAHPSSNSTLNQARNGGRHFSNTGLDRNTRVQVGCRELRSTKYISDGQCTSISPLKELVCAGECLPLPVLPNWIGGGYGTKYWSRRSSQEWRCVNDKTRTQRIQLQCQDGSTRTYKITVVTACKCKRYTRQHNESSHNFESMSPAKPVQHHRERKRASKSSKHSMS

SEQ ID NO: 2569 - protein, 62 aa, Homo Sapiens
LVCPAVASEITVFLFLSDAAVNLQVAKLNPPPEALAAKLEVKHCTDQISFKKRLSLKKSWWK

SEQ ID NO: 2570 - protein, 445 aa, Homo Sapiens
DNKRPCLEFSQLSVKDSFRDLFIPRIETILMMYTRNNLNCAEPLFEQNNSLNVNFNTQKKTVWLIHGYRPVGSIPLWLQNFVRILLNEEDMNVIVVDWSRGATTFIYNRAVKNTRKVAVSLSVHIKNLLKHGASLDNFHFIGVSLGAHISGFVGKIFHGQLGRITGLDPAGPRFSRKPPYSRLDYTDAKFVDVIHSDSNGLGIQEPLGHIDFYPNGGNKQPGCPKSIFSGIQFIKCNHQRAVHLFMASLETNCNFISFPCRSYKDYKTSLCVDCDCFKEKSCPRLGYQAKLFKGVLKERMEGRPLRTTVFLDTSGTYPFCTYYFVLSIIVPDKTMMDGSFSFKLLNQLGMIEEPRLYEKNKPFYKLQEVKILAQFYNDFVNISSIGLTYFQSSNLQCSTCTYKIQRLMLKSLTYPERPPLCRYNIVLKDREEVFLNPNTCTPKNT

SEQ ID NO: 2571 - protein, 192 aa, Homo Sapiens
WVGGSVPNLGPAEQEQNHYLAQLFGLYGENGTLTAGGLARLLHSLGLGRVQGLRLGQHGPLTGRAASPAADNSTHRPQNPELSVDVWAGMPLGPSGWGDLEESKAPHLPRGPAPSGLDLLHRLLLLDHSLADHLNEDCLNGSQLLVNFGLSPAAPLTPRQFALLCPALLYQIDSRVCIGAPAPAPPGDLLSA

SEQ ID NO: 2572 - protein, 379 aa, Homo Sapiens
HFLVFDQKKEYYHGSFKILDPQINNNFGQSNTYQLKDLRETTENLVDEIFIDSAWKKNYIKNQVVRLTPEEDGVKVDVIMVFQFPSTEQRAVREKKIQSILNQKIRNLRALPINASSVQVNAMSSSTGELTVQASCGKRVVPLNVNRIASGVIAPKAAWPWQASLQYDNIHQCGATLISNTWLVTAAHCFQKYKNPHQWTVSFGTKINPPLMKRNVRRFIIHEKYRSAAREYDIAVVQVSSRVTFSDDIRRICLPEASASFQPNLTVHITGFGALYYGGESQNDLREARVKIISDDVCKQPQVYGNDIKPGMFCAGYMEGIYDACRGDSGGPLVTRDLKDTWYLIGIVSWGDNCGQKDKPGVYTQVTYYRNWIASKTGI

SEQ ID NO: 2573 - protein, 412 aa, Homo Sapiens
APSAAPEQVHLSYPGEPGSMTVTWTTWVPTRSEVQFGLQPSGPLPLRAQGTFVPFVDGGILRRKLYIHRVTLRKLLPGVQYVYRCGSAQGWSRRFRFRALKNGAHWSPRLAVFGDLGADNPKAVPRLRRDTQQGMYDAVLHVGDFAYNLDQDNARVGDRFMRLIEPVAASLPYMTCPGNHEERYNFSNYKARFSMPGDNEGLWYSWDLGPAHIISFSTEVYFFLHYGRHLVQRQFRWLESDLQKANKNRAARPWIITMGHRPMYCSNADLDDCTRHESKVRKGLQGKLYGLEDLFYKYGVDLQLWAHEHSYERLWPIYNYQVFNGSREMPYTNPRGPVHIITGSAGCEERLTPFAVFPRPWSAVRVKEYGYTRLHILNGTHIHIQQVSDDQDGKIVDDVWVVRPLFGRRMYL

SEQ ID NO: 2574 - protein, 88 aa, Homo Sapiens
SDYWLLATEVGRCSGEKNIENVTFHHEGFFWRCWFNGIVEENDSNIWKFWYTNQPPSKNCTHAYLSPYPFMRGEHNSTSYDSAVIYRG

SEQ ID NO: 2575 - protein, 109 aa, Homo Sapiens
MYAKCENEPFAGVSESYNGTGELGNLIAPCNANCNCSRSYYYPVCGDGVQYFSPCFAGCSNPVAHRKPKVYYNCSCIERKTEITSTAETFGFEAKAGKCETHCAKLPIF

SEQ ID NO: 2576 - protein, 694 aa, Homo Sapiens
LHLILLPATGNVAENSPPGTSVHKFSVKLSASLSPVIPGFPQIVNSNPLTEAFRVNWLSGTYFEVVTTGMEQLDFETGPNIFDLQIYVKDEVGVTDLQVLTVQVTDVNEPPQFQGNLAEGLHLYIVERANPGFIYQVEAFDPEDTSRNIPLSYFLISPPKSFRMSANGTLFSTTELDFEAGHRSFHLIVEVRDSGGLKASTELQVNIVNLNDEVPRFTSPTRVYTVLEELSPGTIVANITAEDPDDEGFPSHLLYSITTVSKYFMINQLTGTIQVAQRIDRDAGELRQNPTISLEVLVKDRPYGGQENRIQITFIVEDVNDNPATCQKFTFSIMVPERTAKGTLLLDLNKFCFDDDSEAPNNRFNFTMPSGVGSGSRFLQDPAGSGKIVLIGDLDYENPSNLAAGNKYTVIIQVQDVAPPYYKNNVYVYILTSPENEFPLIFDRPSYVFDVSERRPARTRVGQVRATDKDLPQSSLLYSISTGGASLQYPNVFWINPKTGELQLVTKVDCETTPIYILRIQATNNEDTSSVTVTVNILEENDEKPICTPNSYFLALPVDLKVGTNIQNFKLTCTDLDSSPRSFRYSIGPGNVNNHFTFSPNAGSNVTRLLLTSRFDYAGGFDKIWDYKLLVYVTDDNLMSDRKKAEALVETGTVTLSIKVIPHPTTIITTTPRPRVTYQVLRKNVYSPSAWYVP

SEQ ID NO: 2577 - protein, 101 aa, Homo Sapiens
KGKFVGYPGKYTYLFNEWRSEECDPGGCLIELTTQLTIIMTGKQIFGNIKEAIYPLALNWWRRRKARTNSEKLYSRWEQDHDLESFGPLGLFYEYLETVTQ

SEQ ID NO: 2578 - protein, 733 aa, Homo Sapiens
AVSDQHATSPFDWLLSDKGPFHRSQEYTDFVDRSRQGFSTRYKIYREFGRWKVNNLAVERRNFLGSPLPLAPEFFRNIRLLGRRPTLQQITENLIKKYGTHFLLSATLGGEESLTIFVDKRKLSKRAEGSDSTTNSSSVTLETLHQLAASYFIDRDSTLRRLHHIQIASTAIKVTETRTGPLGCSNYDNLDSVSSVLVQSPENKIQLQGLQVLLPDYLQERFVQAALSYIACNSEGEFICKENDCWCHCGPKFPECNCPSMDIQAMEENLLRITETWKAYNSDFEESDEFKLFMKRLPMNYFLNTSTIMHLWTMDSNFQRRYEQLENSMKQLFLKAQKIVHKLFSLSKRCHKQPLISLPRQRTSTYWLTRIQSFLYCNENGLLGSFSEETHSCTCPNDQVVCTAFLPCTVGDASACLTCAPDNRTRCGTCNTGYMLSQGLCKPEVAESTDHYIGFETDLQDLEMKYLLQKTDRRIEVHAIFISNDMRLNSWFDPSWRKRMLLTLKSNKYKSSLVHMILGLSLQICLTKNSTLEPVLAVYVNPFGGSHSESWFMPVNENSFPDWERTKLDLPLQCYNWTLTLGNKWKTFFETVHIYLRSRIKSNGPNGNESIYYEPLEFIDPSRNLGYMKINNIQVFGYSMHFDPEAIRDLILQLDYPYTQGSQDSALLQLLEIRDRVNKLSPPGQRRLDLFSCLLRHRLKLSTSEVVRIQSALQAFNAKLPNTMDYDTTKLCS

SEQ ID NO: 2579 - protein, 130 aa, Homo Sapiens
PDMIRHLQAVDYASRTKVFPGERVEHVTFNFTLENQIHRGGQYFNDKFIGLRLKSVSFEDSLFEECYFEDVTSSNTFFRNCTFINTVFYNTDLFEYKFVNSRLINSTFLHNKEGCPLDVTGTGEGAYMVY

SEQ ID NO: 2580 - protein, 124 aa, Homo Sapiens
PDMIRYFQDEEYKSKMKVFFGEHVYGATINFTMENQIHQHGKLVNDKFTRMYFKHVLFEDTFFDECYFEDVTSTDTYFKNCTIESTIFYNTDLYEHKFINCRFINSTFLEQKEGCHMDLEQDND

SEQ ID NO: 2581 - protein, 365 aa, Homo Sapiens
MPGGKKVAGGGSSGATPTSAAATAPSGVRRLETSEGTSAQRDEEPEEEGEEDLRDGGVPFFVNRGGLPVDEATWERMWKHVAKIHPDGEKVAQRIRGATDLPKIPIPSVPTFQPSTPVPERLEAVQRYIRELQYNHTGTQFFEIKKSRPLTGLMDLAKEMTKEALPIKCLEAVILGIYLTNSMPTLERFPISFKTYFSGNYFRHIVLGVNFAGRYGALGMSRREDLMYKPPAFRTLSELVLDFEAAYGRCWHVLKKVKLGQSVSHDPHSVEQIEWKHSVLDVERLGRDDFRKELERHARDMRLKIGKGTGPPSPTKDRKKDVSSPQRAQSSPHRRNSRSERRPSGDKKTSEPKAMPDLNGYQIRV

SEQ ID NO: 2582 - protein, 68 aa, Homo Sapiens
MGSVGSQRLEEPSVAGTPDPGVVMSFTFDSHQLEEAAEAAQGQGLRARGVPAFTDTTLDEPVPDDRYH

SEQ ID NO: 2583 - protein, 1094 aa, Homo Sapiens
YTVPNSRQDLHPLLQNMAEEIIDGSYLNALLDLIQFQSSHVWTDDLSHRVLAYLNSRNVAFTIPSLQAAVENHLEQRLHQPQKLLEDLRKTDAQQFRTAMKCLLEDKKDGLDLKDIIIDLGEIRERALQSPGVNRSLFLITLERCFQMLNSLECVEILGKVLRGSSGSFLQPDITERLPRDLREDAFKNLSAVFKDLYDKTSAHSQRALYSWMTGILQTSSNATDDSASWVSAEHLWVLGRYMVHLSFEEITKISPIEIGLFISYDNATKQLDMVYDITPELAQAFLERISSSNFNMRNTSTIHRLGLLVCFYNDLELLDATVAQVLLYQMIKCSHLRGFQAGVQKLKAELLDIAMENQTLNETLGSLSDAVVGLTYSQLESLSPEAVHGAISTLNQVSGWAKSQVIILSAKYLAHEKVLSFYNVSQMGALLAGVSTQAFCSMKRKDISQVLRSAVSQYVSDLSPAQQQGILSKMVQAEDTAPGIVEIQGAFFKEVSLFDLRRQPGFNSTVLKDKELGRSQALFLYELLLKTTRRPEELLSAGQLVKGVTCSHIDAMSTDFFLAHFQDFQNNFALLSPYQVNCLAWKYWEVSRLSMPPFLLAALPARYLASVPASQCVPFLISLGKSWLDSLVLDSHKKTSVLRKVQQCLDDSIADEYTVDIMGNLLCHLPAAIIDRGISPRAWATALHGLRDCPDLNPEQKAAVRLKLLGQYGLPQHWTAETTKDLGPFLVLFSGDELSSIATKFPEILLQAASKMARTLPTKEFLWAVFQSVRNSSDKIPSYDPMPGCHGVVAPSSDDIFKLAEANACWALEDLRCMEEDTFIRTVELLGAVQGFSRPQLMTLKEKAIQVWDMPSYWREHHIVSLGRIALALNESELEQLDLSSIDTVASLSWQTEWTPGQAESILQGYLDDSGYSIQDLKSFHLVGLGATLCAINITEIPLIKISEFRVVVARIGTLLCSTHVLAEFKRKAEVVFGDPTEWTSSVLQELGTIAAGLTKAALRMLDKDLMPYFQPSAIKCLPDEIFKELSAEQIASLGPENAAAVTHAQRRRLSPLQLQSLQQALDGAKTHSWQDAPASAGPTRTSSSRSPA

SEQ ID NO: 2584 - protein, 550 aa, Homo Sapiens
APLCLSQQLRMKGDYVLGGLFPLGEAEEAGLRSRTRPSSPVCTRFSSNGLLWALAMKMAVEEINNKSDLLPGLRLGYDLFDTCSEPVVAMKPSLMFLAKAGSRDIAAYCNYTQYQPRVLAVIGPHSSELAMVTGKFFSFFLMPQVSYGASMELLSARETFPSFFRTVPSDRVQLTAAAELLQEFGWNWVAALGSDDEYGRQGLSIFSALAAARGICIAHEGLVPLPRADDSRLGKVQDVLHQVNQSSVQVVLLFASVHAAHALFNYSISSRLSPKVWVASEAWLTSDLVMGLPGMAQMGTVLGFLQRGAQLHEFPQYVKTHLALATDPAFCSALGEREQGLEEDVVGQRCPQCDCITLQNVSAGLNHHQTFSVYAAVYSVAQALHNTLQCNASGCPAQDPVKPWQLLENMYNLTFHVGGLPLRFDSSGNVDMEYDLKLWVWQGSVPRLHDVGRFNGSLRTERLKIRWHTSDNQKPVSRCSRQCQEGQVRRVKGFHSCCYDCVDCEAGSYRQNPDDIACTFCGQDEWSPERSTRCFRRRSRFLAWGEPAVL

SEQ ID NO: 2585 - protein, 308 aa, Homo Sapiens
QPVYSSRVVGGQDAAAGRWPWQVSLHFDHNFIYGGSLVSERLILTAAHCIQPTWTTFSYTVWLGSITVGDSRKRVKYYVSKIVIHPKYQDTTADVALLKLSSQVTFTSAILPICLPSVTKQLAIPPFCWVTGWGKVKESSDRDYHSALQEAEVPIIDRQACEQLYNPIGIFLPALEPVIKEDKICAGDTQNMKDSCKGDSGGPLSCHIDGVWIQTGVVSWGLECGKSLPGVYTNVIYYQKWINATISRANNLDFSDFLFPIVLLSLALLCPSCAFGPNTIHRVGTVAEAVACIQGWEENAWRFSPRGR

SEQ ID NO: 2586 - protein, 1088 aa, Homo Sapiens
ISSWRNSTVTGHPWQVSLKSDEHHFCGGSLIQEDRVVTAAHCLDSLSEKQLKNITVTSGEYSLFQKDKQEQNIPVSKIITHPEYNSREYMSPDIALLYLKHKVKFGNAVQPICLPDSDDKVEPGILCLSSGWGKISKTSEYSNVLQEMELPIMDDRACNTVLKSMNLPPLGRTMLCAGFPDWGMDACQGDSGGPLVCRRGGGIWILAGITSWVAGCAGGSVPVRNNHVKASLGIFSKVSELMDFITQNLFTGLDRGQPLSKVGSRYITKALSSVQEVNGSQRGKGILDMEKQVGCDHDYVSLRSSSGVLFNQRSLMEDDGKQNKRVCGKILPSPLLAETSEAMVPFVSDTEDSGSGFELTVTAVQKSEAGSGCGSLAILVEEGTNHSAKYPDLYPSNTRCHWFICAPEKHIIKLTFEDFAVKFSPNCIYDAVVIYGDSEEKHKLAKLCGMLTITSIFSSSNMTVIYFKSDGKNRLQGFKARFTILPSESLNKFEPKLPPQNNPVSTVKAILHDVCGIPPFSPQWLSRRIAGGEEACPHCWPWQVGLRFLGDYQCGGAIINPVWILTAAHCVQLKNNPLSWTIIAGDHDRNLKESTEQVRRAKHIIVHEDFNTLSYDSDIALIQLSSPLEYNSVVRPVCLPHSAEPLFSSEICAVTGWGSISADGGLASRLQQIQVHVLEREVCEHTYYSAHPGGITEKMICAGFAASGEKDFCQGDSGGPLVCRHENGPFVLYGIVSWGAGCVQPWKPGVFARVMIFLDWIQSKINGPASLQTNNKCKTLKQQLPPPTPSPDSASWPGCCSEAELEKPRGFFPTPRYLLDYRGRLECSWVLRVSASSMAKFTIEYLSLLGSPVCQDSVLIIYEERHSKRKTAGGLHGRRLYSMTFMSPGPLVRVTFHALVRGAFGISYIVLKVLGPKDSKITRLSQSSNREHLVPCEDVLLTKPEGIMQIPRNSHRTTMGCQWRLVAPLNHIIQLNIINFPMKPTTFVCHGHLRVYEGFGPGKKLIASFAGTLAMILTKDILKREKLNFINTYIMHIWENSVYDNVRSVGKRKQKKFASNLSYSMEAEKSRIQVPADLVPAKGSLSGS

SEQ ID NO: 2587 - protein, 668 aa, Homo Sapiens
LDLPAGSCAFEESTCGFDSVLASLPWILNEEGHYIYVDTSFGKQGEKAVLLSPDLQAEEWSCLRLVYQITTSSESLSDPSQLNLYMRFEDESFDRLLWSAKEPSDSWLIASLDLQNSSKKFKILIEGVLGQGNTASIALFEIKMTTGYCIECDFEENHLCGFVNRWNPNVNWFVGGGSIRNVHSILPQDHTFKSELGHYMYVDSVYVKHFQEVAQLISPLTTAPMAGCLSFYYQIQQGNDNVFSLYTRDVAGLYEEIWKADRPGNAAWNLAEVEFNAPYPMEVIFEVAFNGPKGGYVALDDISFSPVHCQNQTELLFSAVEASCNFEQDLCNFYQDKEGPGWTRVKVKPNMYRAGDHTTGLGYYLLANTKFTSQPGYIGRLYGPSLPGNLQYCLRFHYAIYGFLKMSDTLAVYIFEENHVVQEKIWSVLESPRGVWMQAEITFKKPMPTKVVFMSLCKSFWDCGLVALDDITIQLGSCSSSEKLPPPPGECTFEQDECTFTQEKRNRSSWHRRRGETPTSYTGPKGDHTTGVGYYMYIEASHMVYGQKARLLSRPLRGVSGKHCLTFFYHMYGGGTGLLSVYLKKEEDSEESLLWRRRGEQSISWLRALIEYSCERQHQIIFEAIRGVSIRSDIAIDDVKFQAGPCGEMEDTTQQSSGYSEDLNEIEY

SEQ ID NO: 2588 - protein, 217 aa, Homo Sapiens
MAGRHQNRSFPLPGVQSSGQVHAFGNCSDSDILEEDAEVYELRSRGKEKVRRSTSRDRLDDIIVLTKDIQEGDTLNAIALQYCCTVADIKRVNNLISDQDFFALRSIKIPVKKFSSLTETLCPPKGRQTSRHSSVQYSSEQQEILPANDSLAYSDSAGSFLKEVDRDIEQIVKCTDNKRENLNEVVSALTAQQMRFEPDNKNTQRKDPYYGADWGIG

SEQ ID NO: 2589 - protein, 1096 aa, Homo Sapiens
ATPNFLANPSSSSRWIPLQPMPVAWAFVQKTSALLWLLLLGTSLSPAWGQAKIPLETVKLWADTFGGDLYNTVTKYSGSLLLQKKYKDVESSLKIEEVDGLELVRKFSEDMENMLRRKVEAVQNLVEAAEEADLNHEFNESLVFDYYNSVLINERDEKGNFVELGAEFLLESNAHFSNLPVNTSISSVQLPTNVYNKDPDILNGVYMSEALNAVFVENFQRDPTLTWQYFGSATGFFRIYPGIKWTPDENGVITFDCRNRGWYIQAATSPKDIVILVDVSGSMKGLRMTIAKHTITTILDTLGENDFVNIIAYNDYVHYIEPCFKGILVQADRDNREHFKLLVEELMVKGVGVVDQALREAFQILKQFQEAKQGSLCNQAIMLISDGAVEDYEPVFEKYNWPDCKVRVFTYLIGREVSFADRMKWIACNNKGYYTQISTLADTQENVMEYLHVLSRPMVINHDHDIIWTEAYMDSKLLSSQAQSLTLLTTVAMPVFSKKNETRSHGILLGVVGSDVALRELMKLAPRYKLGVHGYAFLNTNNGYILSHPDLRPLYREGKKLKPKPNYNSVDLSEVEWEDQAESLRTAMINRETGTLSMDVKVPMDKGKRVLFLTNDYFFTDISDTPFSLGVVLSRGHGEYILLGNTSVEEGLHDLLHPDLALAGDWIYCITDIDPDHRKLSQLEAMIRFLARKDPDLECDEELVREVLFDAVVTAPMEAYWTALALNMSEESEHVVDMAFLGTRAGLLRSSLFVGSEKVSDRKFLTPEDEASVFTLDRFPLWYRQASEHPAGSFVFNLRWAEGPESAGEPMVVTASTAVAVTVDKRTAIAAAAGVQMKLEFLQRKFWAATRQCSTVDGPCTQSCEDSDLDCFVIDNNGFILISKRSRETGRFLGEVDGAVLTQLLSMGVFSQVTMYDYQAMCKPSSHHHSAAQPLVSPISAFLTATRWLLQELVLFLLEWSVWGSWYDRGAEAKSVFHHSHKHKKQDPLQPCDTEYPVFVYQPAIREANGIVECEPCQKVFVVQQIPNSNLLLLVTDPTCDCSIFPPVLQEATEVKYNASVKCDRMRSQKLRRRPDSCHAFHPEENAQDCGGASDT

SEQ ID NO: 2590 - protein, 78 aa, Homo Sapiens
HRSVSGLKQTLLAESEALTSYSHRVFSAWDFGLCGDVHVRLRQRIILYELKVELEETVVRRQAAVRTLGQQARVWLVR

SEQ ID NO: 2591 - protein, 1009 aa, Homo Sapiens
STQGFHVDHTAELRGIRWTSSLRRETSDYHRTLTPTLEALLHFLLRPLQTLSLGLEEELLQRGIRARLREHGISLAAYGTIVSAELTGRHKGPLAERDFKSGRCPGNSFSCGNSQCVTKVNPECDDQEDCSDGSDEAHCECGLQPAWRMAGRIVGGMEASPGEFPWQASLRENKEHFCGAAIINARWLVSAAHCFNEFQDPTKWVAYVGATYLSGSEASTVRAQVVQIVKHPLYNADTADFDVAVLELTSPLPFGRHIQPVCLPAATHIFPPSKKCLISGWGYLKEDFLVKPEVLQKATVELLDQALCASLYGHSLTDRMVCAGYLDGKVDSCQGDSGGPLVCEEPSGRFFLAGIVSWGIGCAEARRPGVYARVTRLRDWILEATTKASMPLAPTMAPAPAAPSTAWPTSPESPVVSTPTKSMQALSTVPLDWVTVPKLQECGARPAMEKPTRVVGGFGAASGEVPWQVSLKEGSRHFCGATVVGDRWLLSAAHCFNHTKVEQVRAHLGTASLLGLGGSPVKIGLRRVVLHPLYNPGILDFDLAVLELASPLAFNKYIQPVCLPLAIQKFPVGRKCMISGWGNTQEGNATKPELLQKASVGIIDQKTCSVLYNFSLTDRMICAGFLEGKVDSCQGDSGGPLACEEAPGVFYLAGIVSWGIGCAQVKKPGVYTRITRLKGWILEIMSSQPLPMSPPSTTRMLATTSPRTTAGLTVPGATPSRPTPGAASRVTGQPANSTLSAVSTTARGQTPFPDAPEATTHTQLPDCGLAPAALTRIVGGSAAGRGEWPWQVSLWLRRREHRCGAVLVAERWLLSAAHCFDVYGDPKQWAAFLGTPFLSGAEGQLERVARIYKHPFYNLYTLDYDVALLELAGPVRRSRLVRPICLPEPAPRPPDGTRCVITGWGSVREGGSMARQLQKAAVRLLSEQTCRRFYPVQISSRMLCAGFPQGGVDSCSGDAGGPLACREPSGRWVLTGVTSWGYGCGRPHFPGVYTRVAAVRGWIGQHIQE

SEQ ID NO: 2592 - protein, 424 aa, Homo Sapiens
HPDRIIFPNHACEDPPAVLLEVQGTLQRPLVRDSRTSPANCTWLILGSKEQTVTIRFQKLHLACGSERLTLRSPLQPLISLCEAPPSPLQLPGGNVTITYSYAGARAPMGQGFLLSYSQDWLMCLQEEFQCLNHRCVSAVQRCDGVDACGDGSDEAGCSSDPFPGLTPRPVPSLPCNVTLEDFYGVFSSPGYTHLASVSHPQSCHWLLDPHDGRRLAVRFTALDLGFGDAVHVYDGPGPPESSRLLRSLTHFSNGKAVTVETLSGQAVVSYHTVAWSNGRGFNATYHVRGYCLPWDRPCGLGSGLGAGEGLGERCYSEAQRCDGSWDCADGTDEEDCPGCPPGHFPCGAAGTSGATACYLPADRCNYQTFCADGADERRCRHCQPGNFRCRDEKCVYETWVCDGQPDCADGSDEWDCSYVLPRK

SEQ ID NO: 2593 - protein, 129 aa, Homo Sapiens
KIYTRCKLAKIFSRAGLDNYWGFSLGNWICMAYYESGYNTTAQTVLDDGSIDYGIFQINSFAWCRRGKLKENNHCHVACSALVTDDLTDAIICAKKIVKETQGMNYWQGWKKHCEGRDLSDWKKDCEVS

SEQ ID NO: 2594 - protein, 267 aa, Homo Sapiens
GMAAPRLPSPLLSEEGGENPEASPAPGPEAGPPLNLFTSFPGDSLLCGRTPLRIVGGVDAEEGRWPWQVSVRTKGRHICGGTLVTATWVLTAGHCISSRFHYSVKMGDRSVYNENTSVVVSVQRAFVHPKFSTVTTIRNDLALLQLQHPVNFTSNIQPICIPQENFQVEGRTRCWVTGWGKTPEREKLASEILQDVDQYIMCYEECNKIIQKALSSTKDVIIKGMVCGYKEQGKDSCQGDSGGRLACEYNDTWVQVGIVSWGIGCGR

SEQ ID NO: 2595 - protein, 139 aa, Homo Sapiens
ALQPPTATVLVQQGTCEVIAAHRCCNRNRIEERSQTVKCSCFSGQVAGTTRAKPSCVDDLLLAAHCARRDPRAALRLLLPQPPSSCRDGGVRWSPACRGRSVRCSRTCRDGAAAVDTKSKPPRSHDSSWGSRPGQERLD

SEQ ID NO: 2596 - protein, 114 aa, Homo Sapiens
MLLCHGSLQHTFQQHHLHRPEGGTCEVIAAHRCCNKNRIEERSQTVKCSCLPGKVAGTTRNRPSCVDASIVIGKWWCEMEPCLEGEECKTLPDNSGWMCATGNKIKTTRIHPRT

SEQ ID NO: 2597 - protein, 178 aa, Homo Sapiens
QTDGRNGYTAVIEVTSGGPWGDWAWPEMCPDGFFASGFSLKVEPPQGIPGDDTALNGIRLHCARGNVLGNTHVVESQSGSWGEWSEPLWCRGGAYLVAFSLRVEAPTTLGDNTAANNVRFRCSDGEELQGPGLSWGDFGDWSDHCPKGACGLQTKIQGPRGLGDDTALNDARLFCCRS

SEQ ID NO: 2598 - protein, 73 aa, Homo Sapiens
KKMAKNSRTSLASASNENYTFCWRVFCAWDYLIGNPEAAESKTAAIVNSIREAILEEQEKKKSKNLAVTICLR

SEQ ID NO: 2599 - protein, 281 aa, Homo Sapiens
ESLVKFFIPQRRKSVAGEIVLITGAGHGIGRQTTYEFAKRQSILVLWDINKRGVEETAAECRKLGVTAHAYVVDCSNREEIYRSLNQVKKEVGDVTIVVNNAGTVYPADLLSTKDEEITKTFEVNILGHFWITKALLPSMMERNHGHIVTVASVCGHEGIPYLIPYCSSKFAAVGFHRGLTSELQALGKTGIKTSCLCPVFVNTGFTKNPSTRLWPVLETDEVVRSLIDGILTNKKMIFVPSYINIFLRLQKFLPERASAILNRMQNIQFEAVVGHKIKMK

SEQ ID NO: 2600 - protein, 73 aa, Homo Sapiens
GGSKCVSNTPGYCRTCCHWGETALFMCNASRKCCISYSFLPKPDLPQLIGNHWQSRRRNTQRKDKKQQTTVTS

SEQ ID NO: 2601 - protein, 193 aa, Homo Sapiens
SYPFSHSMKPHLHPRLYHGCYGDIMTMKTSGATCDANSVMNCGIRGSEMFAEMDLRAIKPYQTLIKEVGQRHCVDPAVIAAIISRESHGGSVLQDGWDHRGLKFGLMQLDKQTYHPVGAWDSKEHLSQATGILTERIKAIQKKFPTWSVAQHLKGGLSAFKSGIEAIATPSDIDNDFVNDIIARAKFYKRQSF

SEQ ID NO: 2602 - protein, 103 aa, Homo Sapiens
LASGRLPLAVHSAQHGPGSGAPWLRIARRALRFVLSKHWGDDCYLTNRLWQDLKPPSHVENGQELRLAPPVQWALQVQGNQLQTAVLCLRMAPPEPAGSRQRI

SEQ ID NO: 2603 - protein, 378 aa, Homo Sapiens
LAVEKTYYYQGDFHISGVTYNDNCENAASQASTNLSKDIETKMLNAFQNSSIYKEYVKSEVIKLLPNANGSNVQLQLKFKFPPAEGVSMRTKIKAKLHQMLKNNMASWNAVPASIKLMEISKAASEMLTNNCCGRQVANSIITGNKIVNGKSSLEGAWPWQASMQWKGRHYCGASLISSRWLLSAAHCFAKKNNSKDWTVNFGVVVNKPYMTRKVQNIIFHENYSSPGLHDDIALVQLAEEVSFTEYIRKICLPEAKMKLSENDNVVVTGWGTLYMNGSFPVILQEAFLKIIDNKICNASYAYSGFVTDSMLCAGFMSGEADACQNDSGGPLAYPDSRNIWHLVGIVSWGDGCGKKNKPGVYTRVTSYRNWITSKTGL

SEQ ID NO: 2604 - protein, 327 aa, Homo Sapiens
TRQDYEELEKQLKEVFKERSTILRQLTKTSRELDGIKVNLQSLKNDEQSAKTDVQKLLELGQKQREEMKSLQEALQNQLKETSEKAEKHQATINFLKTEVERKSKMIRDLQNENKSLKNKLLSGNKLCGIHAEESKKIQAQLKELRYGKKDLLFKAQQLTDLEQKLAVAKNELEKAALDRESQMKAMKETVQLCLTSVFRDQPPPPLSLITSNPTRMLLPPRNIASKLPDAAAKSKPQQSASGNNESSQVESTKEGNPSTTACDSQDEGRPCSMKHKESPPSNATAETEPIPQKLQMPPCSECEVKKAPEKPLTSFEGMAAREEKIL

SEQ ID NO: 2605 - protein, 506 aa, Homo Sapiens
ASGIYFYSNKYLDPNDFGAVRVGRAVATTAVISYDYLTSLKSVPYGSEEYLQLRSKVHLRSARRLCELCCANRGTFIKVGQHLGALDYLLPEEYTSTLKVLHSQAPQSSMQEIRQVIREDLGKEIHDLFQSFDDTPLGTASLAQVHKAVLHDGRTVAVKVQHPKVRAQSSKDILLMEVLVLAVKQLFPEFEFMWLVDEAKKNLPLELDFLNEGRNAEKVSQMLRHFDFLKVPRIHWDLSTERVLLMEFVDGGQVNDRDYMERNKIDVNEISRHLGKMYSEMIFVNGFVHCDPHPGNVLVRKHPGTGKAEIVLLDHGLYQMLTEEFRLNYCHLWQSLIWTDMKRVKEYSQRLGAGDLYPLFACMLTARSWDSVNRGISQAPVTATEDLEIRNNAANYLPQISHLLNHVPRQMLLILKTNDLLRGIEAALGTRASASSFLNMSRCCIRALAEHKKKNTCSFFRRTQISFSEAFNLWQINLHELILRVKGLKLADRVLALICWLFPAPL

SEQ ID NO: 2606 - protein, 747 aa, Homo Sapiens
FPKIERRREIAHVHAEKGQSDKMNTDDLENSSVTSKQTPQLVVSEDPMMMSAVPSATSLNKAFSINKEIQPGQAGLMQTERPGVSTPTESGVPSAEEVFGSSQPERISPESGLAKAMLTIAITATPSLTVDEKEELLTSTNFQPIVEEITETTKGFLKYMDNQSFATESQEGVGLGHSPSSYVNTKEMLTTNPKTEKFEADTDHRTTSFPGAESTAGSEPGSLTPDKEKPSQMTADNTQAAATKQPLETSEYTLSVEPETDSLLGAPEVTVSVSTAVPAASALSDEWDDTKLESVSRIRTPKLGDNEETQVRTEMSQTAQVSHEGMEGGQPWTEAAQVALGLPEGETHTGTALLIAHGNERSPAFTDQSSFTPTSLMEDMKVSIVNLLQSTGDFTESTKENDALFFLETTVSVSVYESEADQLLGNTMKDIITQEMTTAVQEPDATLSMVTQEQVATLELIRDSGKTEEEKEDPSPVSDVPGVTQLSRRWEPLATTISTTVVPLSFEVTPTVEEQMDTVTGPNEEFTPVLGSPVTPPGIMVGEPSISPALPALEASSERRTVVPSITRVNTAASYGLDQLESEEGEEDEDEEDEEDEDEEEEDEEEDEEDKDADSLDEGLDGDTELPGFTLPGITSQEPGLEEGNMDLLEGATYQVPDALEWEQQNQGLVRSWMEKLKDKAGYMSGMLVPVGVGIAGALFILGALYSIKVMNRRRRNGFKRHKRKQREFNSMQDRVMLLADSSEDEF

SEQ ID NO: 2607 - protein, 403 aa, Homo Sapiens
QPLLAHGDKSLQGPQPPRHQLSEPAPAYHRITPTITNFALRLYKELAADAPGNIFFSPVSISTTLALLSLGAQANTSALILEGLGFNLTETPEADIHQGFRSLLHTLALPSPKLELKVGNSLFLDKRLKPRQHYLDSIKELYGAFAFSANFTDSVTTGRQINDYLRRQTYGQVVDCLPEFSQDTFMVLANYIFFKAKWKHPFSRYQTQKQESFFVDERTSLQVPMMHQKEMHRFLYDQDLACTVLQIEYRGNALALLVLPDPGKMKQVEAALQPQTLRKWGQLLLPSLLDLHLPRFSISGTYNLEDILPQIGLTNILNLEADFSGVTGQLNKTISKVSHKAMVDMSEKGTEAGAASGLLSQPPSLNTMSDPHAHFNRPFLLLLWEVTTQSLLFLGKVVNPVAG

SEQ ID NO: 2608 - protein, 246 aa, Homo Sapiens
APAELRVRVRLPDGQVTEESLQADSDADSISLELRKPDGTLVSFTADFKKDVKVFRALILGELEKGQSQFQALCFVTQLQHNEIIPSEAMAKLRQKNPRAVRQAEEVRGLEHLHMDVAVNFSQGALLSPHLHNVCAEAVDAIYTRQEDVRFWLEQGVDSSVFEALPKASEQAELPRCRQVGDHGKPCVCRYGLSLAWYPCMLKYCHSRDRPTPYKCGIRSCQKSYSFDFYVPQRQLCLWDEDPYPG

SEQ ID NO: 2609 - protein, 419 aa, Homo Sapiens
VSFGIRKLYMKSLLKIFAWATLRMERGAKEKNHQLYKPYTNGIIAKDPTSLEEEIKEIRRSGSSKALDNTPEFELSDIFYFCRKGMETIMDDEVTKRFSAEELESWNLLSRTNYNFQYISLRLTVLWGLGVLIRYCFLLPLRIALAFTGISLLVVGTTVVGYLPNGRFKEFMSKHVHLMCYRICVRALTAIITYHDRENRPRNGGICVANHTSPIDVIILASDGYYAMVGQVHGGLMGVIQRAMVKACPHVWFERSEVKDRHLVAKRLTEHVQDKSKLPILIFPEGTCINNTSVMMFKKGSFEIGATVYPVAIKYDPQFGDAFWNSSKYGMVTYLLRMMTSWAIVCSVWYLPPMTREADEDAVQFANRVKSAIARQGGLVDLLWDGGLKREKVKDTFKEEQQKLYSKMIVGNHKDRSRS

SEQ ID NO: 2610 - protein, 127 aa, Homo Sapiens
SPALQDLQATEANCTVLSVQQIGEVFECTFTCGADCRGTSQYPCVQVYVNNSESNSRALLHSDEHQLLTNPKCSYIPPCKRENQKNLESVMNWQQYWKDEIGSQPFTCYFNQHQRPDDVLLHRTHDE

SEQ ID NO: 2611 - protein, 394 aa, Homo Sapiens
ANAPSAYPRPSSTKSTPASQVYSLNTDFAFRLYRRLVLETPSQNIFFSPVSVSTSLAMLSLGAHSVTKTQILQGLGFNLTHTPESAIHQGFQHLVHSLTVPSKDLTLKMGSALFVKKELQLQANFLGNVKRLYEAEVFSTDFSNPSIAQARINSHVKKKTQGKVVDIIQGLDLLTAMVLVNHIFFKAKWEKPFHPEYTRKNFPFLVGEQVTVHVPMMHQKEQFAFGVDTELNCFVLQMDYKGDAVAFFVLPSKGKMRQLEQALSARTLRKWSHSLQKRWIEVFIPRFSISASYNLETILPKMGIQNVFDKNADFSGIAKRDSLQVSKATHKAVLDVSEEGTEATAATTTKFIVRSKDGPSYFTVSFNRTFLMMITNKATDGILFLGKVENPTKS

SEQ ID NO: 2612 - protein, 65 aa, Homo Sapiens
VTSSTSYFLPYWLFGSQMGKPVSFSTFRRCNYPVRGEGHSLIMVEECGRYASFNAIPSLAWQMCT

SEQ ID NO: 2613 - protein, 304 aa, Homo Sapiens
DHYSPSGRHRLGPSPEPAASSQQAEAVRKRLRRRREGGAHAKDCGTAPLKDVLQGSRIIGGTEAQAGAWPWVVSLQIKYGRVLVHVCGGTLVRERWVLTAAHCTKDASDPLMWTAVIGTNNIHGRYPHTKKIKIKAIIIHPNFILESYVNDIALFHLKKAVRYNDYIQPICLPFDVFQILDGNTKCFISGWGRTKEEGNATNILQDAEVHYISREMCNSERSYGGIIPNTSFCAGDEDGAFDTCRGDSGGPLMCYLPEYKRFFVMGITSYGHGCGRRGFPGVYIGPSFYQKWLTEHFFHASTQG

SEQ ID NO: 2614 - protein, 164 aa, Homo Sapiens
YEVFNIISPSNNGGNVQETVTIDNEKNTAIINIHAGSCSSTTIFDYKHGYIASRVLSRRACFILKMDHQNIPPLNNLQWYIYEKQALDNMFSSKYTWVKYNPLESLIKDVDWFLLGSPIEKLCKHIPLYKGEVVENTHNVGAGGCAKAGLLGILGISICADIHV

SEQ ID NO: 2615 - protein, 434 aa, Homo Sapiens
QVTGVLDDCLCDIDSIDNFNTYKIFPKIKKLQERDYFRYYKVNLKRPCPFWAEDGHCSIKDCHVEPCPESKIPVGIKAGHSNKYLKMANNTKELEVCEQANKLGAINSTLSNQSKEAFIDWARYDDSRDHFCELDDERSPAAQYVDLLLNPERYTGYKGTSAWRVWNSIYEENCFKPRSVYRPLNPLAPSRGEDDGESFYTWLEGLCLEKRVFYKLISGLHASINLHLCANYLLEETWGKPSWGPNIKEFKHRFDPVETKGEGPRRLKNLYFLYLIELRALSKVAPYFERSIVDLYTGNAEEDADTKTLLLNIFQDTKSFPMHFDEKSMFAGDKKGAKSLKEEFRLHFKNISRIMDCVGCDKCRLWGKLQTQGLGTALKILFSEKEIQKLPENSPSKGFQLTRQEIVALLNAFGRLSTSIRDLQNFKVLLQHSR

SEQ ID NO: 2616 - protein, 109 aa, Homo Sapiens
ASTGQPEDDTETTGLEGGVAMPGAEDDVVTPGTSEDRYKSGLTTLVATSVNSVTGIRIEDLPTSESTVHAQEQSPSATASNVATSHSTEKVDGDTQTTVEKDGLSTVTL

SEQ ID NO: 2617 - protein, 996 aa, Homo Sapiens
MKPGCAAGSPGNEWIFFSTDEITTRYRNTMSNGGLQRSVILSALILLRAVTGFSGDGRAIWSKNPNFTPVNESQLFLYDTFPKNFFWGIGTGALQVEGSWKKDGKGPSIWDHFIHTHLKNVSSTNGSSDSYIFLEKDLSALDFIGVSFYQFSISWPRLFPDGIVTVANAKGLQYYSTLLDALVLRNIEPIVTLYHWDLPLALQEKYGGWKNDTIIDIFNDYATYCFQMFGDRVKYWITIHNPYLVAWHGYGTGMHAPGEKGNLAAVYTVGHNLIKAHSKVWHNYNTHFRPHQKGWLSITLGSHWIEPNRSENTMDIFKCQQSMVSVLGWFANPIHGDGDYPEGMRKKLFSVLPIFSEAEKHEMRGTADFFAFSFGPNNFKPLNTMAKMGQNVSLNLREALNWIKLEYNNPRILIAENGWFTDSRVKTEDTTAIYMMKNFLSQVLQAIRLDEIRVFGYTAWSLLDGFEWQDAYTIRRGLFYVDFNSKQKERKPKSSAHYYKQIIRENGFSLKESTPDVQGQFPCDFSWGVTESVLKPESVASSPQFSDPHLYVWNATGNRLLHRVEGVRLKTRPAQCTDFVNIKKQLEMLARMKVTHYRFALDWASVLPTGNLSAVNRQALRYYRCVVSEGLKLGISAMVTLYYPTHAHLGLPEPLLHADGWLNPSTAEAFQAYAGLCFQELGDLVKLWITINEPNRLSDIYNRSGNDTYGAAHNLLVAHALAWRLYDRQFRPSQRGAVSLSLHADWAEPANPYADSHWRAAERFLQFEIAWFAEPLFKTGDYPAAMREYIASKHRRGLSSSALPRLTEAERRLLKGTVDFCALNHFTTRFVMHEQLAGSRYDSDRDIQFLQDITRLSSPTRLAVIPWGVRKLLRWVRRNYGDMDIYITASGIDDQALEDDRLRKYYLGKYLQEVLKAYLIDKVRIKGYYAFKLAEEKSKPRFGFFTSDFKAKSSIQFYNKVISSRGFPFENSSSRCSQTQENTECTVCLFLVQKKP

SEQ ID NO: 2618 - protein, 223 aa, Homo Sapiens
SRGPAHYEMLGRCRMVCDPHGPRGPGPDGAPASVPPFPPGAKGEVGRRGKAGLRGPPGPPGPRGPPGEPGRPGPPGPPGPGPGGVAPAAGYVPRIAFYAGLRRPHEGYEVLRFDDVVTNVGNAYEAASGKFTCPMPGVYFFAYHVLMRGGDGTSMWADLMKNGQVRASAIAQDADQNYDYASNSVILHLDVGDEVFIKLDGGKVHGGNTNKYSTFSGFIIYPD

SEQ ID NO: 2619 - protein, 757 aa, Homo Sapiens
GYKAEVMVSQVYSGSLRVLNRHFSQDLTRRESSAFRSETAKAQKMLKELITSTRLGTYYNSSSVYSFGEGPLTCFFWFILQIPEHRRLMLSPEVVQALLVEELLSTVNSSAAVPYRAEYEVDPEGLVILEASVKDIAALNSTLGCYRYSYVGQGQVLRLKGPDHLASSCLWHLQGPKDLMLKLRLEWTLAECRDRLAMYDVAGPLEKRLITSVYGCSRQEPVVEVLASGAIMAVVWKKGLHSYYDPFVLSVQPVVFQACEVNLTLDNRLDSQGVLSTPYFPSYYSPQTHCSWHLTVPSLDYGLALWFDAYALRRQKYDLPCTQGQWTIQNRRLCGLRILQPYAERIPVVATAGITINFTSQISLTGPGVRVHYGLYNQSDPCPGEFLCSVNGLCVPACDGVKDCPNGLDERNCVCRATFQCKEDSTCISLPKVCDGQPDCLNGSDEEQCQEGVPCGTFTFQCEDRSCVKKPNPQCDGRPDCRDGSDEEHCDCGLQGPSSRIVGGAVSSEGEWPWQASLQVRGRHICGGALIADRWVITAAHCFQEDSMASTVLWTVFLGKVWQNSRWPGEVSFKVSRLLLHPYHEEDSHDYDVALLQLDHPVVRSAAVRPVCLPARSHFFEPGLHCWITGWGALREGALRADAVALFYGWRNQGSETCCCPISNALQKVDVQLIPQDLCSEVYRYQVTPRMLCAGYRKGKKDACQGDSGGPLVCKALSGRWFLAGLVSWGLGCGRPNYFGVYTRITGVISWIQQVVT

SEQ ID NO: 2620 - protein, 52 aa, Homo Sapiens
CTAVPVSALGNGSLAPGLPAPELARLLARVPCPEIYDGDWLLAREVAVRYLR

SEQ ID NO: 2621 - protein, 207 aa, Homo Sapiens
GEHAKEGECPPHKNPCKELCQGDELCPAEQKCCTTGCGRICRDIPKGRKRDCPRVIRKQSCLKRCITDETCPGVKKCCTLGCNKSCVVPISKQKLAEFGGECPADPLPCEELCDGDASCPQGHKCCSTGCGRTCLGDIEGGRGGDCPKVLVGLCIVGCVMDENCQAGEKCCKSGCGRFCVPPVLPPKLTMNPNWTVRSDSELEIPVP

SEQ ID NO: 2622 - protein, 259 aa, Homo Sapiens
YVIVSSVSWAVTNEVDEELDSASTEEAMPALLEDSGSIWQQSFPASAHKEDAHLRPRAGAARARQPPAPPGMFSYRREGGQTASAPPGPRLRAATARSLAHASVWGCLATVSTHKKIQGLPFGNCLPVSDGPFNNSTGIPFFYMTAKDPVVADLMKNPMASLMLPESEGEFCRKNIVDPEDPRCVQLTLTGQMIAVSPEEVEFAKQAMFSRHPGMRKWPRQYEWFFMKMRIEHIWLQKWYGGASSISREEYFKAVPRKA

SEQ ID NO: 2623 - protein, 408 aa, Homo Sapiens
LSPQPGAGHDEGPGSGWAAKGTVRGWNRRARESPGHVSEPDRTQLSQDLGGGTLAMDTLPDNRTRVVEDNHSYYVSRLYGPSEPHSRELWVDVAEANRSQVKIHTILSNTHRQASRVVLSFDFPFYGHPLRQITMATGGFIFMGDVIHRMLTATQYVAPLMANFNPGYSDNSTVVYFDNGTVFVVQWDHVYLQGWEDKGSFTFQAALHHDGRIVFAYKEIPMSVPEISSSQHPVKTGLSDAFMILNPSPDVPESRRRSIFEYHRIELDPSKVTSMSAVEFTPLPTCLQHRSCDACMSSDLTFNCSWCHVLQRCSSGFDRYRQEWMDYGCAQEAEGRMCEDFQDEDHDSASPDTSFSPYDGDLTTTSSSLFIDSLTTEDDTKLNPYAGGDGLQNNLSPKTKGTPVHLGT

SEQ ID NO: 2624 - protein, 716 aa, Homo Sapiens
EPPGLTQLSPGAPPQAPDLLYADGLRAYAAGAWAPAVALLREALRSQAALGRVRLDCGASCAADPGAALPAVLLGAPEPDSGPGPTQGSWERQLLRAALRRADCLTQCAARRLGPGGAARLRVGSALRDAFRRREPYNYLQRAYYQLKKLDLAAAAAHTFFVANPMHLQMREDMAKYRRMSGVRPQSFRDLETPPHWAAYDTGLELLGRQEAGLALPRLEEALQGSLAQMESCRADCEGPEEQQGAEEEEDGAASQGGLYEAIAGHWIQVLQCRQRCVGETATRPGRSFPVPDFLPNQLRRLHEAHAQVGNLSQAIENVLSVLLFYPEDEAAKRALNQYQAQLGEPRPGLGPREDIQRFILRSLGEKRQLYYAMEHLGTSFKDPDPWTPAALIPEALREKLREDQEKRPWDHEPVKPKPLTYWKDVLLLEGVTLTQDSRQLNGSERAVLDGLLTPAECGVLLQLAKDAAGAGARSGYRGRRSPHTPHERFEGLTVLKAAQLARAGTVGSQGAKLLLEVSERVRTLTQAYFSPERPLHLSFTHLVCRSAIEGEQEQRMDLSHPVHADNCVLDPDTGECWREPPAYTYRDYSGLLYLNDDFQGGDLFFTEPNALTVTARVRPRCGRLVAFSSGVENPHGVWAVTRGRRCALALWHTWAPEHREQEWIEAKELLQESQEEEEEEEEEMPSKDPSPEPPSRRHQRVQDKTGRAPRVREEL

SEQ ID NO: 2625 - protein, 332 aa, Homo Sapiens
YDRSLAQHRQEIVDKSVSPWSLETYSYNIYHPMGEIYEWMREISEKYKEVVTQHFLGVTYETHPIYYLKISQPSGNPKKIIWMDCGIHAREWIAPAFCQWFVKEILQNHKDNSRIRKLLRNLDFYVLPVLNIDGYIYTWTTDRLWRKSRSPHNNGTCFGTDLNRNFNASWCSIGASRNCQDQTFCGTGPVSEPETKAVASFIESKKDDILCFLTMHSYGQLILTPYGYTKNKSSNHPEMIQVGQKAANALKAKYGTNYRVGSSADILYASSGSSRDWARDIGIPFSYTFELRDSGTYGFVLPEAQIQPTCEETMEAVLSVLDDVYAKHWHSD

SEQ ID NO: 2626 - protein, 107 aa, Homo Sapiens
LENFTAFIPGHRCWVHILDNDTVSDNDTGALSQDALLRISIPLDSNMRPEKCRRFVHPQWQLLHLNGTFPNTSDADMEPCVDGWVYDRISFSSTIVTEWDLVCDSQS

SEQ ID NO: 2627 - protein, 244 aa, Homo Sapiens
GCAEAGRCCPGRDPACFARGWRLDRVYGTCFCDQACRFTGDCCFDYDRACPARPCFVGEWSPWSGCADQCKPTTRVRRRSVQQEPQNGGAPCPPLEERAGCLEYSTPQGQDCGHTYVPAFITTSAFNKERTRQATSPHWSTHTEDAGYCMEFKTESLTPHCALENWPLTRWMQYLREGYTVCVDCQPPAMNSVSLRCSGDGLDSDGNQTLHWQAIGNPRCQGTWKKVRRVDQCSCPAVHSFIFI

SEQ ID NO: 2628 - protein, 394 aa, Homo Sapiens
LKPSFSPRNYKALSEVQGWKQRMAAKELARQNMDLGFKLLKKLAFYNPGRNIFLSPLSISTAFSMLCLGAQDSTLDEIKQGFNFRKMPEKDLHEGFHYIIHELTQKTQDLKLSIGNTLFIDQRLQPQRKFLEDAKNFYSAETILTNFQNLEMAQKQINDFISQKTHGKINNLIENIDPGTVMLLANYIFFRARWKHEFDPNVTKEEDFFLEKNSSVKVPMMFRSGIYQVGYDDKLSCTILEIPYQKNITAIFILPDEGKLKHLEKGLQVDTFSRWKTLLSRRVVDVSVPRLHMTGTFDLKKTLSYIGVSKIFEEHGDLTKIAPHRSLKVGEAVHKAELKMDERGTEGAAGTGAQTLPMETPLVVKIDKPYLLLIYSEKIPSVLFLGKIVNPIGK

SEQ ID NO: 2629 - protein, 604 aa, Homo Sapiens
STLVPLRLRHRQLGLQAKGWNFMLEDSTFWIFGGSIHYFRVPREYWRDRLLKMKACGLNTLTTYVPWNLHEPERGKFDFSGNLDLEAFVLMAAEIGLWVILRPGPYICSEMDLGGLPSWLLQDPGMRLRTTYKGFTEAVDLYFDHLMSRVVPLQYKRGGPIIAVQVENEYGSYNKDPAYMPYVKKALEDRGIVELLLTSDNKDGLSKGIVQGVLATINLQSTHELQLLTTFLFNVQGTQPKMVMEYWTGWFDSWGGPHNILDSSEVLKTVSAIVDAGSSINLYMFHGGTNFGFMNGAMHFHDYKSDVTSYDYDAVLTEAGDYTAKYMKLRDFFGSISGIPLPPPPDLLPKMPYEPLTPVLYLSLWDALKYLGEPIKSEKPINMENLPVNGGNGQSFGYILYETSITSSGILSGHVHDRGQVFVNTVSIGFLDYKTTKIAVPLIQGYTVLRILVENRGRVNYGENIDDQRKGLIGNLYLNDSPLKNFRIYSLDMKKSFFQRFGLDKWSSLPETPTLPAFFLGSLSISSTPCDTFLKLEGWEKGVVFINGQNLGRYWNIGPQKTLYLPGPWLSSGINQVIVFEETMAGPALQFTETPHLGRNQYIK

SEQ ID NO: 2630 - protein, 658 aa, Homo Sapiens
VPPRRDYCVLGAGPAGLQMAYFLQRAGRDYAVFERAPRPGSFFTRYPRHRKLISINKRYTGKANAEFNLRHDWNSLLSHDPRLLFRHYSRAYFPDARDMVRYLGDFADTLGLRVQYNTTIAHVTLDKDRQAWNGHYFILTDQKGQVHQCSVLFVATGLSVPNQVDFPGSEYAEGYESVSVDPEDFVGQNVLILGRGNSAFETAENILGVTNFIHMLSRSRVRLSWATHYVGDLRAINNGLLDTYQLKSLDGLLESDLTDLAILKDSKGKFHVTPKFFLEEANTNQSADSITLPQDDNDNFAMRVPYDRVIRCLGWNFDFSIFNKSLRLNSGNAFGKKYPLIRASYESKGSRGLFILGTASHSVDYRKSAGGFIHGFRYTVRAVHRLLEHRHHSVTWPATELPITQLTSSIVRRVNEASGLYQMFGVLADVILLKENSTAFEYLEEFPIQMLAQLETLTGRKAKHGLFVINMEYGRNFSGPDKDVFFDDRSVGHTEDAWQSNFLHPVIYYYRYLPTEQEVRFRPAHWPLPRPTAIHHIVEDFLTDWTAPIGHILPLRRFLENCLDTDLRSFYAESCFLFALTRQKLPPFCQQGYLRMQGLVSTESLWQHRVESRLLRDYAPTGRRLEDSSQQLGDQEPLGSPLAPGPLAQSVDSNKEEL

SEQ ID NO: 2631 - protein, 846 aa, Homo Sapiens
FLSHHRLKGRFQRDRRNIRPNIILVLTDDQDVELGSMQVMNKTRRIMEQGGAHFINAFVTTPMCCPSRSSILTGKYVHNHNTYTNNENCSSPSWQAQHESRTFAVYLNSTGYRTAFFGKYLNEYNGSYVPPGWKEWVGLLKNSRFYNYTLCRNGVKEKHGSDYSKDYLTDLITNDSVSFFRTSKKMYPHRPVLMVISHAAPHGPEDSAPQYSRLFPNASQHITPSYNYAPNPDKHWIMRYTGPMKPIHMEFTNMLQRKRLQTLMSVDDSMETIYNMLVETGELDNTYIVYTADHGYHIGQFGLVKGKSMPYEFDIRVPFYVRGPNVEAGCLNPHIVLNIDLAPTILDIAGLDIPADMDGKSILKLLDTERPVNRFHLKKKMRVWRDSFLVERGKLLHKRDNDKVDAQEENFLPKYQRVKDLCQRAEYQTACEQLGQKWQCVEDATGKLKLHKCKGPMRLGGSRALSNLVPKYYGQGSEACTCDSGDYKLSLAGRRKKLFKKKYKASYVRSRSIRSVAIEVDGRVYHVGLGDAAQPRNLTKRHWPGAPEDQDDKDGGDFSGTGGLPDYSAANPIKVTHRCYILENDTVQCDLDLYKSLQAWKDHKLHIDHEIETLQNKIKNLREVRGHLKKKRPEECDCHKISYHTQHKGRLKHRGSSLHPFRKGLQEKDKVWLLREQKRKKKLRKLLKRLQNNDTCSMPGLTCFTHDNQHWQTAPFWTLGPFCACTSANNNTYWCMRTINETHNFLFCEFATGFLEYFDLNTDPYQLMNAVNTLDRDVLNQLHVQLMELRSCKGYKQCNPRTRNMDLGLKDGGSYEQYRQFQRRKWPEMKRPSSKSLGQLWEGWEG

SEQ ID NO: 2632 - protein, 849 aa, Homo Sapiens
STVRSPRFRGRIQQERKNIRPNIILVLTDDQDVELGSLQVMNKTRKIMEHGGATFINAFVTTPMCCPSRSSMLTGKYVHNHNVYTNNENCSSPSWQAMHEPRTFAVYLNNTGYRTVFFGKYLNEYNGSYIPPGWREWLGLIKNSRFYNYTVCRNGIKEKHGFDYAKDYFTDLITNESINYFKMSKRMYPHRPVMMVISHAAPHGPEDSAPQFSKLYPNASQHITPSYNYAPNMDKHWIMQYTGPMLPIHMEFTNILQRKRLQTLMSVDDSVERLYNMLVETGELENTYIIYTADHGYHIGQFGLVKGKSMPYDFDIRVPFFIRGPSVEPGSIVPQIVLNIDLAPTILDIAGLDTPPDVDGKSVLKLLDPEKPGNRFRTNKKAKIWRDTFLVERGKFLRKKEESSKNIQQSNHLPKYERVKELCQQARYQTACEQPGQKWQCIEDTSGKLRIHKCKGPSDLLTVRQSTRNLYARGFHDKDKECSCRESGYRASRSQRKSQRQFLRNQGTPKYKPRFVHTRQTRSLSVEFEGEIYDINLEEEEELQVLQPRNIAKRHDEGHKGPRDLQASSGGNRGRMLADSSNAVGPPTTVRVTHKCFILPNDSIHCERELYQSARAWKDHKAYIDKEIEALQDKIKNLREVRGHLKRRKPEECSCSKQSYYNKEKGVKKQEKLKSHLHPFKEAAQEVDSKLQLFKENNRRRKKERKEKRRQRKGEECSLPGLTCFTHDNNHWQTAPFWNLGSFCACTSSNNNTYWCLRTVNETHNFLFCEFATGFLEYFDMNTDPYQLTNTVHTVERGILNQLHVQLMELRSCQGYKQCNPRPKNLDVGNKDGGSYDLHRGQLWDGWEG

SEQ ID NO: 2633 - protein, 81 aa, Homo Sapiens
KNAEMSKELLGFKRELWNVSNSVQACEERQKRGWDSVQQSITMVRSKIDRLETTLAGIKNIDTKVQKILEVLQKMPQSSPQ

SEQ ID NO: 2634 - protein, 131 aa, Homo Sapiens
SEAKLYGRCELARVLHDFGLDGYRGYSLADWVCLAYFTSGFNAAALDYEADGSTNNGIFQINSRRWCSNLTPNVPNVCRMYCSDLLNPNLKDTVICAMKITQEPQGLGYWEAWRHHCQGKDLTEWVDGCDF

SEQ ID NO: 2635 - protein, 761 aa, Homo Sapiens
DQDFYSLLGVSKTASSREIRQAFKKLALKLHPDKNPNNPNAHGDFLKINRAYEVLKDEDLRKKYDKYGEKGLEDNQGGQYESWNYYRYDFGIYDDDPEIITLERREFDAAVNSGELWFVNFYSPGCSHCHDLAPTWRDFAKEVDGLLRIGAVNCGDDRMLCRMKGVNSYPSLFIFRSGMAPVKYHGDRSKESLVSFAMQHVRSTVTELWTGNFVNSIQTAFAAGIGWLITFCSKGGDCLTSQTRLRLSGMLDGLVNVGWMDCATQDNLCKSLDITTSTTAYFPPGATLNNKEKNSILFLNSLDAKEIYLEVIHNLPDFELLSANTLEDRLAHHRWLLFFHFGKNENSNDPELKKLKTLLKNDHIQVGRFDCSSAPDICSNLYVFQPSLAVFKGQGTKEYEIHHGKKILYDILAFAKESVNSHVTTLGPQNFPANDKEPWLVDFFAPWCPPCRALLPELRRASNLLYGQLKFGTLDCTVHEGLCNMYNIQAYPTTVVFNQSNIHEYEGHHSAEQILEFIEDLMNPSVVSLTPTTFNELVTQRKHNEVWMVDFYSPWCHPCQVLMPEWKRMARTLTGLINVGSIDCQQYHSFCAQENVQRYPEIRFFPPKSNKAYQYHSYNGWNRDAYSLRIWGLGFLPQVSTDLTPQTFSEKVLQGKNHWVIDFYAPWCGPCQNFAPEFELLARMIKGKVKAGKVDCQAYAQTCQKAGIRAYPTVKFYFYERAKRNFQEEQINTRDAKAIAALISEKLETLRNQGKRNKDEL

SEQ ID NO: 2636 - protein, 105 aa, Homo Sapiens
MAHPVQSEFPSAQESGSAASLDLPEMEILLTKAENKDDKTLNLSKTLSGPLDLEQNGQGLPFKAISEGHLEAPLPRSPSRASSRRASSIATTSYAQDQEAPRDYL

SEQ ID NO: 2637 - protein, 147 aa, Homo Sapiens
SSSSPRTPPAPARPPCARGGPSAPRHVCVWERAPPPSRSPRVPRSRRQVLPGTAPPATPSGFEEGPPSSQYPWAIVWGPTVSREDGGDPNSANPGFLDYGFAAPHGLATPHPNSDSMRGDGDGLILGEAPATLRPFLFGGRGEGVDP

SEQ ID NO: 2638 - protein, 599 aa, Homo Sapiens
RFVAERDSEDDGEEPVVFPESPLQSPTVLVAVLARNAAHTLPHFLGCLERLDYPKSRMAIWAATDHNVDNTTEIFREWLKNVQRLYHYVEWRPMDEPESYPDEIGPKHWPTSRFAHVMKLRQAALRTAREKWSDYILFIDVDNFLTNPQTLNLLIAENKTIVAPMLESRGLYSNFWCGITPKGFYKRTPDYVQIREWKRTGCFPVPMVHSTFLIDLRKEASDKLTFYPPHQDYTWTFDDIIVFAFSSRQAGIQMYLCNREHYGYLPIPLKPHQTLQEDIENLIHVQIEAMIDRPPMEPSQYVSVVPKYPDKMGFDEIFMINLKRRKDRRDRMLRTLYEQEIEVKIVEAVDGKALNTSQLKALNIEMLPGYRDPYSSRPLTRGEIGCFLSHYSVWKEVIDRELEKTLVIEDDVRFEHQFKKKLMKLMDNIDQAQLDWELIYIGRKRMQVKEPEKAVPNVANLVEADYSYWTLGYVISLEGAQKLVGANPFGKMLPVDEFLPVMYNKHPVAEYKEYYESRDLKAFSAEPLLIYPTHYTGQPGYLSDTETSTIWDNETVATDWDRTHAWKSRKQSRIYSNAKNTEALPPPTSLDTVPSRDEL

SEQ ID NO: 2639 - protein, 549 aa, Homo Sapiens
RRAAGGLHLLPWSRGEPGAAEPSACLEAATRAWRGLRERGEVVPLGPGVPALVANGFLALDVAANRLWVTPGEREPAVAPDFVPFVQLRPLSALAEAGEAVLLLREGLLRRVRCLQLGSPGPGPVAAGPGPASVSGLAAGSGRDCVLLQEDFLAHRGRPHVYLQRIQLNNPTERVAALQTVGPTAGPAPKAFTSTLEKVGDHQFLLYSGRSPPTPTGLVHLVVVAAKKLVNRLQVAPKTQLDETVLWVVHVSGPINPQVLKSKAAKELKALQDLARKEMLELLDMPAAELLQDHQLLWAQLFSPGVEMKKITDTHTPSGLTVNLTLYYMLSCSPAPLLSPSLSHRERDQMESTLNYEDHCFSGHATMHAENLWPGRLSSVQQILQLSDLWRLTLQKRGCKGLVKVGAPGILQGMVLSFGGLQFTENHLQFQADPDVLHNSYALHGIRYKNDHINLAVLADAEGKPYLHVSVESRGQPVKIYACKAGCLDEPVELTSAPTGHTFSVMVTQPITPLLYISTDLTHLQDLRHTLHLKAILAHDEHMAQQDPG

SEQ ID NO: 2640 - protein, 1040 aa, Homo Sapiens
DVVRSEQQIPLSVVKLWASAFGGEIKSIAAKYSGSQLLQKKYKEYEKDVAIEEIDGLQLVKKLAKNMEEMFHKKSEAVRRLVEAAEEAHLKHEFDADLQYEYFNAVLINERDKDGNFLELGKEFILAPNDHFNNLPVNISLSDVQVPTNMYNKDPAIVNGVYWSESLNKVFVDNFDRDPSLIWQYFGSAKGFFRQYPGIKWEPDENGVIAFDCRNRKWYIQAATSPKDVVILVDVSGSMKGLRLTIAKQTVSSILDTLGDDDFFNIIAYNEELHYVEPCLNGTLVQADRTNKEHFREHLDKLFAKGIGMLDIALNEAFNILSDFNHTGQGSICSQAIMLITDGAVDTYDTIFAKYNWPDRKVRIFTYLIGREAAFADNLKWMACANKGFFTQISTLADVQENVMEYLHVLSRPKVIDQEHDVVWTEAYIDSTLPQAQKLTDDQGPVLMTTVAMPVFSKQNETRSKGILLGVVGTDVPVKELLKTIPKYKLGIHGYAFAITNNGYILTHPELRLLYEEGKKRRKPNYSSVDLSEVEWEDRDDVLRNAMVNRKTGKFSMEVKKTVDKGKRVLVMTNDYYYTDIKGTPFSLGVALSRGHGKYFFRGNVTIEEGLHDLEHPDVSLADEWSYCNTDLHPEHRHLSQLEAIKLYLKGKEPLLQCDKELIQEVLFDAVVSAPIEAYWTSLALNKSENSDKGVEVAFLGTRTGLSRINLFVGAEQLTNQDFLKAGDKENIFNADHFPLWYRRAAEQIPGSFVYSIPFSTGPVNKSNVVTASTSIQLLDERKSPVVAAVGIQMKLEFFQRKFWTASRQCASLDGKCSISCDDETVNCYLIDNNGFILVSEDYTQTGDFFGEIEGAVMNKLLTMGSFKRITLYDYQAMCRANKESSDGAHGLLDPYNAFLSAVKWIMTELVLFLVEFNLCSWWHSDMTAKAQKLKQTLEPCDTEYPAFVSERTIKETTGNIACEDCSKSFVIQQIPSSNLFMVVVDSSCLCESVAPITMAPIEIRYNESLKCERLKAQKIRRRPESCHGFHPEENARECG

SEQ ID NO: 2641 - protein, 466 aa, Homo Sapiens
LLHPDSRSHPRSLEKSAWRAFKESQCHHMLKHLHNGARITVQMPPTIEGHWVSTGCEVRSGPEFITRSYRFYHNNTFKAYQFYYGSNRCTNPTYTLIIRGKIRLRQASWIIRGGTEADYQLHNVQVICHTEAVAEKLGQQVNRTCPGFLADGGPWVQDVAYDLWREENGCECTKAVNFAMHELQLIRVEKQYLHHNLDHLVEELFLGDIHTDATQRMFYRPSSYQPPLQNAKNHDHACIACRIIYRSDEHHPPILPPKADLTIGLHGEWVSQRCEVRPEVLFLTRHFIFHDNNNTWEGHYYHYSDPVCKHPTFSIYARGRYSRGVLSSRVMGGTEFVFKVNHMKVTPMDAATASLLNVFNGNECGAEGSWQVGIQQDVTHTNGCVALGIKLPHTEYEIFKMEQDARGRYLLFNGQRPSDGSSPDRPEKRATSYQMPLVQCASSSPRAEDLAEDSGSSLYGRAPGRH

SEQ ID NO: 2642 - protein, 635 aa, Homo Sapiens
QAQYPVVNTNYGKIRGLRTPLPNEILGPVEQYLGVPYASPPTGERRFQPPEPPSSWTGIRNTTQFAAVCPQHLDERSLLHDMLPIWFTANLDTLMTYVQDQNEDCLYLNIYVPTEDDIHDQNSKKPVMVYIHGGSYMEGTGNMIDGSILASYGNVIVITINYRLGILGFLSTGDQAAKGNYGLLDQIQALRWIEENVGAFGGDPKRVTIFGSGAGASCVSLLTLSHYSEGLFQKAIIQSGTALSSWAVNYQPAKYTRILADKVGCNMLDTTDMVECLRNKNYKELIQQTITPATYHIAFGPVIDGDVIPDDPQILMEQGEFLNYDIMLGVNQGEGLKFVDGIVDNEDGVTPNDFDFSVSNFVDNLYGYPEGKDTLRETIKFMYTDWADKENPETRRKTLVALFTDHQWVAPAVATADLHAQYGSPTYFYAFYHHCQSEMKPSWADSAHGDEVPYVFGIPMIGPTELFSCNFSKNDVMLSAVVMTYWTNFAKTGDPNQPVPQDTKFIHTKPNRFEEVAWSKYNPKDQLYLHIGLKPRVRDHYRATKVAFWLELVPHLHNLNEIFQYVSTTTKVPPPDMTSFPYGTRRSPAKIWPTTKRPAITPANNPKHSKDPHKTGPEDTTVLIETKRDYSTELS

SEQ ID NO: 2643 - protein, 94 aa, Homo Sapiens
LCSGSSYFVLANGHILPNSENAHGQSLEEDSALEALLNFFFPTTCNLRENQVAKPCNELQDLSESECLRHKCCFSSSGTTSFKCFAPFRDVPKQ

SEQ ID NO: 2644 - protein, 227 aa, Homo Sapiens
GMLKEEDDDTERLPSKCEVCKLLSTELQAELSRTGRSREVLELGQVLDTGKRKRHVPYSVSETRLEEALENLCERILDYSVHAERKGSLRYAKGQSQTMATLKGLVQKGVKVDLGIPLELWDEPSVEVTYLKKQCETMLEEFEDIVGDWYFHHQEQPLQNFLCEGHVLPAAETACLQETWTGKEITDGEEKTEGEEEQEEEEEEEEEEGGDKMTKTGSHPKLDREDL

SEQ ID NO: 2645 - protein, 140 aa, Homo Sapiens
HESAAMAASANIENSGLPHNSSANSTETLQHVPSDHTNETSNSTVKPPTSVASDSSNTTVTTMKPTAASNTTTPGMVSTNMTSTTLKSTPKTTSVSQNTSQISTSTMTVTHNSSVTSAASSVTITTTMHSEAKKGSKFDT

SEQ ID NO: 2646 - protein, 531 aa, Homo Sapiens
SEAKVTRSCAETRQVLGARGYSLNLIPPALISGEHLRVCPQEYTCCSSETEQRLIRETEATFRGLVEDSGSFLVHTLAARHRKFDEFFLEMLSVAQHSLTQLFSHSYGRLYAQHALIFNGLFSRLRDFYGESGEGLDDTLADFWAQLLERVFPLLHPQYSFPPDYLLCLSRLASSTDGSLQPFGDSPRRLRLQITRTLVAARAFVQGLETGRNVVSEALKVPVSEGCSQALMRLIGCPLCRGVPSLMPCQGFCLNVVRGCLSSRGLEPDWGNYLDGLLILADKLQGPFSFELTAESIGVKISEGLMYLQENSAKVSAQVFQECGPPDPVPARNRRAPPPREEAGRLWSMVTEEERPTTAAGTNLHRLVWELRERLARMRGFWARLSLTVCGDSRMAADASLEAAPCWTGAGRGRYLPPVVGGSPAEQVNNPELKVDASGPDVPTRRRRLQLRAATARMKTAALGHDLDGQDADEDASGSGGGQQYADDWMAGAVAPPARPPRPPYPPRRDGSGGKGGGGSARYNQGRSRSG

SEQ ID NO: 2647 - protein, 237 aa, Homo Sapiens
VDKADDEDDEDLTVNKTWVLAPKIHEGDITQILNSLLQGYDNKLRPDIGVRPTVIETDVYVNSIGPVDPINMEYTIDIIFAQTWFDSRLKFNSTMKVLMLNSNMVGKIWIPDTFFRNSRKSDAHWITTPNRLLRIWNDGRVLYTLRLTINAECYLQLHNFPMDEHSCPLEFSSYGYPKNEIEYKWKKPSVEVADPKYWRLYQFAFVGLRNSTEITHTISGDYVIMTIFFDLSRRMGY

SEQ ID NO: 2648 - protein, 175 aa, Homo Sapiens
SNWGCYGNIQSLDTPGASCGIGRRHGLNYCGVRASERLAEIDMPYLLKYQPMMQTIGQKYCMDPAVIAGVLSRKSPGDKILVNMGDRTSMVQDPGSQAPTSWISESQVSQTTEVLTTRIKEIQRRFPTWTPDQYLRGGLCAYSGGAGYVRSSQDLSCDFCNDVLARAKYLKRHGF

SEQ ID NO: 2649 - protein, 309 aa, Homo Sapiens
IQAKLIFLNFVRVPYFIDLKKPQDQGLNHTCNYYLQPEEDVTIGVWHTVPAVWWKNAQGKDQMWYEDALASSHPIILYLHGNAGTRGGDHRVELYKVLSSLGYHVVTFDYRGWGDSVGTPSERGMTYDALHVFDWIKARSGDNPVYIWGHSLGTGVATNLVRRLCERETPPDALILESPFTNIREEAKSHPFSVIYRYFPGFDWFFLDPITSSGIKFANDENVKHISCPLLILHAEDDPVVPFQLGRKLYSIAAPARSFRDFKVQFVPFHSDLGYRHKYIYKSPELPRILRPQQGPGSSPDPSMWSELV

SEQ ID NO: 2650 - protein, 632 aa, Homo Sapiens
QKLDDVDPLVATNFGKIRGIKKELNNEILGPVIQFLGVPYAAPPTGERRFQPPEPPSPWSDIRNATQFAPVCPQNIIDGRLPEVMLPVWFTNNLDVVSSYVQDQSEDCLYLNIYVPTEDDIRDSGGPKPVMVYIHGGSYMEGTGNLYDGSVLASYGNVIVITVNYRLGVLGFLSTGDQAAKGNYGLLDLIQALRWTSENIGFFGGDPLRITVFGSGAGGSCVNLLTLSHYSEGNRWSNSTKGLFQRAIAQSGTALSSWAVSFQPAKYARMLATKVGCNVSDTVELVECLQKKPYKELVDQDIQPARYHIAFGPVIDGDVIPDDPQILMEQGEFLNYDIMLGVNQGEGLKFVENIVDSDDGISASDFDFAVSNFVDNLYGYPEGKDVLRETIKFMYTDWADRHNPETRRKTLLALFTDHQWVAPAVATADLHSNFGSPTYFYAFYHHCQTDQVPAWADAAHGDEVPYVLGIPMIGPTELFPCNFSKNDVMLSAVVMTYWTNFAKTGDPNQPVPQDTKFIHTKPNRFEEVAWTRYSQKDQLYLHIGLKPRVKEHYRANKVNLWLELVPHLHNLNDISQYTSTTTKVPSTDITFRPTRKNSVPVTSAFPTAKQDDPKQQPSPFSVDQRDYSTELS

SEQ ID NO: 2651 - protein, 713 aa, Homo Sapiens
ASEAPSPPRSPPPPTSPEPELAQLRRKVEKLERELRSCKRQVREIEKLLHHTERLYQNAESNNQELRTQVEELSKILQRGRNEDNKKSDVEVQTENHAPWSISDYFYQTYYNDVSLPNKVTELSDQQDQAIETSILNSKDHLQVENDAYPGTDRTENVKYRQVDHFASNSQEPASALATEDTSLEGSSLAESLRAAAEAAVSQTGFSYDENTGLYFDHSTGFYYDSENQLYYDPSTGIYYYCDVESGRYQFHSRVDLQPYPTSSTKQSKDKKLKKKRKDPDSSATNEEKDLNSEDQKAFSVEHTSCNEEENFANMKKKAKIGIHHKNSPPKVTVPTSGNTIESPLHENISNSTSFKDEKIMETDSEPEEGEITDSQTEDSYDEAITSEGNVTAEDSEDEDEDKIWPPCIRVIVIRSPVLQIGSLFIITAVNPATIGREKDMEHTLRIPEVGVSKFHAEIYFDHDLQSYVLVDQGSQNGTIVNGKQILQPKTKCDPYVLEHGDEVKIGETVLSFHIHPGSDTCDGCERGQVRAHLRLDKKDESFVGPTLSKEEKELEGRKELKKIRVKYGLQNTEYEDEKTLKNPKYKDRAGKRREQVGSEGTFQRDDAPASVHSEITDSNKGRKLLEKMGWKKGEGLGKDGGGMKTPIQLQLRRTHAGLGTGKPSSFEDVHLLQNKNKKNWDKARERFTENFPETKPQKDDPGTMPWVKGTLE

SEQ ID NO: 2652 - protein, 213 aa, Homo Sapiens
KENQDINTTQNIAEVFKTMENKPISLESEANLNSDKENITTSNLKASHSPPLNLPNNSHGITDFSSNSSAEHSLGSLKPTSTISTSPPLIHSFVSKVPWNAPIADEDLLPISAHPNATPALSSENFTWSLVNDTVKTPDNSSITVSILSSEPTSPSVTPLIVEPSGWLTTNSDSFTGFIPYQEKTTLQPTLKFTNNSKLFPNTSDPQKENRNT

SEQ ID NO: 2653 - protein, 101 aa, Homo Sapiens
ANHHKAHHVKTGTCEVVALHRYCNKNKIEERSQTVKYSCFPGQVAGTTRAAPSCVDASIVEQKWWCHMQPCLEGEECKVLPDRKGWSCSSGNKVKTTRVTH

SEQ ID NO: 2654 - protein, 397 aa, Homo Sapiens
LIDGSEMEWDFMWHLRKVPRIVSERTFHLTSPAFEADAKMMVNTVCGIECQKELPTPSLSELEDYLSYETVFENGTRTLTRVKVQDLVLEPTQNITTKGVSVRRKRQVYGTDSRFSILDKRFLTNFPFSTAVKLSTGCSGILISPQHVLTAAHCVHDGKDYVKGSKKLRVGLLKMRNKSGGKKRRGSKRSRREASGGDQREGTREHLQERAKGGRRRKKSGRGQRIAEGRPSFQWTRVKNTHIPKGWARGGMGDATLDYDYALLELKRAHKKKYMELGISPTIKKMPGGMIHFSGFDNDRADQLVYRFCSVSDESNDLLYQYCDAESGSTGSGVYLRLKDPDKKNWKRKIIAVYSGHQWVDVHGVQKDYNVAVRITPLKYAQICLWIHGNDANCAYG

SEQ ID NO: 2655 - protein, 731 aa, Homo Sapiens
QGAALEDPDYYGQEIWSREPYYARPEPELETFSPPLPAGPGEEWERRPQEPRPPKRATKPKKAPKREKSAPEPPPPGKHSNKKVMRTKSSEKAANDDHSVRVAREDVRESCPPLGLETLKITDFQLHASTVKRYGLGAHRGRLNIQAGINENDFYDGAWCAGRNDLQQWIEVDARRLTRFTGVITQGRNSLWLSDWVTSYKVMVSNDSHTWVTVKNGSGDMIFEGNSEKEIPVLNELPVPMVARYIRINPQSWFDNGSICMRMEILGCPLPDPNNYYHRRNEMTTTDDLDFKHHNYKEMRQLMKVVNEMCPNITRIYNIGKSHQGLKLYAVEISDHPGEHEVGEPEFHYIAGAHGNEVLGRELLLLLVQFVCQEYLARNARIVHLVEETRIHVLPSLNPDGYEKAYEGGSELGGWSLGRWTHDGIDINNNFPDLNTLLWEAEDRQNVPRKVPNHYIAIPEWFLSENATVAAETRAVIAWMEKIPFVLGGNLQGGELVVAYPYDLVRSPWKTQEHTPTPDDHVFRWLAYSYASTHRLMTDARRRVCHTEDFQKEEGTVNGASWHTVAGSLNDFSYLHTNCFELSIYVGCDKYPHESQLPEEWENNRESLIVFMEQVHRGIKGLVRDSHGKGIPNAIISVEGINHDIRTANDGDYWRLLNPGEYVVTAKAEGFTASTKNCMVGYDMGATRCDFTLSKTNMARIREIMEKFGKQPVSLPARRLKLRGRKRRQRG

SEQ ID NO: 2656 - protein, 283 aa, Homo Sapiens
SEYDYVSFQSDIGPYQSGRFYTKPPQCVDIPADLRLCHNVGYKKMVLPNLLEHETMAEVKQQASSWVPLLNKNCHAGTQVFLCSLFAPVCLDRPIYPCRWLCEAVRDSCEPVMQFFGFYWPEMLKCDKFPEGDVCIAMTPPNATEASKPQGTTVCPPCDNELKSEAIIEHLCASEFALRMKIKEVKKENGDKKIVPKKKKPLKLGPIKKKDLKKLVLYLKNGADCPCHQLDNLSHHFLIMGRKVKSQYLLTAIHKWDKKNKEFKNFMKKMKNHECPTFQSVFK

SEQ ID NO: 2657 - protein, 438 aa, Homo Sapiens
STPGTVVRLNKAALSYVSEIGKAPLQRALQVTVPHFLDWSGEALQPTRIRILNVHVPRLHLKFIAGFGVRLLAAANFTFKVFRAPEPLELTLPVELLADTRVTQSSIRTPVVSISACSLFSGHANEFDGSNSTSHALLVLVQKHIKAVLSNKLCLSISNLVQGVNVHLGTLIGLNPVGPESQIRYSMVSVPTVTSDYISLEVNAVLFLLGKPIILPTDATPFVLPRHVGTEGSMATGGLSQQLFDSALLLLQKAGALNLDITGQLRSDDNLLNTSALGRLIPEVARQFPEPMPVVLKVRLGATPVAMLHTNNATLRLQPFVEVLATASNSAFQSLFSLDVVVNLRLQLSVSKVKLQGTTSVLGDVQLTVASSNVGFIDTDQVRTLMGTVFEKPLLDHLNALLAMGIALPGVVNLHYVAPEIFVYEGYVVISSGLFYQS

SEQ ID NO: 2658 - protein, 308 aa, Homo Sapiens
SLSGYNYEVYHSLEEIQNWMHHLNKTHSGLIHMFSIGRSYEGRCLFILKLGRRSRLKRAVWIDCGIHAREWIGPAFCQWFVKEALLTYKSDPAMRKMLNHLYFYIMPVFNVDGYHFSWTNDRFWRKTRSRNSRFRCRGVDANRNWKVKWCDEGASMHPCDDTYCGPFPESEPEVKAVANFLRKHRKHIRAYLSFHAYAQMLLYPYSYKYATIPNFRCVESAAYKAVNALQSVYGVRYRYGPASTTLYVSSGSSMDWAYKNGIPYAFAFELRDTGYFGFLLPEMLIKPTCTETMLAVKNITMHLLKKCP

SEQ ID NO: 2659 - protein, 407 aa, Homo Sapiens
NHAHAPGTAPPPVVSTGAASANSAVVTVERADSSHLSILIDPRCPDLTDSFARLESAQASVLQALTEHQAQPRLVGDQEQELLDTLADQLPRLLARASELQTECMGLRKGHGTLGQGLSALQSEQGRLIQLLSESQGHMAHLVNSVSDILDALQRDRGLGRPRNKADLQRAPARGTRPRGCATGSRPRDCLDVLLSGQQDDGVYSVFPTHYPAGFQVYCDMRTDGGGWTVFQRREDGSVNFFRGWDAYRDGFGRLTGEHWLGLKRIHALTTQAAYELHVDLEDFENGTAYARYGSFGVGLFSVDPEEDGYPLTVADYSGTAGDSLLKHSGMRFTTKDRDSDHSENNCAAFYRGAWWYRNCHTSNLNGQYLRGAHASYADGVEWSSWTGWQYSLKFSEMKIRPVREDR

SEQ ID NO: 2660 - protein, 329 aa, Homo Sapiens
SPLSAARAALRVYAVGAAVILAQLLRRCRGGFLEPVFPPRPDRVAIVTGGTDGIGYSTAKHLARLGMHVIIAGNNDSKAKQVVSKIKEETLNDKVEFLYCDLASMTSIRQFVQKFKMKKIPLHVLINNAGVMMVPQRKTRDGFEEHFGLNYLGHFLLTNLLLDTLKESGSPGHSARVVTVSSATHYVAELNMDDLQSSACYSPHAAYAQSKLALVLFTYHLQRLLAAEGSHVTANVVDPGVVNTDLYKHVFWATRLAKKLLGWLLFKTPDEGAWTSIYAAVTPELEGVGGRYLYNEKETKSLHVTYNQKLQQQLWSKSCEMTGVLDVTL

SEQ ID NO: 2661 - protein, 73 aa, Homo Sapiens
LYFKIHNALKAAKEPEAVAVKNHNPDKVWWAKNSQAKTIATESCPALQCCEGYRMCASFDSLPPCCCDINEGL

SEQ ID NO: 2662 - protein, 741 aa, Homo Sapiens
LTPDELTNSSETRLSLEDLFRKDFVLHDPEARWINDTDVVYKSENGHVIKLNIETNATTLLLENTTFVTFKASRHSVSPDLKYVLLAYDVKQIFHYSYTASYVIYNIHTREVWELNPPEVEDSVLQYAAWGVQGQQLIYIFENNIYYQPDIKSSSLRLTSSGKEEIIFNGIADWLYEEELLHSHIAHWWSPDGERLAFLMINDSLVPTMVIPRFTGALYPKGKQYPYPKAGQMNPTIKLYVVNLYGPTHTLELMPPDSFKSREYYITMVKWVSNTKTVVRWLNRAQNISILTVCETTTGACSKKYEMTSDTWLSQQNEEPVFSRDGSKFFMTVPVKQGGRGEFHHIAMFLIQSKSEQITVRHLTSGNWEVIKILAYDETTQKIYFLSTESSPRGRQLYSASTEGLLNRQCISCNFMKEQCTYFDASFSPMNQHFLLFCEGPRVPVVSLHSTDNPAKYFILESNSMLKEAILKKKIGKPEIKILHIDDYELPLQLSLPKDFMDRNQYALLLIMDEEPGGQLVTDKFHIDWDSVLIDMDNVIVARFDGRGSGFQGLKILQEIHRRLGSVEVKDQITAVKFLLKLPYIDSKRLSIFGKGYGGYIASMILKSDEKLFKCGSVVAPITDLKLYASAFSERYLGMPSKEESTYQAASVLHNVHGLKEENILIIHGTADTKVHFQHSAELIKHLIKAGVNYTMQVYPDEGHNVSEKSKYHLYSTILKFFSDCLKEEISVLPQEPEEDE

SEQ ID NO: 2663 - protein, 58 aa, Homo Sapiens
QIYPPLPERTLPLHLDIQGCNSTYNETNLMTTTEMPFTTSVFQIYNVQRTPLMDNWYS

SEQ ID NO: 2664 - protein, 53 aa, Homo Sapiens
QWKQSSYAGDAIITAVGLYEGLWMSCASQSTGQVQCKLYDSLLALDGHIQSAR

SEQ ID NO: 2665 - protein, 937 aa, Homo Sapiens
VYEDQVGKFDWRQQYVGKVKFASLEFSPGSKKLVVATEKNVIAALNSRTGEILWRHVDKGTAEGAVDAMLLHGQDVITVSNGGRIMRSWETNIGGLNWEITLDSGSFQALGLVGLQESVRYIAVLKKTTLALHHLSSGHLKWVEHLPESDSIHYQMVYSYGSGVVWALGVVPFSHVNIVKFNVEDGEIVQQVRVSTPWLQHLSGACGVVDEAVLVCPDPSSRSLQTLALETEWELRQIPLQSLDLEFGSGFQPRVLPTQPNPVDASRAQFFLHLSPSHYALLQYHYGTLSLLKNFPQTALVSFATTGEKTVAAVMACRNEVQKSSSSEDGSMGSFSEKSSSKDSLACFNQTYTINLYLVETGRRLLDTTITFSLEQSGTRPERLYIQVFLKKDDSVGYRALVQTEDHLLLFLQQLAGKVVLWSREESLAEVVCLEMVDLPLTGAQAELEGEFGKKADGLLGMFLKRLSSQLILLQAWTSHLWKMFYDARKPRSQIKNEINIDTLARDEFNLQKMMVMVTASGKLFGIESSSGTILWKQYLPNVKPDSSFKLMVQRTTAHFPHPPQCTLLVKDKESGMSSLYVFNPIFGKWSQVAPPVLKRPILQSLLLPVMDQDYAKVLLLIDDEYKVTAFPATRNVLRQLHELAPSIFFYLVDAEQGRLCGYRLRKDLTTELSWELTIPPEVQRIVKVKGKRSSEHVHSQGRVMGDRSVLYKSLNPNLLAVVTESTDAHHERTFIGIFLIDGVTGRIIHSSVQKKAKGPVHIVHSENWVVYQYWNTKARRNEFTVLELYEGTEQYNATAFSSLDRPQLPQVLQQSYIFPSSISAMEATITERGITSRHLLIGLPSGAILSLPKALLDPRRPEIPTEQSREENLIPYSPDVQIHAERFINYNQTVSRMRGIYTAPSGLESTCLVVAYGLDIYQTRVYPSKQFDVLKD

SEQ ID NO: 2666 - protein, 564 aa, Homo Sapiens
SPEVNAGVSSIHITKPVHILEERSLLVLTPAGLTQMLNQTRFLMVLFHNPSSKQSRNLAEELGKAVEIMGKGKNGIGFGKVDITIEKELQQEFGITKAPELKLFFEGNRSEPISCKGVVESAALVVWLRRQISQKAFLFNSSEQVAEFVISRPLVIVGFFQDLEEEVAELFYDVIKDFPELTFGVITIGNVIGRFHVTLDSVLVFKKGKIVNRQKLINDSTNKQELNRVIKQHLTDFVIEYNTENKDLISELHIMSHMLLFVSKSSESYGIIIQHYKLASKEFQNKILFILVDADEPRNGRVFKYFRVTEVDIPSVQILNLSSDARYKMPSDDITYESLKKFGRSFLSKNATKHQSSEEIPKYWDQGLVKQLVGKNFNVVVFDKEKDVFVMFYAPWSKKCKMLFPLLEELGRKYQNHSTIIIAKIDVTANDIQLMYLDRYPFFRLFPSGSQQAVLYKGEHTLKGFSDFLESHIKTKIEDEDELLSVEQNEVIEEEVLAEEKEVPMMRKGLPEQQSPELENMTKYVSKLEEPAGKKKTSEEVVVVVAKPKGPPVQKKKPKVKEEL

SEQ ID NO: 2667 - protein, 260 aa, Homo Sapiens
MASAVWGSAPWWGPPPPAPARPLTDIDFCSGAQLQELTQLIQELGVQESWSDGPKPGADLLRAKDFVFSLLGLVHRRDPRFPPQAELLLLRGGIREGSLDLGHAPLGPYARGPHYDAGFTLLVPMFSLDGTELQLDLESCYAQVCLPEMVCGTPIREMWQDCLGPPVPGARDSIHRTESEESSKDWQSSVDQPHSYVTEHEAPVSLEKSPSDVSASESPQHDVVDLGSTAPLKTMSSDVTKAAVESPVPKPSEAREAWPT

SEQ ID NO: 2668 - protein, 75 aa, Homo Sapiens
TMFISTEQTERDSATAYRMTVEVLGTVLGTAIQGQIVGQADTPCFQDLNSSTVASQSANHTHGTTSHRETQKAYL

SEQ ID NO: 2669 - protein, 477 aa, Homo Sapiens
IEFTGLRSNLSGPQQISLFDLPSEWYLKTRQSVQQFTVCQIGLSVFSAIEGEANKYIAHSCNFYLFPTTFGILDSEFSFQASSVQFLNQYGFNYNKFLKNGIPYMNEEQEKKIRHDILTGNWRVRSSPDKDQIKVVIDEVTRWLELAKEGDWMTLPGITGFQAFEVQLVLRQALPNIWTVLKDEGVVVKKVSKQHRWYLQNTSCDRESCWKENILLSARGFSVFFQMLVKAQKPLVGHNMMMDLLHLHEKFFRPLPESYDQFKQNIHSLFPVLIDTKSVTKDIWKEMNFPRVSNLSEVYEVLNSDLNPTKNSGPEIVHASRCEKYVETKCPHEAAYDAFLCGSVLLKVAHLLLQKIYHIDPVPESSFPQYLDVLAPYVNQVNLIRAGVPKINFSGPDYPSIRPPILILSVKRWPGVSEQQVYHKFQNLCKFDVRRLTRSQFLLLTNKFKDARNILKEYRDHPTLCISLYRYWRHSPN

SEQ ID NO: 2670 - protein, 182 aa, Homo Sapiens
FNLQVATPGGKAMEFVDVTESNARWVQDFRLKAYASPAKLESIDGARYHALLIPSCPGALTDLASSGSLARILQHFHSESKPICAVGHGVAALCCATNEDRSWVFDSYSLTGPSVCELVRAPGFARLPLVVEDFVKDSGACFSASEPDAVHVVLDRHLVTGQNASSTVPAVQNLLFLCGSRK

SEQ ID NO: 2671 - protein, 278 aa, Homo Sapiens
HLGVLGPKNVSQKDAEFERTYVDEVNSELVNIYTFNHTVTRNRTEGVRVSVNVLNKQKGAPLLFVVRQKEAVVSFQVPLILRGMFQRKYLYQKVERTLCQPPTKNESEIQFFYVDVSTLSPVNTTYQLRVSRMDDFVLRTGEQFSFNTTAAQPQYFKYELPEGVDSVIVKVTSNKAFPCSVISIQDVLCPVYDLDNNVAFIGMYQTMTKKAAITVQRKDFPSNSFYVVVVVKTEDQACGGSLPFYPFAEDEPVDQGHRQKTLSVLVSQAVTSEAYVSG

SEQ ID NO: 2672 - protein, 341 aa, Homo Sapiens
SQEAGTGAGAGSLAGSCGCGTPQRPGAHGSSAAAHRYSREANAPGPVPGERQLAHSKMVPIPAGVFTMGTDDPQIKQDGEAPARRVTIDAFYMDAYEVSNTEFEKFVNSTGYLTEAEKFGDSFVFEGMLSEQVKTNIQQAVAAAPWWLPVKGANWRHPEGPDSTILHRPDHPVLHVSWNDAVAYCTWAGKRLPTEAEWEYSCRGGLHNRLFPWGNKLQPKGQHYANIWQGEFPVTNTGEDGFQGTAPVDAFPPNGYGLYNIVGNAWEWTSDWWTVHHSVEETLNPKGPPSGKDRVKKGGSYMCHRSYCYRYRCAARSQNTPDSSASNLGFRCAADRLPTMD

SEQ ID NO: 2673 - protein, 369 aa, Homo Sapiens
RQKESGSKWKVFIDQINRSLENYEPCSSQNCSCYHGVIEEDLTPFRGGISRRMMAEVVRRKLGTHYQITKNRLYRENDCMFPSRCSGVEHFILEVIGRLPDMEMVINVRDYPQVPKWMEPAIPVFSFSKTSEYHDIMYPAWTFWEGGPAVWPIYPTGLGRWDLFREDLVRSAAQWPWKKKNSTAYFRGSRTSPERDPLILLSRKNTKLVDAEYTKNQAWKSMKDTLGKPAAKDVHLVDHCKYKYLFNFRGVAASFRFKHLFLCGSLVFHVGDEWLEFFYPQLKPWVHYIPVKTDLSNVQELLQFVKANDDVAQEIAERGSQFIRNHLQMDDITCYWENLLSEYSKFLSYNVTRRKGYDQIIPKMLKTEL

SEQ ID NO: 2674 - protein, 281 aa, Homo Sapiens
ESFVKLFIPKRRKSVTGEIVLITGAGHGIGRLTAYEFAKLKSKLVLWDINKHGLEETAAKCKGLGAKVHTFVVDCSNREDIYSSAKKVKAEIGDVSILVNNAGVVYTSDLFATQDPQIEKTFEVNVLAHFWTTKAFLPAMTKNNHGHIVTVASAAGHVSVPFLLAYCSSKFAAVGFHKTLTDELAALQITGVKTTCLCPNFVNTGFIKNPSTSLGPTLEPEEVVNRLMHGILTEQKMIFIPSSIAFLTTLERILPERFLAVLKRKISVKFDAVIGYKMKAQ

SEQ ID NO: 2675 - protein, 168 aa, Homo Sapiens
RALEWFSAVVNIEYVDPQTNLTVWSVSESGRFGDSSPKEGAHGLVGVPWAPGGDLEGCAPDTRFFVPEPGGRGAAPWVALVARGGCTFKDKVLVAARRNASAVVLYNEERYGNITLPMSHAGTGNIVVIMISYPKGREILELVQKGIPVTMTIGVGTRHVQEFISGQS

SEQ ID NO: 2676 - protein, 147 aa, Homo Sapiens
RTDSPSPTVLNSHISTPNVNALTHENQTKPSISQISTTLPPTTSTKKSGGASVVPHPSPTPLSQEEADNNEDPSIEEEDLLMLNSSPSTAKDTLDNGDYGEPDYDWTTGPRDDDESDDTLEENRGYMEIEQSVKSFKMPSSNIEEED

SEQ ID NO: 2677 - protein, 325 aa, Homo Sapiens
IAVAQKTQDGQNIGIKHIPATQCGIWVRTSNGGHFASPNYPDSYPPNKECIYILEAAPRQRIELTFDEHYYIEPSFECRFDHLEVRDGPFGFSPLIDRYCGVKSPPLIRSTGRFMWIKFSSDEELEGLGFRAKYSFIPDPDFTYLGGILNPIPDCQFELSGADGIVRSSQVEQEEKTKPGQAVDCIWTIKATPKAKIYLRFLDYQMEHSNECKRNFVAVYDGSSSIENLKAKFCSTVANDVMLKTGIGVIRMWADEGSRLSRFRMLFTSFVEPPCTSSTFFCHSNMCINNSLVCNGVQNCAYPWDENHCKEKKKAGVFEQITKTH

SEQ ID NO: 2678 - protein, 183 aa, Homo Sapiens
WVHGDPRRAAYPTDSQGHFCGQKGTPNENKTILFYFNLLRCTSPSVLLNLQCPTTQICVSKCPEKFLTYVEMQLLYTKDKSYWEDYRQFCKTTAKPVKSLTQLLLDDDCPTAIFPSKPFLQRCFPDFSTKNGTLTIGSKMMFQDGNGGTRSVVELGIAANGINKLLDAKSLGLKVFEDYARTW

SEQ ID NO: 2679 - protein, 241 aa, Homo Sapiens
DSEVMASTVVKYLSQEEAQAVDQELFNEYQFSVDQLMELAGLSCATAIAKAYPPTSMSRSPPTVLVICGPGNNGGDGLVCARHLKLFGYEPTIYYPKRPNKPLFTALVTQCQKMDIPFLGEMPAEPMTIDELYELVVDAIFGFSFKGDVREPFHSILSVLKGLTVPIASIDIPSGWDVEKGNAGGIQPDLLISLTAPKKSATQFTGRYHYLGGRFVPPALEKKYQLNLPPYPDTECVYRLQ

SEQ ID NO: 2680 - protein, 395 aa, Homo Sapiens
LASWQRNELTDRRFLQLNKCPACFGTSWCRRFLNGQVVFEAWGRLRLLDFLNVKNVYFAQYGEPREGGRRRVVLKRLGSQRELAQLDQSICKRATGRPRCDLLQAMPRTEFARLNGDVRLLTPEAVEGWSDLVHCPSQRLLDRLVRRYAETKDSGSFLLRNLKDSERMQLLLTLAFNPEPLVLQSFPSDEGWPFAKYLGACGRMVAVNYVGEELWSYFNAPWEKRVDLAWQLMEIAEQLTNNDFEFALYLLDVSFDNFAVGPRDGKVIIVDAENVLVADKRLIRQNKPENWDVWYESKFDDCDKEACLSFSKEILCARATVDHNYYAVCQNLLSRHATWRGTSGGLLHDPPSEIAKDGRLEALLDECANPKKRYGRFQAAKELREYLAQLSNNVR

SEQ ID NO: 2681 - protein, 48 aa, Homo Sapiens
MNYTESSPLRESTAIGFTPELESIIPVPSNKTTCENWREIHHLVFHVA

SEQ ID NO: 2682 - protein, 71 aa, Homo Sapiens
LHPTGNITGLPGSKRSQPPRNITKEPKVFFHKTQLPGIQGAASRSTAASPTNPMKFLRNKAIIRHRPALVK

SEQ ID NO: 2683 - protein, 518 aa, Homo Sapiens
QDSTQASTPGSPLSPTEYERFFALLTPTWKAETTCRLRATHGCRNPTLVQLDQYENHGLVPDGAVCSNLPYASWFESFCQFTHYRCSNHVYYAKRVLCSQPVSILSPNTLKEIEASAEVSPTTMTSPISPHFTVTERQTFQPWPERLSNNVEELLQSSLSLGGQEQAPEHKQEQGVEHRQEPTQEHKQEEGQKQEEQEEEQEEEGKQEEGQGTKEGREAVSQLQTDSEPKFHSESLSSNPSSFAPRVREVESTPMIMENIQELIRSAQEIDEMNEIYDENSYWRNQNPGSLLQLPHTEALLVLCYSIVENTCIITPTAKAWKYMEEEILGFGKSVCDSLGRRHMSTCALCDFCSLKLEQCHSEASLQRQQCDTSHKTPFVSPLLASQSLSIGNQVGSPESGRFYGLDLYGGLHMDFWCARLATKGCEDVRVSGWLQTEFLSFQDGDFPTKICDTDYIQYPNYCSFKSQQCLMRNRNRKVSRMRCLQNETYSALSPGKSEDVVLRWSQEFSTLTLGQFG

SEQ ID NO: 2684 - protein, 59 aa, Homo Sapiens
EDGKNDSLPSESTSHRWRGPACRPPDSSYNSLYSTCLELFKFTIGMGDLEFTENYDFKA

SEQ ID NO: 2685 - protein, 92 aa, Homo Sapiens
LSPGLKCVCLLCDSSNFTCQTEGACWASVMLTNGKEQVIKSCVSLPELNAQVFCHSSNNVTKTECCFTDFCNNITLHLPTASPNAPKLGPME

SEQ ID NO: 2686 - protein, 51 aa, Homo Sapiens
KFKEICERPNGSCRDFCLETEIHVGRCLNSQPCCLPLGHQPRIESTTPKKD

SEQ ID NO: 2687 - protein, 66 aa, Homo Sapiens
SFWNKDPFLDMIRETEQCWVQPPYKYCEKRCTKIMTCVRPNHTCCWTYCGNICLDNEEPLKSMLNP

SEQ ID NO: 2688 - protein, 62 aa, Homo Sapiens
EMRKKRYDRKELLLEECWGKPNVKECTNKCSKAFRCKDKNYTCCWTYCGNICWINVETSGDY

SEQ ID NO: 2689 - protein, 258 aa, Homo Sapiens
RKSAACGQPRMSSRIVGGRDGRDGEWPWQASIQHRGAHVCGGSLIAPQWVLTAAHCFPRRALPAEYRVRLGALRLGSTSPRTLSVPVRRVLLPPDYSEDGARGDLALLQLRRPVPLSARVQPVCLPVPGARPPPGTPCRVTGWGSLRPGVPLPEWRPLQGVRVPLLDSRTCDGLYHVGADVPQAERIVLPGSLCAGYPQGHKDACQGDSGGPLTCLQSGSWVLVGVVSWGKGCALPNRPGVYTSVATYSPWIQARVSF

SEQ ID NO: 2690 - protein, 54 aa, Homo Sapiens
MAAQNGNTSFTPNFNPPQDHASSLSFNFSYGDYDLPMDEDEDMTKTRTFFAAKI

SEQ ID NO: 2691 - protein, 435 aa, Homo Sapiens
DPGALLRLGMDIMNQVQSAMDESHILEKMAAEAGKKQPGMKPIKGITNLKVKDVQLPVITLNFVPGVGIFQCVSTGMTVTGKSFMGGNMEIIVALNITATNRLLRDEETGLPVFKSEGCEVILVNVKTNLPSNMLPKMVNKFLDSTLHKVLPGLMCPAIDAVLVYVNRKWTNLSDPMPVGQMGTVKYVLMSAPATTASYIQLDFSPVVQQQKGKTIKLADAGEALTFPEGYAKGSSQLLLPATFLSAELALLQKSFHVNIQDTMIGELPPQTTKTLARFIPEVAVAYPKSKPLTTQIKIKKPPKVTMKTGKSLLHLHSTLEMFAARWRSKAPMSLFLLEVHFNLKVQYSVHENQLQMATSLDRLLSLSRKSSSIGNFNERELTGFITSYLEEAYIPVVNDVLQVGLPLPDFLAMNYNLAELDIVENALMLDLKLG

SEQ ID NO: 2692 - protein, 68 aa, Homo Sapiens
FPVSQDQEREKRSISDSDELASGFFVFPYPYPFRPLPPIPFPRFPWFRRNFPIPIPESAPTTPLPSEK

SEQ ID NO: 2693 - protein, 56 aa, Homo Sapiens
YFRGYKPRSTDLILRHLTVADSLVILSKRIPETMATFGLKHFDNYFGCKFLLYAHR

SEQ ID NO: 2694 - protein, 120 aa, Homo Sapiens
EEPAASFSQPGSMGLDKNTVHDQEHIMEHLEGVINKPEAEMSPQELQLHYFKMHDYDGNNLLDGLELSTAITHVHKEEGSEQAPLMSEDELINIIDGVLRDDDKNNDGYIDYAEFAKSLQ

SEQ ID NO: 2695 - protein, 183 aa, Homo Sapiens
EASESTMKIIKEEFTDEEMQYDMAKSGQEKQTIEILMNPILLVKNTSLSMSKDDMSSTLLTFRSLHYNDPKGNSSGNDKECCNDMTVWRKVSEANGSCKWSNNFIRSSTEVMRRVHRAPSCKFVQNPGISCCESLELENTVCQFTTGKQFPRCQYHSVTSLEKILTVLTGHSLMSWLVCGSKL

SEQ ID NO: 2696 - protein, 54 aa, Homo Sapiens
QPYWIGDSVNTPQAGYFGLFSYCVGNVLSSELICKGGPLDFSSIPSRAFKTAMF

SEQ ID NO: 2697 - protein, 193 aa, Homo Sapiens
YFDGPLYPEMSNGTLHHYFVPDGDYEENDDPEKCQLLFRVSDHRRCSQGEGSQVGSLLSLTLREEFTVLGRQVEDAGRVLEGISKSISYDLDGEESYGKYLRRESHQIGDAYSNSDKSLTELESKFKQGQEQDSRQESRLNEDFLGMLVHTRSLLKETLDISVGLRDKYELLALTIRSHGTRLGRLKNDYLKV

SEQ ID NO: 2698 - protein, 123 aa, Homo Sapiens
AISWELDNVLMPSPRIWPQVTPTGRSASVRSEGNTSSLWNFSAGQDVHAIVTRTCESVLSSAVYTHGCGCVRSATNITCQSSGQQRQAARQEEENSICKAHDSREGRLGYPLSAHQPGSGGPN

SEQ ID NO: 2699 - protein, 355 aa, Homo Sapiens
RERDHELRHRRHHHQSPKSHFELPHYPGLLAHQKPFIRKSYKCLHKRCRPKLPPSPNNPPKFPNPHQPPKHPDKNSSVVNPTLVATTQIPSVTFPSASTKITTLPNVTFLPQNATTISSRENVNTSSSVATLAPVNSPAPQDTTAAPPTPSATTPAPPSSSAPPETTAAPPTPSATTQAPPSSSAPPETTAAPPTPPATTPAPPSSSAPPETTAAPPTPSATTPAPLSSSAPPETTAVPPTPSATTLDPSSASAPPETTAAPPTPSATTPAPPSSPAPQETTAAPITTPNSSPTTLAPDTSETSAAPTHQTITSVTTQTTTTKQPTSAPGQNKISRFLLYMKNLLNRIIDDMVEQ

SEQ ID NO: 2700 - protein, 742 aa, Homo Sapiens [sequence omitted]

SEQ ID NO: 2701 - protein, 533 aa, Homo Sapiens
LHNVTAELFGAEAWGTLAAFGDLNSDKQTDLFVLRERNDLIVFLADQNAPYFKPKVKVSFKNHSALITSVVPGDYDGDSQMDVLLTYLPKNYAKSELGAVIFWGQNQTLDPNNMTILNRTFQDEPLIMDFNGDLIPDIFGITNESNQPQILLGGNLSWHPALTTTSKMRIPHSHAFIDLTEDFTADLFLTTLNATTSTFQFEIWENLDGNFSVSTILEKPQNMMVVGQSAFADFDGDGHMDHLLPGCEDKNCQKSTIYLVRSGMKQWVPVLQDFSNKGTLWGFVPFVDEQQPTEIPIPITLHIGDYNMDGYPDALVILKNTSGSNQQAFLLENVPCNNASCEEARRMFKVYWELTDLNQIKDAMVATFFDIYEDGILDIVVLSKGYTKNDFAIHTLKNNFEADAYFVKVIVLSGLCSNDCPRKITPFGVNQPGPYIMYTTVDANGYLKNGSAGQLSQSAHLALQLPYNVLGLGRSANFLDHLYVGIPRPSGEKSIRKQEWTAIIPNSQLIVIPYPHNVPRSWSAKLYLTPSNI

SEQ ID NO: 2702 - protein, 94 aa, Homo Sapiens
LAVLLQAAEAAPGLGPPDPRPRTLPPLPPGPTPAQQPGRGLAEAAGPRGSEGGNGSNPVAGLETDDHGGKAGEGSVGGGLAVSPNPGDKPMTQR

SEQ ID NO: 2703 - protein, 93 aa, Homo Sapiens
MANHNLLQIFTAATPVHHCRPPHNASTGPWVLPMGPNGKPERCLRFVHPPNASLPNDTQRAMEPCLDGWVYNSTKDSIVTEWDLVCNSNKLKE

SEQ ID NO: 2704 - protein, 513 aa, Homo Sapiens
MTPESRDTTDLSPGGTQEMEGIVIVKVEEEDEEDHFQKERNKVESSPQVLSRSTTMNERALLSSYLVAYRVAKEKMAHTAAEKIILPACMDMVRTIFDDKSADKLRTIPLSDNTISRRICTIAKHLEAMLITRLQSGIDFAIQLDESTDIASCPTLLVYVRYVWQDDFVEDLLCCLNLNSHITGLDLFTELENCLLGQYKLNWKHCKGISSDGTANMTGKHSRLTEKLLEATHNNAVWNHCFIHREALVSKEISPSLMDVLKNAVKTVNFIKGSSLNSRLLEIFCSEIGVNHTHLLFHTEVRWLSQGKVLSRVYELRNEIYIFLVEKQSHLANIFEDDIWVTKLAYLSDIFGILNELSLKMQGKNNDIFQYLEHILGFQKTLLLWQARLKSNRPSYYMFPTLLQHIEENIINEDCLKEIKLEILLHLTSLSQTFNYYFPEEKFESLKENIWMKDPFAFQNPESIIELNLEPEEENELLQLSSSFTLKNYYKILSLSAFWIKIKDDFPLLSRKS

SEQ ID NO: 2705 - protein, 300 aa, Homo Sapiens
QFNGYNCDANLHSRFPAERDISVYCGVQAITMKINFCTVLFSGYSETDLALNGRHGDSHCRGFINNNTFPAVVIFIINLSTLEGCGNNLVVSTIPGVSAYGNATSVQVGNISGYIDTPDPPTIISYLPGLLYKFSCSYPLEYLVNNTQLASSSAAISVRENNGTFVSTLNLLLYNDSTYNQQLIIPSIGLPLKTKVFAAVQATNLDGRWNVLMDYCYTTPSGSPNDDIRYDLFLSCDKDPQTTVIENGRSQRGRFSFEVFRFVKHKNQKMSTVFLHCVTKLCRADDCPFLMPICSHRERR

SEQ ID NO: 2706 - protein, 62 aa, Homo Sapiens
METTMGFMDDNATNTSTSFLSVLNPHGAHATSFPFNFSYSDYDMPLDEDEDVTNSRTFFAAK

SEQ ID NO: 2707 - protein, 160 aa, Homo Sapiens
DFDDFNLEDAVKETSSVKQPWDHTTTTTTNRPGTTRAPAKPPGSGLDLADALDDQDDGRRKPGIGGRERWNHVTTTTKRPVTTRAPANTLGNDFDLADALDDRNDRDDGRRKPIAGGGGFSDKDLEDIVGGGEYKPDKGKGDGRYGSNDDPGSGMVAEPG

SEQ ID NO: 2708 - protein, 145 aa, Homo Sapiens
IAIKKEKRPPQTLSRGWGDDITWVQTYEEGLFYAQKSKKPLMVIHHLEDCQYSQALKKVFAQNEEIQEMAQNKFIMLNLMHETTDKNLSPDGQYVPRIMFVDPSLTVRADIAGRYSNRLYTYEPRDLPLLIENMKKALRLIQSEL

SEQ ID NO: 2709 - protein, 195 aa, Homo Sapiens
HSLCFNFTIKSLSRPGQPWCEAQVFLNKNLFLQYNSDNNMVKPLGLLGKKVNATSTWGELTQTLGEVGRDLRMLLCDIKPQIKTSDPSTLQVEMFCQHEAERCTGASWQFTINGEKSLLFDAMNMTWTVINHEASKIKETWKKDRGLEKYFRKLSKGDCDHWLREFLGHWEAMPEPTVSPVNASDIHWSSSSLPD

SEQ ID NO: 2710 - protein, 100 aa, Homo Sapiens
NIHMNFTHICRSHNSINQSLDESVIYGPGNLSTNNNTLRDHFKGISSHSRSSLMPLRNDVDKRGETTSASLLNAGLSHTEYQIVTDPGDVPAFLKWLSLA

SEQ ID NO: 2711 - protein, 127 aa, Homo Sapiens
KPKDMTSSQWFKTQHVQPSPQACNSAMSIINKYTERCKDLNTFLHEPFSSVAITCQTPNIACKNSCKNCHQSHGPMSLTMGELTSGKYPNCRYKEKHLNTPYIVACDPPQQGDPGYPLVPVHLDKVV

SEQ ID NO: 2712 - protein, 463 aa, Homo Sapiens
TLSPTAVLILGPKVIKEKLTQELKDHNATSILQQLPLLSAMREKPAGGIPVLGSLVNTVLKHVIWLKVITANILQLQVKPSANDQELLVKIPLDMVAGFNTPLVKTIVEFHMTTEAQATIRMDTSASGPTRLVLSDCATSHGSLRIQLLHKLSFLVNALAKQVMNLLVPSLPNLVKNQLCPVIEASFNGMYADLLQLVKVPISLSIDRLEFDLLYPAIKGDTIQLYLGAKLLDSQGKVTKWFNNSAASLTMPTLDNIPFSLIVSQDVVKAAVAAVLSPEEFMVLLDSVLPESAHRLKSSIGLINEKAADKLGSTQIVKILTQDTPEFFIDQGHAKVAQLIVLEVFPSSEALRPLFTLGIEASSEAQFYTKGDQLILNLNNISSDRIQLMNSGIGWFQPDVLKNIITEIIHSILLPNQNGKLRSGVPVSLVKALGFEAAESSLSKDALVLTPASLWKPTSPVSQ

SEQ ID NO: 2713 - protein, 85 aa, Homo Sapiens
CPRRFLEELGYWGVRLKYTPRCCRICFEERRDELSERLKIQHELRAQAQVEEAEELFRDMRFYGPQRRRLWNLMEKPFSSVAAKA

SEQ ID NO: 2714 - protein, 547 aa, Homo Sapiens
EPAENSDFYLPGDYLLGGLFSLHANMKGIVHLNFLQVPMCKEYEVKVIGYNLMQAMRFAVEEINNDSSLLPGVLLGYEIVDVCYISNNVQPVLYFLAHEDNLLPIQEDYSNYISRVVAVIGPDNSESVMTVANFLSLFLLPQITYSAISDELRDKVRFPALLRTTPSADHHIEAMVQLMLHFRWNWIIVLVSSDTYGRDNGQLLGERVARRDICIAFQETLPTLQPNQNMTSEERQRLVTIVDKLQQSTARVVVVFSPDLTLYHFFNEVLRQNFTGAVWIASESWAIDPVLHNLTELRHLGTFLGITIQSVPIPGFSEFREWGPQAGPPPLSRTSQSYTCNQECDNCLNATLSFNTILRLSGERVVYSVYSAVYAVAHALHSLLGCDKSTCTKRVVYPWQLLEEIWKVNFTLLDHQIFFDPQGDVALHLEIVQWQWDRSQNPFQSVASYYPLQRQLKNIQDISWHTINNTIPMSMCSKRCQSGQKKKPVGIHVCCFECIDCLPGTFLNHTEDEYECQACPNNEWSYQSETSCFKRQLVFLEWHEAPT

SEQ ID NO: 2715 - protein, 872 aa, Homo Sapiens
NAIRLTSEHTVETLVVADADMVQYHGAEAAQRFILTVMNMVYNMFQHQSLGIKINIQVTKLVLLRQRPAKLSIGHHGERSLESFCHWQNEEYGGARYLGNNQVPGGKDDPPLVDAAVFVTRTDFCVHKDEPCDTVGIAYLGGVCSAKRKCVLAEDNGLNLAFTIAHELGHNLGMNHDDDHSSCAGRSHIMSGEWVKGRNPSDLSWSSCSRDDLENFLKSKVSTCLLVTDPRSQHTVRLPHKLPGMHYSANEQCQILFGMNATFCRNMEHLMCAGLWCLVEGDTSCKTKLDPPLDGTECGADKWCRAGECVSKTPIPEHVDGDWSPWGAWSMCSRTCGTGARFRQRKCDNPPPGPGGTHCPGASVEHAVCENLPCPKGLPSFRDQQCQAHDRLSPKKKGLLTAVVVDDKPCELYCSPLGKESPLLVADRVLDGTPCGPYETDLCVHGKCQKIGCDGIIGSAAKEDRCGVCSGDGKTCHLVKGDFSHARGTALKDSGKGSINSDWKIELPGEFQIAGTTVRYVRRGLWEKISAKGPTKLPLHLMVLLFHDQDYGIHYEYTVPVNRTAENQSEPEKPQDSLFIWTHSGWEGCSVQCGGGERRTIVSCTRIVNKTTTLVNDSDCPQASRPEPQVRRCNLHPCQSRWVAGPWSPCSATCEKGFQHREVTCVYQLQNGTHVATRPLYCPGPRPAAVQSCEGQDCLSIWEASEWSQCSASCGKGVWKRTVACTNSQGKCDASTRPRAEEACEDYSGCYEWKTGDWSTCSSTCGKGLQSRVVQCMHKVTGRHGSECPALSKPAPYRQCYQEVCNDRINANTITSPRLAALTYKCTRDQWTVYCRVIREKNLCQDMRWYQRCCQTCRDFYANKMRQPPPNS

SEQ ID NO: 2716 - protein, 945 aa, Homo Sapiens
SLLRSHRNEELNVETLVVVDKKMMQNHGHENITTYVLTILNMVSALFKDGTIGGNINIAIVGLILLEDEQPGLVISHHADHTLSSFCQWQSGLMGKDGTRHDHAILLTGLDICSWKNEPCDTLGFAPISGMCSKYRSCTINEDTGLGLAFTIAHESGHNFGMIHDGEGNMCKKSEGNIMSPTLAGRNGVFSWSPCSRQYLHKFLSTAQAICLADQPKPVKEYKYPEKLPGELYDANTQCKWQFGEKAKLCMLDFKKDICKALWCHRIGRKCETKFMPAAEGTICGHDMWCRGGQCVKYGDEGPKPTHGHWSDWSSWSPCSRTCGGGVSHRSRLCTNPKPSHGGKFCEGSTRTLKLCNSQKCPRDSVDFRAAQCAEHNSRRFRGRHYKWKPYTQVEDQDLCKLYCIAEGFDFFFSLSNKVKDGTPCSEDSRNVCIDGICERVGCDNVLGSDAVEDVCGVCNGNNSACTIHRGLYTKHHHTNQYYHMVTIPSGARSIRIYEMNVSTSYISVRNALRRYYLNGHWTVDWPGRYKFSGTTFDYRRSYNEPENLIATGPTNETLIVELLFQGRNPGVAWEYSMPRLGTEKQPPAQPSYTWAIVRSECSVSCGGGQMTVREGCYRDLKFQVNMSFCNPKTRPVTGLVPCKVSACPPSWSVGNWSACSRTCGGGAQSRPVQCTRRVHYDSEPVPASLCPQPAPSSRQACNSQSCPPAWSAGPWAECSHTCGKGWRKRAVACKSTNPSARAQLLPDAVCTSEPKPRMHEACLLQRCHKPKKLQWLVSAWSQCSVTCERGTQKRFLKCAEKYVSGKYRELASKKCSHLPKPSLELERACAPLPCPRHPPFAAAGPSRGSWFASPWSQCTASCGGGVQTRSVQCLAGGRPASGCLLHQKPSASLACNTHFCPIAEKKDAFCKDYFHWCYLVPQHGMCSHKFYGKQCCKTCSKSNL

SEQ ID NO: 2717 - protein, 738 aa, Homo Sapiens
FVSIPRYVETLVVADESMVKFHGADLEHYLLTLLATAARLYRHPSILNPINIVVVKVLLLRDRDSGPKVTGNAALTLRNFCAWQKKLNKVSDKHPEYWDTAILFTRQDLCGATTCDTLGMADVGTMCDPKRSCSVIEDDGLPSAFTTAHELGHVFNMPHDNVKVCEEVFGKLRANHMMSPTLIQIDRANPWSACSAAIITDFLDSGHGDCLLDQPSKPISLPEDLPGASYTLSQQCELAFGVGSKPCPYMQYCTKLWCTGKAKGQMVCQTRHFPWADGTSCGEGKLCLKGACVERHNLNKHRVDGSWAKWDPYGPCSRTCGGGVQLARRQCTNPTPANGGKYCEGVRVKYRSCNLEPCPSSASGKSFREEQCEAFNGYNHSTNRLTLAVAWVPKYSGVSPRDKCKLICRANGTGYFYVLAPKVVDGTLCSPDSTSVCVQGKCIKAGCDGNLGSKKRFDKCGVCGGDNKSCKKVTGLFTKPMHGYNFVVAIPAGASSIDIRQRGYKGLIGDDNYLALKNSQGKYLLNGHFVVSAVERDLVVKGSLLRYSGTGTAVESLQASRPILEPLTVEVLSVGKMTPPRVRYSFYLPKEPREDKSSHPKDPRGPSVLHNSVLSLSNQVEQPDDRPPARWVAGSWGPCSASCGSGLQKRAVDCRGSAGQRTVPACDAAHRPVETQACGEPCPTWELSAWSPCSKSCGRGFQRRSLKCVGHGGRLLARDQCNLHRKPQELDFCVLRPC

SEQ ID NO: 2718 - protein, 937 aa, Homo Sapiens
SAGKSQKGLNVETLVVADKKMVEKHGKGNVTTYILTVMNMVSGLFKDGTIGSDINVVVVSLILLEQEPGGLLINHHADQSLNSFCQWQSALIGKNGKRHDHAILLTGFDICSWKNEPCDTLGFAPISGMCSKYRSCTINEDTGLGLAFTIAHESGHNFGMIHDGEGNPCRKAEGNIMSPTLTGNNGVFSWSSCSRQYLKKFLSTPQAGCLVDEPKQAGQYKYPDKLPGQIYDADTQCKWQFGAKAKLCSLGFVKDICKSLWCHRVGHRCETKFMPAAEGTVCGLSMWCRQGQCVKFGELGPRPIHGQWSAWSKWSECSRTCGGGVKFQERHCNNPKPQYGGIFCPGSSRIYQLCNINPCNENSLDFRAQQCAEYNSKPFRGWFYQWKPYTKVEEEDRCKLYCKAENFEFFFAMSGKVKDGTPCSPNKNDVCIDGVCELVGCDHELGSKAVSDACGVCKGDNSTCKFYKGLYLNQHKANEYYPVVIIPAGARSIEIQELQVSSSYLAVRSLSQKYYLTGGWSIDWPGEFPFAGTTFEYQRSFNRPERLYAPGPTNETLVFEILMQGKNPGIAWKYALPKVMNGTPPATKRPAYTWSIVQSECSVSCGGGYINVKAICLRDQNTQVNSSFCSAKTKPVTEPKICNAFSCPAYWMPGEWSTCSKACAGGQQSRKIQCVQKKPFQKEEAVLHSLCPVSTPTQVQACNSHACPPQWSLGPWSQCSKTCGRGVRKRELLCKGSAAETLPESQCTSLPRPELQEGCVLGRCPKNSRLQWVASSWSECSATCGLGVRKREMKCSEKGFQGKLITFPERRCRNIKKPNLDLEETCNRRACPAHPVYNMVAGWYSLPWQQCTVTCGGGVQTRSVHCVQQGRPSSSCLLHQKPPVLRACNTNFCPAPEKREDPSCVDFFNWCHLVPQHGVCNHKFYGKQCCKSCTRKI

SEQ ID NO: 2719 - protein, 169 aa, Homo Sapiens
AEAVWTAYLNVSWRVPHTGVNRTVWELSEEGVYGQDSPLEPVAGVLVPPDGPGALNACNPHTNFTVPTVWGSTVQVSWLALIQRGGGCTFADKIHLAYERGASGAVIFNFPGTRNEVIPMSHPGAVDIVAIMIGNLKGTKILQSIQRGIQVTMVIEVGKKHGPWVNHYS

SEQ ID NO: 2720 - protein, 64 aa, Homo Sapiens
LNPQKPLYSSCLSVEKCYQQKDWQRLLLSPLHHADDWHLYFNMASMLWKGINLERRLGSRWFAY

SEQ ID NO: 2721 - protein, 283 aa, Homo Sapiens
SSPCIMEKKDLGPKPALIGHRGAPMLAPEHTLMSFRKALEQKLYGLQADITISLDGVPFLMHDTTLRRTTNVEEEFPELARRPASMLNWTTLQRLNAGQWFLKTVPFWTASSLSPSDHREAQNQSICSLAELLELAKGNATLLLNLRDPPREHPYRSSFINVTLEAVLHSGFPQHQVMWLPSRQRPLVRKVAPGFQQTSGSKEAVASLRRGHIQRLNLRYTQVSRQELRDYASWNLSVNLYTVNAPWLFSLLWCAGVPSVTSDNSHTLSQVPSPLWIMPPDEY

SEQ ID NO: 2722 - protein, 411 aa, Homo Sapiens
PSLIKQQVLKNVRIDPSSLSFNMWKEIPIPFYLSVYFFDVMNPSEILKGEKPQVRERGPYVYREFRHKSNITFNNNDTVSFLEYRTFQFQPSKSHGSESDYIVMPNILVLGAAVMMENKPMTLKLIMTLAFTTLGERAFMNRTVGEIMWGYKDPLVNLINKYFPGMFPFKDKFGLFAELNNSDSGLFTVFTGVQNISRIHLVDKWNGLSKVDFWHSDQCNMINGTSGQMWPPFMTPESSLEFYSPEACRSMKLMYKESGVFEGIPTYRFVAPKTLFANGSIYPPNEGFCPCLESGIQNVSTCRFSAPLFLSHPHFLNADPVLAEAVTGLHPNQEAHSLFLDIHPVTGIPMNCSVKLQLSLYMKSVAGIGQTGKIEPVVLPLLWFAESGAMEGETLHTFYTQLVLMPKVMHY

SEQ ID NO: 2723 - protein, 167 aa, Homo Sapiens
DRAPLTATAPQLDDEEMYSAHMPAHLRCDACRAVAYQMWQNLAKAETKLHTSNSGGRRELSELVYTDVLDRSCSRNWQDYGVREVDQVKRLTGPGLSEGPEPSISVMVTGGPWPTRLSRTCLHYLGEFGEDQIYEAHQQGRGALEALLCGGPQGACSEKVSATREEL

SEQ ID NO: 2724 - protein, 398 aa, Homo Sapiens
QIQQGGPDEKEKTTALKDLLSRIDLDELMKKDEPPLDFPDTLGGFEYAFNEKGQLRHIKTGEPFVFNYREDLHRWNQKRYEALGEIITKYVYELLEKDCNLKKVSIPVDATESEPKSFIFMSEDALTNPQKLMVLIHGSGVVRAGQWARRLIINEDLDSGTQIPFIKRAVAEGYGVIVLNPNENYIEVEKPKIHVQSSSDSSDEPAEKRERKDKVSKETKKRRDFYEKYRNPQREKEMMQLYIRENGSPEEHAIYVWDHFIAQAAAENVFFVAHSYGGLAFVELMIQREADVKNKVTAVALTDSVHNVWHQEAGKTIREWMRENCCNWVSSSEPLDTSVESMLPDCPRVSAGTDRHELTSWKSFPSIFKFFTEASEAKTSSLKPAVTRRSHRIKHEDL

SEQ ID NO: 2725 - protein, 242 aa, Homo Sapiens
ARLMGWWGPRAGFRLFIPEELSRYRGGPGDPGLYLALLGRVYDVSSGRRHYEPGSHYSGFAGRDASRAFVTGDCSEAGLVDDVSDLSAAEMLTLHNWLSFYEKNYVCVGRVTGRFYGEDGLPTPALTQVEAAITRGLEANKLQLQEKQTFPPCNAEWSSARGSRLWCSQKSGGVSRDWIGVPRKLYKPGAKEPRCVCVRTTGPPSGQMPDNPPHRNRGDLDHPNLAEYTGCPPLAITCSFPL

SEQ ID NO: 2726 - protein, 872 aa, Homo Sapiens
ATFISMQLKKTSEVDLAKPLVKFIQQTYPSGGEEQAQYCRAAEELSKLRRAAVGRPLDKHEGALETLLRYYDQICSIEPKFPFSENQICLTFTWKDAFDKGSLFGGSVKLALASLGYEKSCVLFNCAALASQIAAEQNLDNDEGLKIAAKHYQFASGAFLHIKETVLSALSREPTVDISPDTVGTLSLIMLAQAQEVFFLKATRDKMKDAIIAKLANQAADYFGDAFKQCQYKDTLPKYFYFQEVFPVLAAKHCIMQANAEYHQSILAKQQKKFGEEIARLQHAAELIKTVASRYDEYVNVKDFSDKINRALAAAKKDNDFIYHDRVPDLKDLDPIGKATLVKSTPVNVPISQKFTDLFEKMVPVSVQQSLAAYNQRKADLINRSIAQMREATTLANGVLASLNLPAAIEDVSGDTVPQSILTKSRSVIEQGGIQTVDQLIKELPELLQRNREILDESLRLLDEEEATDNDLRAKFKERWQRTPSNELYKPLRAEGTNFRTVLDKAVQADGQVKECYQSHRDTIVLLCKPEPELNAAIPSANPAKTMQGSEVVNVLKSLLSNLDEVKKEREGLENDLKSVNFDMTSKFLTALAQDGVINEEALSVTELDRVYGGLTTKVQESLKKQEGLLKNIQVSHQEFSKMKQSNNEANLREEVLKNLATAYDNFVELVANLKEGTKFYNELTEILVRFQNKCSDIVFARKTERDELLKDLQQSIAREPSAPSIPTPAYQSSPAGGHAPTPPTPAPRTMPPTKPQPPARPPPPVLPANRAPSATAPSPVGAGTAAPAPSQTPGSAPPPQAQGPPYPTYPGYPGYCQMPMPMGYNPYAYGQYNMPYPPVYHQSPGQAPYPGPQQPSYPFPQPPQQSYYPQQ

SEQ ID NO: 2727 - protein, 260 aa, Homo Sapiens
CPRMKRKIEREIKCSPSESPLMEKKNSLKEDHEETKLSVGDIENKHPVSEVGPATVPLQAVVEERTVSFKLGDLEEAPERERLPSVDLKEETSIDSTVNGAVQLPNGNLVQFSQAVSNQINSSGHYQYHTVHKDSGLYKELLHKLHLAKVGDCMGDSGDKPLRRNNSYTSYTMAICGMPLDSFRAKEGEQKGEEMEKLTWPNADSKKRIRMDSYTSYCNAVSDLHSASEIDMSVKAEMGLGDRKGSNGSLEEWYDQDKPE

SEQ ID NO: 2728 - protein, 280 aa, Homo Sapiens
TDEANTYFKEWTCSSSPSLPRSCKEIKDECPSAFDGLYFLRTENGVIYQTFCDMTSGGGGWTLVASVHENDMRGKCTVGDRWSSQQGSKAVYPEGDGNWANYNTFGSAEAATSDDYKNPGYYDIQAKDLGIWHVPNKSPMQHWRNSSLLRYRTDTGFLQTLGHNLFGIYQKYPVKYGEGKCWTDNGPVIPVVYDFGDAQKTASYYSPYGQREFTAGFVQFRVFNNERAANALCAGMRVTGCNTEHHCIGGGGYFPEASPQQCGDFSGFDWSGYGTHVGYS

SEQ ID NO: 2729 - protein, 115 aa, Homo Sapiens
QEYEDEERLGEDEYYQVVYYYTVTPSYDDFSADFTIDYSIFESEDRLNRLDKDITEAIETTISLETARADHPKPVTVKPVTTEPSPDLNDAVSSLRSPIPLLLSCAFVQVGMYFM

SEQ ID NO: 2730 - protein, 551 aa, Homo Sapiens
GDRRPLPVDRAAGLKEKTLILLDVSTKNPVRTVNENFLSLQLDPSIIHDGWLDFLSSKRLVTLARGLSPAFLRFGGKRTDFLQFQNLRNPAKSRGGPGPDYYLKNYEDDIVRSDVALDKQKGCKIAQHPDVMLELQREKAAQMHLVLLKEQFSNTYSNLILTARSLDKLYNFADCSGLHLIFALNALRRNPNNSWNSSSALSLLKYSASKKYNISWELGNEPNNYRTMHGRAVNGSQLGKDYIQLKSLLQPIRIYSRASLYGPNIGRPRKNVIALLDGFMKVAGSTVDAVTWQHCYIDGRVVKVMDFLKTRLLDTLSDQIRKIQKVVNTYTPGKKIWLEGVVTTSAGGTNNLSDSYAAGFLWLNTLGMLANQGIDVVIRHSFFDHGYNHLVDQNFNPLPDYWLSLLYKRLIGPKVLAVHVAGLQRKPRPGRVIRDKLRIYAHCTNHHNHNYVRGSITLFIINLHRSRKKIKLTGTLRDKLVHQYLLQPYGQEGLKSKSVQLNGQPLVMVDDGTLPELKPRPLRAGRTLVIPPVTMGFFVVKNVNALACRYR

SEQ ID NO: 2731 - protein, 299 aa, Homo Sapiens
AAASSLEMLSREFETCAFSFSSLPRSCKEIKERCHSAGDGLYFLRTKNGVVYQTFCDMTSGGGGWTLVASVHENDMHGKCTVGDRWSSQQGNKADYPEGDGNWANYNTFGSAEAATSDDYKNPGYYDIQAKDLGIWHVPNKSPMQHWRNSALLRYRTNTGFLQRLGHNLFGIYQKYPVKYRSGKCWNDNGPAIPVVYDFGDAKKTASYYSPYGQREFVAGFVQFRVFNNERAANALCAGIKVTGCNTEHHCIGGGGFFPQGKPRQCGDFSAFDWDGYGTHVKSSCSREITEAAVLLFYR

SEQ ID NO: 2732 - protein, 88 aa, Homo Sapiens
VKEGIEKAGVCPADNVRCFKSDPPQCHTDQDCLGERKCCYLHCGFKCVIPVKELEEGGNKDEDVSRPYPEPGWEAKCPGSSSTRCPQK

SEQ ID NO: 2733 - protein, 433 aa, Homo Sapiens
EETCPSFTRLSFHSAVVGTGLNVRLMLYTRKNLTCAQTINSSAFGNLNVTKKTTFIVHGFRPTGSPPVWMDDLVKGLLSVEDMNVVVVDWNRGATTLIYTHASSKTRKVAMVLKEFIDQMLAEGASLDDIYMIGVSLGAHISGFVGEMYDGWLGRITGLDPAGPLFNGKPHQDRLDPSDAQFVDVIHSDTDALGYKEPLGNIDFYPNGGLDQPGCPKTILGGFQYFKCDHQRSVYLYLSSLRESCTITAYPCDSYQDYRNGKCVSCGTSQKESCPLLGYYADNWKDHLRGKDPPMTKAFFDTAEESPFCMYHYFVDIITWNKNVRRGDITIKLRDKAGNTTESKINHEPTTFQKYHQVSLLARFNQDLDKVAAISLMFSTGSLIGPRYKLRILRMKLRSLAHPERPQLCRYDLVLMENVETVFQPILCPELQL

SEQ ID NO: 2734 - protein, 161 aa, Homo Sapiens
QEFDPHTVMQRNYNVARVSGVWYSIFMASDDLNRIKENGDLRVFVRNIEHLKNGSLIFDFEYMVQGECVAVVVVCEKTEKNGEYSINYEGQNTVAVSETDYRLFITFHLQNFRNGTETHTLALYETCEKYGLGSQNIIDLTNKDPCYSKHYRSPPRPPMRW

SEQ ID NO: 2735 - protein, 221 aa, Homo Sapiens
FTINCSGFDQHGVDPAVFQAVFDRKAFRPFTNYSIPTRVNISFTLSAILGVDAQLQLLTSFLWMDLVWDNPFINWNPKECVGINKLTVLAENLWLPDIFIVESMDVDQTPSGLTAYISSEGRIKYDKPMRVTSICNLDIFYFPFDQQNCTFTFSSFLYTVDSMLLGMDKEVWEITDTSRKVIQTQGEWELLGINKATPKMSMGNNLYDQIMFYVAIRRRPS

SEQ ID NO: 2736 - protein, 449 aa, Homo Sapiens
FPKPGGSQDKSLHNRELSAERPLNEQIAEAEEDKIKKTYPPENKPGQSNYSFVDNLNLLKAITEKEKIEKERQSIRSSPLDNKLNVEDVDSTKNRKLIDDYDSTKSGLDHKFQDDPDGLHQLDGTPLTAEDIVHKIAARIYEENDRAAFDKIVSKLLNLGLITESQAHTLEDEVAEVLQKLISKEANNYEEDPNKPTSWTENQAGKIPEKVTPMAAIQDGLAKGENDETVSNTLTLTNGLERRTKTYSEDNFEELQYFPNFYALLKSIDSEKEAKEKETLITIMKTLIDFVKMMVKYGTISPEEGVSYLENLDEMIALQTKNKLEKNATDNISKLFPAPSEKSHEETDSTKEEAAKMEKEYGSLKDSTKDDNSNPGGKTDEPKGKTEAYLEAIRKNIEWLKKHDKKGNKEDYDLSKMRDFINKQADAYVEKGILDKEEAEAIKRIYSSL

SEQ ID NO: 2737 - protein, 310 aa, Homo Sapiens
LERSTNSFSYSSYHTLEEIYSWIDNFVMEHSDIVSKIQIGNSFENQSILVLKFSTGGSRHPAIWIDTGIHSREWITHATGIWTANKIVSDYGKDRVLTDILNAMDIFIELVTNPDGFAFTHSMNRLWRKNKSIRPGIFCIGVDLNRNWKSGFGGNGSNSNPCSETYHGPSPQSEPEVAAIVNFITAHGNFKALISIHSYSQMLMYPYGRLLEPVSNQRELYDLAKDAVEALYKVHGIEYIFGSISTTLYVASGITVDWAYDSGIKYAFSFELRDTGQYGFLLPATQIIPTAQETWMALRTIMEHTLNHPY

SEQ ID NO: 2738 - protein, 974 aa, Homo Sapiens
HAKPGSYSIEVLLVVDDSVVRFHGKEHVQNYVLTLMNIVDEIYHDESLGVHINIALVRLIMVGYRQSLSLIERGNPSRSLEQVCRWAHSQQRQDPSHAEHHDHVVFLTRQDFGPSGMQGYAPVTGMCHPLRSCALNHEDGFSSAFVIAHETGHVLGMEHDGQGNGCADETSLGSVMAPLVQAAFHRFHWSRCSKLELSRYLPSYDCLLDDPFDPAWPQPPELPGINYSMDEQCRFDFGSGYQTCLAFRTFEPCKQLWCSHPDNPYFCKTKKGPPLDGTECAPGKWCFKGHCIWKSPEQTYGQDGGWSSWTKFGSCSRSCGGGVRSRSRSCNNPSPAYGGRLCLGPMFEYQVCNSEECPGTYEDFRAQQCAKRNSYYVHQNAKHSWVPYEPDDDAQKCELICQSADTGDVVFMNQVVHDGTRCSYRDPYSVCARGECVPVGCDKEVGSMKADDKCGVCGGDNSHCRTVKGTLGKASKQAGALKLVQIPAGARHIQIEALEKSPHRIVVKNQVTGSFILNPKGKEATSRTFTAMGLEWEDAVEDAKESLKTSGPLPEAIAILALPPTEGGPRSSLAYKYVIHEDLLPLIGSNNVLLEEMDTYEWALKSWAPCSKACGGGIQFTKYGCRRRRDHHMVQRHLCDHKKRPKPIRRRCNQHPCSQPVWVTEEWGACSRSCGKLGVQTRGIQCLLPLSNGTHKVMPAKACAGDRPEARRPCLRVPCPAQWRLGAWSQCSATCGEGIQQRQVVCRTNANSLGHCEGDRPDTVQVCSLPACGGNHQNSTVRADVWELGTPEGQWVPQSEPLHPINKISSTEPCTGDRSVFCQMEVLDRYCSIPGYHRLCCVSCIKKASGPNPGPDPGPTSLPPFSTPGSPLPGPQDPADAAEPPGKPTGSEDHQHGRATQLPGALDTSSPGTQHPFAPETPIPGASWSISPTTPGGLPWGWTQTPTPVPEDKGQPGEDLRHPGTSLPAASPVT

SEQ ID NO: 2739 - protein, 419 aa, Homo Sapiens
MSRKISKESKKVNISSSLESEDISLETTVPTDDISSSEEREGKVRITRQLIERKELLHNIQLLKIELSQKTMMIDNLKVDYLTKIEELEEKLNDALHQKQLLTLRLDNQLAFQQKDASKYQELMKQEMETILLRQKQLEETNLQLREKAGDVRRNLRDFELTEEQYVKLKAFPEDQLSIPEYVSVRFYELVNPLRKEICELQVKKNILAEELSTNKNQLKQLTETYEEDRKNYSEVQIRCQRLALELADTKQLIQQGDYRQENYDKVKSERDALEQEVIELRRKHEILEASHMIQTKERSELSKEVVTLEQTVTLLQKDKEYLNRQNMELSVRCAHEEDRLERLQAQLEESKKAREEMYEKYVASRDHYKTEYENKLHDELEQIRLKTNQEIDQLRNASREMYERENRNLREARDNAVA

SEQ ID NO: 2740 - protein, 60 aa, Homo Sapiens
NGIQGFFYPWSCEGDIWDRESCGGQAAIDSPNLCLRLRCCYRNGVCYHQRPDENVRRKHM

SEQ ID NO: 2741 - protein, 334 aa, Homo Sapiens
ATISCRNEEGKAVDWFTFYKLPKKQNKESGETGLEYLYLDSTTRSWRKSEQLMNDTKSVLGRTLQQLYEAYASKSNNTAYLIYNDGVPKPVNYSRKYGHTKGLLLWNRVQGFWLIHSIPQFPPIPEEGYDYPPTGRRNGQSGICITFKYNQYEAIDSQLLVCNPNVYSCSIPATFHQELIHMPQLCTRASSSEIPGRLLTTLQSAQGQKFLHFAKSDSFLDDIFAAWMAQRLKTHLLTETWQRKRQELPSNCSLPYHVYNIKAIKLSRHSYFSSYQDHAKWCISQKGTKNRWTCIGDLNRSPHQAFRSGGFICTQNWQIYQAFQGLVLYYESCK

SEQ ID NO: 2742 - protein, 431 aa, Homo Sapiens
LPVAPAGGRNPPPAIGQFWHVTDLHLDPTYHITDDHTKVCASSKGANASNPGPFGDVLCDSPYQLILSAFDFIKNSGQEASFMIWTGDSPPHVPVPELSTDTVINVITNMTTTIQSLFPNLQVFPALGNHDYWPQDQLPVVTSKVYNAVANLWKPWLDEEAISTLRKGGFYSQKVTTNPNLRIISLNTNLYYGPNIMTLNKTDPANQFEWLESTLNNSQQNKEKVYIIAHVPVGYLPSSQNITAMREYYNEKLIDIFQKYSDVIAGQFYGHTHRDSIMVLSDKKGSPVNSLFVAPAVTPVKSVLEKQTNNPGIRLFQYDPRDYKLLDMLQYYLNLTEANLKGESIWKLEYILTQTYDIEDLQPESLYGLAKQFTILDSKQFIKYYNYFFVSYDSSVTCDKTCKAFQICAIMNLDNISYADCLKQLYIKHNY

SEQ ID NO: 2743 - protein, 203 aa, Homo Sapiens
QVFEIKMDASLGNLFARSALDTAARSTKPPRYKCGISKACPEKHFAFKMASGAANVVGPKICLEDNVLMSGVKNNVGRGINVALANGKTGEVLDTKYFDMWGGDVAPFIEFLKAIQDGTIVLMGTYDDGATKLNDEARRLIADLGSTSITNLGFRDNWVFCGGKGIKTKSPFEQHIKNNKDTNKYEGWPEVVEMEGCIPQKQD

SEQ ID NO: 2744 - protein, 81 aa, Homo Sapiens
SVCPLPPEPENGGYICHPRPCRDPLTAGSVIEYLCAEGYMLKGDYKYLTCKNGEWKPAMEISCRLNEDKDTHTSLGVPTLS

SEQ ID NO: 2745 - protein, 636 aa, Homo Sapiens
NSVERKIYIPLNKTAPCVRLLNATHQIGCQSSISGDTGVIHVVEKEEDLQWVLTDGPNPPYMVLLESKHFTRDLMEKLKGRTSRIAGLAVSLTKPSPASGFSPSVQCPNDGFGVYSNSYGPEFAHCREIQWNSLGNGLAYEDFSFPIFLLEDENETKVIKQCYQDHNLSQNGSAPTFPLCAMQLFSHMHAVISTATCMRRSSIQSTFSINPEIVCDPLSDYNVWSMLKPINTTGTLKPDDRVVVAATRLDSRSFFWNVAPGAESAVASFVTQLAAAEALQKAPDVTTLPRNVMFVFFQGETFDYIGSSRMVYDMEKGKFPVQLENVDSFVELGQVALRTSLELWMHTDPVSQKNESVRNQVEDLLATLEKSGAGVPAVILRRPNQSQPLPPSSLQRFLRARNISGVVLADHSGAFHNKYYQSIYDTAENINVSYPEWLSPEEDLNFVTDTAKALADVATVLGRALYELAGGTNFSDTVQADPQTVTRLLYGFLIKANNSWFQSILRQDLRSYLGDGPLQHYIAVSSPTNTTYVVQYALANLTGTVVNLTREQCQDPSKVPSENKDLYEYSWVQGPLHSNETDRLPRCVRSTARLARALSPAFELSQWSSTEYSTWTESRWKDIHARIFLIASKELE

SEQ ID NO: 2746 - protein, 402 aa, Homo Sapiens
EGDAKGLKEGETPGNFMEDEQWLSSISQYSGKIKHWNRFRDEVEDDYIKSWEDNQQGDEALDTTKDPCQKVKCSRHKVCIAQGYQRAMCISRKKLEHRIKQPTVKLHGNKDSICKPCHMAQLASVCGSDGHTYSSVCKLEQQACLSSKQLAVRCEGPCPCPTEQAATSTADGKPETCTGQDLADLGDRLRDWFQLLHENSKQNGSASSVAGPASGLDKSLGASCKDSIGWMFSKLDTSADLFLDQTELAAINLDKYEVCIRPFFNSCDTYKDGRVSTAEWCFCFWREKPPCLAELERIQIQEAAKKKPGIFIPSCDEDGYYRKMQCDQSSGDCWCVDQLGLELTGTRTHGSPDCDDIVGFSGDFGSGVGWEDEEEKETEEAGEEAEEEEGEAGEADDGGYIW

SEQ ID NO: 2747 - protein, 233 aa, Homo Sapiens
KVMNFTIDGMGNLRITEKGLKLEGDSEFLQPLYAKEIQSRPGNALYFKSARNVTVNILNDQTKVLTQLITGPKAVEAYGKKFEVKTVSGKLLFSADNNEVVVGAERLRVLGAEGTVFPKSIETPNVRADPFKELRLESPTRSLVMEAPKGVEINAEAGNMEATCRTELRLESKDGEIKLDAAKIRLPRLPHGSYTPTGTRQKVFEICVCANGRLFLSQAGAGSTCQINTSVCL

SEQ ID NO: 2748 - protein, 293 aa, Homo Sapiens
AACEPVRIPLCKSLPWNMTKMPNHLHHSTQANAILAIEQFEGLLGTHCSPDLLFFLCAMYAPICTIDFQHEPIKPCKSVCERARQGCEPILIKYRHSWPENLACEELPVYDRGVCISPEAIVTADGADFPMDSSNGNCRGASSERCKCKPIRATQKTYFRNNYNYVIRAKVKEIKTKCHDVTAVVEVKEILKSSLVNIPRDTVNLYTSSGCLCPPLNVNEEYIIMGYEDEERSRLLLVEGSIAEKWKDRLGKKVKRWDMKLRHLGLSKSDSSNSDSTQSQKSGRNSNPRQARN

SEQ ID NO: 2749 - protein, 295 aa, Homo Sapiens
LPASNALVFITGCDSGFGRLLALQLDQRGFRVLASCLTPSGAEDLQRVASSRLHTTLLDITDPQSVQQAAKWVEMHVKEAGLFGLVNNAGVAGIIGPTPWLTRDDFQRVLNVNTMGPIGVTLALLPLLQQARGRVINITSVLGRLAANGGGYCVSKFGLEAFSDSLRRDVAHFGIRVSIVEPGFFRTPVTNLESLEKTLQACWARLPPATQAHYGGAFLTKYLKMQQRIMNLICDPDLTKVSRCLEHALTARHPRTRYSPGWDAKLLWLPASYLPASLVDAVLTWVLPKPAQAVY

SEQ ID NO: 2750 - protein, 294 aa, Homo Sapiens
RPHGDTAKKPIIGILMQKCRNKVMKNYGRYYIAASYVKYLESAGARVVPVRLDLTEKDYEILFKSINGILFPGGSVDLRRSDYAKVAKIFYNLSIQSFDDGDYFPVWGTCLGFEELSLLISGECLLTATDTVDVAMPLNFTGGQLHSRMFQNFPTELLLSLAVEPLTANFHKWSLSVKNFTMNEKLKKFFNVLTTNTDGKIEFISTMEGYKYPVYGVQWHPEKAPYEWKNLDGISHAPNAVKTAFYLAEFFVNEARKNNHHFKSESEEEKALIYQFSPIYTGNISSFQQCYIFD

SEQ ID NO: 2751 - protein, 279 aa, Homo Sapiens
ALRIGAFNIQSFGDSKVSDPACGSIIAKILAGYDLALVQEVRDPDLSAVSALMEQINSVSEHEYSFVSSQPLGRDQYKEMYLFVYRKDAVSVVDTYLYPDPEDVFSREPFVVKFSAPGTGERAPPLPSRRALTPPPLPAAAQNLVLIPLHAAPHQAVAEIDALYDVYLDVIDKWGTDDMLFLGDFNADCSYVRAQDWAAIRLRSSEVFKWLIPDSADTTVGNSDCAYDRIVACGARLRRSLKPQSATVHDFQEEFGLDQTQALAISDHFPVEVTLKFHR

SEQ ID NO: 2752 - protein, 223 aa, Homo Sapiens
LVHGGPCDKTSHPYQAALYTSGHLLCGGVLIHPLWVLTAAHCKKPNLQVFLGKHNLRQRESSQEQSSVVRAVIHPDYDAASHDQDIMLLRLARPAKLSELIQPLPLERDCSANTTSCHILGWGKTADGDFPDTIQCAYIHLVSREECEHAYPGQITQNMLCAGDEKYGKDSCQGDSGGPLVCGDHLRGLVSWGNIPCGSKEKPGVYTNVCRYTNWIQKTIQAK

SEQ ID NO: 2753 - protein, 60 aa, Homo Sapiens
YPPSEQTMRVLPSSAARCVALSVNASGLLDPALLPANDSSRAPSSGMDASRPALADSFYA

SEQ ID NO: 2754 - protein, 565 aa, Homo Sapiens
AAPSSVPRGRQLPGRLGCLLEEGLCGASEACVNDGVFGRCQKVPAMDFYRYEVSPVALQRLRVALQKLSGTGFTWQDDYTQYVMDQELADLPKTYLRRPEASSPARPSKHSVGSERRYSREGGAALANALRRHLPFLEALSQAPASDVLARTHTAQDRPPAEGDDRFSESILTYVAHTSALTYPPGPRTQLREDLLPRTLGQLQPDELSPKVDSGVDRHHLMAALSAYAAQRPPAPPGEGSLEPQYLLRAPSRMPRPLLAPAAPQKWPSPLGDSEDPSSTGDGARIHTLLKDLQRQPAEVRGLSGLELDGMAELMAGLMQGVDHGVARGSPGRAALGESGEQADGPKATLRGDSFPDDGVQDDDDRLYQEVHRLSATLGGLLQDHGSRLLPGALPFARPLDMERKKSEHPESSLSSEEETAGVENVKSQTYSKDLLGQQPHSEPGAAAFGELQNQMPGPSKEEQSLPAGAQEALSDGLQLEVQPSEEEARGYIVTDREVLGPAVTFKVSANVQNVTTEDVEKATVDNKDKLEETSGLKILQTGVGSKSKLKFLPPQAEQEDSTKF

SEQ ID NO: 2755 - protein, 103 aa, Homo Sapiens
FFMGCSTPTVAEVYPPSTSSSIHPQSPACRRDCSCPDSIFHPVCGDNGIEYLSPCHAGCSNINMSSATSKQLIYLNCSCVTGGSASAKTGSCPVPCAHFLLPA

SEQ ID NO: 2756 - protein, 80 aa, Homo Sapiens
MDSGTEEYELNGGLPPGTPGSPDASPARWGWRHGPINVNHYASKKSAAESMLDIALLMANASQLKAVVEQGPSFAFYVPL

SEQ ID NO: 2757 - protein, 239 aa, Homo Sapiens
SEVAIKIDFDFAPGSFDDQYQGCSKQVMEKLTQGDYFTKDIEAQKNYFRMWQKAHLAWLNQGKVLPQNMTTTHAVAILFYTLNSNVHSDFTRAMASVARTPQQYERSFHFKYLHYYLTSAIQLLRKDSIMENGTLCYEVHYRTKDVHFNAYTGATIRFGQFLSTSLLKEEAQEFGNQTLFTIFTCLGAPVQYFSLKKEVLIPPYELFKVINMSYHPRGNWLQLRSTGNLSTYNCQLLKA

SEQ ID NO: 2758 - protein, 268 aa, Homo Sapiens
KKGYQDVDTSLQSAVITKVKGVAFTNTSDLGQRIWDVADYVIPAQGENVFFVVTNLIVTPNQRQNVCAENEGIPDGACSKDSDCHAGEAVTAGNGVKTGRCLRRENLARGTCEIFAWCPLETSSRPEEPFLKEAEDFTIFIKNHIRFPKFNFSKSNVMDVKDRSFLKSCHFGPKNHYCPIFRLGSVIRWAGSDFQDIALEGGVIGINIEWNCDLDKAASECHPHYSFSRLDNKLSKSVSSGYNFRFARYYRDAAGVEFRTLMKAYGIR

SEQ ID NO: 2759 - protein, 127 aa, Homo Sapiens
WPKRLTKAHWFEIQHIQPSPLQCNRAMSGINNYTQHCKHQNTFLHDSFQNVAAVCDLLSIVCKNRRHNCHQSSKPVNMTDCRLTSGKYPQCRYSAAAQYKFFIVACDPPQKSDPPYKLVPVHLDSIL

SEQ ID NO: 2760 - protein, 329 aa, Homo Sapiens
WSVNNFLMTGPKAYLIYSSSVAAGAQSGIEECKYQFAWDRWNCPERALQLSSHGGLRSANRETAFVHAISSAGVMYTLTRNCSLGDFDNCGCDDSRNGQLGGQGWLWGGCSDNVGFGEAISKQFVDALETGQDARAAMNLHNNEAGRKAVKGTMKRTCKCHGVSGSCTTQTCWLQLPEFREVGAHLKEKYHAALKVDLLQGAGNSAAGRGAIADTFRSISTRELVHLEDSPDYCLENKTLGLLGTEGRECLRRGRALGRWERRSCRRLCGDCGLAVEERRAETVSSCNCKFHWCCAVRCEQCRRRVTKYFCSRAERPRGGAAHKPGRKP

SEQ ID NO: 2761 - protein, 115 aa, Homo Sapiens
KFDDFEDEEDIVEYDDNDFAEFEDVMEDSVTESPQRVIITEDDEDETTVELEGQDENQEGDFEDADTQEGDTESEPYDDEEFEGYEDKPDTSSSKNKDPITIVDVPAHLQNSWES

SEQ ID NO: 2762 - protein, 421 aa, Homo Sapiens
WSIGAAPFSGRRNWCSYVVTRTISCHVQNGTYLQRVLQNCPWPMSCPGSSYRTVVRPTYKVMYKIVTAREWRCCPGHSGVSCEEVAASSASLEPMWSGSTMRRMALRPTAFSGCLNCSKVSELTERLKVLEAKMTMLTVIEQPVPPTPATPEDPAPLWGPPPAQGSPGDGGLQDQVGAWGLPGPTGPKGDAGSRGPMGMRGPPGPQGPPGSPGRAGAVGTPGERGPPGPPGPPGPPGPPAPVGPPHARISQHGDPLLSNTFTETNNHWPQGPTGPPGPPGPMGPPGPPGPTGVPGSPGHIGPPGPTGPKGISGHPGEKGERGLRGEPGPQGSAGQRGEPGPKGDPGEKSHWGEGLHQLREALKILAERVLILETMIGLYEPELGSGAGPAGTGTPSLLRGKRGGHATNYRIVAPRSRDERG

SEQ ID NO: 2763 - protein, 556 aa, Homo Sapiens
VGRGLGRASPAGGPLEDVVIERYHIPRACPREVQMGDFVRYHYNGTFEDGKKFDSSYDRNTLVAIVVGVGRLITGMDRGLMGMCVNERRRLIVPPHLGYGSIGLAGLIPPDATLYFDVVLLDVWNKEDTVQVSTLLRPPHCPRMVQDGDFVRYHYNGTLLDGTSFDTSYSKGGTYDTYVGSGWLIKGMDQGLLGMCPGERRKIIIPPFLAYGEKGYGTVIPPQASLVFHVLLIDVHNPKDAVQLETLELPPGCVRRAGAGDFMRYHYNGSLMDGTLFDSSYSRNHTYNTYIGQGYIIPGMDQGLQGACMGERRRITIPPHLAYGENGTGDKIPGSAVLIFNVHVIDFHNPADVVEIRTLSRPSETCNETTKLGDFVRYHYNCSLLDGTQLFTSHDYGAPQEATLGANKVIEGLDTGLQGMCVGERRQLIVPPHLAHGESGARGVPGSAVLLFEVELVSREDGLPTGYLFVWHKDPPANLFEDMDLNKDGEVPPEEFSTFIKAQVSEGKGRLMPGQDPEKTIGDMFQNQDRNQDGKITVDELKLKSDEDEERVHEEL

SEQ ID NO: 2764 - protein, 57 aa, Homo Sapiens
TLAPGWRLVKGFLNQPVDVELYQGLWDMCREQSSRERECGQTDQWGYFEAQPVLVAR

SEQ ID NO: 2765 - protein, 256 aa, Homo Sapiens
PHLRTFTDRFQTCKVQGAWPLIDNNYLNVQVTNTPVLPGSAATATSKLTIIFKNFQECVDQKVYQAEMDELPAAFVDGSKNGGDKHGANSLKITEKVSGQHVEIQAKYIGTTIVVRQVGRYLTFAVRMPEEVVNAVEDWDSQGLYLCLRGCPLNQQIDFQAFHTNAEGTGARRLAAASPAPTAPETFPYETAVAKCKEKLPVEDLYYQACVFDLLTTGDVNFTLAAYYALEDVKMLHSNKDKLHLYERTRDLPGRA

SEQ ID NO: 2766 - protein, 109 aa, Homo Sapiens
FSLHCPSVPMAGVTASYGGSLLPEGHLNLTAPCNAACSCQPEHYSPVCGSDGLMYFSLCHAGCPAATETNVDGQKVYRDCSCIPQNLSSGFGHATAGKCTSTCQRKPLL

SEQ ID NO: 2767 - protein, 199 aa, Homo Sapiens
YMSFSMKTIRLPRWLAASPTKEIQVKKYKCGLIKPCPANYFAFKICSGAANVVGPTMCFEDRMIMSPVKNNVGRGLNIALVNGTTGAVLGQKAFDMYSGDVMHLVKFLKEIPGGALVLVASYDDPGTKMNDESRKLFSDLGSSYAKQLGFRDSWVFIGAKDLRGKSPFEQFLKNSPDTNKYEGWPELLEMEGCMPPKPF

SEQ ID NO: 2768 - protein, 213 aa, Homo Sapiens
SEIPKGKQKAQLRQREVVDLYNGMCLQGPAGVPGRDGSPGANGIPGTPGIPGRDGFKGEKGECLRESFEESWTPNYKQCSWSSLNYGIDLGKIAECTFTKMRSNSALRVLFSGSLRLKCRNACCQRWYFTFNGAECSGPLPIEAIIYLDQGSPEMNSTINIHRTSSVEGLCEGIGAGLVDVAIWVGTCSDYPKGDASTGWNSVSRIIIEELPK

SEQ ID NO: 2769 - protein, 308 aa, Homo Sapiens
KPSPDAGPHGQGRVHQAAPLSDAPHDDAHGNFQYDHEAFLGREVAKEFDQLTPEESQARLGRIVDRMDRAGDGDGWVSLAELRAWIAHTQQRHIRDSVSAAWDTYDTDRDGRVGWEELRNATYGHYAPGEEFHDVEDAETYKKMLARDERRFRVADQDGDSMATREELTAFLHPEEFPHMRDIVIAETLEDLDRNKDGYVQVEEYIADLYSAEPGEEEPAWVQTERQQFRDFRDLNKDGHLDGSEVGHWVLPPAQDQPLVEANHLLHESDTDKDGRLSKAEILGNWNMFVGSQATNYGEDLTRHHDEL

SEQ ID NO: 2770 - protein, 156 aa, Homo Sapiens
GKMYGPGGGKYFSTTEDYDHEITGLRVSVGLLLVKSVQVKLGDSWDVKLGALGGNTQEVTLQPGEYITKVFVAFQAFLRGMVMYTSKDRYFYFGKLDGQISSAYPSQEGQVLVGIYGQYQLLGIKSIGFEWNYPLEEPTTEPPVNLTYSANSPVGR

SEQ ID NO: 2771 - protein, 124 aa, Homo Sapiens
QTLKDTTSSSSADSTIMDIQVPTRAPDAVYTELQPTSPTPTWPADETPQPQTQTQQLEGTDGPLVTDPETHKSTKAAHPTDDTTTLSERPSPSTDVQTDPQTLKPSGFHEDDPFFYDEHTLRKR

SEQ ID NO: 2772 - protein, 60 aa, Homo Sapiens
GEDCLWYLDRNGSWHPGFNCEFFTFCCGTCYHRYCCRDLTLLITERQQKHCLAFSPKTIA

SEQ ID NO: 2773 - protein, 248 aa, Homo Sapiens
EVEKSSDGPGAAQEPTWLTDVPAAMEFIAATEVAVIGFFQDLEIPAVPILHSMVQKFPGVSFGISTDSEVLTHYNITGNTICLFRLVDNEQLNLEDEDIESIDATKLSRFIEINSLHMVTEYNPVTVIGLFNSVIQIHLLLIMNKASPEYEENMHRYQKAAKLFQGKILFILVDSGMKENGKVISFFKLKESQLPALAIYQTLDDEWDTLPTAEVSVEHVQNFCDGFLSGKLLKENRESEGKTPKVEL

SEQ ID NO: 2774 - protein, 231 aa, Homo Sapiens
ESLLDNLGNDLSNVVDKLEPVLHEGLETVDNTLKGILEKLKVDLGVLQKSSAWQLAKQKAQEAEKLLNNVISKLLPTNTDIFGLKISNSLILDVKAEPIDDGKGLNLSFPVTANVTVAGPIIGQIINLKASLDLLTAVTIETDPQTHQPVAVLGECASDPTSISLSLLDKHSQIINKFVNSVINTLKSTVSSLLQKEICPLIRIFIHSLDVNVIQQVVDNPQHKTQLQTLI

SEQ ID NO: 2775 - protein, 70 aa, Homo Sapiens
NPTTAAPADTYPATGPADDEAPDAETTAAATTATTAAPTTATTAASTTARKDIPVLPKWVGDLPNGRVCP

SEQ ID NO: 2776 - protein, 560 aa, Homo Sapiens
QGLLLTLEEHIAHFLGTGGAATTMGNSCICRDDSGTDDSVDTQQQQAENSAVPTADTRSQPRDPVRPPRRGRGPHEPRRKKQNVDGLVLDTLAVIRTLVDNDQEPPYSMITLHEMAETDEGWLDVVQSLIRVIPLEDPLGPAVITLLLDECPLPTKDALQKLTEILNLNGEVACQDSSHPAKHRNTSAVLGCLAEKLAGPASIGLLSPGILEYLLQCLKLQSHPTVMLFALIALEKFAQTSENKLTISESSISDRLVTLESWANDPDYLKRQVGFCAQWSLDNLFLKEGRQLTYEKVNLSSIRAMLNSNDVSEYLKISPHGLEARCDASSFESVRCTFCVDAGVWYYEVTVVTSGVMQIGWATRDSKFLNHEGYGIGDDEYSCAYDGCRQLIWYNARSKPHIHPCWKEGDTVGFLLDLNEKQMIFFLNGNQLPPEKQVFSSTVSGFFAAASFMSYQQCEFNFGAKPFKYPPSMKFSTFNDYAFLTAEEKIILPRHRRLALLKQVSIRENCCSLCCDEVADTQLKPCGHSDLCMDCALQLETCPLCRKEIVSRIRQISHIS

SEQ ID NO: 2777 - protein, 450 aa, Homo Sapiens
LPQLSDDIPFRVNWPGTEFSLPTTGVLYKEDNYVIMTTAHKEKYKCILPLVTSGDEEEEKDYKGPNPRELLEPLFKQSSCSYRIESYWTYEVCHGKHIRQYHEEKETGQKINIHEYYLGNMLAKNLLFEKEREAEEKEKSNEIPTKNIEGQMTPYYPVGMGNGTPCSLKQNRPRSSTVMYICHPESKHEILSVAEVTTCEYEVVILTPLLCSHPKYRFRASPVNDIFCQSLPGSPFKPLTLRQLEQQEEILRVPFRRNKEEDLQSTKEERFPAIHKSIAIGSQPVLTVGTTHISKLTDDQLIKEFLSGSYCFRGGVGWWKYEFCYGKHVHQYHEDKDSGKTSVVVGTWNQEEHIEWAKKNTARAYHLQDDGTQTVRMVSHFYGNGDICDITDKPRQVTVKLKCKESDSPHAVTVYMLEPHSCQYILGVESPVICKILDTADENGLLSLPN

SEQ ID NO: 2778 - protein, 114 aa, Homo Sapiens
LMLLHYTFQQPRHQSSVKLREQILDLSKRYVKALAEENKNTVDVENGASMAGYADLKRTIAVLLDDILQRLVKLENKVDYIVVNGSAANTTNGTSGNLVPVTTNKRTNVSGSIR

SEQ ID NO: 2779 - protein, 509 aa, Homo Sapiens
GFLYPLVDFCISGKTRGQKPNFVIILADDMGWGDLGANWAETKDTANLDKMASEGMRFVDFHAAASTCSPSRASLLTGRLGLRNGVTRNFAVTSVGGLPLNETTLAEVLQQAGYVTGIIGKWHLGHHGSYHPNFRGFDYYFGIPYSHDMGCTDTPGYNHPPCPACPQGDGPSRNLQRDCYTDVALPLYENLNIVEQPVNLSSLAQKYAEKATQFIQRASTSGRPFLLYVALAHMHVPLPVTQLPAAPRGRSLYGAGLWEMDSLVGQIKDKVDHTVKENTFLWFTGDNGPWAQKCELAGSVGPFTGFWQTRQGGSPAKQTTWEGGHRVPALAYWPGRVPVNVTSTALLSVLDIFPTVVALAQASLPQGRRFDGVDVSEVLFGRSQPGHRVLFHPNSGAAGEFGALQTVRLERYKAFYITGGARACDGSTGPELQHKFPLIFNLEDDTAEAVPLERGGAEYQAVLPEVRKVLADVLQDIANDNISSADYTQDPSVTPCCNPYQIACRCQAA

SEQ ID NO: 2780 - protein, 103 aa, Homo Sapiens
MDGNDNVTLLFAPLLRDNYTLAPNASSLGPGTDLALAPASSAGPGPGLSLGPGPSFGFSPGPTPTPEPTTSGLAGGAASHGPSPFPRPWAPHALPFWDTPLNH

SEQ ID NO: 2781 - protein, 429 aa, Homo Sapiens
ASNDPRNFVPNKMWKGLVKRNASVETVDNKTSEDVTMAAASPVTLTKGTSAAHLNSMEVTTEDTSRTDVSEPATSGVAADGVTSIAPTAVASSTTAASITTAASSMTVASSAPTTAASSTTVASIAPTTAASSMTAASSTPMTLALPAPTSTSTGRTPSTTATGHPSLSTALAQVPKSSALPRTATLATLATRAQTVATTANTSSPMSTRPSPSKHMPSDTAASPVPPMRPQAQGPISQVSVDQPVVNTTNKSTPMPSNTTPEPAPTPTVVTTTKAQAREPTASPVPVPHTSPIPEMEAMSPTTQPSPMPYTQRAAGPGTSQAPEQVETEATPGTDSTGPTPRSSGGTKMPATDSCQPSTQGQYMVVTTEPLTQAVVDKTLLLVVLLLGVTLFITVLVLFALQAYESYKKKDYTQVDYLINGMYADSEM

SEQ ID NO: 2782 - protein, 330 aa, Homo Sapiens
RGYLTRPHLVAMDPAAPAPVAGFPAVTLCNINRFRHSALSDADIFHLANLTGLPPKDRDGHRAAGLRYPEPDMVDILNRTGHQLADMLKSCNFSGHHCSASNFSVVYTRYGKCYTFNADPRSSLPSRAGGMGSGLEIMLDIQQEEYLPIWRETNETSFEAGIRVQIHSQEEPPYIHQLGFGVSPGFQTFVSCQEQRLTYLPQPWGNCRAESELREPELQGYSAYSVSACRLRCEKEAVLQRCHCRMVHMPDSLGGGPEGPCFCPTPCNLTRYGKEISMVRIPNRGSARYLARKYNRNETYIRENFLVLDVFFEALTSEAMEQRAAYGLSA

SEQ ID NO: 2783 - protein, 120 aa, Homo Sapiens
LHTFLLYLGPHIASVTLAAYECNSVNFPEPPYPDQIICPDEEGTEGTIFLWSIISKVRIEACMWGIGTAIGELPPYFMARAARLSGAEPDDEEYQEFEEMLEHAESAQDFASRAKLAVQK

SEQ ID NO: 2784 - protein, 643 aa, Homo Sapiens
DLAFIPPFIRMSGPAVSASLVGDTEGVTVSLAVLQDEAGILPIPTCGVLNNETEDWSVTVIPGAKVLEVTVRWKRGLDWCSSNETDSFSESPCILQTLLVSASHNSSCSAHLLIQVEIYANSSLTHNASENVTVIPNQVYQPLGPCPCNLTAGACDVRCCCDQECSSNLTTLFRRSCFTGVFGGDVNPPFDQLCSAGTTTRGVPDWFPFLCVQSPLANTPFLGYFYHGAVSPKQDSSFEVYVDTDAKDFADFGYKQGDPIMTVKKAYFTIPQVSLAGQCMQNAPVAFLHNFDVKCVTNLELYQERDGIINAKIKNVALGGIVTPKVIYEEATDLDKFITNTETPLNNGSTPRIVNVEEHYIFKWNNNTISEINVKIFRAEINAHQKGIMTQRFVVKFLSYNSGNEEELSGNPGYQLGKPVRALNINRMNNVTTLHLWQSAGRGLCTSATFKPILFGENVLSGCLLEVGINENCTQLRENAVERLDSLIQATHVAMRGNSDYADLSDGWLEIIRVDAPDPGADPLASSVNGMCLDIPAHLSIRILISDAGAVEGITQQEILGVETRFSSVNWQYQCGLTCEHKADLLPISASVQFIKIPAQLPHPLTRFQINYTEYDCNRNEVCWPQLLYPWTQYYQGELHSQC

SEQ ID NO: 2785 - protein, 445 aa, Homo Sapiens
EEQPPETAAQRCFCQVSGYLDDCTCDVETIDRFNNYRLFPRLQKLLESDYFRYYKVNLKRPCPFWNDISQCGRRDCAVKPCQSDEVPDGIKSASYKYSEEANNLIEECEQAERLGAVDESLSEETQKAVLQWTKHDDSSDNFCEADDIQSPEAEYVDLLLNPERYTGYKGPDAWKIWNVIYEENCFKPQTIKRPLNPLASGQGTSEENTFYSWLEGLCVEKRAFYRLISGLHASINVHLSARYLLQETWLEKKWGHNITEFQQRFDGILTEGEGPRRLKNLYFLYLIELRALSKVLPFFERPDFQLFTGNKIQDEENKMLLLEILHEIKSFPLHFDENSFFAGDKKEAHKLKEDFRLHFRNISRIMDCVGCFKCRLWGKLQTQGLGTALKILFSEKLIANMPESGPSYEFHLTRQEIVSLFNAFGRISTSVKELENFRNLLQNIH

SEQ ID NO: 2786 - protein, 271 aa, Homo Sapiens
LFLFGQPDFSYKRSNCKPIPVNLQLCHGIEYQNMRLPNLLGHETMKEVLEQAGAWIPLVMKQCHPDTKKFLCSLFAPVCLDDLDETIQPCHSLCVQVKDRCAPVMSAFGFPWPDMLECDRFPQDNDLCIPLASSDHLLPATEEAPKVCEACKNKNDDDNDIMETLCKNDFALKIKVKEITYINRDTKIILETKSKTIYKLNGVSERDLKKSVLWLKDSLQCTCEEMNDINAPYLVMGQKQGGELVITSVKRWQKGQREFKRISRSIRKLQC

SEQ ID NO: 2787 - protein, 159 aa, Homo Sapiens
MEEPTAVEGQVQLPSPHQGSLRKAVAAALALDGESTMGHRKKKRKESRPESIIIYRSDNEKTDEEPGESEGGDQPKEEEGDDFLDYPVDDDMWNLPLDSRYVTLTGTITRGKKKGQMVDIHVTLTEKELQELTKPKESSRETTPEGRMACQMGADRGPH

SEQ ID NO: 2788 - protein, 295 aa, Homo Sapiens
AIRIEAASLRLTLSTLRHLTLTSIMKSKRKTDHMERTASVLRREIVSAAKVCGAASESPSVKSLRLLVADQDFSFKAGQWVDFFIPGVSVVGGFSICSSPRLLEQERVIELAVKYTNHPPALWVHNTCTLDCEVAVRVGGEFFFDPQPADASRNLVLIAGGVGINPLLSILRHAADLLREQANKRNGYEIGTIKLFYSAKNTSELLFKKNILDLVNEFPEKIACSLHVTKQTTQINAELKPYITEGRITEKEIRDHISKETLFYICGPPPMTDFFSKQLENNHVPKEHICFEKWW

SEQ ID NO: 2789 - protein, 49 aa, Homo Sapiens
LYLLSTRLPRGRRLGSTEEAGGRSLWFPSDLAELRELSEVLREYRKEHQ

SEQ ID NO: 2790 - protein, 286 aa, Homo Sapiens
ASAGQEPLHNEELAGAGRVAQPGPLEPEEPRAGGRPRRRRDLGSRLQAQRRAQRVAWAEADENEEEAVILAQEEEGVEKPAETHLSGKIGAKKLRKLEEKQARKAQREAEEAEREERKRLESQREAEWKKEEERLRLEEEQKEEEERKAREEQAQREHEEYLKLKEAFVVEEEGVGETMTEEQSQSFLTEFINYIKQSKVVLLEDLASQVGLRTQDTINRIQDLLAEGTITGVIDDRGKFIYITPEELAAVANFIRQRGRVSIAELAQASNSLIAWGRESPAQAPA

SEQ ID NO: 2791 - protein, 309 aa, Homo Sapiens
ASASYYEQYHSLNEIYSWIEFITERHPDMLTKIHIGSSFEKYPLYVLKVSGKEQAAKNAIWIDCGIHAREWISPAFCLWFIGHITQFYGIIGQYTNLLRLVDFYVMPVVNVDGYDYSWKKNRMWRKNRSFYANNHCIGTDLNRNFASKHWCEEGASSSSCSETYCGLYPESEPEVKAVASFLRRNINQIKAYISMHSYSQHIVFPYSYTRSKSKDHEELSLVASEAVRAIEKTSKNTRYTHGHGSETLYLAPGGGDDWIYDLGIKYSFTIELRDTGTYGFLLPERYIKPTCREAFAAVSKIAWHVIRNV

SEQ ID NO: 2792 - protein, 289 aa, Homo Sapiens
VEVAEESGRLWSEEQPAHPLQVGAVYLGEEELLHDPMGQDRAAEEANAVLGLDTQGDHMVMLSVIPGEAEDKVSSEPSGVTCGAGGAEDSRCNVRESLFSLDGAGAHFPDREEEYYTEPEVAESDAAPTEDSNNTESLKSPKVNCEERNITGLENFTLKILNMSQDLMDFLNPNGSDCTLVLFYTPWCRFSASLAPHFNSLPRAFPALHFLALDASQHSSLSTRFGTVAVPNILLFQGAKPMARFNHTDRTLETLKIFIFNQTGIEAKKNVVVTQADQIGPLPSTLIKS

SEQ ID NO: 2793 - protein, 732 aa, Homo Sapiens
QSLGTTKLRLVGPESKPEEGRLEVLHQGQWGTVCDDNFAIQEATVACRQLGFEAALTWAHSAKYGQGEGPIWLDNVRCVGTESSLDQCGSNGWGVSDCSHSEDVGVICHPRRHRGYLSETVSNALGPQGRRLEEVRLKPILASAKQHSPVTEGAVEVKYEGHWRQVCDQGWTMNNSRVVCGMLGFPSEVPVDSHYYRKVWDLKMRDPKSRLKSLTNKNSFWIHQVTCLGTEPHMANCQVQVAPARGKLRPACPGGMHAVVSCVAGPHFRPPKTKPQRKGSWAEEPRVRLRSGAQVGEGRVEVLMNRQWGTVCDHRWNLISASVVCRQLGFGSAREALFGARLGQGLGPIHLSEVRCRGYERTLSDCPALEGSQNGCQHENAAAVRCNVPNMGFQNQVRLAGGRIPEEGLLEVQVEVNGVPRWGSVCSENWGLTEAMVACRQLGLGFAIHAYKETWFWSGTPRAQEVVMSGVRCSGTELALQQCQRHGPVHCSHGGGRFLAGVSCMDSAPDLVMNAQLVQETAYLEDRPLSQLYCAHEENCLSKSADHMDWPYGYRRLLRFSTQIYNLGRTDFRPKTGRDSWVWHQCHRHYHSIEVFTHYDLLTLNGSKVAEGHKASFCLEDTNCPTGLQRRYACANFGEQGVTVGCWDTYRHDIDCQWVDITDVGPGNYIFQVIVNPHYEVAESDFSNNMLQCRCKYDGHRVWLHNCHTGNSYPANAELSLEQEQRLRNNLI

SEQ ID NO: 2794 - protein, 162 aa, Homo Sapiens
MTNSKGRSITDKTSGGPSSGGGFVDWTLRLNTIQSDKFLNLLLSMVPVIYQKNQEDRHKKANGIWQDGLSTAVQTFSNRSEQHMEYHSFSEQSFHANNGHASSSCSQKYDDYANYNYCDGRETSETTAMLQDEDISSDGDEDAIVEVTPKLPKESSGIMALQ

SEQ ID NO: 2795 - protein, 412 aa, Homo Sapiens
LGIWRIVIRIQRGKSTSSSSTPTEFCRNGGTWENGRCICTEEWKGLRCTIANFCENSTYMGFTFARIPVGRYGPSLQTCGKDTPNAGNPMAVRLCSLSLYGEIELQKVTIGNCNENLETLEKQVKDVTAPLNNISSEVQILTSDANKLTAENITSATRVVGQIFNTSRNASPEAKKVAIVTVSQLLDASEDAFQRVAATANDDALTTLIEQMETYSLSLGNQSVVEPNIAIQSANFSSENAVGPSNVRFSVQKGASSSLVSSSTFIHTNVDGLNPDAQTELQVLLNMTKNYTKTCGFVVYQNDKLFQSKTFTAKSDFSQKIISSKTDENEQDQSASVDMVFSPKYNQKEFQLYSYACVYWNLSAKDWDTYGCQKDKGTDGFLRCRCNHTTNFAVLMTFKKDYQYPKSLDILS

SEQ ID NO: 2796 - protein, 253 aa, Homo Sapiens
YTRPCSGDANCIQPYLARRPKLQLSVYTTTRSHLGAENNIDLVLNVEDFDVESKFERTVNVSVPKKTRNNGTLYAYIFLHHAGVLPWHDGKQVHLVSPLTTYMVPKPEEINLLTGESDTQQIEAEKKPTSALDEPVSHWRPRLALNVMADNFVFDGSSLPADVHRYMKMIQLGKTVHYLPILFIDQLSNRVKDLMVINRSTTELPLTVSYDKVSLGRLRFWIHMQDAVYSLQQFGFSEKDADEVKGIFVDTNL

SEQ ID NO: 2797 - protein, 481 aa, Homo Sapiens
SPSPPPALLEKVFQYIDLHQDEFVQTLKEWVAIESDSVQPVPRFRQELFRMMAVAADTLQRLGARVASVDMGPQQLPDGQSLPIPPVILAELGSDPTKGTVCFYGHLDVQPADRGDGWLTDPYVLTEVDGKLYGRGATDNKGPVLAWINAVSAFRALEQDLPVNIKFIIEGMEEAGSVALEELVEKEKDRFFSGVDYIVISDNLWISQRKPAITYGTRGNSYFMVEVKCRDQDFHSGTFGGILHEPMADLVALLGSLVDSSGHILVPGIYDEVVPLTEEEINTYKAIHLDLEEYRNSSRVEKFLFDTKEEILMHLWRYPSLSIHGIEGAFDEPGTKTVIPGRVIGKFSIRLVPHMNVSAVEKQVTRHLEDVFSKRNSSNKMVVSMTLGLHPWIANIDDTQYLAAKRAIRTVFGTEPDMIRDGSTIPIAKMFQEIVHKSVVLIPLGAVDDGEHSQNEKINRWNYIEGTKLFAAFFLEMAQLH

SEQ ID NO: 2798 - protein, 127 aa, Homo Sapiens
YILGRCTVAKKLHDGGLDYFEGYSLENWVCLAYFESKFNPMAIYENTREGYTGFGLFQMRGSDWCGDHGRNRCHMSCSALLNPNLEKTIKCAKTIVKGKEGMGAWPTWSRYCQYSDTLARWLDGCKL

SEQ ID NO: 2799 - protein, 103 aa, Homo Sapiens
MRWAAATLRGKARPRGRAGVTTPAPGNRTGTCAKLRLPPQATFQVLRGNGASVGTVLMFRCPSNHQMVGSGLLTCTWKGSIAEWSSGSPVCKLVPPHETFGFK

SEQ ID NO: 2800 - protein, 365 aa, Homo Sapiens
TVYFQEEFLDGEHWRNRWLQSTNDSRFGHFRLSSGKFYGHKEKDKGLQTTQNGRFYAISARFKPFSNKGKTLVIQYTVKHEQKMDCGGGYIKVFPADIDQKNLNGKSQYYIMFGPDICGFDIKKVHVILHFKNKYHENKKLIRCKVDGFTHLYTLILRPDLSYDVKIDGQSIESGSIEYDWNLTSLKKETSPAESKDWEQTKDNKAQDWEKHFLDASTSKQSDWNGDLDGDWPAPMLQKPPYQDGLKPEGIHKDVWLHRKMKNTDYLTQYDLSEFENIGAIGLELWQVRSGTIFDNFLITDDEEYADNFGKATWGETKGPEREMDAIQAKEEMKKAREEEEEELLSGKINRHEHYFNQFHRRNEL

SEQ ID NO: 2801 - protein, 270 aa, Homo Sapiens
VPTILPLGLAPDTFDDTYVGCVEEMEEKAAPLLKEEMAHHALLRESWEAAQETWEDKRRGLTLPPGFKAQNGIAIMVYTNSSNTLYWELNQAVRTGGGSRELYMRHFPFKALHFYLIRALQLLRGSGGCSRGPGEVVFRGVGSLRFEPKRLGDSVRLGQFASSSLDKAVAHRFGNATLFSLTTCFGAPIQAFSVFPKEREVLIPPHEVFLVTRFSQDGAQSLVTLWSYNQTCSHFNCAYLGGEKRRGCVSAPGALGTGDLHMTKRHLQQP

SEQ ID NO: 2802 - protein, 324 aa, Homo Sapiens
WDTPTIVSRKEWGARPLACRALLTLPVAYIITDQLPGMQCQQQSVCSQMLRGLQSHSVYTIGWCDVAYNFLVGDDGRVYEGVGWNIQGLHTQGYNNISLGIAFFGNKIGSSPSPAALSAAEGLISYAIQKGHLSPRYIQPLLLKEETCLDPQHPVMPRKVCPNIIKRSAWEARETHCPKMNLPAKYVIIIHTAGTSCTVSTDCQTVVRNIQSFHMDTRNFCDIGYHFLVGQDGGVYEGVGWHIQGSHTYGFNDIALGIAFIGYFVEKPPNAAALEAAQDLIQCAVVEGYLTPNYLLMGHSDVVNILSPGQALYNIISTWPHFKH

SEQ ID NO: 2803 - protein, 105 aa, Homo Sapiens
SQHLRGHAGHHQIKQGTCEVVAVHRCCNKNRIEERSQTVKCSCFPGQVAGTTRAQPSCVEASIVIQKWWCHMNPCLEGEDCKVLPDYSGWSCSSGNKVKTTKVTR

SEQ ID NO: 2804 - protein, 481 aa, Homo Sapiens
MSTLCPPPSPAVAKTEIALSGKSPLLAATFAYWDNILGPRVRHIWAPKTEQVLLSDGEITFLANHTLNGEILRNAESGAIDVKFFVLSEKGVIIVSLIFDGNWNGDRSTYGLSIILPQTELSFYLPLHRVCVDRLTHIIRKGRIWMHKERQENVQKIILEGTERMEDQGQSIIPMLTGEVIPVMELLSSMKSHSVPEEIDIADTVLNDDDIGDSCHEGFLLNAISSHLQTCGCSVVVGSSAEKVNKIVRTLCLFLTPAERKCSRLCEAESSFKYESGLFVQGLLKDSTGSFVLPFRQVMYAPYPTTHIDVDVNTVKQMPPCHEHIYNQRRYMRSELTAFWRATSEEDMAQDTIIYTDESFTPDLNIFQDVLHRDTLVKAFLDQVFQLKPGLSLRSTFLAQFLLVLHRKALTLIKYIEDDTQKGKKPFKSLRNLKIDLDLTAEGDLNIIMALAEKIKPGLHSFIFGRPFYTSVQERDVLMTF

SEQ ID NO: 2805 - protein, 508 aa, Homo Sapiens
QLRPRERPRGCPCTGRASSLARDSAAAASDPGTIVHNFSRTEPRTEPAGGSHSGSSSKLQALFAHPLYNVPEEPPLLGAEDSLLASQEALRYYRRKVARWNRRHKMYREQMNLTSLDPPLQLRLEASWVQFHLGINRHGLYSRSSPVVSKLLQDMRHFPTISADYSQDEKALLGACDCTQIVKPSGVHLKLVLRFSDFGKAMFKPMRQQRDEETPVDFFYFIDFQRHNAEIAAFHLDRILDFRRVPPTVGRIVNVTKEILEVTKNEILQSVFFVSPASNVCFFAKCPYMCKTEYAVCGNPHLLEGSLSAFLPSLNLAPRLSVPNPWIRSYTLAGKEEWEVNPLYCDTVKQIYPYNNSQRLLNVIDMAIFDFLIGNMDRHHYEMFTKFGDDGFLIHLDNARGFGRHSHDEISILSPLSQCCMIKKKTLLHLQLLAQADYRLSDVMRESLLEDQLSPVLTEPHLLALDRRLQTILRTVEGCIVAHGQQSVIVDGPVEQSAPDSGQANLTS

SEQ ID NO: 2806 - protein, 224 aa, Homo Sapiens
SLSPSQPLSFQCLKAPATLTWEDEKQQRWGQPHGPVSSPLLGDHRCLVPFRDLNPSSEVNTANLLESPSSLLLTSCYICSYFSFYILGEKRCHSLKRLRYSVCCKVCPNFCACGKENVSGTGQVCTGVHVGAKEQEEPGGTQALRSCGIYCLEERTDKASHEECRERSTLGRPQCTGLTPSLAGESPCPRLLPGSPTVRHLIASSCPGLSDPLPLPPGTLPLGS

SEQ ID NO: 2807 - protein, 131 aa, Homo Sapiens
VPAPKVPIKMQVKHWPSEQDPEKAWGARVVEPPEKDDQLVVLFPVQKPKLLTTEEKPRGQGRGPILPGTKAWMETEDTLGRVLSPEPDHDSLYHPPPEEDQGEERPRLWVMPNHQVLLGPEEDQDHIYHPQ

SEQ ID NO: 2808 - protein, 935 aa, Homo Sapiens
EDGEVRSSCRTAPTDLVFILDGSYSVGPENFEIVKKWLVNITKNFDIGPKFIQVGVVQYSDYPVLEIPLGSYDSGEHLTAAVESILYLGGNTKTGKAIQFALDYLFAKSSRFLTKIAVVLTDGKSQDDVKDAAQAARDSKITLFAIGVGSETEDAELRAIANKPSSTYVFYVEDYIAISKIREVMKQKLCEESVCPTRIPVAARDERGFDILLGLDVNKKVKKRIQLSPKKIKGYEVTSKVDLSELTSNVFPEGLPPSYVFVSTQRFKVKKIWDLWRILTIDGRPQIAVTLNGVDKILLFTTTSVINGSQVVTFANPQVKTLFDEGWHQIRLLVTEQDVTLYIDDQQIENKPLHPVLGILINGQTQIGKYSGKEETVQFDVQKLRIYCDPEQNNRETACEIPGFNGECLNGPSDVGSTPAPCICPPGKPGLQGPKGDPGLPGNPGYPGQPGQDGKPGYQGIAGTPGVPGSPGIQGARGLPGYKGEPGRDGDKGDRGLPGFPGLHGMPGSKGEMGAKGDKGSPGFYGKKGAKGEKGNAGFPGLPGPAGEPGRHGKDGLMGSPGFKGEAGSPGAPGQDGTRGEPGIPGFPGNRGLMGQKGEIGPPGQQGKKGAPGMPGLMGSNGSPGQPGTPGSKGSKGEPGIQGMPGASGLKGEPGATGSPGEPGYMGLPGIQGKKGDKGNQGEKGIQGQKGENGRQGIPGQQGIQGHHGAKGERGEKGEPGVRGAIGSKGESGVDGLMGPAGPKGQPGDPGPQGPPGLDGKPGREFSEQFIRQVCTDVIRAQLPVLLQSGRIRNCDHCLSQHGSPGIPGPPGPIGPEGPRGLPGLPGRDGVPGLVGVPGRPGVRGLKGLPGRNGEKGSQGFGYPGEQGPPGPPGPEGPPGISKEGPPGDPGLPGKDGDHGKPGIQGQPGPPGICDPSLCFSVIARRDPFRKGPNY

SEQ ID NO: 2809 - protein, 434 aa, Homo Sapiens
QISPKEGWQVYSSAQDPDGRCICTVVAPEQNLCSRDAKSRQLRKLLEKVQNMSQSIEVLNLRTQRDFQYVLKMETQMKGLKAKFRQIEDDRKTLMTKHFQELKEKMDELLPLIPVLEQYKTDAKLITQFKEEIRNLSAVLTGIQEEIGAYDYEELHQRVLSLETRLRDCMKKLTCGKLMKITGPVTVKTSGTRFGAWMTDPLASEKNNRVWYMDSYTNNKIVREYKSIADFVSGAESRTYNLPFKWAGTNHVVYNGSLYFNKYQSNIIIKYSFDMGRVLAQRSLEYAGFHNVYPYTWGGFSDIDLMADEIGLWAVYATNQNAGNIVISQLNQDTLEVMKSWSTGYPKRSAGESFMICGTLYVTNSHLTGAKVYYSYSTKTSTYEYTDIPFHNQYFHISMLDYNARDRALCAWNNGHQVLFNVTLFHIIKTEDDT

SEQ ID NO: 2810 - protein, 586 aa, Homo Sapiens
LESTKLLADLKKCGDLECEALINRVSAMRDYRGPDCRYLNFTKGEEISVYVKLAGEREDLWAGSKGKEFGYFPRDAVQIEEVFISEEIQMSTKESDFLCLLGVSYTFDNEDSELNGDYGENIYPYEEDKDEKSSIYESDFQIEPGFYATYESTLFEDQVPALEAPEDIGSTSESKDWEEVVVESMEQDRIPEVHVPPSSAVSGVKEWFGLGGEQAEEKAFESVIEPVQESSFRSRKIAVEDENDLEELNNGEPQTEHQQESESEIDSVPKTQSELASESEHIPKPQSTGWFGGGFTSYLGFGDEDTGLELIAEESNPPLQDFPNSISSDKEATVPCTEILTEKKDTITNDSLSLKPSWFDFGFAILGFAYAKEDKIMLDDRKNEEDGGADEHEHPLTSELDPEKEQEIETIKIIETEDQIDKKPVSEKTDESDTIPYLKKFLYNFDNPWNFQNIPKETELPFPKQILDQNNVIENEETGEFSIDNYPTDNTKVMIFKSSYSLSDMVSNIELPTRIHEEVYFEPSSSKDSDENSKPSVDTEGPALVEIDRSVENTLLNSQMVSTDNSLSSQNYISQKEDASEFQILK

SEQ ID NO: 2811 - protein, 462 aa, Homo Sapiens
QQGDGCGHTVLGPESGTLTSINYPQTYPNSTVCEWEIRVKMGERVRIKFGDFDIEDSDSCHFNYLRIYNGIGVSRTEIGKYCGLGLQMNHSIESKGNEITLLFMSGIHVSGRGFLASYSVIDKQDLITCLDTASNFLEPEFSKYCPAGCLLPFAEISGTIPHGYRDSSPLCMAGVHAGVVSNTLGGQISVVISKGIPYYESSLANNVTSVVGHLSTSLFTFKTSGCYGTLGMESGVIADPQITASSVLEWTDHTGQENSWKPKKARLKKPGPPWAAFATDEYQWLQIDLNKEKKITGIITTGSTMVEHNYYVSAYRILYSDDGQKWTVYREPGVEQDKIFQGNKDYHQDVRNNFLPPIIARFIRVNPTQWQQKIAMKMELLGCQFIPKGRPPKLTQPPPPRNSNDLKNTTAPPKIAKGRAPKFTQPLQPRSSNEFPAQTEQTTASPDIRNTTVTPNVTKDVA

SEQ ID NO: 2812 - protein, 161 aa, Homo Sapiens
YRHQKRKHTCPSCQHSWIEGVQDNMKLHKVDFIWINRDQRSFEWFVSLLTKLEMDQAEEAQYGRFLELHMYMTSALGKNDMKAIGLQMALDLLANKEKKDSITGLQTRTQPGRPDWSKVFQKVAAEKKGKVQVFFCGSPALAKVLKGHCEKFGFRFFQENF

SEQ ID NO: 2813 - protein, 72 aa, Homo Sapiens
FLINKVPLPVDKLAPLPLDNILPFMDPLKLLLKTLGISVEHLVEGLRKCVNELGPEASEAVKKLLEALSHLV

SEQ ID NO: 2814 - protein, 288 aa, Homo Sapiens
KSCAPNKADVILVFCYPKTIITKIPECPYGWEVHQLALGGLCYNGVHEGGYYQFVIPDLSPKNKSYCGTQSEYKPPIYHFYSHIVSNDTTVIVKNQPVNYSFSCTYHSTYLVNQAAFDQRVATVHVKNGSMGTFESQLSLNFYTNAKFSIKKEAPFVLEASEIGSDLFAGVEAKGLSIRFKVVLNSCWATPSADFMYPLQWQLINKGCPTDETVLVHENGRDHRATFQFNAFRFQNIPKLSKVWLHCETFICDSEKLSCPVTCDKRKRLLRDQTGGVLVVELSLRSRG

SEQ ID NO: 2815 - protein, 93 aa, Homo Sapiens
CGIPLNPARDLGPRLFTYVAGWGPEVFSAGNGWWWVPVVAPLVGATVGTATYQLLVALHHPEGPEPAQDLVSAQHKASELETPASAQMLECKL

SEQ ID NO: 2816 - protein, 829 aa, Homo Sapiens
ITCGHPGNPAHGFTNGSEFNLNDVVNFTCNTGYLLQGVSRAQCRSNGQWSSPLPTCRVVNCSDPGFVENAIRHGQQNFPESFEYGMSILYHCKKGFYLLGSSALTCMANGLWDRSLPKCLAISCGHPGVPANAVLTGELFTYGAVVHYSCRGSESLIGNDTRVCQEDSHWSGALPHCTGNNPGFCGDPGTPAHGSRLGDDFKTKSLLRFSCEMGHQLRGSPERTCLLNGSWSGLQPVCEAVSCGNPGTPTNGMIVSSDGILFSSSVIYACWEGYKTSGLMTRHCTANGTWTGTAPDCTIISCGDPGTLANGIQFGTDFTFNKTVSYQCNPGYVMEAVTSATIRCTKDGRWNPSKPVCKAVLCPQPPPVQNGTVEGSDFRWGSSISYSCMDGYQLSHSAILSCEGRGVWKGEIPQCLPVFCGDPGIPAEGRLSGKSFTYKSEVFFQCKSPFILVGSSRRVCQADGTWSGIQPTCIDPAHNTCPDPGTPHFGIQNSSRGYEVGSTVFFRCRKGYHIQGSTTRTCLANLTWSGIQTECIPHACRQPETPAHADVRAIDLPTFGYTLVYTCHPGFFLAGGSEHRTCKADMKWTGKSPVCKSKGVREVNETVTKTPVPSDVFFVNSLWKGYYEYLGKRQPATLTVDWFNATSSKVNATFSEASPVELKLTGIYKKEEAHLLLKAFQIKGQADIFVSKFENDNWGLDGYVSSGLERGGFTFQGDIHGKDFGKFKLERQDPLNPDQDSSSHYHGTSSGSVAAAILVPFFALILSGFAFYLYKHRTRPKVQYNGYAGHENSNGQASFENPMYDTNLKPTEAKAVRFDTTLNTVCTVV

SEQ ID NO: 2817 - protein, 54 aa, Homo Sapiens
KKFQVPCPVEAALIINETINTTLTQPTALVPALSHNVTENDSCRPHYFIFNSQT

SEQ ID NO: 2818 - protein, 94 aa, Homo Sapiens
SAQVSPRITFKPIAPSGQNATCTRYSYCNECMLDPDCGFCYKMNKSTVIDSSCVPVNKASTNEAAWGRCENETKFKTEDIFWAYNFCPTPYSWT

SEQ ID NO: 2819 - protein, 84 aa, Homo Sapiens
FLVGSAKPVAQPVAALESAAEAGAGTLANPLGTLNPLKLLLSSLGIPVNHLIEGSQKCVAELGPQAVGAVKALKALLGALTVFG

SEQ ID NO: 2820 - protein, 53 aa, Homo Sapiens
GSPISCFSPSNFSIRQAAYVDSSCWDSLLHHKQDGPGQDKMKSLWPHKALPYS

SEQ ID NO: 2821 - protein, 546 aa, Homo Sapiens
QDWKAERSQDPFEKCMQDPDYEQLLKVVTWGLNRTLKPQRVIVVGAGVAGLVAAKVLSDAGHKVTILEADNRIGGRIFTYRDQNMGWIGELGAMRMPSSHRILHKLCQGLGLNLTKFTQYDKNTWTEVHEVKLRNYVVEKVPEKLGYALRPQEKGHSPEDIYQMALNQALKDLKALGCRKAMKKFERHTLLEYLLGEGNLSRPAVQLLGDVMSEDGFFYLSFAEALRAHSCLSDRLQYSRIVGGWDLLPRALLSSLSGLVLLNAPVVAMTQGPHDVHVQIETSPPARNLKVLKADVVLLTASGPAVKRITFSPPLPRHMQEALRRLHYVPATKVFLSFRRPFWREEHIEGGHSNTDRPSRMIFYPPPREGALLLASYTWSDAAAAFAGLSREEALRLALDDVAALHGPVVRQLWDGTGVVKRWAEDQHSQGGFVVQPPALWQTEKDDWTVPYGRIYFAGEHTAYPHGWVETAVKSALRAAIKINSRKGPASDTASPEGHASDMEGQGHVHGVASSPSHDLAKEEGSHPPVQGQLSLQNTTHTRTSH

SEQ ID NO: 2822 - protein, 110 aa, Homo Sapiens
HHLPDRSQLCRKVKFQVDFNLIGWGSWIIYPKQYNAYRCEGECPNPVGEEFHPTNHAYIQSLLKRYQPHRVPSTCCAPVKTKPLSMLYVDNGRVLLDHHKDMIVEECGCL

SEQ ID NO: 2823 - protein, 116 aa, Homo Sapiens
HDDDWIDPTDMLNYDAASGTMRKSQAKYGISGEKDVSPDLSCADEISECYHKLDSLTYKIDECEKKKREDYESQSNPVFRRYLNKILIEAGKLGLFHDFETWKWRFEDSFGVDPYN

SEQ ID NO: 2824 - protein, 168 aa, Homo Sapiens
QQEQDFYDFKAVNIRGKLVSLEKYRGSVSLVVNVASECGFTDQHYRALQQLQRDLGPHHFNVLAFPCNQFGQQEPDSNKEIESFARRTYSVSFPMFSKIAVTGTGAHPAFKYLAQTSGKEPTWNFWKYLVAPDGKVVGAWDPTVSVEEVRPQITALVRKLILLKREDL

SEQ ID NO: 2825 - protein, 106 aa, Homo Sapiens
QEAVIPGCHLHPFNVTVRSDRQGTCQGSHVAQACVGHCESSAFPSRYSVLVASGYRHNITSVSQCCTISGLKKVKVQLQCVGSRREELEIFTARACQCDMCRLSRY

SEQ ID NO: 2826 - protein, 175 aa, Homo Sapiens
MPLPPHPGHPGYINFSYEVLTPLKWYQSIRPPYPSYGYEPMGGWLHHQIIPVLSQQHPPTHTLQPHHHIPVVPAQQPVIPQQPMMPVPGQHSMTPIQHHQPNLPPPAQQPYQPQPVQPQPHQPMQPQPPVHPMQPLPPQPPLPPMFPMQPLPPMLPDLTLEAWPSTDKTKREEVD

SEQ ID NO: 2827 - protein, 176 aa, Homo Sapiens
MPLPPHPGHPGYINFSYEVLTPLKWYQSMIRPPYSSYGYEPMGGWLHHQIIPVVSQQHPLTHTLQSHHHIPVVPAQQPRVRQQALMPVPGQQSMTPTQHHQPNLPLPAQQPFQPQPVQPQPHQPMQPQPPVQPMQPLLPQPPLPPMFPLRPLPPILPDLHLEAWPATDKTKQEEVD

SEQ ID NO: 2828 - protein, 193 aa, Homo Sapiens
SSLGVVTCGSVVKLLNTRHNVRLHSHDVRYGSGSGQQSVTGVTSVDDSNSYWRIRGKSATVCERGTPIKCGQPIRLTHVNTGRNLHSHHFTSPLSGNQEVSAFGEEGEGDYLDDWTVLCNGPYWVRDGEVRFKHSSTEVLLSVTGEQYGRPISGQKEVHGMAQPSQNNYWKAMEGIFMKPSELLKAEAHHAEL

SEQ ID NO: 2829 - protein, 368 aa, Homo Sapiens
ENDFGLVQPLVTMEQLLWVSGRQIGSVDTFRIPLITATPRGTLLAFAEARKMSSSDEGAKFIALRRSMDQGSTWSPTAFIVNDGDVPDGLNLGAVVSDVETGVVFLFYSLCAHKAGCQVASTMLVWSKDDGVSWSTPRNLSLDIGTEVFAPGPGSGIQKQREPRKGRLIVCGHGTLERDGVFCLLSDDHGASWRYGSGVSGIPYGQPKQENDFNPDECQPYELPDGSVVINARNQNNYHCHCRIVLRSYDACDTLRPRDVTFDPELVDPVVAAGAVVTSSGIVFFSNPAHPEFRVNLTLRWSFSNGTSWRKETVQLWPGPSGYSSLATLEGSMDGEEQAPQLYVLYEKGRNHYTESISVAKISVYGTL

SEQ ID NO: 2830 - protein, 678 aa, Homo Sapiens
SAPGEDEECGRVRDFVAKLANNTHQHVFDDLRGSVSLSWVGDSTGVILVLTTFHVPLVIMTFGQSKLYRSEDYGKNFKDITDLINNTFIRTEFGMAIGPENSGKVVLTAEVSGGSRGGRIFRSSDFAKNFVQTDLPFHPLTQMMYSPQNSDYLLALSTENGLWVSKNFGGKWEEIHKAVCLAKWGSDNTIFFTTYANGSCKADLGALELWRTSDLGKSFKTIGVKIYSFGLGGRFLFASVMADKDTTRRIHVSTDQGDTWSMAQLPSVGQEQFYSILAANDDMVFMHVDEPGDTGFGTIFTSDDRGIVYSKSLDRHLYTTTGGETDFTNVTSLRGVYITSVLSEDNSIQTMITFDQGGRWTHLRKPENSECDATAKNKNECSLHIHASYSISQKLNVPMAPLSEPNAVGIVIAHGSVGDAISVMVPDVYISDDGGYSWTKMLEGPHYYTILDSGGIIVAIEHSSRPINVIKFSTDEGQCWQTYTFTRDPIYFTGLASEPGARSMNISIWGFTESFLTSQWVSYTIDFKDILERNCEEKDYTIWLAHSTDPEDYEDGCILGYKEQFLRLRKSSVCQNGRDYVVTKQPSICLCSLEDFLCDFGYYRPENDSKCVEQPELKGHDLEFCLYGREEHLTTNGYRKIPGDKCQGGVNPVREVKDLKKKCTSNFLSPEKQNSKSN

SEQ ID NO: 2831 - protein, 306 aa, Homo Sapiens
IPIDDPEDGGKHWVVIVAGSNGWYNYRHQADACHAYQIIHRNGIPDEQIVVMMYDDIAYSEDNPTPGIVINRPNGTDVYQGVPKDYTGEDVTPQNFLAVLRGDAEAVKGIGSGKVLKSGPQDHVFIYFTDHGSTGILVFPNEDLHVKDLNETIHYMYKHKMYRKMVFYIEACESGSMMNHLPDNINVYATTAANPRESSYACYYDEKRSTYLGDWYSVNWMEDSDVEDLTKETLHKQYHLVKSHTNTSHVMQYGNKTISTMKVMQFQGMKRKASSPVPLPPVTHLDLTPSPDVPLTIMKRKLMNTN

SEQ ID NO: 2832 - protein, 411 aa, Homo Sapiens
YLLLGRWRKKHLTFRILNLPSTLPPHTARAALRQAFQDWSNVAPLTFQEVQAGAADIRLSFHGRQSSYCSNTFDGPGRVLAHADIPELGSVHFDEDEFWTEGTYRGVNLRIIAAHEVGHALGLGHSRYSQALMAPVYEGYRPHFKLHPDDVAGIQALYGKKSPVIRDEEEEETELPTVPPVPTEPSPMPDPCSSELDAMMLGPRGKTYAFKGDYVWTVSDSGPGPLFRVSALWEGLPGNLDAAVYSPRTQWIHFFKGDKVWRYINFKMSPGFPKKLNRVEPNLDAALYWPLNQKVFLFKGSGYWQWDELARTDFSSYPKPIKGLFTGVPNQPSAAMSWQDGRVYFFKGKVYWRLNQQLRVEKGYPRNISHNWMHCRPRTIDTTPSGGNTTPSGTGITLDTTLSATETTFEY

SEQ ID NO: 2833 - protein, 284 aa, Homo Sapiens
QETDSVVSSVTTKVKGVAVTNTSKLGFRIWDVADYVIPAQEENSLFVMTNVILTMNQTQGLCPEIPDATTVCKSDASCTAGSAGTHSNGVSTGRCVAFNGSVKTCEVAAWCPVEDDTHVPQPAFLKAAENFTLLVKNNIWYPKFNFSKRNILPNITTTYLKSCIYDAKTDPFCPIFRLGKIVENAGHGFQDMAVEGGIMGIQVNWDCNLDRAASLCLPRYSFRRLDTRDVEHNVSPGYNFRFAKYYRDLAGNEQRTLIKAYGIRFDIIVFGKAGKFDIIPTMIN

SEQ ID NO: 2834 - protein, 288 aa, Homo Sapiens
SDKLYQRKEPVISSVHTKVKGIAEVKEEIVENGVKKLVHSVFDTADYTFPLQGNSFFVMTNFLKTEGQEQRLCPEYPTRRTLCSSDRGCKKGWMDPQSKGIQTGRCVVHEGNQKTCEVSAWCPIEAVEEAPRPALLNSAENFTVLIKNNIDFPGHNYTTRNILPGLNITCTFHKTQNPQCPIFRLGDIFRETGDNFSDVAIQGGIMGIEIYWDCNLDRWFHHCHPKYSFRRLDDKTTNVSLYPGYNFRYAKYYKENNVEKRTLIKVFGIRFDILVFGTGGKFDIIQLV

SEQ ID NO: 2835 - protein, 98 aa, Homo Sapiens
MAAEPLTELEESIETVVTTFFTFARQEGRKDSLSVNEFKELVTQQLPHLLKDVGSLDEKMKSLDVNQDSELKFNEYWRLIGELAKEIRKKKDLKIRKK

SEQ ID NO: 2836 - protein, 282 aa, Homo Sapiens
APKDGVTRPDSEVQHQLLPNPFQPGQEQLGLLQSYLKGLGRTEVQLEHLSREQVLLYLFALHDYDQSGQLDGLELLSMLTAALAPGAANSPTTNPVILIVDKVLETQDLNGDGLMTPAELINFPGVALRHVEPGEPLAPSPQEPQAVGRQSLLAKSPLRQETQEAPGPREEAKGQVEARRESLDPVQEPGGQAEADGDVPGPRGEAEGQAEAKGDAPGPRGEAGGQAEAEGDAPGPRGEAGGQAEARENGEEAKELPGETLESKNTQNDFEVHIVQVENDEI

SEQ ID NO: 2837 - protein, 195 aa, Homo Sapiens
CSCAPAHPQQHICHSALVIRAKISSEKVVPASADPADTEKMLRYEIKQIKMFKGFEKVKDVQYIYTPFDSSLCGVKLEANSQKQYLLTGQVLSDGKVFIHLCNYIEPWEDLSLVQRESLNHHYHLNCGCQITTCYTVPCTISAPNECLWTDWLLERKLYGYQAQHYVCMKHVDGTCSWYRGHLPLRKEFVDIVQP

SEQ ID NO: 2838 - protein, 434 aa, Homo Sapiens
LPTNPEESWQVYSSAQDSEGRCICTVVAPQQTMCSRDARTKQLRQLLEKVQNMSQSIEVLDRRTQRDLQYVEKMENQMKGLESKFKQVEESHKQHLARQFKAIKAKMDELRPLIPVLEEYKADAKLVLQFKEEVQNLTSVLNELQEEIGAYDYDELQSRVSNLEERLRACMQKLACGKLTGISDPVTVKTSGSRFGSWMTDPLAPEGDNRVWYMDGYHNNRFVREYKSMVDFMNTDNFTSHRLPHPWSGTGQVVYNGSIYFNKFQSHIIIRFDLKTETILKTRSLDYAGYNNMYHYAWGGHSDIDLMVDESGLWAVYATNQNAGNIVVSRLDPVSLQTLQTWNTSYPKRSAGEAFIICGTLYVTNGYSGGTKVHYAYQTNASTYEYIDIPFQNKYSHISMLDYNPKDRALYAWNNGHQILYNVTLFHVIRSDEL

SEQ ID NO: 2839 - protein, 206 aa, Homo Sapiens
RGAASSGNATGPGPRSAGGSARRSAAVTGPPPPLSHCGRAAPCEPLRYNVCLGSVLPYGATSTLLAGDSDSQEEAHGKLVLWSGLRNAPRCWAVIQPLLCAVYMPKCENDRVELPSRTLCQATRGPCAIVERERGWPDFLRCTPDRFPEGCTNEVQNIKFNSSGQCEVPLVRTDNPKSWYEDVEGCGIQCQNPLFTEAEHQDMHSY

SEQ ID NO: 2840 - protein, 77 aa, Homo Sapiens
AYVLFYLFASLTSDLPWEHCGNWWNTELCLEHRVSKDGNGALPLNLTCTVSPSEEYWSRYVLHIQGSQGIGSPGEIR

SEQ ID NO: 2841 - protein, 239 aa, Homo Sapiens
VVGGEDARPHSWPWQISLQYLKNDTWRHTCGGTLIASNFVLTAAHCISNTRTYRVAVGKNNLEVEDEEGSLFVGVDTIHVHKRWNALLLRNDIALIKLAEHVELSDTIQVACLPEKDSLLPKDYPCYVTGWGRLWTNGPIADKLQQGLQPVVDHATCSRIDWWGFRVKKTMVCAGGDGVISACNGDSGGPLNCQLENGSWEVFGIVSFGSRRGCNTRKKPVVYTRVSAYIDWINEKMQL

SEQ ID NO: 2842 - protein, 69 aa, Homo Sapiens
RGRNVENMKILRLMLLHIKYLYGIRVEVRGAHHFPPSQPYVVVSNHQSSLDLLGMMEVLPGRCVPIAKR

SEQ ID NO: 2843 - protein, 112 aa, Homo Sapiens
QRGPRGPYPPGPLAPPPPPRFPFGTGFVPPPHPPPYGPGRFPPPLSPPYGPGRIPPSPPPPYGPGRIQSHSLPPPYGPGYPQPPSQPRPYPPGPPFFPVNSPTDPALPTLAP

SEQ ID NO: 2844 - protein, 137 aa, Homo Sapiens
ELTEAQRRGLQVALEEFHKHPPVQWAFQETSVESAVDTPFPAGIFVRLEFKLQQTSCRKRDWKKPECKVRPNGRKRKCLACIKLGSEDKVLGRLVHCPIETQVLREAEEHQETQCLRVQRAGEDPHSFYFPGQFAFS

SEQ ID NO: 2845 - protein, 472 aa, Homo Sapiens
RTAQLRKANDQSGRCQYTFSVASPNESSCPEQSQAMSVIHNLQRDSSTQRLDLEATKARLSSLESLLHQLTLDQAARPQETQEGLQRELGTLRRERDQLETQTRELETAYSNLLRDKSVLEEEKKRLRQENENLARRLESSSQEVARLRRGQCPQTRDTARAVPPGSREVSTWNLDTLAFQELKSELTEVPASRILKESPSGYLRSGEGDTGCGELVWVGEPLTLRTAETITGKYGVWMRDPKPTYPYTQETTWRIDTVGTDVRQVFEYDLISQFMQGYPSKVHILPRPLESTGAVVYSGSLYFQGAESRTVIRYELNTETVKAEKEIPGAGYHGQFPYSWGGYTDIDLAVDEAGLWVIYSTDEAKGAIVLSKLNPENLELEQTWETNIRKQSVANAFIICGTLYTVSSYTSADATVNFAYDTGTGISKTLTIPFKNRYKYSSMIDYNPLEKKLFAWDNLNMVTYDIKLSKM

SEQ ID NO: 2846 - protein, 330 aa, Homo Sapiens
GWTVAGQFQEKKRFTEEVIEYFQKKVSPVHLKILLTSDEAWKRFVRVAELPREEADALYEALKNLTPYVAIEDKDMQQKEQQFREWFLKEFPQIRWKIQESIERLRVIANEIEKVHRGCVIANVVSGSTGILSVIGVMLAPFTAGLSLSITAAGVGLGIASATAGIASSIVENTYTRSAELTASRLTATSTDQLEALRDILRDITPNVLSFALDFDEATKMIANDVHTLRRSKATVGRPLIAWRYVPINVVETLRTRGAPTRIVRKVARNLGKATSGVLVVLDVVNLVQDSLDLHKGAKSESAESLRQWAQELEENLNELTHIHQSLKAG

SEQ ID NO: 2847 - protein, 88 aa, Homo Sapiens
QCSLDSVMDKKIKDVLNSLEYSPSPISKKLSCASVKSQGRPSSCPAGMAVTGCACGYGCGSWDVQLETTCHCQCSVVDWTTARCCHLT

SEQ ID NO: 2848 - protein, 412 aa, Homo Sapiens
AAAAVAAAGGRSDGGNFLDDKQWLTTISQYDKEVGQWNKFRDDDYFRTWSPGKPFDQALDPAKDPCLKMKCSRHKVCIAQDSQTAVCISHRRLTHRMKEAGVDHRQWRGPILSTCKQCPVVYPSPVCGSDGHTYSFQCKLEYQACVLGKQISVKCEGHCPCPSDKPTSTSRNVKRACSDLEFREVANRLRDWFKALHESGSQNKKTKTLLRPERSRFDTSILPICKDSLGWMFNRLDTNYDLLLDQSELRSIYLDKNEQCTKAFFNSCDTYKDSLISNNEWCYCFQRQQDPPCQTELSNIQKRQGVKKLLGQYIPLCDEDGYYKPTQCHGSVGQCWCVDRYGNEVMGSRINGVADCAIDFEISGDFASGDFHEWTDDEDDEDDIMNDEDEIEDDDEDEGDDDDGGDDHDVYI

SEQ ID NO: 2849 - protein, 190 aa, Homo Sapiens
QGWQAFKNDATEIIPELGEYPEPPPELENNKTMNRAENGGRPPHHPFETKDVSEYSCRELHFTRYVTDGPCRSAKPVTELVCSGQCGPARLLPNAIGRGKWWRPSGPDFRCIPDRYRAQRVQLLCPGGEAPRARKVRLVASCKCKRLTRFHNQSELKDFGTEAARPQKGRKPRPRARSAKANQAELENAY

SEQ ID NO: 2850 - protein, 249 aa, Homo Sapiens
CQLPSEWRPLSEGCRAELAETIVYARVLALHPEAPGLYNHLPWQYHAGQGGLFYSAEVEMLCDQAWGSMLEVPAGSRLNLTGLGYFSCHSHTVVQDYSYFFFLRMDENYNLLPHGVNFQDAIFPDTQENRRMFSSLFQFSNCSQGQQLATFSSDWEIQEDSRLMCSSVQKALFEEEDHVKKLQQKVATLEKRNRQLRERVKKVKRSLRQARKKGRHLELANQKLSEKLAAGALPHINARGPVRPPYLRG

SEQ ID NO: 2851 - protein, 1087 aa, Homo Sapiens
ATRVYYLGIRDVQWNYAPKGRNVITNQPLDSDIVASSFLKSDKNRIGGTYKKTIYKEYKDDSYTDEVAQPAWLGFLGPVLQAEVGDVILIHLKNFATRPYTIHPHGVFYEKDSEGSLYPDGSSGPLKADDSVPPGGSHIYNWTIPEGHAPTDADPACLTWIYHSHVDAPRDIATGLIGPLITCKRGALDGNSPPQRQDVDHDFFLLFSVVDENLSWHLNENIATYCSDPASVDKEDETFQESNRMHAINGFVFGNLPELNMCAQKRVAWHLFGMGNEIDVHTAFFHGQMLTTRGHHTDVANIFPATFVTAEMVPWEPGTWLISCQVNSHFRDGMQALYKVKSCSMAPPVDLLTGKVRQYFIEAHEIQWDYGPMGHDGSTGKNLREPGSISDKFFQKSSSRIGGTYWKVRYEAFQDETFQEKMHLEEDRHLGILGPVIRAEVGDTIQVVFYNRASQPFSMQPHGVFYEKDYEGTVYNDGSSYPGLVAKPFEKVTYRWTVPPHAGPTAQDPACLTWMYFSAADPIRDTNSGLVGPLLVCRAGALGADGKQKGVDKEFFLLFTVLDENKSWYSNANQAAAMLDFRLLSEDIEGFQDSNRMHAINGFLFSNLPRLDMCKGDTVAWHLLGLGTETDVHGVMFQGNTVQLQGMRKGAAMLFPHTFVMAIMQPDNLGTFEIYCQAGSHREAGMRAIYNVSQCPGHQATPRQRYQAARIYYIMAEEVEWDYCPDRSWEREWHNQSEKDSYGYIFLSNKDGLLGSRYKKAVFREYTDGTFRIPRPRTGPEEHLGILGPLIKGEVGDILTVVFKNNASRPYSVHAHGVLESTTVWPLAAEPGEVVTYQWNIPERSGPGPNDSACVSWIYYSAVDPIKDMYSGLVGPLAICQKGILEPHGGRSDMDREFALLFLIFDENKSWYLEENVATHGSQDPGSINLQDETFLESNKMHAINGKLYANLRGLTMYQGERVAWYMLAMGQDVDLHTIHFHAESFLYRNGENYRADVVDLFPGTFEVVEMVASNPGTWLMHCHVTDHVHAGMETLFTVFSRTEHLSPLTVITKETEKAVPPRDIEEGNVKMLGMQIPIKNVEMLAS

SEQ ID NO: 2852 - protein, 828 aa, Homo Sapiens
NKANKHKPWIEAEYQGIVMENDNTVLLNPPLFALDKDAPLRYAGEICGFRLHGSGVPFEAVILDKATGEGLIRAKEPVDCEAQKEHTFTIQAYDCGEGPDGANTKKSHKATVHVRVNDVNEFAPVFVERLYRAAVTEGKLYDRILRVEAIDGDCSPQYSQICYYEILTPNTPFLIDNDGNIENTEKLQYSGERLYKFTVTAYDCGKKRAADDAEVEIQVKPTCKPSWQGWNKRIEYAPGAGSLALFPGIRLETCDEPLWNIQATIELQTSHVAKGCDRDNYSERALRKLCGAATGEVDLLPMPGPNANWTAGLSVHYSQDSSLIYWFNGTQAVQVPLGGPSGLGSGPQDSLSDHFTLSFWMKHGVTPNKGKKEEETIVCNTVQNEDGFSHYSLTVHGCRIAFLYWPLLESARPVKFLWKLEQVCDDEWHHYALNLEFPTVTLYTDGISFDPALIHDNGLIHPPRREPALMIGACWTEEKNKEKEKGDNSTDTTQGDPLSIHHYFHGYLAGFSVRSGRLESREVIECLYACREGLDYRDFESLGKGMKVHVNPSQSLLTLEGDDVETFNHALQHVAYMNTLRFATPGVRPLRLTTAVKCFSEESCVSIPEVEGYVVVLQPDAPQILLSGTAHFARPAVDFEGTNGVPLFPDLQITCSISHQVEAKKDESWQGTVTDTRMSDEIVHNLDGCEISLVGDDLDPERESLLLDTTSLQQRGLELTNTSAYLTIAGVESITVYEEILRQARYRLRHGAALYTRKFRLSCSEMNGRYSSNEFIVEVNVLHSMNRVAHPSHVLSSQQFLHRGHQPPPEMAGHSLASSHRNSMIPSA

SEQ ID NO: 2853 - protein, 61 aa, Homo Sapiens
EGILGKPCPKIKVECEVEEIDQCTKPRDCPENMKCCPFSRGKKCLDFRKVSLTLYHKEELE

SEQ ID NO: 2854 - protein, 326 aa, Homo Sapiens
RPANHSSTRERVANREENEILPPDHLNGVKLEMDGHLNRGFHQEVFLGKDLGGFDEDAEPRRSRRKLMVIFSKVDVNTDRKISAKEMQRWIMEKTAEHFQEAMEESKTHFRAVDPDGDGHVSWDEYKVKFLASKGHSEKEVADAIRLNEELKVDEETQEVLENLKDRWYQADSPPADLLLTEEEFLSFLHPEHSRGMLRFMVKEIVRDLDQDGDKQLSVPEFISLPVGTVENQQGQDIDDNWVKDRKKEFEELIDSNHDGIVTAEELESYMDPMNEYNALNEAKQMIAVADENQNHHLEPEEVLKYSEFFTGSKLVDYARSVHEEF

SEQ ID NO: 2855 - protein, 150 aa, Homo Sapiens
GEQSQALAQSIKDPGPTRTFTVVPRAAESTEIPPYVMKCPSNGLCSRLPADCIDCTTNFSCTYGKPVTFDCAVKPSVTCVDQDFKSQKNFIINMTCRFCWQLPETDYECTNSTSCMTVSCPRQRYPANCTVRDHVHCLGNRTFPKMLYCN

SEQ ID NO: 2856 - protein, 475 aa, Homo Sapiens
LEPELPGSALRSLWSSLCLGPAPAPPGPVSPEGRLAAAWDALIVRPVRRWRRVAVGVNACVDVVLSGVKLLQALGLSPGNGKDHSILHSRNDLEEAFIHFMGKGAAAERFFSDKETFHDIAQVASEFPGAQHYVGGNAALIGQKFAANSDLKVLLCGPVGPKLHELLDDNVFVPPESLQEVDEFHLILEYQAGEEWGQLKAPHANRFIFSHDLSNGAMNMLEVFVSSLEEFQPDLVVLSGLHMMEGQSKELQRKRLLEVVTSISDIPTGIPVHLELASMTNRELMSSIVHQQVFPAVTSLGLNEQELLFLTQSASGPHSSLSSWNGVPDVGMVSDILFWILKEHGRSKSRASDLTRIHFHTLVYHILATVDGHWANQLAAVAAGARVAGTQACATETIDTSRVSLRAPQEFMTSHSEAGSRIVLNPNKPVVEWHREGISFHFTPVLVCKDPIRTVGLGDAISAEGLFYSEVHPHY

SEQ ID NO: 2857 - protein, 377 aa, Homo Sapiens
EITSLDTENIDEILNNADVALVNFYADWCRFSQMLHPIFEEASDVIKEEFPNENQVVFARVDCDQHSDIAQRYRISKYPTLKLFRNGMMMKREYRGQRSVKALADYIRQQKSDPIQEIRDLAEITTLDRSKRNIIGYFEQKDSDNYRVFERVANILHDDCAFLSAFGDVSKPERYSGDNIIYKPPGHSAPDMVYLGAMTNFDVTYNWIQDKCVPLVREITFENGEELTEEGLPFLILFHMKEDTESLEIFQNEVARQLISEKGTINFLHADCDKFRHPLLHIQKTPADCPVIAIDSFRHMYVFGDFKDVLIPGKLKQFVFDLHSGKLHREFHHGPDPTDTAPGEQAQDVASSPPESSFQKLAPSEYRYTLLRDRDEL

SEQ ID NO: 2858 - protein, 127 aa, Homo Sapiens
ADGSAAVATSDFCVAPDTFILNVTEGQISTEVTRYYLYCSQSGSSPFQQTLTTFQRALTTMQIQVAGLLQFAVPLFSTAEEDLLAIQLLLNSSESSLHQLTAMVDCRGLHKDYLDALAGICYDGLQG

SEQ ID NO: 2859 - protein, 167 aa, Homo Sapiens
HGFRIHDYLYFQVLSPGDIRYIFTATPAKDFGGIFHTRYEQIHLVPAEPPEACGELSNGFFIQDQIALVERGGCSFLSKTRVVQEHGGRAVIISDNAVDNDSFYVEMIQDSTQRTADIPALFLLGRDGYMIRRSLEQHGLPWAIISIPVNVTSIPTFELLQPPWTFW

SEQ ID NO: 2860 - protein, 199 aa, Homo Sapiens
SRPLQARSQQHHGLAADLGKGKLHLAGPCCPSEMDTTETSGPGNHPERCGVPSPECESFLEHLQRALRSRFRLRLLGVRQAQPLCEELCQAWFANCEDDITCGPTWLPLSEKRGCEPSCLTYGQTFADGTDLCRSALGHALPVAAPGARHCFNISISAVPRPRPGRRGREAPSRRSRSPRTSILDAAGSGSGSGSGSGP

SEQ ID NO: 2861 - protein, 552 aa, Homo Sapiens
MSDNPPRMEVCPYCKKPFKRLKSHLPYCKMIGPTIPTDQKVYQSKPATLPRAKKMKGPIKDLIKAKGKELETENEERNSKLVVDKPEQTVKTFPLPAVGLERAATTKADKDIKNPIQPSFKMLKNTKPMTTFQEETKAQFYASEKTSPKRELAKDLPKSGESRCNPSEAGASLLVGSIEPSLSNQDRKYSSTLPNDVQTTSGDLKLDKIDPQRQELLVKLLDVPTGDCHISPKNVSDGVKRVRTLLSNERDSKGRDHLSGVPTDVTVTETPEKNTESLILSLKMSSLGKIQVMEKQEKGLTLGVETCGSKGNAEKSMSATEKQERTVMSHGCENFNTRDSVTGKESQGERPHLSLFIPRETTYQFHSVSQSSSQSLASLATTFLQEKKAEAQNHNCVPDVKALMESPEGQLSLEPKSDSQFQASHTGCQSPLCSAQRHTPQSPFTNHAAAAGRKTLRSCMGLEWFPELYPGYLGLGVLPGKPQCWNAMTQKPQLISPQGERLSQVSLLERSSTHIRSLEPPAGLTTSNFSLMRLLGAVQKGWIRCNTTIRKS

SEQ ID NO: 2862 - protein, 77 aa, Homo Sapiens
TSNWVCQTLEDGRRRSVGLWRSCWLVDRTRGGPSPGARAGQVDAHDCEALGWGSEAAGFQESRGTVKLQFDMMRACN

SEQ ID NO: 2863 - protein, 248 aa, Homo Sapiens
GPSQAGAEENDWVRLPSKCEVCKYVAVELKSAFEETGKTKEVIGTGYGILDQKASGVKYTKSDLRLIEVTETICKRLLDYSLHKERTGSNRFAKGMSETFETLHNLVHKGVKVVMDIPYELWNETSAEVADLKKQCDVLVEEFEEVIEDWYRNHQEEDLTEFLCANHVLKGKDTSCLAEQWSGKKGDTAALGGKKSKKKSSRAKAAGGRSSSSKQRKELGGLEGDPSPEEDEGIQKASPLTHSPPDEL

SEQ ID NO: 2864 - protein, 90 aa, Homo Sapiens
APQRLLERRNWTPQAMLYLKGAQGRRFISDQSRRKDLSDRPLPERRSPNPQLLTIPEAATILLASLQKSPEDEEKNFDQTRFLEDSLLNW

SEQ ID NO: 2865 - protein, 439 aa, Homo Sapiens
HSATRFDPTWESLDARQLPAWFDQAKFGIFIHWGVFSVPSFGSEWFWWYWQKEKIPKYVEFMKDNYPPSFKYEDFGPLFTAKFFNANQWADIFQASGAKYIVLTSKHHEGFTLWGSEYSWNWNAIDEGPKRDIVKELEVAIRNRTDLRFGLYYSLFEWFHPLFLEDESSSFHKRQFPVSKTLPELYELVNNYQPEVLWSDGDGGAPDQYWNSTGFLAWLYNESPVRGTVVTNDRWGAGSICKHGGFYTCSDRYNPGHLLPHKWENCMTIDKLSWGYRREAGISDYLTIEELVKQLVETVSCGGNLLMNIGPTLDGTISVVFEERLRQVGSWLKVNGEAIYETYTWRSQNDTVTPDVWYTSKPKEKLVYAIFLKWPTSGQLFLGHPKAILGATEVKLLGHGQPLNWISLEQNGIMVELPQLTIHQMPCKWGWALALTNVI

SEQ ID NO: 2866 - protein, 429 aa, Homo Sapiens
EQVKHSETYCMFQDKKYRVGERWHPYLEPYGLVYCVNCICSENGNVLCSRVRCPNVHCLSPVHIPHLCCPRCPDSLPPVNNKVTSKSCEYNGTTYQHGELFVAEGLFQNRQPNQCTQCSCSEGNVYCGLKTCPKLTCAFPVSVPDSCCRVCRGDGELSWEHSDGDIFRQPANREARHSYHRSHYDPPPSRQAGGLSRFPGARSHRGALMDSQQASGTIVQIVINNKHKHGQVCVSNGKTYSHGESWHPNLRAFGIVECVLCTCNVTKQECKKIHCPNRYPCKYPQKIDGKCCKVCPGKKAKELPGQSFDNKGYFCGEETMPVYESVFMEDGETTRKIALETERPPQVEVHVWTIRKGILQHFHIEKISKRMFEELPHFKLVTRTTLSQWKIFTEGEAQISQMCSSRVCRTELEDLVKVLYLERSEKGHC

SEQ ID NO: 2867 - protein, 82 aa, Homo Sapiens
KKDSPPKNSVKVDELSLYSVPEGQSKYVEEARSQLEESISQLRHYCEPYTTWCQETYSQTKPKMQSLVQWGLDSYDYLQNAP

SEQ ID NO: 2868 - protein, 557 aa, Homo Sapiens
APGPDGSAPDPAHYRERVKAMFYHAYDSYLENAFPFDELRPLTCDGHDTWGSFSLTLIDALDTLLILGNVSEFQRVVEVLQDSVDFDIDVNASVFETNIRVVGGLLSAHLLSKKAGVEVEAGWPCSGPLLRMAEEAARKLLPAFQTPTGMPYGTVNLLHGVNPGETPVTCTAGIGTFIVEFATLSSLTGDPVFEDVARVALMRLWESRSDIGLVGNHIDVLTGKWVAQDAGIGAGVDSYFEYLVKGAILLQDKKLMAMFLEYNKAIRNYTRFDDWYLWVQMYKGTVSMPVFQSLEAYWPGLQSLIGDIDNAMRTFLNYYTVWKQFGGLPEFYNIPQGYTVEKREGYPLRPELIESAMYLYRATGDPTLLELGRDAVESIEKISKVECGFATIKDLRDHKLDNRMESFFLAETVKYLYLLFDPTNFIHNNGSTFDTVITPYGECILGAGGYIFNTEAHPIDPAALHCCQRLKEEQWEVEDLMREFYSLKRSRSKFQKNTVSSGPWEPPARPGTLFSPENHDQARERKPAKQKVPLLSCPSQPFTSKLALLGQVFLDSS

SEQ ID NO: 2869 - protein, 374 aa, Homo Sapiens
TLSKSDAKKAASKTLLEKSQFSDKPVQDRGLVVTDLKAESVVLEHRSYCSAKARDRHFAGDVLGYVTPWNSHGYDVTKVFGSKFTQISPVWLQLKRRGREMFEVTGLHDVDQGWMRAVRKHAKGLHIVPRLLFEDWTYDDFRNVLDSEDEIEELSKTVVQVAKNQHFDGFVVEVWNQLLSQKRVGLIHMLTHLAEALHQARLLALLVIPPAITPGTDQLGMFTHKEFEQLAPVLDGFSLMTYDYSTAHQPGPNAPLSWVRACVQVLDPKSKWRSKILLGLNFYGMDYATSKDAREPVVGARYIQTLKDHRPRMVWDSQASEHFFEYKKSRSGRHVVFYPTLKSLQVRLELARELGVGVSIWELGQGLDYFYDLL

SEQ ID NO: 2870 - protein, 109 aa, Homo Sapiens
QNATAEPELTSAGAAQPEGPGGAASWEYGDPHSPVILCSYLPDEFIECEDPVDHVGNATASQELGYGCLKFGGQAYSDVEHTSVQCHALDGIECASPRTFLRENKPCIK

SEQ ID NO: 2871 - protein, 81 aa, Homo Sapiens
TSAGGEESLKCEDLKVGQYICKDPKINDATQEPVNCTNYTAHVSCFPAPNITCKDSSGNETHFTGNEVGFFKPISCRNVNG

SEQ ID NO: 2872 - protein, 176 aa, Homo Sapiens
QSDTSPDTEESYSDWGLRHLRGSFESVNSYFDSFLELLGGKNGVCQYRCRYGKAPMPRPGYKPQEPNGCGSYFLGLKVPESMDLGIPAMTKCCNQLDVCYDTCGANKYRCDAKFRWCLHSICSDLKRSLGFVSKVEAACDSLVDTVFNTVWTLGCRPFMNSQRAACICAEEEKEEL

SEQ ID NO: 2873 - protein, 394 aa, Homo Sapiens
YGNVHVSTESNLQATERRAEGLYSQLLGLTASQSNLTKELNFTTRAKDAIMQMWLNARRDLDRINASFRQCQGDRVIYTNNQRYMAAIILSEKQCRDQFKDMNKSCDALLFMLNQKVKTLEVEIAKEKTICTKDKESVLLNKRVAEEQLVECVKTRELQHQERQLAKEQLQKVQALCLPLDKDKFEMDLRNLWRDSIIPRSLDNLGYNLYHPLGSELASIRRACDHMPSLMSSKVEELARSLRADIERVARENSDLQRQKLEAQQGLRASQEAKQKVEKEAQAREAKLQAECSRQTQLALEEKAVLRKERDNLAKELEEKKREAEQLRMELAIRNSALDTCIKTKSQPMMPVSRPMGPVPNPQPIDPASLEEFKRKILESQRPPAGIPVAPSSG

SEQ ID NO: 2874 - protein, 232 aa, Homo Sapiens
TFDRAVASGCQRCCDSEDPLDPAHVSSASSSGRPHALPEIRPYINITILKGDKGDPGPMGLPGYMGREGPQGEPGPQGSKGDKGEMGSPGAPCQKRFFAFSVGRKTALHSGEDFQTLLFERVFVNLDGCFDMATGQFAAPLRGIYFFSLNVHSWNYKETYVHIMHNQKEAVILYAQPSERSIMQSQSVMLDLAYGDRVWVRLFKRQRENAIYSNDFDTYITFSGHLIKAEDD

SEQ ID NO: 2875 - protein, 256 aa, Homo Sapiens
RVPHVQGEQQEWEGTEELPSPPDHAERAEEQHEKYRPSQDQGLPASRCLRCCDPGTSMYPATAVPQINITILKGEKGDRGDRGLQGKYGKTGSAGARGHTGPKGQKGSMGAPGERCKSHYAAFSVGRKKPMHSNHYYQTVIFDTEFVNLYDHFNMFTGKFYCYVPGLYFFSLNVHTWNQKETYLHIMKNEEEVVILFAQVGDRSIMQSQSLMLELREQDQVWVRLYKGERENAIFSEELDTYITFSGYLVKHATEP

SEQ ID NO: 2876 - protein, 273 aa, Homo Sapiens
QPRGNQLKGENYSPRYICSIPGLPGPPGPPGANGSPGPHGRIGLPGRDGRDGRKGEKGEKGTAGLRGKTGPLGLAGEKGDQGETGKKGPIGPEGEKGEVGPIGPPGPKGDRGEQGDPGLPGVCRCGSIVLKSAFSVGITTSYPEERLPIIFNKVLFNEGEHYNPATGKFICAFPGIYYFSYDITLANKHLAIGLVHNGQYRIKTFDANTGNHDVASGSTVIYLQPEDEVWLEIFFTDQNGLFSDPGWADSLFSGFLLYVDTDYLDSISEDDEL

SEQ ID NO: 2877 - protein, 297 aa, Homo Sapiens
QDEYMEVSGRTNKVVARIVQSHQQTGRSGSRREKVRERSHPKTGTVDNNTSTDLKSLRPDELPHPEVDDLAQITTFWGQSPQTGGLPPDCSKCCHGDYSFRGYQGPPGPPGPPGIPGNHGNNGNNGATGHEGAKGEKGDKGDLGPRGERGQHGPKGEKGYPGIPPELQIAFMASLATHFSNQNSGIIFSSVETNIGNFFDVMTGRFGAPVSGVYFFTFSMMKHEDVEEVYVYLMHNGNTVFSMYSYEMKGKSDTSSNHAVLKLAKGDEVWLRMGNGALHGDHQRFSTFAGFLLFETK

SEQ ID NO: 2878 - protein, 551 aa, Homo Sapiens
EGTLCDFPKIHHGFLYDEEDYNPFSQVPTGEVFYYSCEYNFVSPSKSFWTRITCTEEGWSPTPKCLRMCSFPFVKNGHSESSGLIHLEGDTVQIICNTGYSLQNNEKNISCVERGWSTPPICSFTKGECHVPILEANVDAQPKKESYKVGDVLKFSCRKNLIRVGSDSVQCYQFGWSPNFPTCKGQVRSCGPPPQLSNGEVKEIRKEEYGHNEVVEYDCNPNFIINGPKKIQCVDGEWTTLPTCVEQVKTCGYIPELEYGYVQPSVPPYQHGVSVEVNCRNEYAMIGNNMITCINGIWTELPMCVATHQLKRCKIAGVNIKTLLKLSGKEFNHNSRIRYRCSDIFRYRHSVCINGKWNPEVDCTEKREQFCPPPPQIPNAQNMTTTVNYQDGEKVAVLCKENYLLPEAKEIVCKDGRWQSLPRCVESTAYCGPPPSINNGDTTSFPLSVYPPGSTVTYRCQSFYKLQGSVTVTCRNKQWSEPPRCLDPCVVSEENMNKNNIQLKWRNDGKLYAKTGDAVEFQCKFPHKAMISSPPFRAICQEGKFEYPICE

SEQ ID NO: 2879 - protein, 204 aa, Homo Sapiens
EAFDSVLGDTASCHRACQLTYPLHTYPKEEELYACQRGCRLFSICQFVDDGIDLNRTKLECESACTEAYSQSDEQYACHLGCQNQLPFAELRQEQLMSLMPKMHLLFPLTLVRSFWSDMMDSAQSFITSSWTFYLQADDGKIVIFQSKPEIQYAPHLEQEPTNLRESSLSKMSSDLQMRNSQAHRNFLEDGESDGFLRCLSLNS

SEQ ID NO: 2880 - protein, 251 aa, Homo Sapiens
QNASRGRRQRRMHPNVSQGCQGGCATCSDYNGCLSCKPRLFFALERIGMKQIGVCLSSCPSGYYGTRYPDINKCTKCKADCDTCFNKNFCTKCKSGFYLHLGKCLDNCPEGLEANNHTMECVSIVHCEVSEWNPWSPCTKKGKTCGFKRGTETRVREIIQHPSAKGNLCPPTNETRKCTVQRKKCQKGERGKKGRERKRKKPNKGESKEAIPDSKSLESSKEIPEQRENKQQQKKRKVQDKQKSVSVSTVH

SEQ ID NO: 2881 - protein, 381 aa, Homo Sapiens
QFWQGHTGIRYKEQRESCPKHAVRCDGVVDCKLKSDELGCVRFDWDKSLLKIYSGSSHQWLPICSSNWNDSYSEKTCQQLGFESAHRTTEVAHRDFANSFSILRYNSTIQESLHRSECPSQRYISLQCSHCGLRAMTGRIVGGALASDSKWPWQVSLHFGTTHICGGTLIDAQWVLTAAHCFFVTREKVLEGWKVYAGTSNLHQLPEAASIAEIIINSNYTDEEDDYDIALMRLSKPLTLSAHIHPACLPMHGQTFSLNETCWITGFGKTRETDDKTSPFLREVQVNLIDFKKCNDYLVYDSYLTPRMMCAGDLRGGRDSCQGDSGGPLVCEQNNRWYLAGVTSWGTGCGQRNKPGVYTKVTEVLPWIYSKMESEVRFRKS

SEQ ID NO: 2882 - protein, 1134 aa, Homo Sapiens
NVAPKFLANMTSVILPEDLPVGAQAFWLVAEDQDNDPLTYGMSGPNAYFFAVTPKTGEVKLASALDYETLYTFKVTISVSDPYIQVQREMLVIVEDRNDNAPVFQNTAFSTSINETLPVGSVVFSVLAVDKDMGSAGMVVYSIEKVIPSTGDSEHLFRILANGSIVLNGSLSYNNKSAFYQLELKACDLGGMYHNTFTIQCSLPVFLSISVVDQPDLDPQFVREFYSASVAEDAAKGTSVLTVEAVDGDKGINDPVIYSISYSTRPGWFDIGADGVIRVNGSLDREQLLEADEEVQLQVTATETHLNIYGQEAKVSIWVTVRVMDVNDHKPEFYNCSLPACTFTPEEAQVNFTGYVDEHASPRIPIDDLTMVVYDPDKGSNGTFLLSLGGPDAEAFSVSPERAAGSASVQVLVRVSALVDYERQTAMAVQVVATDSVSQNFSVAMVTIHLRDINDHRPTFPQSLYVLTVPEHSATGSVVTDSIHATDPDTGAWGQITYSLLPGNGADLFQVDPVSGTVTVRNGELLDRESQAVYYLTLQATDGGNLSSSTTLQIHLLDINDNAPVVSGSYNIFVQEEEGNVSVTIQAHDNDEPGTNNSRLLFNLLPGPYSHNFSLDPDTGLLRNLGPLDREAIDPALEGRIVLTVLVSDCGEPVLGTKVNVTITVEDINDNLPIFNQSSYNFTVKEEDPGVLVGVVKAWDADQTEANNRISFSLSGSGANYFMIRGLVLGAGWAEGYLRLPPDVSLDYETQPVFNLTVSAENPDPQGGETIVDVCVNVKDVNDNPPTLDVASLRGIRVAENGSQHGQVAVVVASDVDTSAQLEIQLVNILCTKAGVDVGSLCWGWFSVAANGSVYINQSKAIDYEACDLVTLVVRACDLATDPGFQAYSNNGSLLITIEDVNDNAPYFLPENKTFVIIPELVLPNREVASVRARDDDSGNNGVILFSILRVDFISKDGATIPFQGVFSIFTSSEADVFAGSIQPVTSLDSTLQGTYQVTVQARDRPSLGPFLEATTTLNLFTVDQSYRSRLQFSTPKEEVGANRQAINAALTQATRTTVYIVDIQDIDSAARARPHSYLDAYFVFPNGSALTLDELSVMIRNDQDSLMQLLQLGLVVLGSQESQESDLSKQLIS

SEQ ID NO: 2883 - protein, 64 aa, Homo Sapiens
LLYNRFDLELFTPGNLERECNEELCNYEEAREIFVDEDKTIAFWQEYSAKGPTTKSDGNREKID

SEQ ID NO: 2884 - protein, 59 aa, Homo Sapiens
ANEFLEELRQGTIERECMEEICSYEEVKEVFENKEKTMEFWKGYPNAVYSVRDPSQSSD

SEQ ID NO: 2885 - protein, 367 aa, Homo Sapiens
LPEGPLVFVALVFRHGDRAPLASYPMDPHKEVASTLWPRGLGQLTTEGVRQQLELGRFLRSRYEAFLSPEYRREEVYIRSTDFDRTLESAQANLAGLFPEAAPGSPEARWRPIPVHTVPVAEDKLLRFPMRSCPRYHELLREATEAAEYQEALEGWTGFLSRLENFTGLSLVGEPLRRAWKVLDTLMCQQAHGLPLPAWASPDVLRTLAQISALDIGAHVGPPRAAEKAQLTGGILLNAILANFSRVQRLGLPLKMVMYSAHDSTLLALQGALGLYDGHTPPYAACLGFEFRKHLGNPAKDGGNVTVSLFYRNDSAHLPLPLSLPGCPAPCPLGRFYQLTAPARPPAHGVSCHGPYEAAIPPAPVVP

SEQ ID NO: 2886 - protein, 167 aa, Homo Sapiens
QEQAQTTDWRATLKTIRNGVHKIDTYLNAALDLLGGEDGLCQYKCSDGSKPFPRYGYKPSPPNGCGSPLFGVHLNIGIPSLTKCCNQHDRCYETCGKSKNDCDEEFQYCLSKICRDVQKTLGLTQHVQACETTVELLFDSVIHLGCKPYLDSQRAACRCHYEEKTDL

SEQ ID NO: 2887 - protein, 148 aa, Homo Sapiens
SLLNLKAMVEAVTGRSAILSFVGYGCYCGLGGRGQPKDEVDWCCHAHDCCYQELFDQGCHPYVDHYDHTIENNTEIVCSDLNKTECDKQTCMCDKNMVLCLMNQTYREEYRGFLNVYCQGPTPNCSIYEPPPEEVTCSHQSPAPPAPP

SEQ ID NO: 2888 - protein, 191 aa, Homo Sapiens
RRDDPHSLCYDITVIPKFRPGPRWCAVQGQVDEKTFLHYDCGNKTVTPVSPLGKKLNVTMAWKAQNPVLREVVDILTEQLLDIQLENYTPKEPLTLQARMSCEQKAEGHSSGSWQFSIDGQTFLLFDSEKRMWTTVHPGARKMKEKWENDKDVAMSFHYISMGDCIGWLEDFLMGMDSTLEPSAGAPLAMS

SEQ ID NO: 2889 - protein, 191 aa, Homo Sapiens
GWVDTHCLCYDFIITPKSRPEPQWCEVQGLVDERPFLHYDCVNHKAKAFASLGKKVNVTKTWEEQTETLRDVVDFLKGQLLDIQVENLIPIEPLTLQARMSCEHEAHGHGRGSWQFLFNGQKFLLFDSNNRKWTALHPGAKKMTEKWEKNRDVTMFFQKISLGDCKMWLEEFLMYWEQMLDPTKPPSLAPG

SEQ ID NO: 2890 - protein, 750 aa, Homo Sapiens
VSATAAAVVPEQHASVAGQHPLDWLLTDRGPFHRAQEYADFMERYRQGFTTRYRIYREFARWKVNNLALERKDFFSLPLPLAPEFIRNIRLLGRRPNLQQVTENLIKKYGTHFLLSATLGGEESLTIFVDKQKLGRKTETTGGASIIGGSGNSTAVSLETLHQLAASYFIDRESTLRRLHHIQIATGAIKVTETRTGPLGCSNYDNLDSVSSVLVQSPENKVQLLGLQVLLPEYLRERFVAAALSYITCSSEGELVCKENDCWCKCSPTFPECNCPDADIQAMEDSLLQIQDSWATHNRQFEESEEFQALLKRLPDDRFLNSTAISQFWAMDTSLQHRYQQLGAGLKVLFKKTHRILRRLFNLCKRCHRQPRFRLPKERSLSYWWNRIQSLLYCGESTFPGTFLEQSHSCTCPYDQSSCQGPIPCALGEGPACAHCAPDNSTRCGSCNPGYVLAQGLCRPEVAESLENFLGLETDLQDLELKYLLQKQDSRIEVHSIFISNDMRLGSWFDPSWRKRMLLTLKSNKYKPGLVHVMLALSLQICLTKNSTLEPVMAIYVNPFGGSHSESWFMPVNEGSFPDWERTNVDAAAQCQNWTITLGNRWKTFFETVHVYLRSRIKSLDDSSNETIYYEPLEMTDPSKNLGYMKINTLQVFGYSLPFDPDAIRDLILQLDYPYTQGSQDSALLQLIELRDRVNQLSPPGKVRLDLFSCLLRHRLKLANNEVGRIQSSLRAFNSKLPNPVEYETGKLCS

SEQ ID NO: 2891 - protein, 129 aa, Homo Sapiens
GLELAVSVGSSDFCVDPDAYVTKMVEEYSVLSGDILQYYLACSPRAANPFQQKLSGSHKALVEMQDVVAELLRTVPWEQPATKDPLLRVQEVLNGTEVNLQHLTALVDCRSLHLDYVQALTGFCYDGVE

SEQ ID NO: 2892 - protein, 90 aa, Homo Sapiens
ERMLKMLLKTYGQNGHTHFGNDNFGPQEKTHQPKALPAINGVTCYANPAVTEANGHIHFDNVSVVSLQDGKKEPSSCTCLKGPKLSEIGT

SEQ ID NO: 2893 - protein, 446 aa, Homo Sapiens
AQQGRGRRELAPGLHLRGIRDAGGRYCQEQDLCCRGRADDCALPYLGAICYCDLFCNRTVSDCCPDFWDFCLGVPPPFPPIQGCMHGGRIYPVLGTYWDNCNRCTCQENRQWQCDQEPCLVDPDMIKAINQGNYGWQAGNHSAFWGMTLDEGIRYRLGTIRPSSSVMNMHEIYTVLNPGEVLPTAFEASEKWPNLIHEPLDQGNCAGSWAFSTAAVASDRVSIHSLGHMTPVLSPQNLLSCDTHQQQGCRGGRLDGAWWFLRRRGVVSDHCYPFSGRERDEAGPAPPCMMHSRAMGRGKRQATAHCPNSYVNNNDIYQVTPVYRLGSNDKEIMKELMENGPVQALMEVHEDFFLYKGGIYSHTPVSLGRPERYRRHGTHSVKITGWGEETLPDGRTLKYWTAANSWGPAWGERGHFRIVRGVNECDIESFVLGVWGRVGMEDMGHH

SEQ ID NO: 2894 - protein, 285 aa, Homo Sapiens
ARIPVPPACGKPQQLNRVVGGEDSTDSEWPWIVSIQKNGTHHCAGSLLTSRWVITAAHCFKDNLNKPYLFSVLLGAWQLGNPGSRSQKVGVAWVEPHPVYSWKEGACADIALVRLERSIQFSERVLPICLPDASIHLPPNTHCWISGWGSIQDGVPLPHPQTLQKLKVPIIDSEVCSHLYWRGAGQGPITEDMLCAGYLEGERDACLGDSGGPLMCQVDGAWLLAGIISWGEGCAERNRPGVYISLSAHRSWVEKIVQGVQLRGRAQGGGALRAPSQGSGAAARS

SEQ ID NO: 2895 - protein, 382 aa, Homo Sapiens
MPRSAPNDILDLRLPPEPVLNANTVCLTLPGLSRRQMEVCVRHPDVAASAIQGIQIAIHECQHQFRDQRWNCSSLETRNKIPYESPIFSRGFRESAFAYAIAAAGVVHAVSNACALGKLKACGCDASRRGDEEAFRRKLHRLQLDALQRGKGLSHGVPEHPALPTASPGLQDSWEWGGCSPDMGFGERFSKDFLDSREPHRDIHARMRLHNNRVGRQAVMENMRRKCKCHGTSGSCQLKTCWQVTPEFRTVGALLRSRFHRATLIRPHNRNGGQLEPGPAGAPSPAPGAPGPRRRASPADLVYFEKSPDFCEREPRLDSAGTVGRLCNKSSAGSDGCGSMCCGRGHNILRQTRSERCHCRFHWCCFVVCEECRITEWVSVCK

SEQ ID NO: 2896 - protein, 198 aa, Homo Sapiens
CNKALCASDVSKCLIQELCQCRPGEGNCSCCKECMLCLGALWDECCDCVGMCNPRNYSDTPPTSKSTVEELHEPIPSLFRALTEGDTQLNWNIVSFPVAEELSHHENLVSFLETVNQPHHQNVSVPSNNVHAPYSSDKEHMCTVVYFDDCMSIHQCKISCESMGASKYRWFHNACCECIGPECIDYGSKTVKCMNCMF

SEQ ID NO: 2897 - protein, 213 aa, Homo Sapiens
AEGRLALKLFRDLFANYTSALRPVADTDQTLNVTLEVTLSQIIDMDERNQVLTLYLWIRQEWTDAYLRWDPNAYGGLDAIRIPSSLVWRPDIVLYNKADAQPPGSASTNVVLRHDGAVRWDAPAITRSSCRVDVAAFPFDAQHCGLTFGSWTHGGHQLDVRPRGAAASLADFVENVEWRVLGMPARRRVLTYGCCSEPYPDVTFTLLLRRRAA

SEQ ID NO: 2898 - protein, 119 aa, Homo Sapiens
EDASSDSTGADPAQEAGTSKPNEEISGPAEPASPPETTTTAQETSAAAVQGTAKVTSSRQELNPLKSIVEKSILLTEQALAKAGKGMHGGVPGGKQFIENGSEFAQKLLKKFSLLKPWA

SEQ ID NO: 2899 - protein, 100 aa, Homo Sapiens
LAGTPEHRCRVPDAANLSSAWRNNSVPLRLRDGREVPHSCSRYRLATIANFSALGLEPGRDVDLGQLEQESCLDGWEFSQDVYLSTVVTEWNLVCEDNWK

SEQ ID NO: 2900 - protein, 475 aa, Homo Sapiens
YLLPNVTLLEELLSKYQHNESHSRVRRAIPREDKEEILMLHNKLRGQVQPQASNMEYMTWDDELEKSAAAWASQCIWEHGPTSLLVSIGQNLGAHWGRYRSPGFHVQSWYDEVKDYTYPYPSECNPWCPERCSGPMCTHYTQIVWATTNKIGCAVNTCRKMTVWGEVWENAVYFVCNYSPKGNWIGEAPYKNGRPCSECPPSYGGSCRNNLCYREETYTPKPETDEMNEVETAPIPEENHVWLQPRVMRPTKPKKTSAVNYMTQVVRCDTKMKDRCKGSTCNRYQCPAGCLNHKAKIFGTLFYESSSSICRAAIHYGILDDKGGLVDITRNGKVPFFVKSERHGVQSLSKYKPSSSFMVSKVKVQDLDCYTTVAQLCPFEKPATHCPRIHCPAHCKDEPSYWAPVFGTNIYADTSSICKTAVHAGVISNESGGDVDVMPVDKKKTYVGSLRNGVQSESLGTPRDGKAFRIFAVRQ

SEQ ID NO: 2901 - protein, 155 aa, Homo Sapiens
QRKKEMVLSEKVSQLMEWTNKRPVIRMNGDKFRRLVKAPPRNYSVIVMFTALQLHRQCVVCKQADEEFQILANSWRYSSAFTNRIFFAMVDFDEGSDVFQMLNMNSAPTFINFPAKGKPKRGDTYELQVRGFSAEQIARWIADRTDVNIRVIRPP

SEQ ID NO: 2902 - protein, 482 aa, Homo Sapiens
PCPDRPASQRMWRIDYSAAVIYDFLAVDDINGDRIQDVLFLYKNTNSSNNFSRSCVDEGFSSPCTFAAAVSGANGSTLWERPVAQDVALVECAVPQPRGSEAPSACILVGRPSSFIAVNLFTGETLWNHSSSFSGNASILSPLLQVPDVDGDGAPDLLVLTQEREEVSGHLYSGSTGHQIGLRGSLGVDGESGFLLHVTRTGAHYILFPCASSLCGCSVKGLYEKVTGSGGPFKSDPHWESMLNATTRRMLSHSSGAVRYLMHVPGNAGADVLLVGSEAFVLLDGQELTPRWTPKAAHVLRKPIFGRYKPDTLAVAVENGTGTDRQILFLDLGTGAVLCSLALPSLPGGPLSASLPTADHRSAFFFWGLHELGSTSETETGEARHSLYMFHPTLPRVLLELANVSTHIVAFDAVLFEPSRHAAYILLTGPADSEAPGLVSVIKHKVRDLVPSSRVVRLGEGGPDSDQAIRDRFSRLRYQSEA

SEQ ID NO: 2903 - protein, 112 aa, Homo Sapiens
RKKTFLSVHEVMAVENYAKDSLQWITDQYNKESDDKYHFRIFRVLKVQRQVTDHLEYHLNVEMQWTTCQKPETTNCVPQERELHKQVNCFFSVFAVPWFEQYKILNKSCSSD

SEQ ID NO: 2904 - protein, 126 aa, Homo Sapiens
AKLGHFQRWEGFQQKLMSKKNMNSTLNFFIQSYNNASNDTYLYRVQRLIRSQMQLTTGVEYIVTVKIGRTKCKRNDTSNSSCPLQSKKLRKSLICESLIYTMPWINYFQLWNNSCLEAEHVGRNLR

SEQ ID NO: 2905 - protein, 430 aa, Homo Sapiens
HQNLKEFALTNPEKSSTKETERKETKAEEELDAEVLEVFHPTHEWQALQPGQAVPAGSHVRLNLQTGEREAKLQYEDKFRNNLKGKRLDINTNTYTSQDLKSALAKFKEGAEMESSKEDKARQAEVKRLFRPIEELKKDFDELNVVIETDMQIMVRLINKFNSSSSSLEEKIAALFDLEYYVHQMDNAQDLLSFGGLQVVINGLNSTEPLVKEYAAFVLGAAFSSNPKVQVEAIEGGALQKLLVILATEQPLTAKKKVLFALCSLLRHFPYAQRQFLKLGGLQVLRTLVQEKGTEVLAVRVVTLLYDLVTEKMFAEEEAELTQEMSPEKLQQYRQVHLLPGLWEQGWCEITAHLLALPEHDAREKVLQTLGVLLTTCRDRYRQDPQLGRTLASLQAEYQVLASLELQDGEDEGYFQELLGSVNSLLKELR

SEQ ID NO: 2906 - protein, 300 aa, Homo Sapiens
RRMWTLRSPLTRSLYVNMTSGPGGPAAAAGGRKENHQWYVCNREKLCESLQAVFVQSYLDQGTQIFLNNSIEKSGWLFIQLYHSFVSSVFSLFMSRTSINGLLGRGSMFVFSPDQFQRLLKINPDWKTHRLLDLGAGDGEVTKIMSPHFEEIYATELSETMIWQLQKKKYRVLGINEWQNTGFQYDVISCLNLLDRCDQPLTLLKDIRSVLEPTRGRVILALVLPFHPYVENVGGKWEKPSEILEIKGQNWEEQVNSLPEVFRKAGFVIEAFTRLPYLCEGDMYNDYYVLDDAVFVLKPV

SEQ ID NO: 2907 - protein, 128 aa, Homo Sapiens
KPKGMTSSQWFKIQHMQPSPQACNSAMKNINKHTKRCKDLNTFLHEPFSSVAATCQTPKIACKNGDKNCHQSHGPVSLTMCKLTSGKYPNCRYKEKRQNKSYVVACKPPQKKDSQQFHLVPVHLDRVL

SEQ ID NO: 2908 - protein, 58 aa, Homo Sapiens
GYRDKKRMQKTQLSPEIKVCQQQPKLYLCKHLCESHRDCQANNICCSTYCGNVCMSIL

SEQ ID NO: 2909 - protein, 342 aa, Homo Sapiens
QLLTDANSWWSLALNPVQRPEMFIIGAQPVCSQLPGLSPGQRKLCQLYQEHMAYIGEGAKTGIKECQHQFRQRRWNCSTADNASVFGRVMQIGSRETAFTHAVSAAGVVNAISRACREGELSTCGCSRTARPKDLPRDWLWGGCGDNVEYGYRFAKEFVDAREREKNFAKGSEEQGRVLMNLQNNEAGRRAVYKMADVACKCHGVSGSCSLKTCWLQLAEFRKVGDRLKEKYDSAAAMRVTRKGRLELVNSRFTQPTPEDLVYVDPSPDYCLRNESTGSLGTQGRLCNKTSEGMDGCELMCCGRGYNQFKSVQVERCHCKFHWCCFVRCKKCTEIVDQYICK

SEQ ID NO: 2910 - protein, 164 aa, Homo Sapiens
EFIGLRRCLMGLGRCRDHCNVDEKEIQKCKMKKCCVGPKVVKLIKNYLQYGTPNVLNEDVQEMLKPAKNSSAVIQRKHILSVLPQIKSTSFFANTNFVIIPNATPMNSATISTMTPGQITYTATSTKSNTKESRDSATASPPPAPPPPNILPTPSLELEEAEEQ

SEQ ID NO: 2911 - protein, 64 aa, Homo Sapiens
KRQLWDRTRPEVQQWYQQFLYMGFDEAKFEDDITYWLNRDRNGHEYYGDYYQRHYDEDSAIGPR

SEQ ID NO: 2912 - protein, 63 aa, Homo Sapiens
MINLSSLWTVPAWISKVSFLRWCFEGLMKIQFSRRTYKMPLGNLTIAVSGDKILSAMELDSYP

SEQ ID NO: 2913 - protein, 96 aa, Homo Sapiens
GFKANVINEKCITQNSETIMKFLKMGNISQDIIPHHINLSTVTAEDYHLVYDIIQKVKEEEFPALHLNSCKIEEELNKAVQGTGLAFIAFTEAMTH

SEQ ID NO: 2914 - protein, 235 aa, Homo Sapiens
LLEGDECAPHSQPWQVALYERGRFNCGASLISPHWVLSAAHCQSRFMRVRLGEHNLRKRDGPEQLRTTSRVIPHPRYEARSHRNDIMLLRLVQPARLNPQVRPAVLPTRCPHPGEACVVSGWGLVSHNEPGTAGSPRSQVSLPDTLHCANISIISDTSCDKSYPGRLTNTMVCAGAEGRGAESCEGDSGGPLVCGGILQGIVSWGDVPCDNTTKPGVYTKVCHYLEWIRETMKRN

SEQ ID NO: 2915 - protein, 492 aa, Homo Sapiens
RKTVPGDNESEEDSKIKGIHDEKYVELFIVADDTVYRRNGHPHNKLRNRIWGMVNFVNMIYKTLNIHVTLVGIEIWTHEDKIELYSNIETTLLRFSFWQEKILKTRKDFDHVVLLSGKWLYSHVQGISYPGGMCLPYYSTSIIKDLLPDTNIIANRMAHQLGHNLGMQHDEFPCTCPSGKCVMDSDGSIPALKFSKCSQNQYHQYLKDYKPTCMLNIPFPYNFHDFQFCGNKKLDEGEECDCGPAQECTNPCCDAHTCVLKPGFTCAEGECCESCQIKKAGSICRPAKDECDFPEMCTGHSPACPKDQFRVNGFPCKNSEGYCFMGKCPTREDQCSELFDDEAIESHDICYKMNTKGNKFGYCKNKENRFLPCEEKDVRCGKIYCTGGELSSLLGEDKTYHLKDPQKNATVKCKTIFLYHDSTDIGLVASGTKCGEGMVCNNGECLNMEKVYISTNCPSQCNENPVDGHGLQCHCEEGQAPVACEETLHVTN

SEQ ID NO: 2916 - protein, 415 aa, Homo Sapiens
YGYTLPGWRKYNLTYRIINYTPDMARAAVDEAIQEGLEVWSKVTPLKFTKISKGIADIMIAFRTRVHGRCPRYFDGPLGVLGHAFPPGPGLGGDTHFDEDENWTKDGAGFNLFLVAAHEFGHALGLSHSNDQTALMFPNYVSLDPRKYPLSQDDINGIQSIYGGLPKEPAKPKEPTIPHACDPDLTFDAITTFRREVMFFKGRHLWRIYYDITDVEFELIASFWPSLPADLQAAYENPRDKILVFKDENFWMIRGYAVLPDYPKSIHTLGFPGRVKKIDAAVCDKTTRKTYFFVGIWCWRFDEMTQTMDKGFPQRVVKHFPGISIRVDAAFQYKGFFFFSRGSKQFEYDIKTKNITRIMRTNTWFQCKEPKNSSFGFDINKEKAHSGGIKILYHKSLSLFIFGIVHLLKNTSIYQ

SEQ ID NO: 2917 - protein, 477 aa, Homo Sapiens
MVVPNATLLEKLLEKYMDEDGEWWIAKQRGKRAITDNDMQSILDLHNKLRSQVYPTASNMEYMTWDVELERSAESWAESCLWEHGPASLLPSIGQNLGAHWGRYRPPTFHVQSWYDEVKDFSYPYEHECNPYCPFRCSGPVCTHYTQVVWATSNRIGCAINLCHNMNIWGQIWPKAVYLVCNYSPKGNWWGHAPYKHGRPCSACPPSFGGGCRENLCYKEGSDRYYPPREEETNEIERQQSQVHDTHVRTRSDDSSRNEVISAQQMSQIVSCEVRLRDQCKGTTCNRYECPAGCLDSKAKVIGSVHYEMQSSICRAAIHYGIIDNDGGWVDITRQGRKHYFIKSNRNGIQTIGKYQSANSFTVSKVTVQAVTCETTVEQLCPFHKPASHCPRVYCPRNCMQANPHYARVIGTRVYSDLSSICRAAVHAGVVRNHGGYVDVMPVDKRKTYIASFQNGIFSESLQNPPGGKAFRVFAVV

SEQ ID NO: 2918 - protein, 454 aa, Homo Sapiens
LFRSLYRSVSMPPKGDSGQPLFLTPYIEAGKIQKGRELSLVGPFPGLNMKSYAGFLTVNKTYNSNLFFWFFPAQIQPEDAPVVLWLQGGPGGSSMFGLFVEHGPYVVTSNMTLRDRDFPWTTTLSMLYIDNPVGTGFSFTDDTHGYAVNEDDVARDLYSALIQFFQIFPEYKNNDFYVTGESYAGKYVPAIAHLIHSLNPVREVKINLNGIAIGDGYSDPESIIGGYAEFLYQIGLLDEKQKKYFQKQCHECIEHIRKQNWFEAFEILDKLLDGDLTSDPSYFQNVTGCSNYYNFLRCTEPEDQLYYVKFLSLPEVRQAIHVGNQTFNDGTIVEKYLREDTVQSVKPWLTEIMNNYKVLIYNGQLDIIVAAALTERSLMGMDWKGSQEYKKAEKKVWKIFKSDSEVAGYIRQVGDFHQVIIRGGGHILPYDQPLRAFDMINRFIYGKGWDPYVG

SEQ ID NO: 2919 - protein, 154 aa, Homo Sapiens
RRSNVRVITDENWRELLEGDWMIEFYAPWCPACQNLQPEWESFAEWGEDLEVNIAKVDVTEQPGLSGRFIITALPTIYHCKDGEFRRYQGPRTKKDFINFISDKEWKSIEPVSSWFGPGSVLMSSMSALFQLSMWIRTCHNYFIEDLGLPVWGS

SEQ ID NO: 2920 - protein, 387 aa, Homo Sapiens
YLCPAASQPISGTLQDEEITLSCSEASAEEALLPALPKTVSFRINSEDFLLEAQVRDQPRWLLVCHEGWSPALGLQICWSLGHLRLTHHKGVNLTDIKLNSSQEFAQLSPRLGGFLEEAWQPRNNCTSGQVVSLRCSECGARPLASRIVGGQSVAPGRWPWQASVALGFRHTCGGSVLAPRWVVTAAHCMHSFRLARLSSWRVHAGLVSHSAVRPHQGALVERIIPHPLYSAQNHDYDVALLRLQTALNFSDTVGAVCLPAKEQHFPKGSRCWVSGWGHTHPSHTYSSDMLQDTVVPLLSTQLCNSSCVYSGALTPRMLCAGYLDGRADACQGDSGGPLVCPDGDTWRLVGVVSWGRGCAEPNHPGVYAKVAEFLDWIHDTAQDSLL

SEQ ID NO: 2921 - protein, 425 aa, Homo Sapiens
QKFSALTFLRVDQDKDKDCSLDCAGSPQKPLCASDGRTFLSRCEFQRAKCKDPQLEIAYRGNCKDVSRCVAERKYTQEQARKEFQQVFIPECNDDGTYSQVQCHSYTGYCWCVTPNGRPISGTAVAHKTPRCPGSVNEKLPQREGTGKTDDAAAPALETQPQGDEEDIASRYPTLWTEQVKSRQNKTNKNSVSSCDQEHQSALEEAKQPKNDNVVIPECAHGGLYKPVQCHPSTGYCWCVLVDTGRPIPGTSTRYEQPKCDNTARAHPAKARDLYKGRQLQGCPGAKKHEFLTSVLDALSTDMVHAASDPSSSSGRLSEPDPSHTLEERVVHWYFKLLDKNSSGDIGKKEIKPFKRFLRKKSKPKKCVKKFVEYCDVNNDKSISVQELMGCLGVAKEDGKADTKKRHTPRGHVESTSNRQPRKQG

SEQ ID NO: 2922 - protein, 197 aa, Homo Sapiens
HISVRDMNALLDYHNHIRASVYPPAANMEYMVWDKRLARAAEAWATQCIWAHGPSQLMRYVGQNLSIHSGQYRSVVDLMKSWSEEKWHYLFPAPRDCNPHCPWRCDGPTCSHYTQMVWASSNRLGCAIHTCSSISVWGNTWHRAAYLVCNYAIKGNWIGESPYKMGKPCSSCPPSYQGSCNSNMCFKGLKSNKFTWF

SEQ ID NO: 2923 - protein, 248 aa, Homo Sapiens
ASAKELACQEITVPLCKGIGYNYTYMPNQFNHDTQDEAGLEVHQFWPLVEIQCSPDLKFFLCSMYTPICLEDYKKPLPPCRSVCERAKAGCAPLMRQYGFAWPDRMRCDRLPEQGNPDTLCMDYNRTDLTTAAPSPPRRLPPPPPGEQPPSGSGHGRPPGARPPHRGGGRGGGGGDAAAPPARGGGGGGKARPPGGGAAPCEPGCQCRAPMVSVSSERHPLYNRVKTGQIANCALPCHNPFFSQDERA

SEQ ID NO: 2924 - protein, 372 aa, Homo Sapiens
ASRPWEGTDEPGSAWAWPGFQRLQEQLRAAGALSKRYWTLFSCQVWPDDCDEDEEAATGPLGWRLPLLGQRYLDLLTTWYCSFKDCCPRGDCRISNNFTGLEWDLNVRLHGQHLVQQLVLRTVRGYLETPQPEKALALSFHGWSGTGKNFVARMLVENLYRDGLMSDCVRMFIATFHFPHPKYVDLYKEQLMSQIRETQQLCHQTLFIFDEAEKLHPGLLEVLGPHLERRAPEGHRAESPWTIFLFPSNLRGDIINEVVLKLLKAGWSREEITMEHLEPHLQAEIVETIDNGFGHSRLVKENLIDYFIPFLPLEYRHVRLCARDAFLSQELLYKEETLDEIAQMMVYVPKEEQLFSSQGCKSISQRINYFLS

SEQ ID NO: 2925 - protein, 649 aa, Homo Sapiens
ASGEHSPGSGAARRPLHSAQAVDVASASNFRAFELLHLHLDLRAEFGPPGPGAGSRGLSGTAVLDLRCLEPEGAAELRLDSHPCLEVTAAALRRERPGSEEPPAEPVSFYTQPFSHYGQALCVSFPQPCRAAERLQVLLTYRVGEGPGVCWLAPEQTAGKKKPFVYTQGQAVLNRAFFPCFDTPAVKYKYSALIEVPDGFTAVMSASTWEKRGPNKFFFQMCQPIPSYLIALAIGDLVSAEVGPRSRVWAEPCLIDAAKEEYNGVIEEFLATGEKLFGPYVWGRYDLLFMPPSFPFGGMENPCLTFVTPCLLAGDRSLADVIIHEISHSWFGNLVTNANWGEFWLNEGFTMYAQRRISTILFGAAYTCLEAATGRALLRQHMDITGEENPLNKLRVKIEPGVDPDDTYNETPYEKGFCFVSYLAHLVGDQDQFDSFLKAYVHEFKFRSILADDFLDFYLEYFPELKKKRVDIIPGFEFDRWLNTPGWPPYLPDLSPGDSLMKPAEELAQLWAAEELDMKAIEAVAISPWKTYQLVYFLDKILQKSPLPPGNVKKLGDTYPSISNARNAELRLRWGQIVLKNDHQEDFWKVKEFLHNQGKQKYTLPLYHAMMGGSEVAQTLAKETFASTASQLHSNVVNYVQQIVAPKGS

SEQ ID NO: 2926 - protein, 427 aa, Homo Sapiens
AETTPGAPRALSLGSPSLFTTPGVPSALTTPGLTTPGTPKTLDLRGRAQALMRSFPLVDGHNDLPQVLRQRYKNVLQDVNLRNFSHGQTSLDRLRDGLVGAQFWSASVSCQSQDQTAVRLALEQIDLIHRMCASYSELELVTSAEGLNSSQKLACLIGVEGGHSLDSSLSVLRSFYVLGVRYLTLTFTCSTPWAESSTKFRHHMYTNVSGLTSFGEKVVEELNRLGMMIDLSYASDTLIRRVLEVSQAPVIFSHSAARAVCDNLLNVPDDILQLLKKNGGIVMVTLSMGVLQCNLLANVSTVADHFDHIRAVIGSEFIGIGGNYDGTGRFPQGLEDVSTYPVLIEELLSRSWSEEELQGVLRGNLLRVFRQVEKVREESRAQSPVEAEFPYGQLSTSCHSHLVPQNGHQATHLEVTKQPTNRVPWRS

SEQ ID NO: 2927 - protein, 811 aa, Homo Sapiens
SGGGGDSRQRRLLAAKVNKHKPWIETSYHGVITENNDTVILDPPLVALDKDAPVPFAGEICAFKIHGQELPFEAVVLNKTSGEGRLRAKSPIDCELQKEYTFIIQAYDCGAGPHETAWKKSHKAVVHIQVKDVNEFAPTFKEPAYKAVVTEGKIYDSILQVEAIDEDCSPQYSQICNYEIVTTDVPFAIDRNGNIRNTEKLSYDKQHQYEILVTAYDCGQKPAAQDTLVQVDVKPVCKPGWQDWTKRIEYQPGSGSMPLFPSIHLETCDGAVSSLQIVTELQTNYIGKGCDRETYSEKSLQKLCGASSGIIDLLPSPSAATNWTAGLLVDSSEMIFKFDGRQGAKVPDGIVPKNLTDQFTITMWMKHGPSPGVRAEKETILCNSDKTEMNRHHYALYVHNCRLVFLLRKDFDQADTFRPAEFHWKLDQICDKEWHYYVINVEFPVVTLYMDGATYEPYLVTNDWPIHPSHIAMQLTVGACWQGGEVTKPQFAQFFHGSLASLTIRPGKMESQKVISCLQACKEGLDINSLESLGQGIKYHFNPSQSILVMEGDDIGNINRALQKVSYINSRQFPTAGVRRLKVSSKVQCFGEDVCISIPEVDAYVMVLQAIEPRITLRGTDHFWRPAAQFESARGVTLFPDIKIVSTFAKTEAPGDVKTTDPKSEVLEEMLHNLDFCDILVIGGDLDPRQECLELNHSELHQRHLDATNSTAGYSIYGVGSMSRYEQVLHHIRYRNWRPASLEARRFRIKCSELNGRYTSNEFNLEVSILHEDQVSDKEHVNHLIVQPPFLQSVHHPESRSSIQHSSVVPS

SEQ ID NO: 2928 - protein, 409 aa, Homo Sapiens
HRTTGPRFLISDRDPQCNLHCSRTQPKPICASDGRSYESMCEYQRAKCRDPTLGVVHRGRCKDAGQSKCRLERAQALEQAKKPQEAVFVPECGEDGSFTQVQCHTYTGYCWCVTPDGKPISGSSVQNKTPVCSGSVTDKPLSQGNSGRKDDGSKPTPTMETQPVFDGDEITAPTLWIKHLVIKDSKLNNTNIRNSEKVYSCDQERQSALEEAQQNPREGIVIPECAPGGLYKPVQCHQSTGYCWCVLVDTGRPLPGTSTRYVMPSCESDARAKTTEADDPFKDRELPGCPEGKKMEFITSLLDALTTDMVQAINSAAPTGGGRFSEPDPSHTLEERVVHWYFSQLDSNSSNDINKREMKPFKRYVKKKAKPKKCARRFTDYCDLNKDKVISLPELKGCLGVSKEVGRLV

SEQ ID NO: 2929 - protein, 119 aa, Homo Sapiens
WHFHEQRDCDEHNVMARYLPATVEFAVHTFNQQSKDYYAYRLGHILNSWKEQVESKTVFSMELLLGRTRCGKFEDDIDNCHFQESTELNNTFTCFFTISTRPWMTQFSLLNKTCLEGFH

SEQ ID NO: 2930 - protein, 638 aa, Homo Sapiens
FEIALPRESNITVLIKLGTPTLLAKPCYIVISKRHITMLSIKSGERIVFTFSCQSPENHFVIEIQKNIDCMSGPCPFGEVQLQPSTSLLPTLNRTFIWDVKAHKSIGLELQFSIPRLRQIGPGESCPDGVTHSISGRIDATVVRIGTFCSNGTVSRIKMQEGVKMALHLPWFHPRNVSGFSIANRSSIKRLCIIESVFEGEGSATLMSANYPEGFPEDELMTWQFVVPAHLRASVSFLNFNLSNCERKEERVEYYIPGSTTNPEVFKLEDKQPGNMAGNFNLSLQGCDQDAQSPGILRLQFQVLVQHPQNESNKIYVVDLSNERAMSLTIEPRPVKQSRKFVPGCFVCLESRTCSSNLTLTSGSKHKISFLCDDLTRLWMNVEKTISCTDHRYCQRKSYSLQVPSDILHLPVELHDFSWKLLVPKDRLSLVLVPAQKLQQHTHEKPCNTSFSYLVASAIPSQDLYFGSFCPGGSIKQIQVKQNISVTLRTFAPSFQQEASRQGLTVSFIPYFKEEGVFTVTPDTKSKVYLRTPNWDRGLPSLTSVSWNISVPRDQVACLTFFKERSGVVCQTGRAFMIIQEQRTRAEEIFSLDEDVLPKPSFHHHSFWVNISNCSPTSGKQLDLLFSVTLTPRTVDLT

SEQ ID NO: 2931 - protein, 318 aa, Homo Sapiens
ALTHVLCRPRRGCCGRRRSASPACLSDPSLGEHGFLNLKSSGLRLHYVSAGRGNGPLMLFLHGFPENWFSWRYQLREFQSRFHVVAVDLRGYGPSDAPRDVDCYTIDLLLVDIKDVILGLGYSKCILVAHDWGALLAWHFSIYYPSLVERMVVVSGAPMSVYQDYSLHHISQFFRSHYMFLFQLPWLPEKLLSMSDFQILKTTLTHRKTGIPCLTPSELEAFLYNFSQPGGLTGPLNYYRNLFRNFPLEPQELTTPTLLLWGEKDTYLELGLVEAIGSRFVPGRLEAHILPGIGHWIPQSNPQEMHQYMWAFLQDLLD

SEQ ID NO: 2932 - protein, 207 aa, Homo Sapiens
TLRTSLDPSLEIYKKMFEVKRREQLLALKNLAQLNDIHQQYKILDVMLKGLFKVLEDSRTVLTAADVLPDGPFPQDEKLKDAFSHVVENTAFFGDVVLRFPRIVHYYFDHNSNWNLLIRWGISFCNQTGVFNQGPHSPILSLMAQELGISEKDSNFQNPFKIDRTEFIPSTDPFQKALREEEKRRKKEEKRKEIRKGPRISRSQSEL

SEQ ID NO: 2933 - protein, 172 aa, Homo Sapiens
TFKQEERAVRDRNLLQVHDHNQPIPWKVQFNLGNSSRPSNQCRNSIQGKHLITDELGYVCERKDLLVNGCCNVNVPSTKQYCCDGCWPNGCCSAYEYCVSCCLQPNKQLLLERFLNRAAVAFQNLFMAVEDHFELCLAKCRTSSQSVQHENTYRDPIAKYCYGESPPELFPA

SEQ ID NO: 2934 - protein, 147 aa, Homo Sapiens
RKNRPAGAIHSPYKDGSSNNSERWQHQIKEVLASSQEALVVTERKYLKSDWCKTQPLRQTVSEEGCRSRTILNRFCYGQCNSFYIPRHVKKEEESFQSCAFCKPQRVTSVLVELECPGLDPPFRLKKIQKVKQCRCMSVNLSDSDKQ

SEQ ID NO: 2935 - protein, 102 aa, Homo Sapiens
LSPPTMNLRPPKSCGNVFYWVLVLNSGLLYKFCQTIKCRANWRPARAPRGWNEATERHQERRTQMETEMGGISTTYWHRLCTCTDRRAEKLVMDGNNCWFHK

SEQ ID NO: 2936 - protein, 215 aa, Homo Sapiens
WICKKWFPYFLVRFTVIYNEQMASKKRELFSNLQEFAGPSGKLSLLEVGCGTGANFKFYPPGCRVTCIDPNPNFEKFLIKSIAENRHLQFERFVVAAGENMHQVADGSVDVVVCTLVLCSVKNQERILREVCRVLRPGGAFYFMEHVAAECSTWNYFWQQVLDPAWHLLFDGCNLTRESWKALERASFSKLKLQHIQAPLSWELVRPHIYGYAVK

SEQ ID NO: 2937 - protein, 405 aa, Homo Sapiens
QNCLKKSLEDVVIDIQSSLSKGIRGNEPIYTSTQEDCINSCCSTKNISGDKACNLMIFDTRKTARQPNCYLFFCPNEEACPLKPAKGLMSYRIITDFPSLTRNLPSQELPQEDSLLHGQFSQAVTPLAHHHTDYSKPTDISWRDTLSQKFGSSDHLEKLFKMDEASAQLLAYKEKGHSQSSQFSSDQEIAHLLPENVSALPATVAVASPHTTSATPKPATLLPTNASVTPSGTSQPQLATTAPPVTTVTSQPPTTLISTVFTRAAATLQAMATTAVLTTTFQAPTDSKGSLETIPFTEISNLTLNTGNVYNPTALSMSNVESSTMNKTASWEGREASPGSSSQGSVPENQYGLPFEKWLLIGSLLFGVLFLVIGLVLLGRILSESLRRKRYSRLDYLINGIYVDI

SEQ ID NO: 2938 - protein, 406 aa, Homo Sapiens
LLAPVFRTLSILTNQSNCWLCEHLDNAEQPELVFVPASASTWWTYSGQWMYERVWYPQAEVQNHSTSSYRKVTWHWEASMEAQGLSFAQVRLLEGNFSLCVENKNGSGPFLGNIPKQYCNQILWFDSTDGTFMPSIDVTNESRNDDDDTSVCLGTRQCSWFAGCTNRTWNSSAVPLIGLPNTQDYKWVDRNSGLTWSGNDTCLYSCQNQTKGLLYQLFRNLFCSYGLTEAHGKWRCADASITNDKGHDGHRTPTWWLTGSNLTLSVNNSGLFFLCGNGVYKGFPPKWSGRCGLGYLVPSLTRYLTLNASQITNLRSFIHKVTPHRCTQGDTDNPPLYCNPKDNSTIRALFPSLGTYDLEKAILNISKAMEQEFSATKQTLEAHQSKVSSLASASRKDHVLDIPTTQ

SEQ ID NO: 2939 - protein, 500 aa, Homo Sapiens
IGFRFASYINNDMVLQKEPAGAVIWGFGTPGATVTVTLRQGQETIMKKVTSVKAHSDTWMVVLDPMKPGGPFEVMAQQTLEKINFTLRVHDVLFGDVWLCSGQSNMQMTVLQIFNATRELSNTAAYQSVRILSVSPIQAEQELEDLVAVDLQWSKPTSENLGHGYFKYMSAVCWLFGRHLYDTLQYPIGLIASSWGGTPIEAWSSGRSLKACGVPKQGSIPYDSVTGPSKHSVLWNAMIHPLCNMTLKGVVWYQGESNINYNTDLYNCTFPALIEDWRETFHRGSQGQTERFFPFGLVQLSSDLSKKSSDDGFPQIRWHQTADFGYVPNPKMPNTFMAVAMDLCDRDSPFGSIHPRDKQTVAYRLHLGARALAYGEKNLTFEGPLPEKIELLAHKGLLNLTYYQQIQVQKKDNKIFEISCCSDHRCKWLPASMNTVSTQSLTLAIDSCHGTVVALRYAWTTWPCEYKQCPLYHPSSALPAPPFIAFITDQGPGHQSNVAK

SEQ ID NO: 2940 - protein, 462 aa, Homo Sapiens
GKLLVVPMDGSHWFTMQSVVEKLILRGHEVVVVMPEVSWQLGRSLNCTVKTYSTSYTLEDQDREFMVFADARWTAPLRSAFSLLTSSSNGIFDLFFSNCRSLFNDRKLVEYLKESCFDAVFLDPFDACGLIVAKYFSLPSVVFARGIFCHYLEEGAQCPAPLSYVPRLLLGFSDAMTFKERVWNHIMHLEEHLFCPYFFKNVLEIASEILQTPVTAYDLYSHTSIWLLRTDFVLEYPKPVMPNMIFIGGINCHQGKPVPMEFEAYINASGEHGIVVFSLGSMVSEIPEKKAMAIADALGKIPQTVLWRYTGTRPSNLANNTILVKWLPQNDLLGHPMTRAFITHAGSHGVYESICNGVPMVMMPLFGDQMDNAKRMETKGAGVTLNVLEMTSEDLENALKAVINDKSYKENIMRLSSLHKDRPVEPLDLAVFWVEFVMRHKGAPHLRPAAHDLTWYQYHSLD

SEQ ID NO: 2941 - protein, 462 aa, Homo Sapiens
GKLLVVPMDGSHWFTMQSVVEKLILRGHEVVVVMPEVSWQLGKSLNCTVKTYSTSYTLEDLDREFMDFADAQWKAQVRSLFSLFLSSSNGFFNLFFSHCRSLFNDRKLVEYLKESSFDAVFLDPFDACGLIVAKYFSLPSVVFARGIACHYLEEGAQCPAPLSYVPRILLGFSDAMTFKERVRNHIMHLEEHLFCQYFSKNALEIASEILQTPVTAYDLYSHTSIWLLRTDFVLDYPKPVMPNMIFIGGINCHQGKPLPMEFEAYINASGEHGIVVFSLGSMVSEIPEKKAMAIADALGKIPQTVLWRYTGTRPSNLANNTILVKWLPQNDLLGHPMTRAFITHAGSHGVYESICNGVPMVMMPLFGDQMDNAKRMETKGAGVTLNVLEMTSEDLENALKAVINDKSYKENIMRLSSLHKDRPVEPLDLAVFWVEFVMRHKGAPHLRPAAHDLTWYQYHSLD

SEQ ID NO: 2942 - protein, 426 aa, Homo Sapiens
AVIDWPTEEGKEVWDYVTVRKDAYMFWWLYYATNSCKNFSELPLVMWLQGGPGGSSTGFGNFEEIGPLDSDLKPRKTTWLQAASLLFVDNPVGTGFSYVNGSGAYAKDLAMVASDMMVLLKTFFSCHKEFQTVPFYIFSESYGGKMAAGIGLELYKAIQRGTIKCNFAGVALGDSWISPVDSVLSWGPYLYSMSLLEDKGLAEVSKVAEQVLNAVNKGLYREATELWGKAEMIIEQNTDGVNFYNILTKSTPTSTMESSLEFTQSHLVCLCQRHVRHLQRDALSQLMNGPIRKKLKIIPEDQSWGGQATNVFVNMEEDFMKPVISIVDELLEAGINVTVYNGQLDLIVDTMGQEAWVRKLKWPELPKFSQLKWKALYSDPKSLETSAFVKSYKNLAFYWILKAGHMVPSDQGDMALKMMRLVTQQE

SEQ ID NO: 2943 - protein, 190 aa, Homo Sapiens
QSPMTVLCSIDWFMVTVHPFMLNNDVCVHFHELHLGLGCPPNHVQPHAYQFTYRVTECGIRAKAVSQDMVIYSTEIHYSSKGTPSKFVIPVSCAAPQKSPWLTKPCSMRVASKSRATAQKDEKCYEVFSLSQSSQRPNCDCPPCVFSEEEHTQVPCHQAGAQEAQPLQPSHFLDISEDWSLHTDDMIGSM

SEQ ID NO: 2944 - protein, 52 aa, Homo Sapiens
MGFIFSKSMNESMKNQKEFMLMNARLQLERQLIMQSEMRERQMAMQIAWSRE

SEQ ID NO: 2945 - protein, 192 aa, Homo Sapiens
TNVTAAVQDAGLAHEGEGEEETENNDSETAENYAPPETEDVSNRNVVKEVEFGMCTVTCGIGVREVILTNGCPGGESKCVVRVEECRGPTDCGWGKPISESLESVRLACIHTSPLNRFKYMWKLLRQDQQSIILVNDSAILEVRKESHPLAFECDTLDNNEIVATIKFTVYTSSELQMRRSSLPATDAALIF

SEQ ID NO: 2946 - protein, 102 aa, Homo Sapiens
AVITGACDKDSQCGGGMCCAVSIWVKSIRICTPMGKLGDSCHPLTRKNNFGNGRQERRKRKRSKRKKEVPFFGRRMHHTCPCLPGLACLRTSFNRFICLAQK

SEQ ID NO: 2947 - protein, 189 aa, Homo Sapiens
KNIWKRALPARLAEKSRAEEAGAPGGPRQPRADRCPPPPRTLPPGACQAARCQADSECPRHRRCCYNGCAYACLEAVPPPPVLDWLVQPKPRWLGGNGWLLDGPEEVLQAEACSTTEDGAEPLLCPSGYECHILSPGDVAEGIPNRGQCVKQRRQADGRILRHKLYKEYPEGDSKNVAEPGRGQQKHFQ

SEQ ID NO: 2948 - protein, 63 aa, Homo Sapiens
EQKELDLMDLVGEDRKWMMARKLMQVNDTLTSEDAGLRNSKNCTEPALHEFPNDIFTNEDRRQ

SEQ ID NO: 2949 - protein, 779 aa, Homo Sapiens
FSDETLDKVPKSEGYCSRILRAQGTRREGYTEFSLRVEGDPDFYKPGTSYRVTLSAAPPSYFRGFTLIALRENREGDKEEDHAGTFQIIDEEETQFMSNCPVAVTESTPRRRTRIQVFWIAPPAGTGCVILKASIVQKRIIYFQDEGSLTKKLCEQDSTFDGVTDKPILDCCACGTAKYRLTFYGNWSEKTHPKDYPRRANHWSAIIGGSHSKNYVLWEYGGYASEGVKQVAELGSPVKMEEEIRQQSDEVLTVIKAKAQWPAWQPLNVRAAPSAEFSVDRTRHLMSFLTMMGPSPDWNVGLSAEDLCTKECGWVQKVVQDLIPWDAGTDSGVTYESPNKPTIPQEKIRPLTSLDHPQSPFYDPEGGSITQVARVVIERIARKGEQCNIVPDNVDDIVADLAPEEKDEDDTPETCIYSNWSPWSACSSSTCDKGKRMRQRMLKAQLDLSVPCPDTQDFQPCMGPGCSDEDGSTCTMSEWITWSPCSISCGMGMRSRERYVKQFPEDGSVCTLPTEETEKCTVNEECSPSSCLMTEWGEWDECSATCGMGMKKRHRMIKMNPADGSMCKAETSQAEKCMMPECHTIPCLLSPWSEWSDCSVTCGKGMRTRQRMLKSLAELGDCNEDLEQVEKCMLPECPIDCELTEWSQWSECNKSCGKGHVIRTRMIQMEPQFGGAPCPETVQRKKCRIRKCLRNPSIQKLRWREARESRRSEQLKEESEGEQFPGCRMRPWTAWSECTKLCGGGIQERYMTVKKRFKSSQFTSCKDKKEIRACNVHPC

SEQ ID NO: 2950 - protein, 281 aa, Homo Sapiens
SSPCIMEPRDLPPKPGLVGHRGAPMLAPENTLMSLRKTAECGATVFETDVMVSSDGVPFLMHDEHLSRTTNVASVFPTRITAHSSDFSWTELKRLNAGSWFLERRPFWGAKPLAGPDQKEAESQTVPALEELLEEAAALNLSIMFDLRRPPQNHTYYDTFVIQTLETVLNARVPQAMVFWLPDEDRANVQRRAPGMRQIYGRQGGNRTERPQFLNLPYQDLPLLDIKALHKDNVSVNLFVVNKPWLFSLLWCAGVDSVTTNDCQLLQQMRYPIWLITPQTY

SEQ ID NO: 2951 - protein, 193 aa, Homo Sapiens
AKTGAELVTCGSVLKLLNTHHRVRLHSHDIKYGSGSGQQSVTGVEASDDANSYWRIRGGSEGGCPRGSPVRCGQAVRLTHVLTGKNLHTHHFPSPLSNNQEVSAFGEDGEGDDLDLWTVRCSGQHWEREAAVRFQHVGTSVFLSVTGEQYGSPIRGQHEVHGMPSANTHNTWKAMEGIFIKPSVEPSAGHDEL

SEQ ID NO: 2952 - protein, 51 aa, Homo Sapiens
TARFMAFLKATEAQLYVDQHVQDDTLHNVSLPPEVAYFTYARDKWWPSDPQ

SEQ ID NO: 2953 - protein, 90 aa, Homo Sapiens
KTLCSMEEAINERIQEVAGSLIFRAISSIGLECQSVTSRGDLATCPRGFAVTGCTCGSACGSWDVRAETTCHCQCAGMDWTGARCCRVQP

SEQ ID NO: 2954 - protein, 355 aa, Homo Sapiens
ESPIDPQPLSFKEPPLLLGVLHPNTKLRQAERLFENQLVGPESIAHIGDVMFTGTADGRVVKLENGEIETIARFGSGPCKTRDDEPVCGRPLGIRAGPNGTLFVADAYKGLFEVNPWKREVKLLLSSETPIEGKNMSFVNDLTVTQDGRKIYFTDSSSKWQRRDYLLLVMEGTDDGRLLEYDTVTREVKVLLDQLRFPNGVQLSPAEDFVLVAETTMARIRRVYVSGLMKGGADLFVENMPGFPDNIRPSSSGGYWVGMSTIRPNPGFSMLDFLSERPWIKRMIFKLFSQETVMKFVPRYSLVLELSDSGAFRRSLHDPDGLVATYISEVHEHDGHLYLGSFRSPFLCRLSLQAV

SEQ ID NO: 2955 - protein, 390 aa, Homo Sapiens
MNGTRNWCTLVDVHPEDQAAGSVDILRLTLQGELTGDELEHIAQKAGRKTYAMVSSHSAGHSLASELVESHDGHEEIIKVYLKGRSGDKMIHEKNINQLKSEVQYIQEARNCLQKLREDISSKLDRNLGDSLHRQEIQVVLEKPNGFSQSPTALYSSPPEVDTCINEDVESLRKTVQDLLAKLQEAKRQHQSDCVAFEVTLSRYQREAEQSNVALQREEDRVEQKEAEVGELQRRLLGMETEHQALLAKVREGEVALEELRSNNADCQAEREKAATLEKEVAGLREKIHHLDDMLKSQQRKVRQMIEQLQNSKAVIQSKDATIQELKEKIAYLEAENLEMHDRMEHLIEKQISHGNFSTQARAKTENPGSIRISKPPSPKPMPVIRVVET

SEQ ID NO: 2956 - protein, 237 aa, Homo Sapiens
QFGGLPVPLDQTLPLNVNPALPLSPTGLAGSLTNALSNGLLSGGLLGILENLPLLDILKPGGGTSGGLLGGLLGKVTSVIPGLNNIIDIKVTDPQLLELGLVQSPDGHRLYVTIPLGIKLQVNTPLVGASLLRLAVKLDITAEILAVRDKQERIHLVLGDCTHSPGSLQISLLDGLGPLPIQGLLDSLTGILNKVLPELVQGNVCPLVNEVLRGLDITLVHDIVNMLIHGLQFVIKV

SEQ ID NO: 2957 - protein, 421 aa, Homo Sapiens
VPFFPQQSGTPGMASLSLETMRQLGSLQRLNTLSQYSRYGFGKSFNSLWMHGLLPPHSSLPWMRPREHETQQYEYSLPVHPPPLPSQPSLKPQQPGLKPFLQSAAATTNQATALKEALQPPIHLGHLPLQEGELPLVQQQVAPSDKPPKPELPGVDFADPQGPSLPGMDFPDPQGPSLPGLDFADPQGSTIFQIARLISHGPMPQNKQSPLYPGMLYVPFGANQLNAPARLGIMSSEEVAGGREDPMAYGAMFPGFGGMRPGFEGMPHNPAMGGDFTLEFDSPVAATKGPENEEGGAQGSPMPEANPDNLENPAFLTELEPAPHAGLPALPKDDIPGLPRSPSGKMKGLPSVTPAAADPLMTPELADVYRTYDADMTTSVDFQEEATMDTTMAPNSLQTSMPGNKAQEPEMMHDAWHFQEP

SEQ ID NO: 2958 - protein, 92 aa, Homo Sapiens
YGFKATFNYENCLKKVSLLLTNTFDLEDGFLTASNLEQVKGYLASAYPSKYSEMFPQIKNCSLESELDTAVQGTGLAFIVYTEAIKNMEVSQ

SEQ ID NO: 2959 - protein, 136 aa, Homo Sapiens
SEVPGAAAEGSGGSGVGIGDRFKIEGRAVVPGVKPQDWISAARVLVDGEEHVGFLKTDGSFVVHDIPSGSYVVEVVSPAYRFDPVRVDITSKGKMRARYVNYIKTSEVVRLPYPLQMKSSGPPSYFIKRESWGWTD

SEQ ID NO: 2960 - protein, 126 aa, Homo Sapiens
KPFMLSIQREESTCTAIHTDIMDDWLDCAFTCGVHCHGQGKYPCLQVFVNLSHPGQKALLHYNEEAVQINPKCFYTPKCHQDRNDLLNSALDIKEFFDHKNGTPFSCFYSPASQSEDVILIKKYDQ

SEQ ID NO: 2961 - protein, 112 aa, Homo Sapiens
FPLICESKSVAGLTLTYDGNNSVASHVDVPLSYCNSECNCDESQWEPVCGNNGITYLSPCLAGCKSSSGIKKHTVFYNCSCVEVTGLQNRNYSAHLGECPRDNTCTRKFFIY

SEQ ID NO: 2962 - protein, 215 aa, Homo Sapiens
GGLLKYQTNLDTHPPGCISLNRTSSQNISLPEYFSEHFHEPFPEGFSKPAEFTQHKFVKICMEEPRFQANFPQTWLWISGPLCLYCAERLYRYIRSNKPVTIISVISHPSDVMEIRMVKENFKARPGQYITLHCPSVSALENHPFTLTMCPTETKATFGVHLKIVGDWTERFRDLLLPPSSQDSEILPFIQSRNYPKLYIDGPFGSPFEESLNYE

SEQ ID NO: 2963 - protein, 155 aa, Homo Sapiens
LSFTLEEEDITGTWYVKAMVVDKDFPEDRRPRKVSPVKVTALGGGKLEATFTFMREDRCIQKKILMRKTEEPGKYSAYGGRKLMYLQELPRRDHYIFYCKDQHHGGLLHMGKLVGRNSDTNREALEEFKKLVQRKGLSEEDIFTPLQTGSCVPEH

SEQ ID NO: 2964 - protein, 165 aa, Homo Sapiens
WSNNYAVDCPQHCDSSECKSSPRCKRTVLDDCGCCRVCAAGRGETCYRTVSGMDGMKCGPGLRCQPSNGEDPFGEEFGICKDCPYGTFGMDCRETCNCQSGICDRGTGKCLKFPFFQYSVTKSSNRFVSLTEHDMASGDGNIVREEVVKENAAGSPVMRKWLNPR

SEQ ID NO: 2965 - protein, 71 aa, Homo Sapiens
AKNFEDVRCKCICPPYKENSGHIYNKNISQKDCDCLHVVEPMPVRGPDVEAYCLRCECKYEERSSVTIKVT

SEQ ID NO: 2966 - protein, 1042 aa, Homo Sapiens
KNEDQEMCHEFQAFMKNGKLFCPQDKKFFQSLDGIMFINKCATCKMILEKEAKSQKRARHLARAPKATAPTELNCDDFKKGERDGDFICPDYYEAVCGTDGKTYDNRCALCAENAKTGSQIGVKSEGECKSSNPEQDVCSAFRPFVRDGRLGCTRENDPVLGPDGKTHGNKCAMCAELFLKEAENAKREGETRIRRNAEKDFCKEYEKQVRNGRLFCTRESDPVRGPDGRMHGNKCALCAEIFKQRFSEENSKTDQNLGKAEEKTKVKREIVKLCSQYQNQAKNGILFCTRENDPIRGPDGKMHGNLCSMCQAYFQAENEEKKKAEARARNKRESGKATSYAELCSEYRKLVRNGKLACTRENDPIQGPDGKVHGNTCSMCEVFFQAEEEEKKKKEGKSRNKRQSKSTASFEELCSEYRKSRKNGRLFCTRENDPIQGPDGKMHGNTCSMCEAFFQQEERARAKAKREAAKEICSEFRDQVRNGTLICTREHNPVRGPDGKMHGNKCAMCASVFKLEEEEKKNDKEEKGKVEAEKVKREAVQELCSEYRHYVRNGRLPCTRENDPIEGLDGKIHGNTCSMCEAFFQQEAKEKERAEPRAKVKREAEKETCDEFRRLLQNGKLFCTRENDPVRGPDGKTHGNKCAMCKAVFQKENEERKRKEEEDQRNAAGHGSSGGGGGNTQDECAEYREQMKNGRLSCTRESDPVRDADGKSYNNQCTMCKAKLEREAERKNEYSRSRSNGTGSESGKDTCDEFRSQMKNGKLICTRESDPVRGPDGKTHGNKCTMCKEKLEREAAEKKKKEDEDRSNTGERSNTGERSNDKEDLCREFRSMQRNGKLICTRENNPVRGPYGKMHINKCAMCQSIFDREANERKKKDEEKSSSKPSNNAKDECSEFRNYIRNNELICPRENDPVHGADGKFYTNKCYMCRAVFLTEALERAKLQEKPSHVRASQEEDSPDSFSSLDSEMCKDYRVLPRIGYLCPKDLKPVCGDDGQTYNNPCMLCHENLIRQTNTHIRSTGKCEESSTPGTTAASMPPSDE

SEQ ID NO: 2967 - protein, 62 aa, Homo Sapiens
QGSGLTTCVNVTEISDSVPSPVPTRETDIAQGVPRALVSALPGMEAPLSHLESRYLPAHFSP

SEQ ID NO: 2968 - protein, 167 aa, Homo Sapiens
LKSSTLKPTIEALPNVLPLNEDVNKQEEKNEDHTPNYAPANEKNGNYYKDIKQYVFTTQNPNGTESEISVRATTDLNFALKNDKTVNATTYEKSTIEEETTTSEPSHKNIQRSTPNVPAFWTMLAKAINGTAVVMDDKDQLFHPIPESDVNATQGENQPDLEDLKIK

SEQ ID NO: 2969 - protein, 508 aa, Homo Sapiens
PTFQPQTEKTKQSCVEEQRQEEKNKDNIGFHHLGKRINQELSSKENIVQERKKDLSLSEASENKGSSKSQNYFTNRQRLNKEYSISNKENTHNGLRMSIYPKSTGNKGFEDGDDAISKLHDQEEYGAALIRNNMQHIMGPVTAIKLLGEENKENTPRNVLNIIPASMNYAKAHSKDKKKPQRDSQAQKSPVKSKSTHRIQHNIDYLKHLSKVKKIPSDFEGSGYTDLQERGDNDISPFSGDGQPFKDIPGKGEATGPDLEGKDIQTGFAGPSEAESTHLDTKKPGYNEIPEREENGGNTIGTRDETAKEADAVDVSLVEGSNDIMGSTNFKELPGREGNRVDAGSQNAHQGKVEFHYPPAPSKEKRKEGSSDAAESTNYNEIPKNGKGSTRKGVDHSNRNQATLNEKQRFPSKGKSQGLPIPSRGLDNEIKNEMDSFNGPSHENIITHGRKYHYVPHRQNNSTRNKGMPQGKGSWGRQPHSNRRFSSRRRDDSSESSDSGSSSESDGD

SEQ ID NO: 2970 - protein, 104 aa, Homo Sapiens
FKGRFVGRPGSYVYVFDGYRMEECAPGGCLMELCIQLSIIMLGKQLIQNNIFEIGVPKLKKLFRKLKDETEAGETDSAHSKHPEQWDLDYSLEPYTGLTPEYME

SEQ ID NO: 2971 - protein, 490 aa, Homo Sapiens
SLLRRLGEHIQQFQESSAQGLGLSLGPGAAALPKVGWLEQLLDPFNVSDRRSFLQRYWVNDQHWVGQDGPIFLHLGGEGSLGPGSVMRGHPAALAPAWGALVISLEHRFYGLSIPAGGLEMAQLRFLSSRLALADVVSARLALSRLFNISSSSPWICFGGSYAGSLAAWARLKFPHLIFASVASSAPVRAVLDFSEYNDVVSRSLMSTAIGGSLECRAAVSVAFAEVERRLRSGGAAQAALRTELSACGPLGRAENQAELLGALQALVGGVVQYDGQTGAPLSVRQLCGLLLGGGGNRSHSTPYCGLRRAVQIVLHSLGQKCLSFSRAETVAQLRSTEPQLSGVGDRQWLYQTCTEFGFYVTCENPRCPFSQLPALPSQLDLCEQVFGLSALSVAQAVAQTNSYYGGQTPGANKVLFVNGDTDPWHVLSVTQALGSSESTLLIRTGSHCLDMAPERPSDSPSLRLGRQNIFQQLQTWLKLAKESQIKGEV

SEQ ID NO: 2972 - protein, 147 aa, Homo Sapiens
GHPDVAACPGSLDCALKRRARCPPGAHACGPCLQPFQEDQQGLCVPRMRRPPGGGRPQPRLEDEIDFLAQELARKESGHSTPPLPKDRQRLPEPATLGFSARGQGLELGLPSTPGTPTPTPHTSLGSPVSSDPVHMSPLEPRGGQGD

SEQ ID NO: 2973 - protein, 111 aa, Homo Sapiens
VHGIFMDRLASKKLCADDECVYTISLASAQEDYNAPDCRFINVKKGQQIYVYSKLVKENGAGEFWAGSVYGDGQDEMGVVGYFPRNLVKEQRVYQEATKEVPTTDIDFFCE

SEQ ID NO: 2974 - protein, 172 aa, Homo Sapiens
TSISPGRCKWNKHTLTYRIINYPHDMKPSAVKDSIYNAVSIWSNVTPLIFQQVQNGDADIKVSFWQWAHEDGWPFDGPGGILGHAFLPNSGNPGVVHFDKNEHWSASDTGYNLFLVATHEIGHSLGLQHSGNQSSIMYPTYWYHDPRTFQLSADDIQRIQHLYGEKCSSDIP

SEQ ID NO: 2975 - protein, 1103 aa, Homo Sapiens
MPMHMPRMPGFSSKSEEMMRYNQFNFMNGPHMAHLGPFFGNGLPQQFPQYQMPMWPQPPPNTWHPRKSSAPKRHNKTDQTQETQKPNQTQSKKPPQKRPLKQPSHNQPQPEEEAQPPQAFPPFGNGLFPYQQPPWQIPQRLPPPGYGRPPISNEEGGNPYFGYFGYHGFGGRPPYYSEEMFEQDFEKPKEEDPPKAESPGTEPTANSTVTETNSTQPNPKGSQGGNDTSPTGNSTPGLNTGNNPPAQNGIGPLPAVNASGQGGPGSQIPWRPSQPNIRENHPYPNIRNFPSGRQWYFTGTVMGHRQNRPFYRNQQVQRGPRWNFFAWERKQVARPGNPVYHKAYPPTSRGNYPNYAGNPANLRRKPQGPNKHPVGTTVAPLGPKPGPVVRNEKIQNPKEKPLGPKEQIIVPTKNPTSPWRNSQQYEVNKSNYKLPHSEGYMPVPNFNSVDQHENSYYPRGDSRKVPNSDGQTQSQNLPKGIVLGSRRMPYESETNQSELKHSSYQPAVYPEEIPSPAKEHFPAGRNTWDHQEISPPFKEDPGRQEEHLPHPSHGSRGSVFYPEYNPYDPRENSPYLRGNTWDERDDSPNTMGQKESPLYPINTPDQKEIVPYNEEDPVDPTGDEVFPGQNRWGEELSFKGGPTVRHYEGEQYTSNQPKEYLPYSLDNPSKPREDFYYSEFYPWSPDENFPSYNTASTMPPPIESRGYYVNNAAGPEESTLFPSRNSWDHRIQAQGQRERRPYFNRNIWDQATHLQKAPARPPDQKGNQPYYSNTPAGLQKNPIWHEGENLNYGMQITRMNSPEREHSSFPNFIPPSYPSGQKEAHLFHLSQRGSCCAGSSTGPKDNPLALQDYTPSYGLAPGENQDTSPLYTDGSHTKQTRDIISPTSILPGQRNSSEKRESQNPFRDDVSTLRRNTPCSIKNQLGQKEIMPFPEASSLQSKNTPCLKNDLGGDGNNILEQVFEDNQLNERTVDLTPEQLVIGTPDEGSNPEGIQSQVQENESERQQQRPSNILHLPCFGSKLAKHHSSTTGTPSSDGRQSPFDGDSITPTENPNTLVELATEEQFKSINVDPLDADEHSPFEFLQRGTNVQDQVQDCLLLQA

SEQ ID NO: 2976 - protein, 385 aa, Homo Sapiens
QQHHLVEYMERRLAALEERLAQCQDQSSRHAAELRDFKNKMLPLLEVAEKEREALRTEADTISGRVDRLEREVDYLETQNPALPCVEFDEKVTGGPGTKGKGRRNEKYDMVTDCGYTISQVRSMKILKRFGGPAGLWTKDPLGQTEKIYVLDGTQNDTAFVFPRLRDFTLAMAARKASRVRVPFPWVGTGQLVYGGFLYFARRPPGRPGGGGEMENTLQLIKFHLANRTVVDSSVFPAEGLIPPYGLTADTYIDLAADEEGLWAVYATREDDRHLCLAKLDPQTLDTEQQWDTPCPRENAEAAFVICGTLYVVYNTRPASRARIQCSFDASGTLTPERAALPYFPRRYGAHASLRYNPRERQLYAWDDGYQIVYKLEMRKKEEEV

SEQ ID NO: 2977 - protein, 114 aa, Homo Sapiens
TPPTCYSRMRALSQEITRDFNLLQVSEPSEPCVRYLPRLYLDIHNYCVLDKLRDFVASPPCWKVAQVDSLKDKARKLYTIMNSFCRRDLVFLLDDCNALEYPIPVTTVLPDRQR

SEQ ID NO: 2978 - protein, 384 aa, Homo Sapiens
KVILDKYYFLCGQPLHFIPRKQLCDGELDCPLGEDEEHCVKSFPEGPAVAVRLSKDRSTLQVLDSATGNWFSACFDNFTEALAETACRQMGYSSKPTFRAVEIGPDQDLDVVEITENSQELRMRNSSGPCLSGSLVSLHCLACGKSLKTPRVVGGEEASVDSWPWQVSIQYDKQHVCGGSILDPHWVLTAAHCFRKHTDVFNWKVRAGSDKLGSFPSLAVAKIIIIEFNPMYPKDNDIALMKLQFPLTFSGTVRPICLPFFDEELTPATPLWIIGWGFTKQNGGKMSDILLQASVQVIDSTRCNADDAYQGEVTEKMMCAGIPEGGVDTCQGDSGGPLMYQSDQWHVVGIVSWGYGCGGPSTPGVYTKVSAYLNWIYNVWKAEL

SEQ ID NO: 2979 - protein, 165 aa, Homo Sapiens
NYNINVNDDNNNAGSGQQSVSVNNEHNVANVDNNNGWDSWNSIWDYGNGFAATRLFQKKTCIVHKMNKEVMPSIQSLDALVKEKKLQGKGPGGPPPKGLMYSVNPNKVDDLSKFGKNIANMCRGIPTYMAEEMQEASLFFYSGTCYTTSVLWIVDISFCGDTVEN

SEQ ID NO: 2980 - protein, 111 aa, Homo Sapiens
PSQMLLENFSAAIPGHRCWTHMLDNGSAVSTNMTPKALLTISIPPGPNQGPHQCRRFRQPQWQLLDPNATATSWSEADTEPCVDGWVYDRSVFTSTIVAKWDLVCSSQGLK

SEQ ID NO: 2981 - protein, 65 aa, Homo Sapiens
SSFTIDLPWGGCYHEWNTEHCMEFQKTNGSLNGTSENATSPVIEFWERRVLKISDGIQHLGALRW

SEQ ID NO: 2982 - protein, 744 aa, Homo Sapiens
RGTPLLARPAPPGASRYSLYTTGWRPRLRPGPHKALCAYVVHRNVTCILQEGAESYVKAEYRQCRWGPKCPGTVTYRTVLRPKYKVGYKTVTDLAWRCCPGFTGKRCPEHLTDHGAASPQLEPEPQIPSGQLDPGPRPPSYSRAAPSPHGRKGPGLFGERLERLEGDVQRLAQTYGTLSGLVASHEDPNRMTGGPRAPAVPVGFGVIPEGLVGPGDRARGPLTPPLDEILSKVTEVSNTLQTKVQLLDKVHGLALGHEAHLQRLREAPPSPLTSLALLEEYVDRRLHRLWGSLLDGFEQKLQGVQSECDLRVQEVRRQCEEGQAASRRLHQSLDGRELALRQELSQLGSQLQGLSVSGRGSCCGQLALINARMDGLERALQAVTETQRGPGAPAGDELTRLSAAMLEGGVDGLLEGLETLNGTEGGARGCCLRLDMGGWGVGGFGTMLEERVQSLEERLATLAGELSHDSASPGRSARPLVQTELAVLEQRLVSLETSCTPSTTSAILDNLVAEVKAWQSRSEALLRQVASHAALLQQLNGTVAEVQGQLAEGTGSSLQGEITLLKVNLNSVSKSLTGLSDSVSQYSDAFLAANTSLDERERKVEAEVQAIQEQVSSQGSRLQAGHRQVLNLRGELEQLKAGVAKVASGLSRCQDTAQKLQHTVGHFDQRVAQVEGACRRLGLLAAGLDSLPTEPLRPREGLWSHVDQLNRTLAQHTQDIARLRDDLLDCQAQLAEQVRPGQAN

SEQ ID NO: 2983 - protein, 174 aa, Homo Sapiens
QNDTEPIVLEGKCLVVCDSNPATDSKGSSSSPLGISVRAANSKVAFSAVRSTNHEPSEMSNKTRIIYFDQILVNVGNFFTLESVFVAPRKGIYSFSFHVIKVYQSQTIQVNLMLNGKPVISAFAGDKDVTREAATNGVLLYLDKEDKVYLKLEKGNLVGGWQYSTFSGFLVFPL

SEQ ID NO: 2984 - protein, 245 aa, Homo Sapiens
WLTTGAPEPPPLSGAPQDGIRINVTTLKDDGDISKQQVVLNITYESGQVYVNDLPVNSGVTRISCQTLIVKNENLENLEEKEYFGIVSVRILVHEWPMTSGSSLQLIVIQEEVVEIDGKQVQQKDVTEIDILVKNRGVLRHSNYTLPLEESMLYSISRDSDILFTLPNLSKKESVSSLQTTSQYLIRNVETTVDEDVLPGKLPETPLRAEPPSSYKVMCQWMEKFRKDLCRFWSNVFPVFFQFLN

SEQ ID NO: 2985 - protein, 57 aa, Homo Sapiens
SLAPQYVMYGSQNYLIETNITSDNHKGNSTLSVPKRCDADAPEDQCTVTRTYLFLHK

SEQ ID NO: 2986 - protein, 79 aa, Homo Sapiens
VLKDMKLLRQSLATLLITSQILNQIMESFLPYWLQRKHGVRVKRKVQALKADIDATLYEQVILEKEMGTYLGTFDDYLE

SEQ ID NO: 2987 - protein, 452 aa, Homo Sapiens
PGVVPKDIEDIYLSICVFGQYKKTQCVPATFPLVFNARMVFEKVFPDAVDPGDVVTQLEYDTAVFELIQLVPPVGETLSTYDENTRDFMFPGPNQMSGHHDSNRQVTMRRISGLRGNAPRLEFSTTSVITECLISSRKCHTQDKFIYHLAPVEKSHGRLQNRTSRSQKKKSKSPERSKYCINAKNYEQPTISSKSHSPSPYTKRRMCELSEDTRRRLAHLNLGPYEFKKETDKPPFVIRHVDPPSPRADTLLGSSGRDCERDGWSRVHNDHSHLGCCRPKDYKVIRTPHGRDFDDSLEKCEEYLSPRSCSKPRHSARTLLVHSAPSTMPKHSPSPVLNRASLRERFHSDWCSPSNCDEIHDRDERDLEKDDELELKRSLLCRDSAYDSDPEYSSCQQPRGTFHLDDGEYWSNRAASYKGKSHRPIFENSMDKMYRNLYKKACSSASHTQESF

SEQ ID NO: 2988 - protein, 192 aa, Homo Sapiens
ALIPEPEVKIEVLQKPFICHRKTKGGDLMLVHYEGYLEKDGSLFHSTHKHNNGQPIWFTLGILEALKGWDQGLKGMCVGEKRKLIIPPALGYGKEGKGKIPPESTLIFNIDLLEIRNGPRSHESFQEMDLNDDWKLSKDEVKAYLKKEFEKHGAVVNESHHDALVEDIFDKEDEDKDGFISAREFTYKHDEL

SEQ ID NO: 2989 - protein, 70 aa, Homo Sapiens
RWLLCNGSLFRYKHPSEEELRALAGKPRPRGRKERWANGLSEEKPLSVPRDAPFQLETCPLTTVDALVLR

SEQ ID NO: 2990 - protein, 369 aa, Homo Sapiens
KDEGFAVKALWGRTQEEAEELAKEMSVPFYTSRIDEVLLHQDVDLVCINLPPPLTRQIAVKTLGIGKNVICDRTATPLDAFRMTSAAHYYPKLMSIMGNVLRFLPAFVRMKQLIEEGYVGEPLVCEVQVHGGSLLGKKYNWSCDDLMGGGGLHSVGTYIIDLLTFLTGQKAVKVHGLLKTFVKQTDHIKGIRQITSDDFCTFQMVLEGGVCCTVTLNFNVPGEFKQDVTVVGSAGRLLAVGTDLYGQRNSAPEQELLVQDATPVSNSLLPEKAFSDIPSPYLRGTIKMMQAVRQAFQDQDDRRTWDGRPLTMAATFDDCLYALCVVDTIKRSSQTGEWQNIAIMTEEPELSPAYLISEAMRRSRMSLYC

SEQ ID NO: 2991 - protein, 377 aa, Homo Sapiens
RLLNYFTWPTTTSIEVQYVEKMEFPAVTFCNLNRFQTDAVAKFGVIFFLWHIVSKVLHLQEITANSTGSREATDFAASHQNFSIVEFIRNKGFYLNNSTLLDCEFFGKPCSPKDFAHVFTEYGNCFTFNHGETLQAKRKVSVSGRGLSLLFNVNQEAFTDNPALGFVDAGIIFVIHSPKKVPQFDGLGLLSPVGMHARVTIRQVKTVHQEYPWGECNPNIKLQNFSSYSTSGCLKECKAQHIKKQCGCVPFLLPGYGIECDLQKYFSCVSPVLDHIEFKDLCTVGTHNSSCPVSCEEIEYPATISYSSFPSQKALKYLSKKLNQSRKYIRENLVKIEINYSDLNYKITQQQKAVSVSELLADLGGQLGLFCGASLIT

SEQ ID NO: 2992 - protein, 89 aa, Homo Sapiens
SRILYTDMVACVVPSECVKHCGVDVGCTNYAYPTMVLELMPQGLRGLMLSVMLASLMSSLTSIFNSASTLFTIDLYTKMRKQASEKELL

SEQ ID NO: 2993 - protein, 128 aa, Homo Sapiens
GLETESPVRTLQVETLVEPPEPCAEPAAFGDTLHIHYTGSLVDGRIIDTSLTRDPLVIELGQKQVIPGLEQSLLDMCVGEKRRAIIPSHLAYGKRGFPPSVPADAVVQYDVELIALIRANYWLKLVKG

SEQ ID NO: 2994 - protein, 490 aa, Homo Sapiens
GSPALRWYRTSCHLTKAVPGNPLGYLSFLAKDAQGLALIHARWDAHRRLQACSWEDEPELTAAYGALCAHETAWGSFIHTPGPELQRALATLQSQWEACRALEESPAGARKKRAAGQSGVPGGGHQREKRGWTMPGTLWCGVGDSAGNSSELGVFQGPDLCCREHDRCPQNISPLQYNYGIRNYRFHTISHCDCDTRFQQCLQNQHDSISDIVGVAFFNVLEIPCFVLEEQEACVAWYWWGGCRMYGTVPLARLQPRTFYNASWSSRATSPTPSSRSPAPPKPRQKQHLRKGPPHQKGSKRPSKANTTALQDPMVSPRLDVAPTGLQGPQGGLKPQGARWVCRSFRRHLDQCEHQIGPREIEFQLLNSAQEPLFHCNCTRRLARFLRLHSPPEVTNMLWELLGTTCFKLAPPLDCVEGKNCSRDPRAIRVSARHLRRLQQRRHQLQDKGTDERQPWPSEPLRGPMSFYNQCLQLTQAARRPDRQQKSWSQ

SEQ ID NO: 2995 - protein, 468 aa, Homo Sapiens
GSDEPGPEGLTSTSLLDLLLPTGLEPLDSEEPSETMGLGAGLGAPGSGFPSEENEESRILQPPQYFWEEEEELNDSSLDLGPTADYVFPDLTEKAGSIEDTSQAQELPNLPSPLPKMNLVEPPWHMPPREEEEEEEEEEEREKEEVEKQEEEEEEELLPVNGSQEEAKPQVRDFSLTSSSQTPGATKSRHEDSGDQASSGVEVESSMGPSLLLPSVTPTTVTPGDQDSTSQEAEATVLPAAGLGVEFEAPQEASEEATAGAAGLSGQHEEVPALPSFPQTTAPSGAEHPDEDPLGSRTSASSPLAPGDMELTPSSATLGQEDLNQQLLEGQAAEAQSRIPWDSTQVICKDWSNLAGKNYIILNMTENIDCEVFRQHRGPQLLALVEEVLPRHGSGHHGAWHISLSKPSEKEQHLLMTLVGEQGVVPTQDVLSMLGDIRRSLEEIGIQNYSTTSSCQARASQVRSDYGT

SEQ ID NO: 2996 - protein, 652 aa, Homo Sapiens
QAPAPTVNTHFGKLRGARVPLPSEILGPVDQYLGVPYAAPPIGEKRFLPPEPPPYWSGIRNATHFPPVCPQNIHTAVPEVMLPVWFTANLDIVATYIQEPNEDCLYLNVYVPTEDGSGAKKQGEDLADNDGDEDEDIRDSGAKPVMVYIHGGSYMEGTGNMIDGSILASYGNVIVITLNYRVGVLGFLSTGDQAAKGNYGLLDQIQALRWVSENIAFFGGDPRRITVFGSGIGASCVSLLTLSHHSEGLFQRAIIQSGSALSSWAVNYQPVKYTSLLADKVGCNVLDTVDMVDCLRQKSAKELVEQDIQPARYHVAFGPVIDGDVIPDDPEILMEQGEFLNYDIMLGVNQGEGLKFVEGVVDPEDGVSGTDFDYSVSNFVDNLYGYPEGKDTLRETIKFMYTDWADRDNPETRRKTLVALFTDHQWVEPSVVTADLHARYGSPTYFYAFYHHCQSLMKPAWSDAAHGDEVPYVFGVPMVGPTDLFPCNFSKNDVMLSAVVMTYWTNFAKTGDPNKPVPQDTKFIHTKANRFEEVAWSKYNPRDQLYLHIGLKPRVRDHYRATKVAFWKHLVPHLYNLHDMFHYTSTTTKVPPPDTTHSSHITRRPNGKTWSTKRPAISPAYSNENAQGSWNGDQDAGPLLVENPRDYSTELS

SEQ ID NO: 2997 - protein, 65 aa, Homo Sapiens
MESARENIDLQPGSSDPRSQPINLNHYATKKSVAESMLDVALFMSNAMRLKAVLEQGPSSHYYTT

SEQ ID NO: 2998 - protein, 482 aa, Homo Sapiens
IDETRAHLLLKEKMMRLGGRLVLNTKEELANERLMTLKIAEMKEAMRTLIFPPSMHFFQAKHLIERSQVFNILRMMPKGAALHLHDIGIVTMDWLVRNVTYRPHCHICFTPRGIMQFRFAHPTPRPSEKCSKWILLEDYRKRVQNVTEFDDSLLRNFTLVTQHPEVIYTNQNVVWSKFETIFFTISGLIHYAPVFRDYVFRSMQEFYEDNVLYMEIRARLLPVYELSGEHHDEEWSVKTYQEVAQKFVETHPEFIGIKIIYSDHRSKDVAVIAESIRMAMGLRIKFPTVVAGFDLVGHEDTGHSLHDYKEALMIPAKDGVKLPYFFHAGETDWQGTSIDRNILDALMLNTTRIGHGFALSKHPAVRTYSWKKDIPIEVCPISNQVLKLVSDLRNHPVATLMATGHPMVISSDDPAMFGAKGLSYDFYEVFMGIGGMKADLRTLKQLAMNSIKYSTLLESEKNTFMEIWKKRWDKFIADVATK

SEQ ID NO: 2999 - protein, 123 aa, Homo Sapiens
NLVQFGVMIEKMTGKSALQYNDYGCYCGIGGSHWPVDQTDWCCHAHDCCYGRLEKLGCEPKLEKYLFSVSERGIFCAGRTTCQRLTCECDKRAALCFRRNLGTYNRKYAHYPNKLCTGPTPPC

SEQ ID NO: 3000 - protein, 452 aa, Homo Sapiens
CPTRGSVLLAQELPQQLTSPGYPEPYGKGQESSTDIKAPEGFAVRLVFQDFDLEPSQDCAGDSVTISFVGSDPSQFCGQQGSPLGRPPGQREFVSSGRSLRLTFRTQPSSENKTAHLHKGFLALYQTVAVNYSQPISEASRGSEAINAPGDNPAKVQNHCQEPYYQAAAAGALTCATPGTWKDRQDGEEVLQCMPVCGRPVTPIAQNQTTLGSSRAKLGNFPWQAFTSIHGRGGGALLGDRWILTAAHTVYPKDSVSLRKNQSVNVFLGHTAIDEMLKLGNHPVHRVVVHPDYRQNESHNFSGDIALLELQHSIPLGPNVLPVCLPDNETLYRSGLLGYVSGFGMEMGWLTTELKYSRLPVAPREACNAWLQKRQRPEVFSDNMFCVGDETQRHSVCQGDSGSVYVVWDNHAHHWVATGIVSWGIGCGEGYDFYTKVLSYVDWIKGVMNGKN

SEQ ID NO: 3001 - protein, 66 aa, Homo Sapiens
SEEAPLRTGLEDLQDLDSLDTEKSPLYGLQSRVEELVEAPRAQGDRGPRAVFLLTRWRKFWGAPVT

SEQ ID NO: 3002 - protein, 227 aa, Homo Sapiens
IIGGHTCTRSSQPWQAALLAGPRRRFLCGGALLSGQWVITAAHCGRPILQVALGKHNLRRWEATQQVLRVVRQVTHPNYNSRTHDNDLMLLQLQQPARIGRAVRPIEVTQACASPGTSCRVSGWGTISSPIARYPASLQCVNINISPDEVCQKAYPRTITPGMVCAGVPQGGKDSCQGDSGGPLVCRGQLQGLVSWGMERCALPGYPGVYTNLCKYRSWIEETMRDK

SEQ ID NO: 3003 - protein, 189 aa, Homo Sapiens
SAYYYTKVMSELFLHTPSDTGVSFQAISSMADFWDFAQGPLLDSLYWTKWYNNQSLGHGSHSFIYYENMLLGVPRLRQLKVRNDSCVVHEDFREDILSCYDVYSPDKEEQLPFGPFNGTAWTYHSQDELGGFSHWGRLTSYSGGGYYLDLPGSRQGSAEALRALQEGLWLDRGTRVVFIDFSVYNANIN

SEQ ID NO: 3004 - protein, 219 aa, Homo Sapiens
WYCYGLCAPAPQMLRHQGLLKCRCRMLFNDLKVFLLRRPPQAPLPMHGDPQPPGLAANNTLPALGAGGWAGWRGPREVVGREPPPVPPPPPLPPSSVEDDWGGPATEPPASLLSSASSDDFCKEKTEDRYSLGSSLDSGMRTPLCRICFQGPEQGELLSPCRCDGSVKCTHQPCLIKWISERGCWSCELCYYKYHVIAISTKNPLQWQAISLTVIEKVQ

SEQ ID NO: 3005 - protein, 798 aa, Homo Sapiens
LPELSPQKYFSTLQPGKASLAYFCQADSPRTSVFLEELNEAVRPLQDYGISVAKVNCVKEEISRYCGKEKDLMKAYLFKGNILLREFPTDTLFDVNAIVAHVLFALLFSEVKYITNLEDLQNIENALKGKANIIFSYVRAIGIPEHRAVMEAAFVYGTTYQFVLTTEIALLESIGSEDVEYAHLYFFHCKLVLDLTQQCRRTLMEQPLTTLNIHLFIKTMKAPLLTEVAEDPQQVSTVHLQLGLPLVFIVSQQATYEADRRTAEWVAWRLLGKAGVLLLLRDSLEVNIPQDANVVFKRAEEGVPVEFLVLHDVDLIISHVENNMHIEEIQEDEDNDMEGPDIDVQDDEVAETVFRDRKRKLPLELTVELTEETFNATVMASDSIVLFYAGWQAVSMAFLQSYIDVAVKLKGTSTMLLTRINCADWSDVCTKQNVTEFPIIKMYKKGENPVSYAGMLGTKDLLKFIQLNRISYPVNITSIQEAEEYLSGELYKDLILYSSVSVLGLFSPTMKTAKEDFSEAGNYLKGYVITGIYSEEDVLLLSTKYAASLPALLLARHTEGKIESIPLASTHAQDIVQIITDALLEMFPEITVENLPSYFRLQKPLLILFSDGTVNPQYKKAILTLVKQKYLDSFTPCWLNLKNTPVGRGILRAYFDPLPPLPLLVLVNLHSGGQVFAFPSDQAIIEENLVLWLKKLEAGLENHITILPAQEWKPPLPAYDFLSMIDAATSQRGTRKVPKCMKETDVQENDKEQHEDKSAVRKEPIETLRIKHWNRSNWFKEAEKSFRRDKELGCSKVN

SEQ ID NO: 3006 - protein, 60 aa, Homo Sapiens
APAHRGRGGWTLNSAGYLLGPVLHLPQMGDQDGKRETALEILDLWKAIDGLPYSHPPQPS

SEQ ID NO: 3007 - protein, 198 aa, Homo Sapiens
LNRTGDPGPGPSIQKTYDLTHYLEHQLRSLAGTYLNYLGPPFNEPDFNPPRLGAETLPRATVDLEVWRSLNDKLRLTQNYEAYSHLLCYLRGLNRQAATAELRRSLAHFCTSLQGLLGSIAGVMAALGYPLPQPLPGTEPTWTPGPAHSDFLQKMDDFWLLKELQTWLWRSAKDFNRLKKKMQPPAAAVTLHLGAHGF

SEQ ID NO: 3008 - protein, 77 aa, Homo Sapiens
DYWLYSSAHICNGTNLTMDDGPPPRRARGDLTHSGLWRVCCIEGIYKGHCFRINHFPEDNDYDHDSSEYLLRIVRAS

SEQ ID NO: 3009 - protein, 67 aa, Homo Sapiens
GLNQLYFYYEETKGLTCKGIRCEKQNNAFSTLFETLQSLFWSIFGLINLYVTNVKAQHEFTEFVGAT

SEQ ID NO: 3010 - protein, 329 aa, Homo Sapiens
APAPTATSAPVKPGPALSYPQEEATLNEMFREVEELMEDTQHKLRSAVEEMEAEEAAAKASSEVNLANLPPSYHNETNTDTKVGNNTIHVHREIHKITNNQTGQMVFSETVITSVGDEEGRRSHECIIDEDCGPSMYCQFASFQYTCQPCRGQRMLCTRDSECCGDQLCVWGHCTKMATRGSNGTICDNQRDCQPGLCCAFQRGLLFPVCTPLPVEGELCHDPASRLLDLITWELEPDGALDRCPCASGLLCQPHSHSLVYVCKPTFVGSRDQDGEILLPREVPDEYEVGSFMEEVRQELEDLERSLTEEMALGEPAAAAAALLGGEEI

SEQ ID NO: 3011 - protein, 242 aa, Homo Sapiens
LPKSWDWRNVDGVNYASITRNQHIPQYCGSCWAHASTSAMADRINIKRKGAWPSTLLSVQNVIDCGNAGSCEGGNDLSVWDYAHQHGIPDETCNNYQAKDQECDKFNQCGTCNEFKECHAIRNYTLWRVGDYGSLSGREKMMAEIYANGPISCGIMATERLANYTGGIYAEYQDTTYINHVVSVAGWGISDGTEYWIVRNSWGEPWGERGWLRIVTSTYKDGKGARYNLAIEEHCTFGDPIV

SEQ ID NO: 3012 - protein, 200 aa, Homo Sapiens
SKSYYDILGVPKSASERQIKKAFHKLAMKYHPDKNKSPDAEAKFREIAEAYETLSDANRRKEYDTLGHSAFTSGKGQRGSGSSFEQSFNFNFDDLFKDFGFFGQNQNTGSKKRFENHFQTRQDGGSSRQRHHFQEFSFGGGLFDDMFEDMEKMFSFSGFDSTNQHTVQTENRFHGSSKHCRTVTQRRGNMVTTYTDCSGQ

SEQ ID NO: 3013 - protein, 336 aa, Homo Sapiens
GRDFYKILGVPRSASIKDIKKAYRKLALQLHPDRNPDDPQAQEKFQDLGAAYEVLSDSEKRKQYDTYGEEGLKDGHQSSHGDIFSHFFGDFGFMFGGTPRQQDRNIPRGSDIIVDLEVTLEEVYAGNFVEVVRNKPVARQAPGKRKCNCRQEMRTTQLGPGRFQMTQEVVCDECPNVKLVNEERTLEVEIEPGVRDGMEYPFIGEGEPHVDGEPGDLRFRIKVVKHPIFERRGDDLYTNVTISLVESLVGFEMDITHLDGHKVHISRDKITRPGAKLWKKGEGLPNFDNNNIKGSLIITFDVDFPKEQLTEEAREGIKQLLKQGSVQKVYNGLQGY

SEQ ID NO: 3014 - protein, 206 aa, Homo Sapiens
LVLDFNNIRSSADLHGARKGSQCLSDTDCNTRKFCLQPRDEKPFCATCRGLRRRCQRDAMCCPGTLCVNDVCTTMEDATPILERQLDEQDGTHAEGTTGHPVQENQPKRKPSIKKSQGRKGQEGESCLRTFDCGPGLCCARHFWTKICKPVLLEGQVCSRRGHKDTAQAPEIFQRCDCGPGLLCRSQLTSNRQHARLRVCQKIEKL

SEQ ID NO: 3015 - protein, 226 aa, Homo Sapiens
KLNSIKSSLGGETPGQAANRSAGMYQGLAFGGSKKGKNLGQAYPCSSDKECEVGRYCHSPHQGSSACMVCRRKKKRCHRDGMCCPSTRCNNGICIPVTESILTPHIPALDGTQHRDRNHGHYSNHDLGWQNLGRPHTKMSHIKGHEGDPCLRSSDCIEGFCCARHFWTKICKPVLHQGEVCTKQRKKGSHGLEIFQRCDCAKGLSCKVWKDATYSSKARLHVCQKI

SEQ ID NO: 3016 - protein, 336 aa, Homo Sapiens
NWMWLGIASFGVPEKLGCANLPLNSRQKELCKRKPYLLPSIREGARLGIQECGSQFRHERWNCMITAAATTAPMGASPLFGYELSSGTKETAFIYAVMAAGLVHSVTRSCSAGNMTECSCDTTLQNGGSASEGWHWGGCSDDVQYGMWFSRKFLDFPIGNTTGKENKVLLAMNLHNNEAGRQAVAKLMSVDCRCHGVSGSCAVKTCWKTMSSFEKIGHLLKDKYENSIQISDKTKRKMRRREKDQRKIPIHKDDLLYVNKSPNYCVEDKKLGIPGTQGRECNRTSEGADGCNLLCCGRGYNTHVVRHVERCECKFIWCCYVRCRRCESMTDVHTCK

SEQ ID NO: 3017 - protein, 456 aa, Homo Sapiens
VQVLNLQARLRVLEMYFLNDTLAAEDSPSFSLLQSAHPGEHLAQGASRLQVLQAQLTWVRVSHEHLLQRVDNFTQNPGMFRIKGEQGAPGLQGHKGAMGMPGAPGPPGPPAEKGAKGAMGRDGATGPSGPQGPPGVKGEAGLQGPQGAPGKQGATGTPGPQGEKGSKGDGGLIGPKGETGTKGEKGDLGLPGSKGDRGMKGDAGVMGPPGAQGSKGDFGRPGPPGLAGFPGAKGDQGQPGLQGVPGPPGAVGHPGAKGEPGSAGSPGRAGLPGSPGSPGATGLKGSKGDTGLQGQQGRKGESGVPGPAGVKGEQGSPGLAGPKGAPGQAGQKGDQGVKGSSGEQGVKGEKGERGENSVSVRIVGSSNRGRAEVYYSGTWGTICDDEWQNSDAIVFCRMLGYSKGRALYKVGAGTGQIWLDNVQCRGTESTLWSCTKNSWGHHDCSHEEDAGVECSV

SEQ ID NO: 3018 - protein, 212 aa, Homo Sapiens
ADGKYAQKLFNDLFEDYSNALRPVEDTDKVLNVTLQITLSQIKDMDERNQILTAYLWIRQIWHDAYLTWDRDQYDGLDSIRIPSDLVWRPDIVLYNKADDESSEPVNTNVVLRYDGLITWDAPAITKSSCVVDVTYFPFDNQQCNLTFGSWTYNGNQVDIFNALDSGDLSDFIEDVEWEVHGMPAVKNVISYGCCSEPYPDVTFTLLLKRRS

SEQ ID NO: 3019 - protein, 380 aa, Homo Sapiens
ERVRYYREFHHQTALDERESHRLIFPAVTLCNINPLRRSRLTPNDLHWAGSALLGLDPAEHAAFLRALGRPPAPPGFMPSPTFDMAQLYARAGHSLDDMLLDCRFRGQPCGPENFTTIFTRMGKCYTFNSGADGAELLTTTRGGMGNGLDIMLDVQQEEYLPVWRDNEETPFEVGIRVQIHSQEEPPIIDQLGLGVSPGYQTFVSCQQQQLSFLPPPWGDCSSASLNPNYEPEPSDPLGSPSPSPSPPYTLMGCRLACETRYVARKCGCRMVYMPGDVPVCSPQQYKNCAHPAIDAMLRKDSCACPNPCASTRYAKELSMVRIPSRAAARFLARKLNRSEAYIAENVLALDIFFEALNYETVEQKKAYEMSELLGDIGGQ

SEQ ID NO: 3020 - protein, 478 aa, Homo Sapiens
AELRAPPDKIAIIGAGIGGTSAAYYLRQKFGKDVKIDLFEREEVGGRLATMMVQGQEYEAGGSVIHPLNLHMKRFVKDLGLSAVQASGGLLGIYNGETLVFEESNWFIINVIKLVWRYGFQSLRMHMWVEDVLDKFMRIYRYQSHDYAFSSVEKLLHALGGDDFLGMLNRTLLETLQKAGFSEKFLNEMIAPVMRVNYGQSTDINAFVGAVSLSCSDSGLWAVEGGNKLVCSGLLQASKSNLISGSVMYIEEKTKTKYTGNPTKMYEVVYQIGTETRSDFYDIVLVATPLNRKMSNITFLNFDPPIEEFHQYYQHIVTTLVKGELNTSIFSSRPIDKFGLNTVLTTDNSDLFINSIGIVPSVREKEDPEPSTDGTYVWKIFSQETLTKAQILKLFLSYDYAVKKPWLAYPHYKPPEKCPSIILHDRLYYLNGIECAASAMEMSAIAAHNAALLAYHRWNGHTDMIDQDGLYEKLKTEL

SEQ ID NO: 3021 - protein, 715 aa, Homo Sapiens
FVSSHRYVETMLVADQSMAEFHGSGLKHYLLTLFSVAARLYKHPSIRNSVSLVVVKILVIHDEQKGPEVTSNAALTLRNFCNWQKQHNPPSDRDAEHYDTAILFTRQDLCGSQTCDTLGMADVGTVCDPSRSCSVIEDDGLQAAFTTAHELGHVFNMPHDDAKQCASLNGVNQDSHMMASMLSNLDHSQPWSPCSAYMITSFLDNGHGECLMDKPQNPIQLPGDLPGTSYDANRQCQFTFGEDSKHCPDAASTCSTLWCTGTSGGVLVCQTKHFPWADGTSCGEGKWCINGKCVNKTDRKHFDTPFHGSWGMWGPWGDCSRTCGGGVQYTMRECDNPVPKNGGKYCEGKRVRYRSCNLEDCPDNNGKTFREEQCEAHNEFSKASFGSGPAVEWIPKYAGVSPKDRCKLICQAKGIGYFFVLQPKVVDGTPCSTDSTSVCVQGQCVKAGCDRIIDSKKKFDKCGVCGGNGSTCKKISGSVTSAKPGYHDIITIPTGATNIEVKQRNQRGSRNNGSFLAIKAADGTYILNGDYTLSTLEQDIMYKGVVLRYSGSSAALERIRSFSPLKEPLTIQVLTVGNALRPKIKYTYFVKKKKESFNAIPTFSAWVIEEWGECSKSCELGWQRRLVECRDINGQPASECAKEVKPASTRPCADHPCPQWQLGEWSSCSKTCGKGYKKRSLKCLSHDGGVLSHESCDPLKKPKHFIDFCTMAECS

SEQ ID NO: 3022 - protein, 467 aa, Homo Sapiens
APDPGFQERFFQQRLDHFNFERFGNKTFPQRFLVSDRFWVRGEGPIFFYTGNEGDVWAFANNSGFVAELAAERGALLVFAEHRYYGKSLPFGAQSTQRGHTELLTVEQALADFAELLRALRRDLGAQDAPAIAFGGSYGGMLSAYLRMKYPHLVAGALAASAPVLAVAGLGDSNQFFRDVTADFEGQSPKCTQGVREAFRQIKDLFLQGAYDTVRWEFGTCQPLSDEKDLTQLFMFARNAFTVLAMMDYPYPTDFLGPLPANPVKVGCDRLLSEAQRITGLRALAGLVYNASGSEHCYDIYRLYHSCADPTGCGTGPDARAWDYQACTEINLTFASNNVTDMFPDLPFTDELRQRYCLDTWGVWPRPDWLLTSFWGGDLRAASNIIFSNGNLDPWAGGGIRRNLSASVIAVTIQGGAHHLDLRASHPEDPASVVEARKLEATIIGEWVKAARREQQPALRGGPRLSL

SEQ ID NO: 3023 - protein, 72 aa, Homo Sapiens
MNPPSGPRVLPSPTQEPSCMATPAPPSWWDSSQSSISSLGRLPSISPTAPGTWAAAWVPLPTVDVPDHAHYT

SEQ ID NO: 3024 - protein, 346 aa, Homo Sapiens
AGEAPGALSTADPADQSVQCVPKATCPSSRPRLLWQTPTTQTLPSTTMETQFPVSEGKVDPYRSCGFSYEQDPTLRDPEAVARRWPWMVSVRANGTHICAGTIIASQWVLTVAHCLIWRDVIYSVRVGSPWIDQMTQTASDVPVLQVIMHSRYRAQRFWSWVGQANDIGLLKLKQELKYSNYVRPICLPGTDYVLKDHSRCTVTGWGLSKADGMWPQFRTIQEKEVIILNNKECDNFYHNFTKIPTLVQIIKSQMMCAEDTHREKFCYELTGEPLVCSMEGTWYLVGLVSWGAGCQKSEAPPIYLQVSSYQHWIWDCLNGQALALPAPSRTLLLALPLPLSLLAAL

SEQ ID NO: 3025 - protein, 308 aa, Homo Sapiens
SSNNFNYGAYHSLEAIYHEMDNIAADFPDLARRVKIGHSFENRPMYVLKFSTGKGVRRPAVWLNAGIHSREWISQATAIWTARKIVSDYQRDPAITSILEKMDIFLLPVANPDGYVYTQTQNRLWRKTRSRNPGSSCIGADPNRNWNASFAGKGASDNPCSEVYHGPHANSEVEVKSVVDFIQKHGNFKGFIDLHSYSQLLMYPYGYSVKKAPDAEELDKVARLAAKALASVSGTEYQVGPTCTTVYPASGSSIDWAYDNGIKFAFTFELRDTGTYGFLLPANQIIPTAEETWLGLKTIMEHVRDNLY

SEQ ID NO: 3026 - protein, 101 aa, Homo Sapiens
LFLGCDTGPVAGVTVPYGNSTAPGSALDPYSPCNNNCECQTDSFTPVCGADGITYLSACFAGCNSTNLTGCACLTTVPAENATVVPGKCPSPGCQEAFLTF

SEQ ID NO: 3027 - protein, 535 aa, Homo Sapiens
QIYFGDPQIFQQGAVVTDAARCTSLGIEVLSKQGSSVDAAVAVALCLGIVAPHSSGLGGGGVMLVHVIRRNESHLIDFRESAPGALREETLQRSWETKPGLLVGVPGMVKGLHEAHQLYGRLPWSQVLAFAAAVAQDGFNVTHDLARALAEQLPPNMSERFRETFLPSGRPPLPGSLLHRPDLAEVLDVLGTSGPAAFYAGGNLTLEMVAEAQHAGGVITEEDFSNYSALVEKPVCGVYRGHLVLSPPPPHTGPALISALNILEGFNLTSLVSREQALHWVAETLKIALALASRLGDPVYDSTITESMDDMLSKVEAAYLRGHINDSQAAPAPLLPVYELDGAPTAAQVLIMGPDDFIVAMVSSLNQPFGSGLITPSGILLNSQMLDFSWPNRTANHSAPSLENSVQPGKRPLSFLLPTVVRPAEGLCGTYLALGANGAARGLSGLTQVLLNVLTLNRNLSDSLARGRLHPDLQSNLLQVDSEFTEEEIEFLEARGHHVEKVDVLSWVHGSRRTNNFIIAVKDPRSPDAAGATIL

SEQ ID NO: 3028 - protein, 407 aa, Homo Sapiens
PDQQKVLLVSFDGFRWDYLYKVPTPHFHYIMKYGVHVKQVTNVFITKTYPNHYTLVTGLFAENHGIVANDMFDPIRNKSFSLDHMNIYDSKFWEEATPIWITNQRAGHTSGAAMWPGTDVKIHKRFPTHYMPYNESVSFEDRVAKIIEWFTSKEPINLGLLYWEDPDDMGHHLGPDSPLMGPVISDIDKKLGYLIQMLKKAKLWNTLNLIITSDHGMTQCSEERLIELDQYLDKDHYTLIDQSPVAAILPKEGKFDEVYEALTHAHPNLTVYKKEDVPERWHYKYNSRIQPIIAVADEGWHILQNKSDDFLLGNHGYDNALADMHPIFLAHGPAFRKNFSKEAMNSTDLYPLLCHLLNITAMPHNGSFWNVQDLLNSAMPRVVPYTQSTILLPGSVKPAEYDQEGSY

SEQ ID NO: 3029 - protein, 280 aa, Homo Sapiens
AKMKVVEEPNAFGVNNPFLPQASRLQAKRDPSPVSGPVHLFRLSGKCFSLVESTYKYEFCPFHNVTQHEQTFRWNAYSGILGIWHEWEIANNTFTGMWMRDGDACRSRSRQSKVELACGKSNRLAHVSEPSTCVYALTFETPLVCHPHALLVYPTLPEALQRQWDQVEQDLADELITPQGHEKLLRTLFEDAGYLKTPENEPTQLEGGPDSLGFETLENCRKAHKELSKEIKRLKGLLTQHGIPYTRPTETSNLEHLGHETPRAKSPEQLRGDPGLRGSL

SEQ ID NO: 3030 - protein, 206 aa, Homo Sapiens
EQEVENLSGLSTNPEKDIFVVRENGTTCLMAEFAAKFIVPYDVWASNYVDLITEQADIALTRGAEVKGRCGHSQSELQVFWVDRAYALKMLFVKESHNMSKGPEATWRLSKVQFVYDSSEKTHFKDAVSAGKHTANSHHLSALVTPAGKSYECQAQQTISLASSDPQKTVTMILSAVHIQPFDIISDFVFSEEHKCPVDEREQLEE

SEQ ID NO: 3031 - protein, 476 aa, Homo Sapiens
MWTGYKILIFSYLTTEIWMEKRYLSQREVDLEAYFTRNHTVLQGTRFKRAIFQGQYCRNFGCCEDRDDGCVTEFYAANALCYCDKFCDRENSDCCPDYKSFCREEKEWPPHTQPWYPEGCFKDGQHYEEGSVIKENCNSCTCSGQQWKCSQHVCLVRSELIEQVNKGDYGWTAQNYSQFWGMTLEDGFKFRLGTLPPSLMLLSMNEMTASLPATTDLPEFFVASYKWPGWTHGPLDQKNCAASWAFSTASVAADRIAIQSKGRYTANLSPQNLISCCAKNRHGCNSGSIDRAWWYLRKRGLVSHACYPLFKDQNATNNGCAMASRSDGRGKRHATKPCPNNVEKSNRIYQCSPPYRVSSNETEIMKEIMQNGPVQAIMQVHEDFFHYKTGIYRHVTSTNKESEKYRKLQTHAVKLTGWGTLRGAQGQKEKFWIAANSWGKSWGENGYFRILRGVNESDIEKLIIAAWGQLTSSDEP

SEQ ID NO: 3032 - protein, 243 aa, Homo Sapiens
APSARDPFAPQLGDTQNCQLRCRDRDLGPQPSQAGLEGASESPYDRAVLISACERGCRLFSICRFVARSSKPNATQTECEAACVEAYVKEAEQQACSHGCWSQPAEPEPEQKRKVLEAPSGALSLLDLFSTLCNDLVNSAQGFVSSTWTYYLQTDNGKVVVFQTQPIVESLGFQGGRLQRVEVTWRGSHPEALEVHVDPVGPLDKVRKAKIRVKTSSKAKVESEEPQDNDFLSCMSRRSGLPR

SEQ ID NO: 3033 - protein, 423 aa, Homo Sapiens
LAPSPQSPETPAPQNQTSRVVQAPKEEEEDEQEASEEKASEEEKAWLMASRQQLAKETSNFGFSLLRKISMRHDGNMVFSPFGMSLAMTGLMLGATGPTETQIKRGLHLQALKPTKPGLLPSLFKGLRETLSRNLELGLTQGSFAFIHKDFDVKETFFNLSKRYFDTECVPMNFRNASQAKRLMNHYINKETRGKIPKLFDEINPETKLILVDYILFKGKWLTPFDPVFTEVDTFHLDKYKTIKVPMMYGAGKFASTFDKNFRCHVLKLPYQGNATMLVVLMEKMGDHLALEDYLTTDLVETWLRNMKTRNMEVFFPKFKLDQKYEMHELLRQMGIRRIFSPFADLSELSATGRNLQVSRVLQRTVIEVDERGTEAVAGILSEITAYSMPPVIKVDRPFHFMIYEETSGMLLFLGRVVNPTLL

SEQ ID NO: 3034 - protein, 212 aa, Homo Sapiens
APIHDADAQESSLGLTGLQSLLQGFSRLFLKGNLLRGIDSLFSAPMDFRGLPGNYHKEENQEHQLGNNTLSSHLQIDKMTDNKTGEVLISENVVASIQPAEGSFEGDLKVPRMEEKEALVPIQKATDSFHTELHPRVAFWIIKLPRRRSHQDALEGGHWLSEKRHRLQAIRDGLRKGTHKDVLEEGTESSSHSRLSPRKTHLLYILRPSRQL

SEQ ID NO: 3035 - protein, 103 aa, Homo Sapiens
VLAQLDALLVFPGQVAQLSCTLSPQHVTIRDYGVSWYQQRAGSAPRYLLYYRSEEDHHRPADIPDRFSAAKDEAHNACVLTISPVQPEDDADYYCSVGYGFSP

SEQ ID NO: 3036 - protein, 235 aa, Homo Sapiens
HGWADTRAIGAEECRPNSQPWQAGLFHLTRLFCGATLISDRWLLTAAHCRKPYLWVRLGEHHLWKWEGPEQLFRVTDFFPHPGFNKDLSANDHNDDIMLIRLPRQARLSPAVQPLNLSQTCVSPGMQCLISGWGAVSSPKALFPVTLQCANISILENKLCHWAYPGHISDSMLCAGLWEGGRGSCQGDSGGPLVCNGTLAGVVSGGAEPCSRPRRPAVYTSVCHYLDWIQEIMEN

SEQ ID NO: 3037 - protein, 261 aa, Homo Sapiens
GGVSQESSKVLNTNGTSGFLPGGYTCFPHSQPWQAALLVQGRLLCGGVLVHPKWVLTAAHCLKEGLKVYLGKHALGRVEAGEQVREVVHSIPHPEYRRSPTHLNHDHDIMLLELQSPVQLTGYIQTLPLSHNNRLTPGTTCRVSGWGTTTSPQVNYPKTLQCANIQLRSDEECRQVYPGKITDNMLCAGTKEGGKDSCEGDSGGPLVCNRTLYGIVSWGDFPCGQPDRPGVYTRVSRYVLWIRETIRKYETQQQKWLKGPQ

SEQ ID NO: 3038 - protein, 963 aa, Homo Sapiens
SLRFDECGASATPGADGGPSGFPERGGNGSLPGSARRNHHAGGDSWQPEAGGVASPGTTSAQPPSEEEREPWEPWTQLRLSGHLKPLHYNLMLTAFMENFTFSGEVNVEIACRNATRYVVLHASRVAVEKVQLAEDRAFGAVPVAGFFLYPQTQVLVVVLNRTLDAQRNYNLKIIYNALIENELLGFFRSSYVLHGERRFLGVTQFSPTHARKAFPCFDEPIYKATFKISIKHQATYLSLSNMPVETSVFEEDGWVTDHFSQTPLMSTYYLAWAICNFTYRETTTKSGVVVRLYARPDAIRRGSGDYALHITKRLIEFYEDYFKVPYSLPKLDLLAVPKHPYAAMENWGLSIFVEQRILLDPSVSSISYLLDVTMVIVHEICHQWFGDLVTPVWWEDVWLKEGFAHYFEFVGTDYLYPGWNMEKQRFLTDVLHEVMLLDGLASSHPVSQEVLQATDIDRVFDWIAYKKGAALIRMLANFMGHSVFQRGLQDYLTIHKYGNAARNDLWNTLSEALKRNGKYVNIQEVMDQWTLQMGYPVITILGNTTAENRIIITQQHFIYDISAKTKALKLQNNSYLWQIPLTIVVGNRSHVSSEAIIWVSNKSEHHRITYLDKGSWLLGNINQTGYFRVNYDLRNWRLLIDQLIRNHEVLSVSNRAGLIDDAFSLARAGYLPQNIPLEIIRYLSEEKDFLPWHAASRALYPLDKLLDRMENYNIFNEYILKQVATTYIKLGWPKNNFNGSLVQASYQHEELRREVIMLACSFGNKHCHQQASTLISDWISSNRNRIPLNVRDIVYCTGVSLLDEDVWEFIWMKFHSTTAVSEKKILLEALTCSDDRNLLNRLLNLSLNSEVVLDQDAIDVIIHVARNPHGRDLAWKFFRDKWKILNTRYGEALFMNSKLISGVTEFLNTEGELKELKNFMKNYDGVAAASFSRAVETVEANVRWKMLYQDELFQWLGKALRH

SEQ ID NO: 3039 - protein, 127 aa, Homo Sapiens
TRGIKHRIKWNRKALPSTAQITEAQVAENRPGAFIKQGRKLDIDFGAEGNRYYEANYWQFPDGIHYNGCSEANVTKEAFVTGCINATQAANQGEFQKPDNKLHQQVLWRLVQELCSLKHCEFWLERG

SEQ ID NO: 3040 - protein, 392 aa, Homo Sapiens
QSPERPVFTCGGILTGESGFIGSEGFPGVYPPNSKCTWKITVPEGKVVVLNFRFIDLESDNLCRYDFVDVYNGHANGQRIGRFCGTFRPGALVSSGNKMMVQMISDANTAGNGFMAMFSAAEPNERGDQYCGGLLDRPSGSFKTPNWPDRDYPAGVTCVWHIVAPKNQLIELKFEKFDVERDNYCRYDYVAVFNGGEVNDARRIGKYCGDSPPAPIVSERNELLIQFLSDLSLTADGFIGHYIFRPKKLPTTTEQPVTTTFPVTTGLKPTVALCQQKCRRTGTLEGNYCSSDFVLAGTVITTITRDGSLHATVSIINIYKEGNLAIQQAGKNMSARLTVVCKQCPLLRRGLNYIIMGQVGEDGRGKIMPNSFIMMFKTKNQKLLDALKNKQC

SEQ ID NO: 3041 - protein, 880 aa, Homo Sapiens
YITDENPEVMIPFTNANYDSHPMLYFSRAEVAELQLRAASSHEHIAARLTEAVHTMLSSPLEYLPPWDPKDYSARWNEIFGNNLGALAMFCVLYPENIEARDMAKDYMERMAAQPSWLVKDAPWDEVPLAHSLVGFATAYDFLYNYLSKTQQEKFLEVIANASGYMYETSYRRGWGFQYLHNHQPTNCMALLTGSLVLMNQGYLQEAYLWTKQVLTIMEKSLVLLREVTDGSLYEGVAYGSYTTRSLFQYMFLVQRHFNINHFGHPWLKQHFAFMYRTILPGFQRTVAIADSNYNWFYGPESQLVFLDKFVMRNGSGNWLADQIRRNRVVEGPGTPSKGQRWCTLHTEFLWYDGSLKSVPPPDFGTPTLHYFEDWGVVTYGSALPAEINRSFLSFKSGKLGGRAIYDIVHRNKYKDWIKGWRNFNAGHEHPDQNSFTFAPNGVPFITEALYGPKYTFFNNVLMFSPAVSKSCFSPWVGQVTEDCSSKWSKYKHDLAASCQGRVVAAEEKNGVVFIRGEGVGAYNPQLNLKNVQRNLILLHPQLLLLVDQIHLGEESPLETAASFFHNVDVPFEETVVDGVHGAFIRQRDGLYKMYWMDDTGYSEKATFASVTYPRGYPYNGTNYVNVTMHLRSPITRAAYLFIGPSIDVQSFTVHGDSQQLDVFIATSKHAYATYLWTGEATGQSAFAQVIADRHKILFDRNSAIKSSIVPEVKDYAAIVEQNLQHFKPVFQLLEKQILSRVRNTASFRKTAERLLRFSDKRQTEEAIDRIFAISQQQQQQSKSKKNRRAGKRYKFVDAVPDIFAQIEVNEKKIRQKAQILAQKELPIDEDEEMKDLLDFADVTYEKHKNGGLIKGRFGQARMVTTTHSRAPSLSASYTR

SEQ ID NO: 3042 - protein, 383 aa, Homo Sapiens
HYVRYNQKKTYNYYSTLSFTTDKLYAEFGREASNNFTEMSQRLESMVKNAFYKSPLREEFVKSQVIKFSQQKHGVLAHMLLICRFHSTEDPETVDKIVQLVLHEKLQDAVGPPKVDPHSVKIKKINKTETDSYLNHCCGTRRSKTLGQSLRIVGGTEVEEGEWPWQASLQWDGSHRCGATLINATWLVSAAHCFTTYKNPARWTASFGVTIKPSKMKRGLRRIIVHEKYKHPSHDYDISLAELSSPVPYTNAVHRVCLPDASYEFQPGDVMFVTGFGALKNDGYSQNHLRQAQVTLIDATTCNEPQAYNDAITPRMLCAGSLEGKTDACQGDSGGPLVSSDARDIWYLAGIVSWGDECAKPNKPGVYTRVTALRDWITSKTGI

SEQ ID NO: 3043 - protein, 70 aa, Homo Sapiens
GLNQLYFYYETRAIDEPNNCKGIRCEKQNNAFSTLFETLQSLFWSVFGLLNLYVTNVKARHEFTEFVGAT

SEQ ID NO: 3044 - protein, 186 aa, Homo Sapiens
FGDEEERRCDPIRISMCQNLGYNVTKMPNLVGHELQTDAELQLTTFTPLIQYGCSSQLQFFLCSVYVPMCTEKINIPIGPCGGMCLSVKRRCEPVLKEFGFAWPESLNCSKFPPQNDHNHMCMEGPGDEEVPLPHKTPIQPGEECHSVGTNSDQYIWVKRSLNCVLKCGYDAGLYSRSAKEFTDIW

SEQ ID NO: 3045 - protein, 205 aa, Homo Sapiens
ISSMDMERPGDGKCQPIEIPMCKDIGYNMTRMPNLMGHENQREAAIQLHEFAPLVEYGCHGHLRFFLCSLYAPMCTEQVSTPIPACRVMCEQARLKCSPIMEQFNFKWPDSLDCRKLPNKNDPNYLCMEAPNNGSDEPTRGSGLFPPLFRPQRPHSAQEHPLKDGGPGRGGCDNPGKFHHVEKSASCAPLCTPGVDVYWSREDKR

SEQ ID NO: 3046 - protein, 275 aa, Homo Sapiens
ADGGQHWTYEGPHGQDHWPASYPECGNNAQSPIDIQTDSVTFDPDLPALQPHGYDQPGTEPLDLHNNGHTVQLSLPSTLYLGGLPRKYVAAQLHLHWGQKGSPGGSEHQINSEATFAELHIVHYDSDSYDSLSEAAERPQGLAVLGILIEVGETKNIAYEHILSHLHEVRHKDQKTSVPPFNLRELLPKQLGQYFRYNGSLTTPPCYQSVLWTVFYRRSQISMEQLEKLQGTLFSTEEEPSKLLVQNYRALQPLNQRMVFASFIQAGSSYTTGEM

SEQ ID NO: 3047 - protein, 187 aa, Homo Sapiens
APRPCQAPQQWEGRQVMYQQSSGRNSRALLSYDGLNQRVRVLDERKALIPCKRLFEYILLYKDGVMFQIDQATKQCSKMTLTQPWDPLDIPQNSTFEDQYSIGGPQEQITVQEWSDRKSARSYETWIGIYTVKDCYPVQETFTINYSVILSTRFFDIQLGIKDPSVFTPPSTCQMAQLEKMSEDCSW

SEQ ID NO: 3048 - protein, 275 aa, Homo Sapiens
APAPHRASYKPVIVVHGLFDSSYSFRHLLEYINETHPGTVVTVLDLFDGRESLRPLWEQVQGFREAVVPIMAKAPQGVHLICYSQGGLVCRALLSVMDDHNVDSFISLSSPQMGQYGDTDYLKWLFPTSMRSNLYRICYSPWGQEFSICNYWHDPHHDDLYLNASSFLALINGERDHPNATVWRKNFLRVGHLVLIGGPDDGVITPWQSSFFGFYDANETVLEMEEQLVYLRDSFGLKTLLARGAIVRCPMAGISHTAWHSNRTLYETCIEPWLS

SEQ ID NO: 3049 - protein, 141 aa, Homo Sapiens
GQTPRPAERGPPVRLFTEEELARYGGEEEDQPIYLAVKGVVFDVTSGKEFYGRGAPYNALTGKDSTRGVAKMSLDPADLTHDTTGLTAKELEALDEVFTKVYKAKYPIVGYTARRILNEDGSPNLDFKPEDQPHFDIKDEF

SEQ ID NO: 3050 - protein, 104 aa, Homo Sapiens
YYNVIIAYSLYYMFASFQSELPWKNCSSWSDKNCSRSPIVTHCNVSTVNKGIQEIIQMNKSWVDINNFTCINGSEIYQPGQLPSEQYWNKVALQRSSGMNETGV

SEQ ID NO: 3051 - protein, 247 aa, Homo Sapiens
EGNYPSPIPKFHFEFSSAVPEVVLNLFNCKNCANEAVVQKILDRVLSRYDVRLRPNFGGAPVPVRISIYVTSIEQISEMNMDYTITMFFHQTWKDSRLAYYETTLNLTLDYRMHEKLWVPDCYFLNSKDAFVHDVTVENRVFQLHPDGTVRYGIRLTTTAACSLDLHKFPMDKQACNLVVESYGYTVEDIILFWDDNGNAIHMTEELHIPQFTFLGRTITSKEVYFYTGSYIRLILKFQVQREVNSY

SEQ ID NO: 3052 - protein, 240 aa, Homo Sapiens
VVGGTEAGRNSWPSQISLQYRSGGSRYHTCGGTLIRQNWVMTAAHCVDYQKTFRVVAGDHNLSQNDGTEQYVSVQKIVVHPYWNSDNVAAGYDIALLRLAQSVTLNSYVQLGVLPQEGAILANNSPCYITGWGKTKTNGQLAQTLQQAYLPSVDYAICSSSSYWGSTVKNTMVCAGGDGVRSGCQGDSGGPLHCLVNGKYSVHGVTSFVSSRGCNVSRKPTVFTQVSAYISWINNVIASN

SEQ ID NO: 3053 - protein, 125 aa, Homo Sapiens
GILNLNKMVKQVTGKMPILSYWPYGCHCGLGGRGQPKDATDWCCQTHDCCYDHLKTQGCSIYKDYYRYNFSQGNIHCSDKGSWCEQQLCACDKEVAFCLKRNLDTYQKRLRFYWRPHCRGQTPGC

SEQ ID NO: 3054 - protein, 74 aa, Homo Sapiens
NLTTIASWLSWLQYFSIPRYGFTALQHNEFLGQNFCPGLNATGNNPCNYATCTGEEYLVKQGIDLSPWGLWKNH

SEQ ID NO: 3055 - protein, 457 aa, Homo Sapiens
SLLEPRDPVASSLSPYFGTKTRYEDVNPVLLSGPEAPWRDPELLEGTCTPVQLVALIRHGTRYPTVKQIRKLRQLHGLLQARGSRDGGASSTGSRDLGAALADWPLWYADWMDGQLVEKGRQDMRQLALRLASLFPALFSRENYGRLRLITSSKHRCMDSSAAFLQGLWQHYHPGLPPPDVADMEFGPPTVNDKLMRFFDHCEKFLTEVEKNATALYHVEAFKTGPEMQNILKKVAATLQVPVNDLNADLIQVAFFTCSFDLAIKGVKSPWCDVFDIDDAKVLEYLNDLKQYWKRGYGYTINSRSSCTLFQDIFQHLDKAVEQKQRSQPISSPVILQFGHAETLLPLLSLMGYFKDKEPLTAYNYKKQMHRKFRSGLIVPYASNLIFVLYHCENAKTPKEQFRVQMLLNEKVLPLAYSQETVSFYEDLKNHYKDILQSCQTSEECELARANSTSDEL

SEQ ID NO: 3056 - protein, 423 aa, Homo Sapiens
APPPCRCMTSSSPYQEFLWRMQRPGNIDAPSYRSLSKGTPTFTAHTHMPRNCYHSATLCMHANTHYWTGKMINPSCPGGLGVTVCWTYFTQTGMSDGGGVQDQAREKHVKEVISQLTRVHGTSSPYKGLDLSKLHETLRTHTRLVSLFNTTLTGLHEVSAQNPTNCWICLPLNFRPYVSIPVPEQWNNFSTEINTTSVLVGPLVSNLEITHTSNLTCVKFSNTTYTTNSQCIRWVTPPTQIVCLPSGIFFVCGTSAYRCLNGSSESMCFLSFLVPPMTIYTEQDLYSYVISKPRNKRVPILPFVIGAGVLGALGTGIGGITTSTQFYYKLSQELNGDMERVADSLVTLQDQLNSLAAVVLQNRRALDLLTAERGGTCLFLGEECCYYVNQSGIVTEKVKEIRDRIQRRAEELRNTGPWGLLSQ

SEQ ID NO: 3057 - protein, 712 aa, Homo Sapiens
PKKANSLAPQDLDLEILETVMGQLDAHRIRENLRELSREPHLASSPRDEDLVQLLLQRWKDPESGLDSAEASTYEVLLSFPSQEQPNVVDIVGPTGGIIHSCHRTEENVTGEQGGPDVVQPYAAYAPSGTPQGLLVYANRGAEEDFKELQTQGIKLEGTIALTRYGGVGRGAKAVNAAKHGVAGVLVYTDPADINDGLSSPDETFPNSWYLPPSGVERGSYYEYFGDPLTPYLPAVPSSFRVDLANVSGFPPIPTQPIGFQDARDLLCNLNGTLAPATWQGALGCHYRLGPGFRPDGDFPADSQVNVSVYNRLELRNSSNVLGIIRGAVEPDRYVLYGNHRDSWVHGAVDPSSGTAVLLELSRVLGTLLKKGTWRPRRSIVFASWGAEEFGLIGSTEFTEEFFNKLQERTVAYINVDISVFANATLRVQGTPPVQSVVFSATKEIRSPGPGDLSIYDNWIRYFNRSSPVYGLVPSLGSLGAGSDYAPFVHFLGISSMDIAYTYDRSKTSARIYPTYHTAFDTFDYVDKFLDPGFSSHQAVARTAGSVILRLSDSFFLPLKVSDYSETLRSFLQAAQQDLGALLEQHSISLGPLVTAVEKFEAEAAALGQRISTLQKGSPDPLQVRMLNDQLMLLERTFLNPRAFPEERYYSHVLWAPRTGSVVTFPGLSNACSRARDTASGSEAWAEVQRQLSIVVTALEGAAATLRPVADL

SEQ ID NO: 3058 - protein, 433 aa, Homo Sapiens
QPTFINSVLPISAALPSLDQKKRGGHKACCLLTPPPPPLFPPPFFRGGRSPLLSPDMKNLMLELETSQSPCMQGSLGSPGPPGPQGPPGLPGKTGPKGEKGELGRPGRKGRPGPPGVPGMPGPIGWPGPEGPRGEKGDLGMMGLPGSRGPMGSKGYPGSRGEKGSRGEKGDLGPKGEKGFPGFPGMLGQKGEMGPKGEPGIAGHRGPTGRPGKRGKQGQKGDSGVMGPPGKPGPSGQPGRPGPPGPPPAGQLIMGPKGERGFPGPPGRCLCGPTMNVNNPSYGESVYGPSSPRVPVIFVVNNQEELERLNTQNAIAFRRDQRSLYFKDSLGWLPIQLTPFYPVDYTADQHGTCGDGLLQPGEECDDGNSDVGDDCIRCHRAYCGDGHRHEGVEDCDGSDFGYLTCETYLPGSYGDLQCTQYCYIDSTPCRYFT

SEQ ID NO: 3059 - protein, 508 aa, Homo Sapiens
QDVVDLDFFTQEPLHLVSPSFLSVTIDANLATDPRFLILLGSPKLRTLARGLSPAYLRFGGTKTDFLIFDPKKESTFEERSYWQSQVNQDICKYGSIPPDVEEKLRLEWPYQEQLLLREHYQKKFKNSTYSRSSVDVLYTFANCSGLDLIFGLNALLRTADLQWNSSNAQLLLDYCSSKGYNISWELGNEPNSFLKKADIFINGSQLGEDFIQLHKLLRKSTFKNAKLYGPDVGQPRRKTAKMLKSFLKAGGEVIDSVTWHHYYLNGRTATREDFLNPDVLDIFISSVQKVFQVVESTRPGKKVWLGETSSAYGGGAPLLSDTFAAGFMWLDKLGLSARMGIEVVMRQVFFGAGNYHLVDENFDPLPDYWLSLLFKKLVGTKVLMASVQGSKRRKLRVYLHCTNTDNPRYKEGDLTLYAINLHNVTKYLRLPYPFSNKQVDKYLLRPLGPHGLLSKSVQLNGLTLKMVDDQTLPPLMEKPLRPGSSLGLPAFSYSFFVIRNAKVAACI

SEQ ID NO: 3060 - protein, 93 aa, Homo Sapiens
TAQKPYCNTSWILAVGPHLSKAEQLNLTIPQAPNGSFLTCFMYLPVPWNLDSIIQFGLNDTDTCQDGWIYPDAKKRSLINEFDLVCGMETKKD

SEQ ID NO: 3061 - protein, 162 aa, Homo Sapiens
RRSQDLHCGACRALVDELEWEIAQVDPKKTIQMGSFRINPDGSQSVVEVPYARSEAHLTELLEEICDRMKEYGEQIDPSTHRKNYVRVVGRNGESSELDLQGIRIDSDISGTLKFACESIVEEYEDELIEFFSREADNVKDKLCSKRTDLCDHALHISHDEL

SEQ ID NO: 3062 - protein, 413 aa, Homo Sapiens
RRRQAPAGSPRGLRKGAAPARERRGREQSTLESEEWNPWEGDEKNEQQHRFKTSLQILDKSTKGKTDLSVQIWGKAAIGLYLWEHIFEGLLDPSDVTAQWREGKSIVGRTQYSFITGPAVIPGYFSVDVNNVVLILNGREKAKIFYATQWLLYAQNLVQIQKLQHLAVVLLGNEHCDNEWINPFLKRNGGFVELLFIIYDSPWINDVDVFQWPLGVATYRNFPVVEASWSMLHDERPYLCNFLGTIYENSSRQALMNILKKDGNDKLCWVSAREHWQPQETNESLKNYQDALLQSDLTLCPVGVNTECYRIYEACSYGSIPVVEDVMTAGNCGNTSVHHGAPLQLLKSMGAPFIFIKNWKELPAVLEKEKTIILQEKIERRKMLLQWYQHFKTELKMKFTNILESSFLMNNKS

SEQ ID NO: 3063 - protein, 986 aa, Homo Sapiens
AGPIRAFVVPHSHMDVGWVYTVQESMRAYAANVYTSVVEELARGQQRRFIAVEQEFFRLWWDGVASDQQKYQVRQLLEEGRLEFVIGGQVMHDEAVTHLDDQILQLTEGHGFLYETFGIRPQFSWHVDPFGASATTPTLFALAGFNAHLGSRIDYDLKAAMQEARGLQFVWRGSPSLSERQEIFTHIMDQYSYCTPSHIPFSNRSGFYWNGVAVFPKPPPDGVYPNMSEPVTPANINLYAEALVANVKQRAAWFRTPHVLWPWGCDKQFFNASVQFANMDPLLDHINSHAAELGVSVQYATLGDYFRALHALNVTWRVRDHHDFLPYSTEPFQAWTGFYTSRSSLKGLARRASALLYAGESMFTRYLWPAPRGHLDPTWALQQLQQLRWAVSEVQHHDAITGTESPKVRDMYATHLASGMLGVRKLMASIVLDELQPQAPMAASSDAGPAGHFASVYNPLAWTVTTIVTLTVGFPGVRVTDEAGHPVPSQIQNSTETPSAYDLLILTTIPGLSYRHYSIRPTAGAQEGTQEPAATVASTLQFGRRLRRRTSHAGRYLVPVANDCYIVLLDQDTNLMHSIWERQSNRTVRVTQEFLEYHVNGDVKQGPISDNYLFTPGKAAVPAWEAVEMEIVAGQLVTEIRQYFYRNMTAQNYTYAIRSRLTHVPQGHDGELLCHRIEQEYQAGPLELNREAVLRTSTNLNSQQVIYSDNNGYQMQRRPYVSYVNNSIARNYYPMVQSAFMEDGKSRLVLLSERAHGISSQGNGQVEVMLHRRLWNNFDWDLGYNLTLNDTSVVHPVLWLLLGSWSLTTALRQRSALALQHRPVVLFGDLAGTAPKLPGPQQQEAVTLPPNLHLQILSIPGWRYSSNHTEHSQNLRKGHRGEAQADLRRVLLRLYHLYEVGEDPVLSQPVTVNLEAVLQALGSVVAVEERSLTGTWDLSMLHRWSWRTGPGRHRGDTTSPSRPPGGPIITVHPKEIRTFFIHFQQQ

SEQ ID NO: 3064 - protein, 408 aa, Homo Sapiens
SGQEFWPGQSAADILSGAASRRRYLLYDVNPPEGFNLRRDVYIRIASLLKTLLKTEEWVLVLPPWGRLYHWQSPDIHQVRIPWSEFFDLPSLNKNIPVIEYEQFIAESGGPFIDQVYVLQSYAEGWKEGTWEEKVDERPCIDQLLYSQDKHEYYRGWFWGYEETRGLNVSCLSVQGSASIVAPLLLRNTSARSVMLDRAENLLHDHYGGKEYWDTRRSMVFARHLREVGDEFRSRHLNSTDDADRIPFQEDWMKMKVKLGSALGGPYLGVHLRRKDFIWGHRQDVPSLEGAVRKIRSLMKTHRLDKVFVATDAVRKEYEELKKLLPEMVRFEPTWEELELYKDGGVAIIDQWICAHARFFIGTSVSTFSFRIHEEREILGLDPKTTYNRFCGDQEKACEQPTHWKITY

SEQ ID NO: 3065 - protein, 226 aa, Homo Sapiens
QAFSDSNDERESSPPEKEEAQEKTGKTEPSFTKENSSKIPKKGFVEVTELTDVTYTSNLVRLRPGHMNVVLILSNSTKTSLLQKFALEVYTFTGSSCLHFSFLSLDKHREWLEYLLEFAQDAAPIPNQYDKHFMERDYTGYVLALNGHKKYFCLFKPQKTVEEEEAIGSCSDVDSSLYLGESRGKPSCGLGSRPIKGKLSKLSLWMERLLEGSLQRFYIPSWPELD

SEQ ID NO: 3066 - protein, 54 aa, Homo Sapiens
LPTQREDGNPCDFDWREVEILMFLSAIVMMKNRRSITVEQHIGNIFMFSKVANT

SEQ ID NO: 3067 - protein, 271 aa, Homo Sapiens
VTEHVLANNDVSCDHPSNTVPSGSNQDLGAGAGEDARSDDSSSRIINGSDCDMHTQPWQAALLLRPNQLYCGAVLVHPQWLLTAAHCRKKVFRVRLGHYSLSPVYESGQQMFQGVKSIPHPGYSHPGHSNDLMLIKLNRRIRPTKDVRPINVSSHCPSAGTKCLVSGWGTTKSPQVHFPKVLQCLNISVLSQKRCEDAYPRQIDDTMFCAGDKAGRDSCQGDSGGPVVCNGSLQGLVSWGDYPCARPNRPGVYTNLCKFTKWIQETIQANS

SEQ ID NO: 3068 - protein, 102 aa, Homo Sapiens
CYTLFYLFASFVSVLPWGSCNNPWNTPECKDKTKLLLDSCVISDHPKIQIKNSTFCMTAYPNVTMVNFTSQANKTFVSGSEEYFKYFVLKISAGIEYPGEIR

SEQ ID NO: 3069 - protein, 311 aa, Homo Sapiens
DGDLTLLWAEWQGRRPEWELTDMVVWVTGASSGIGEELAYQLSKLGVSLVLSARRVHELERVKRRCLENGNLKEKDILVLPLDLTDTGSHEAATKAVLQEFGRIDILVNNGGMSQRSLCMDTSLDVYRKLIELNYLGTVSLTKCVLPHMIERKQGKIVTVNSILGIISVPLSIGYCASKHALRGFFNGLRTELATYPGIIVSNICPGPVQSNIVENSLAGEVTKTIGNNGDQSHKMTTSRCVRLMLISMANDLKEVWISEQPFLLVTYLWQYMPTWAWWITNKMGKKRIENFKSGVDADSSYFKIFKTKHD

SEQ ID NO: 3070 - protein, 749 aa, Homo Sapiens
QYDSWPHYPEYFQQPAPEYHQPQAPANVAKIQLRLAGQKRKHSEGRVEVYYDGQWGTVCDDDFSIHAAHVVCRELGYVEAKSWTASSSYGKGEGPIWLDNLHCTGNEATLAACTSNGWGVTDCKHTEDVGVVCSDKRIPGFKFDNSLINQIENLNIQVEDIRIRAILSTYRKRTPVMEGYVEVKEGKTWKQICDKHWTAKNSRVVCGMFGFPGERTYNTKVYKMFASRRKQRYWPFSMDCTGTEAHISSCKLGPQVSLDPMKNVTCENGLPAVVSCVPGQVFSPDGPSRFRKAYKPEQPLVRLRGGAYIGEGRVEVLKNGEWGTVCDDKWDLVSASVVCRELGFGSAKEAVTGSRLGQGIGPIHLNEIQCTGNEKSIIDCKFNAESQGCNHEEDAGVRCNTPAMGLQKKLRLNGGRNPYEGRVEVLVERNGSLVWGMVCGQNWGIVEAMVVCRQLGLGFASNAFQETWYWHGDVNSNKVVMSGVKCSGTELSLAHCRHDGEDVACPQGGVQYGAGVACSETAPDLVLNAEMVQQTTYLEDRPMFLLQCAMEENCLSASAAQTDPTTGYRRLLRFSSQIHNNGQSDFRPKNGRHAWIWHDCHRHYHSMEVFTHYDLLNLNGTKVAEGHKASFCLEDTECEGDIQKNYECANFGDQGITMGCWDMYRHDIDCQWVDITDVPPGDYLFQVVINPNFEVAESDYSNNIMKCRSRYDGHRIWMYNCHIGGSFSEETEKKFEHFSGLLNNQLSPQ

SEQ ID NO: 3071 - protein, 460 aa, Homo Sapiens
EHSENVHISGVSTACGETPEQIRAPSGIITSPGWPSEYPAKINCSWFIRANPGEIITISFQDFDIQGSRRCNLDWLTIETYKNIESYRACGSTIPPPYISSQDHIWIRFHSDDNISRKGFRLAYFSGKSEEPNCACDQFRCGNGKCIPEAWKCNNMDECGDSSDEEICAKEANPPTAAAFQPCAYNQFQCLSRFTKVYTCLPESLKCDGNIDCLDLGDEIDCDVPTCGQWLKYFYGTFNSPNYPDFYPPGSNCTWLIDTGDHRKVILRFTDFKLDGTGYGDYVKIYDGLEENPHKLLRVLTAFDSHAPLTVVSSSGQIRVHFCADKVNAARGFNATYQVDGFCLPWEIPCGGNWGCYTEQQRCDGYWHCPNGRDETNCTMCQKEEFPCSRNGVCYPRSDRCNYQNHCPNGSDEKNCFFCQPGNFHCKNNRCVFESWVCDSQDDCGDGSDEENCPVIVPTR

SEQ ID NO: 3072 - protein, 56 aa, Homo Sapiens
WTDCWMVNADDSLEVSTKCRGLWWECVTNAFDGIRTCDEYDSILAEHPLKLVVTRA

SEQ ID NO: 3073 - protein, 224 aa, Homo Sapiens
IINGEDCSPHSQPWQAALVMENELFCSGVLVHPQWVLSAAHCFQNSYTIGLGLHSLEADQEPGSQMVEASLSVRHPEYNRPLLANDLMLIKLDESVSESDTIRSISIASQCPTAGNSCLVSGWGLLANGRMPTVLQCVNVSVVSEEVCSKLYDPLYHPSMFCAGGGQDQKDSCNGDSGGPLICNGYLQGLVSFGKAPCGQVGVPGVYTNLCKFTEWIEKTVQAS

SEQ ID NO: 3074 - protein, 434 aa, Homo Sapiens
TRDVREPPALKYGIVLDAGSSHTSMFIYKWPADKENDTGIVGQHSSCDVPGGGISSYADNPSGASQSLVGCLEQALQDVPKERHAGTPLYLGATAGMRLLNLTNPEASTSVLMAVTHTLTQYPFDFRGARILSGQEEGVFGWVTANYLLENFIKYGWVGRWFRPRKGTLGAMDLGGASTQITFETTSPAEDRASEVQLHLYGQHYRVYTHSFLCYGRDQVLQRLLASALQTHGFHPCWPRGFSTQVLLGDVYQSPCTMAQRPQNFNSSARVSLSGSSDPHLCRDLVSGLFSFSSCPFSRCSFNGVFQPPVAGNFVAFSAFFYTVDFLRTSMGLPVATLQQLEAAAVNVCNQTWAQLQARVPGQRARLADYCAGAMFVQQLLSRGYGFDERAFGGVIFQKKAADTAVGWALGYMLNLTNLIPADPPGLRKGTDFS

SEQ ID NO: 3075 - protein, 169 aa, Homo Sapiens
RGQTEESMNESHPRKCAESFEMWDDRDSHCRRPKFEGHPPESWKWILAPVILYICERILRFYRSQQKVVITKVVMHPSKVLELQMNKRGFSMEVGQYIFVNCPSISLLEWHPFTLTSAPEEDFFSIHIRAAGDWTENLIRAFEQQYSPIPRIEVDGPFGTASEDVFQYE

SEQ ID NO: 3076 - protein, 480 aa, Homo Sapiens
SPVPFGPEGRLEDKLHKPKATQTEVKPSVRFNLRTSKDPEHEGCYLSVGHSQPLEDCSFNMTAKTFFIIHGWTMSGIFENWLHKLVSALHTREKDANVVVVDWLPLAHQLYTDAVNNTRVVGHSIARMLDWLQEKDDFSLGNVHLIGYSLGAHVAGYAGNFVKGTVGRITGLDPAGPMFEGADIHKRLSPDDADFVDVLHTYTRSFGLSIGIQMPVGHIDIYPNGGDFQPGCGLNDVLGSIAYGTITEVVKCEHERAVHLFVDSLVNQDKPSFAFQCTDSNRFKKGICLSCRKNRCNSIGYNAKKMRNKRNSKMYLKTRAGMPFRVYHYQMKIHVFSYKNMGEIEPTFYVTLYGTNADSQTLPLEIVERIEQNATNTFLVYTEEDLGDLLKIQLTWEGASQSWYNLWKEFRSYLSQPRNPGRELNIRRIRVKSGETQRKLTFCTEDPENTSISPGQELWFRKCRDGWRMKNETSPTVELP

SEQ ID NO: 3077 - protein, 779 aa, Homo Sapiens
WHLQYRDVRVQKVFNGYMRITNENFVDAYENSNSTEFVSLASKVKDALKLLYSGVPFLGPYHKESAVTAFSEGSVIAYYWSEFSIPQHLVEEAERVMAEERVVMLPPRARSLKSFVVTSVVAFPTDSKTVQRTQDNSCSFGLHARGVELMRFTTPGFPDSPYPAHARCQWALRGDADSVLSLTFRSFDLASCDERGSDLVTVYNTLSPMEPHALVQLCGTYPPSYNLTFHSSQNVLLITLITNTERRHPGFEATFFQLPRMSSCGGRLRKAQGTFNSPYYPGHYPPNIDCTWNIEVPNNQHVKVRFKFFYLLEPGVPAGTCPKDYVEINGEKYCGERSQFVVTSNSNKITVRFHSDQSYTDTGFLAEYLSYDSSDPCPGQFTCRTGRCIRKELRCDGWADCTDHSDELNCSCDAGHQFTCKNKFCKPLFWVCDSVNDCGDNSDEQGCSCPAQTFRCSNGKCLSKSQQCNGKDDCGDGSDEASCPKVNVVTCTKHTYRCLNGLCLSKGNPECDGKEDCSDGSDEKDCDCGLRSFTRQARVVGGTDADEGEWPWQVSLHALGQGHICGASLISPNWLVSAAHCYIDDRGFRYSDPTQWTAFLGLHDQSQRSAPGVQERRLKRIISHPFFNDFTFDYDIALLELEKPAEYSSMVRPICLPDASHVFPAGKAIWVTGWGHTQYGGTGALILQKGEIRVINQTTCENLLPQQITPRMMCVGFLSGGVDSCQGDSGGPLSSVEADGRIFQAGVVSWGDGCAQRNKPGVYTRLPLFRDWIKENTGV

SEQ ID NO: 3078 - protein, 219 aa, Homo Sapiens
LVQGSLRAEELSIQVSCRIMGITLVSKKANQQLNFTEAKEACRLLGLSLAGKDQVETALKASFETCSYGWVGDGFVVISRISPNPKCGKNGVGVLIRKVPVSRQFAAYCYNSSDTWTNSCIPEIITTKDPIFNTQTATQTTEFIVSDSTYSVASPYSTIPAPTTTPPAPASTSIPRRKKLICVTEVFMETSTMSTETEPFVENKAAFKNEAAGFGGVPT

SEQ ID NO: 3079 - protein, 453 aa, Homo Sapiens
APELAPAPFTLPLRVAAATNRVVAPTPGPGTPAERHADGLALALEPALASPAGAANFLAMVDNLQGDSGRGYYLEMLIGTPPQKLQILVDTGSSNFAVAGTPHSYIDTYFDTERSSTYRSKGFDVTVKYTQGSWTGFVGEDLVTIPKGFNTSFLVNIATIFESENFFLPGIKWNGILGLAYATLAKPSSSLETFFDSLVTQANIPNVFSMQMCGAGLPVAGSGTNGGSLVLGGIEPSLYKGDIWYTPIKEEWYYQIEILKLEIGGQSLNLDCREYNADKAIVDSGTTLLRLPQKVFDAVVEAVARASLIPEFSDGFWTGSQLACWTNSETPWSYFPKISIYLRDENSSRSFRITILPQLYIQPMMGAGLNYECYRFGISPSTNALVIGATVMEGFYVIFDRAQKRVGFAASPCAEIAGAAVSEISGPFSTEDVASNCVPAQSLSEPILWIVSY

SEQ ID NO: 3080 - protein, 506 aa, Homo Sapiens
DVKARSCGEVRQAYGAKGFSLADIPYQEIAGEHLRICPQEYTCCTTEMEDKLSQQSKLEFENLVEETSHFVRTTFVSRHKKFDEFFRELLENAEKSLNDMFVRTYGMLYMQNSEVFQDLFTELKRYYTGGNVNLEEMLNDFWARLLERMFQLINPQYHFSEDYLECVSKYTDQLKPFGDVPRKLKIQVTRAFIAARTFVQGLTVGREVANRVSKVSPTPGCIRALMKMLYCPYCRGLPTVRPCNNYCLNVMKGCLANQADLDTEWNLFIDAMLLVAERLEGPFNIESVMDPIDVKISEAIMNMQENSMQVSAKVFQGCGQPKPAPALRSARSAPENFNTRFRPYNPEERPTTAAGTSLDRLVTDIKEKLKLSKKVWSALPYTICKDESVTAGTSNEEECWNGHSKARYLPEIMNDGLTNQINNPEVDVDITRPDTFIRQQIMALRVMTNKLKNAYNGNDVNFQDTSDESSGSGSGSGCMDDVCPTEFEFVTTEAPAVDPDRREVDS

SEQ ID NO: 3081 - protein, 428 aa, Homo Sapiens
DVAKAIINLAVYGKAQNRSYERLALLVDTVGPRLSGSKNLEKAIQIMYQNLQQDGLEKVHLEPVRIPHWERGEESAVMLEPRIHKIAILGLGSSIGTPPEGITAEVLVVTSFDELQRRASEARGKIVVYNQPYINYSRTVQYRTQGAVEAAKVGALASLIRSVASFSIYSPHTGIQEYQDGVPKIPTACITVEDAEMMSRMASHGIKIVIQLKMGAKTYPDTDSFNTVAEITGSKYPEQVVLVSGHLDSWDVGQGAMDDGGGAFISWEALSLIKDLGLRPKRTLRLVLWTAEEQGGVGAFQYYQLHKVNISNYSLVMESDAGTFLPTGLQFTGSEKARAIMEEVMSLLQPLNITQVLSHGEGTDINFWIQAGVPGASLLDDLYKYFFFHHSHGDTMTVMDPKQMNVAAAVWAVVSYVVADMEEMLPRS

SEQ ID NO: 3082 - protein, 199 aa, Homo Sapiens
QRQKKEESTEEVKIEVLHRPENCSKTSKKGDLLNAHYDGYLAKDGSKFYCSRTQNEGHPKWFVLGVGQVIKGLDIAMTDMCPGEKRKVVIPPSFAYGKEGYAEGKIPPDATLIFEIELYAVTKGPRSIETFKQIDMDNDRQLSKAEINLYLQREFEKDEKPRDKSYQDAVLEDIFKKNDHDGDGFISPKEYNVYQHDEL

SEQ ID NO: 3083 - protein, 127 aa, Homo Sapiens
TLLRSYMQSVWTEESQCTLLNASITETFNCSFSCGPDCWKLSQYPCLQVYVNLTSSGEKLLLYHTEETIKINQKCSYIPKCGKNFEESMSLVNVVMENFRKYQHFSCYSDPEGNQKSVILTKLYSSN

SEQ ID NO: 3084 - protein, 62 aa, Homo Sapiens
TSCVGFFMPYWLWGSQLGKPVSFGTFRRCSYPVHDESRQMMVMVEECGRYASFQGIPSAEWR

SEQ ID NO: 3085 - protein, 314 aa, Homo Sapiens
ETNLEQLWVEVGSRVSQELHYTKEKLGEEAAYTSQMLIQTARQEGENILTPEALGLHLQAALTASKVQVSLYGKSWDLNKICYKSGVPLIENGMIERMIEKLFPCVILTPLDCFWEGAKLQGGSAYLPGRPDIQWTNLDPEQLLEELGPFASLEGFRELLDKAQVGQAYVGRPCLHPDDLHCPPSAPNHHSRQAPNVAHELSGGCHGFSHKFMHWQEELLLGGMARDPQGELLRAEALQSTFLLMSPRQLYEHFRGDYQTHDIGWSEEQASTVLQAWQRRFVQLAQEALPENASQQIHAFSSTTLDDILHAFSE

SEQ ID NO: 3086 - protein, 281 aa, Homo Sapiens
GVEVSAGSPPIRNVTVAYKFHMGLYGETGRLFTESCSISPKLRSIAVYYDNPHMVPPDKCRCAVGSILSEGEESPSPELIDLYQKFGFKVFSFPAPSHVVTATFPYTTILSIWLATRRVHPALDTYIKERKLCAYPRLEIYQEDQIHFMCPLARQGDFYVPEMKETEWKWRGLVEAIDTQVDGTGADTMSDTSSVSLEVSPGSRETSAATLSPGASSRGWDDGDTRSEHSYSESGASGSSFEELDLEGEGPLGESRLDPGTEPLGTTKWLWEPTAPEKGKE

SEQ ID NO: 3087 - protein, 112 aa, Homo Sapiens
FFILCENKSVAGLTMTYDGNNPVTSHRDVPLSYCNSDCNCDESQWEPVCGNNGITYISPCLAGCKSSSGNKKPIVFYNCSCLEVTGLQNRNYSAHLGECPRDDACTRKFYFF

SEQ ID NO: 3088 - protein, 247 aa, Homo Sapiens
IVGGEDAELGRWPWQGSLRLWDSHVCGVSLLSHRWALTAAHCFETYSDLSDPSGWMVQFGQLTSMPSFWSLQAYYTRYFVSNIYLSPRYLGNSPYDIALVKLSAPVTYTKHIQPICLQASTFEFENRTDCWVTGWGYIKEDEALPSPHTLQEVQVAIINNSMCNHLFLKYSFRKDIFGDMVCAGNAQGGKDACFGDSGGPLACNKNGLWYQIGVVSWGVGCGRPNRPGVYTNISHHFEWIQKLMAQS

SEQ ID NO: 3089 - protein, 608 aa, Homo Sapiens
MERFRLEKKLPGPDEEAVVDLGKTSSTVNTKFEKEELESHRAVYIGVHVPFSKESRRRHRHRGHKHHHRRRKDKESDKEDGRESPSYDTPSQRVQFILGTEDDDEEHIPHDLFTEMDELCYRDGEEYEWKETARWLKFEEDVEDGGDRWSKPYVATLSLHSLFELRSCILNGTVMLDMRASTLDEIADMVLDNMIASGQLDESIRENVREALLKRHHHQNEKRFTSRIPLVRSFADIGKKHSDPHLLERNGEGLSASRHSLRTGLSASNLSLRGESPLSLLLGHLLPSSRAGTPAGSRCTTPVPTPQNSPPSSPSISRLTSRSSQESQRQAPELLVSPASDDIPTVVIHPPEEDLEAALKGEEQKNEENVDLTPGILASPQSAPGNLDNSKSGEIKGNGSGGSRENSTVDFSKVDMNFMRKIPTGAEASNVLVGEVDFLERPIIAFVRLAPAVLLTGLTEVPVPTRFLFLLLGPAGKAPQYHEIGRSIATLMTDEIFHDVAYKAKDRNDLLSGIDEFLDQVTVLPPGEWDPSIRIEPPKSVPSQEKRKIPVFHNGSTPTLGETPKEAAHHAGPELQRTGRLFGGLILDIKRKAPFFLSDFKDALSLQC

SEQ ID NO: 3090 - protein, 207 aa, Homo Sapiens
DGSEPAAGAGRGGARAVRVDVRLPRQDALVLEGVRIGSEADPAPLLGGRLLLMDIVDAEQEAPVEGWIAVAYVGKEQAAQFHQENKGSGPQAYPKALVQQMRRALFLGASALLLLILNHNVVRELDISQLLLRPVIVLHYSSNVTKLLDALLQRTQATAEITSGESLSANIEWKLTLWTTCGLSKDGYGGWQDLVCLGGSRAQEQKP

SEQ ID NO: 3091 - protein, 392 aa, Homo Sapiens
FRSDSSSSLPPKLLLVSFDGFRADYLKNYEFPHLQNFIKEGVLVEHVKNVFITKTFPNHYSIVTGLYEESHGIVANSMYDAVTKKHFSDSNDKDPFWWNEAVPIWVTNQLQENRSSAAAMWPGTDVPIHDTISSYFMNYNSSVSFEERLNNITMWLNNSNPPVTFATLYWEEPDASGHKYGPEDKENMSRVLKKIDDLIGDLVQRLKMLGLWENLNVIITSDHGMTQCSQDRLINLDSCIDHSYYTLIDLSPVAAILPKINRTEVYNKLKNCSPHMNVYLKEDIPNRFYYQHNDRIQPIILVADEGWTIVLNESSQKLGDHGYDNSLPSMHPFLAAHGPAFHKGYKHSTINIVDIYPMMCHILGLKPHPNNGTFGHTKCLLVDQWCINLPEA

SEQ ID NO: 3092 - protein, 142 aa, Homo Sapiens
QKQYWVCNSSDASISYTYCDKMQYPISINVNPCIELKGSKGLLHIFYIPRRDLKQLYFNLYITVNTMNLPKRKEVICRGSDDDYSFCRALKGETVNTTISFSFKGIKFSKGKYKCVVEAISGSPEEMLFCLEFVILHQPNSN

SEQ ID NO: 3093 - DNA, 1422 bp, Homo Sapiens
gccatattttatgagacgcagcccagcctgtgggcagagtccgaatcactgctgaaacccttggccaatgtgacgctgacgtgccaggcccgcctggagactccagacttccagctgttcaagaatggggtggcccaggagcctgtgcaccttgactcacctgccatcaagcaccagttcctgctgacgggtgacacccagggccgctaccgctgccgctcgggcttgtccacaggatggacccagctgagcaagctcctggagctgacagggccaaagtccttgcctgctccctggctctcgatggcgccagtgtcctggatcacccccggcctgaaaacaacagcagtgtgccgaggtgtgctgcggggtgtgacttttctgctgaggcgggagggcgaccatgagtttctggaggtgcctgaggcccaggaggatgtggaggccacctttccagtccatcagcctggcaactacagctgcagctaccggaccgatggggaaggcgccctctctgagcccagcgctactgtgaccattgaggagctcgctgcaccaccaccgcctgtgctgatgcaccatggagagtcctcccaggtcctgcaccctggcaacaaggtgaccctcacctgcgtggctcccctgagtggagtggacttccagctacggcgcggggagaaagagctgctggtacccaggagcagcaccagcccagatcgcatcttctttcacctgaacgcggtggccctgggggatggaggtcactacacctgccgctaccggctgcatgacaaccaaaacggctggtccggggacagcgcgccggtcgagctgattctgagcgatgagacgctgcccgcgccggagttctccccggagccggagtccggcagggccttgcggctgcggtgcctggcgcccctggagggcgcgcgcttcgccctggtgcgcgaggacaggggcgggcgccgcgtgcaccgtttccagagccccgctgggaccgaggcgctcttcgagctgcacaacatttccgtggctgactccgccaactacagctgcgtctacgtggacctgaagccgcctttcgggggctccgcgcccagcgagcgcttggagctgcacgtggacggaccccctcccaggcctcagctccgggcgacgtggagtggggcggtcctggcgggccgagatgccgtcctgcgctgcgagggacccatccccgacgtcaccttcgagctgctgcgcgagggcgagacgaaggccgtgaagacggtccgcacccccggggccgcggcgaacctcgagctgatcttcgtggggccccagcacgccggcaactacaggtgccgctaccgctcctgggtgccccacaccttcgaatcggagctcagcgaccctgtggagctcctggtggcagaaagc

SEQ ID NO: 3094 - DNA, 4353 bp, Homo Sapiens
tcagtctctggaaaaccgcagtatatggttctggtcccctccctgctccacactgagaccactgagaagggctgtgtccttctgagctacctgaatgagacagtgactgtaagtgcttccttggagtctgtcaggggaaacaggagcctcttcactgacctggaggcggagaatgacgtactccactgtgtcgccttcgctgtcccaaagtcttcatccaatgaggaggtaatgttcctcactgtccaagtgaaaggaccaacccaagaatttaagaagcggaccacagtgatggttaagaacgaggacagtctggtctttgtccagacagacaaatcaatctacaaaccagggcagacagtgaaatttcgtgttgtctccatggatgaaaactttcaccccctgaatgagttgattccactagtatacattcaggatcccaaaggaaatcgcatcgcacaatggcagagtttccagttagagggtggcctcaagcaattttcttttcccctctcatcagagcccttccagggctcctacaaggtggtggtacagaagaaatcaggtggaaggacagagcaccctttcaccgtggaggaatttgttcttcccaagtttgaagtacaagtaacagtgccaaagataatcaccatcttggaagaagagatgaatgtatcagtgtgtggcctatacacatatgggaagcctgtccctggacatgtgactgtgagcatttgcagaaagtatagtgacgcttccgactgccacggtgaagattcacaggctttctgtgagaaattcagtggacagctaaacagccatggctgcttctatcagcaagtaaaaaccaaggtcttccagctgaagaggaaggagtatgaaatgaaacttcacactgaggcccagatccaagaagaaggaacagtggtggaattgactggaaggcagtccagtgaaatcacaagaaccataaccaaactctcatttgtgaaagtggactcacactttcgacagggaattcccttctttgggcaggtgcgcctagtagatgggaaaggcgtccctataccaaataaagtcatattcatcagaggaaatgaagcaaactattactccaatgctaccacggatgagcatggccttgtacagttctctatcaacaccaccaatgttatgggtacctctcttactgttagggtcaattacaaggatcgtagtccctgttacggctaccagtgggtgtcagaagaacacgaagaggcacatcacactgcttatcttgtgttctccccaagcaagagctttgtccaccttgagcccatgtctcatgaactaccctgtggccatactcagacagtccaggcacattatattctgaatggaggcaccctgctggggctgaagaagctctccttctattatctgataatggcaaagggaggcattgtccgaactgggactcatggactgcttgtgaagcaggaagacatgaagggccatttttccatctcaatccctgtgaagtcagacattgctcctgtcgctcggttgctcatctatgctgttttacctaccggggacgtgattggggattctgcaaaatatgatgttgaaaattgtctggccaacaaggtggatttgagcttcagcccatcacaaagtctcccagcctcacacgcccacctgcgagtcacagcggctcctcagtccgtctgcgccctccgtgctgtggaccaaagcgtgctgctcatgaagcctgatgctgagctctcggcgtcctcggtttacaacctgctaccagaaaaggacctcactggcttccctgggcctttgaatgaccaggacgatgaagactgcatcaatcgtcataatgtctatattaatggaatcacatatactccagtatcaagtacaaatgaaaaggatatgtacagcttcctagaggacatgggcttaaaggcattcaccaactcaaagattcgtaaacccaaaatgtgtccacagcttcaacagtatgaaatgcatggacctgaaggtctacgtgtaggtttttatgagtcagatgtaatgggaagaggccatgcacgcctggtgcatgttgaagagcctcacacggagaccgtacgaaagtacttccctgagacatggatctgggatttggtggtggtaaactcagcaggtgtggctgaggtaggagtaacagtccctgacaccatcaccgagtggaaggcaggggccttctgcctgtctgaagatgctggacttggtatctcttccactgcctctctccgagccttccagcccttctttgtggagctcacaatgccttactctgtgattcgtggagaggccttcacactcaaggccacggtcctaaactaccttcccaaatgcatccgggtcagtgtgcagctggaagcctctcccgccttcctagctgtcccagtggagaaggaacaagcgcctcactgcatctgtgcaaacgggcggcaaactgtgtcctgggcagtaaccccaaagtcattaggaaatgtgaatttcactgtgagcgcagaggcactagagtctcaagagctgtgtgggactgaggtgccttcagttcctgaacacggaaggaaagacacagtcatcaagcctctgttggttgaacctgaaggactagagaaggaaacaacattcaactccctactttgtccatcaggtggtgaggtttctgaagaattatccctgaaactgccaccaaatgtggtagaagaatctgcccgagcttctgtctcagttttgggagacatattaggctctgccatgcaaaacacacaaaatcttctccagatgccctatggctgtggagagcagaatatggtcctctttgctcctaacatctatgtactggattatctaaatgaaacacagcagcttactccagaggtcaagtccaaggccattggctatctcaacactggttaccagagacagttgaactacaaacactatgatggctcctacagcacctttggggagcgatatggcaggaaccagggcaacacctggctcacagcctttgttctgaagacttttgcccaagctcgagcctacatcttcatcgatgaagcacacattacccaagccctcatatggctctcccagaggcagaaggacaatggctgtttcaggagctctgggtcactgctcaacaatgccataaagggaggagtagaagatgaagtgaccctctccgcctatatcaccatcgcccttctggagattcctctcacagtcactcaccctgttgtccgcaatgccctgttttgcctggagtcagcctggaagacagcacaagaaggggaccatggcagccatgtatataccaaagcactgctggcctatgcttttgccctggcaggtaaccaggacaagaggaaggaagtactcaagtcacttaatgaggaagctgtgaagaaagacaactctgtccattgggagcgccctcagaaacccaaggcaccagtggggcatttttacgaaccccaggctccctctgctgaggtggagatgacatcctatgtgctcctcgcttatctcacggcccagccagccccaacctcggaggacctgacctctgcaaccaacatcgtgaagtggatcacgaagcagcagaatgcccagggcggtttctcctccacccaggacacagtggtggctctccatgctctgtccaaatatggagcagccacatttaccaggactgggaaggctgcacaggtgactatccagtcttcagggacattttccagcaaattccaagtggacaacaacaaccgcctgttactgcagcaggtctcattgccagagctgcctggggaatacagcatgaaagtgacaggagaaggatgtgtctacctccagacatccttgaaatacaatattctcccagaaaaggaagagttcccctttgctttaggagtgcagactctgcctcaaacttgtgatgaacccaaagcccacaccagcttccaaatctccctaagtgtcagttacacagggagccgctctgcctccaacatggcgatcgttgatgtgaagatggtctctggcttcattcccctgaagccaacagtgaaaatgcttgaaagatctaaccatgtgagccggacagaagtcagcagcaaccatgtcttgatttaccttgataaggtgtcaaatcagacactgagcttgttcttcacggttctgcaagatgtcccagtaagagatctgaaaccagccatagtgaaagtctatgattactacgagacggatgagtttgcaattgctgagtacaatgctccttgcagcaaagatcttggaaatgct

SEQ ID NO: 3095 - DNA, 3141 bp, Homo Sapiens
cagaaattgccaaaaggtaaaaggccaaacctcaaagtccacatcaataccacaagtgactccatcctcttgaagttcttgcgtccaagtccaaatgtaaagcttgaaggtcttctcctgggatatggcagcaatgtatcaccaaaccagtacttccctcttcccgctgaagggaaattcacagaagctatagttgatgcagagccgaaatatctgatagttgtgcgacctgctccacctccaagtcaaaagaagtcatgttcaggtaaaactcgttctcgcaaacctctgcagctggtggttggcactctgacaccgagctcagtcttcctgtcctggggtttcctcatcaacccacaccatgactggacattgccaagtcactgtcccaatgacagattttatacaattcgctatcgagaaaaggataaagaaaagaagtggatttttcaaatctgtccagccactgaaacaattgtggaaaacctaaagcccaacacagtttatgaatttggagtgaaagacaatgtggaaggtggaatttggagtaagattttcaatcacaagactgttgttggaagtaaaaaagtaaatgggaaaatccaaagtacctatgaccaagaccacacagtgccagcatatgtcccaaggaaactaatcccaataacaatcatcaagcaagtgattcagaatgttactcacaaggattcagctaaatccccagaaaaagctccactgggaggagtgatactagtccaccttattattccaggtcttaatgaaactactgtaaaacttcctgcatccctaatgtttgagatttcagatgcactcaagacacaattagctaagaatgaaaccttggcattacctgccgaatctaaaacaccagaggttgaaaaaatctcagcacgacccacaacagtgactcctgaaacagttccaagaagcactaaacccactacgtctagtgcattagatgtttcagaaacaacactggcttcaagtgaaaagccatggattgtgcctacagctaaaatatctgaagattccaaagttctgcagcctcaaactgcaacttatgatgttttctcaagccctacaacatcagatgagcctgagatatcagattcctacacagcaacaagtgatcgtattctggattctatcccacctaaaacttctagaactcttgaacagccaagggcaacactggctccaagtgaaacaccatttgttcctcaaaaactggaaatctttaccagtccagaaatgcagcctacgacacctgctccccagcaaactacatctatcccttctacacctaaacgacgcccccggcccaaaccgccaagaaccaaacctgaaagaaccacaagtgccggaacaattacacctaaaatttctaaaagccctgaacctacatggacaacaccggctcccggtaaaacacaatttatttctctgaaacctaaaatccctctcagcccagaagtgacacacaccaaacctgctcccaagcagacaccacgtgctcctcctaagccaaaaacatcaccacgcccaagaatcccacaaacacaaccagttcctaaggtgccccagcgtgttactgcaaaaccaaaaacgtcaccaagtccagaagtgtcatacaccacacctgctccaaaagatgtgctccttcctcataaaccataccctgaggtctctcagagcgaacctgctcctctagagacacgaggcatcccttttatacccatgatttccccaagtcctagtcaagaggaactacagaccactctggaagaaacagaccaatccacccaagaacctttcacaactaagattccacgaacaactgaactagcaaagacaactcaggcgccacacagattttatactactgtgaggcccagaacatctgacaagccacacatcagacctggggtcaagcaagcacccaggccatcaggtgctgatagaaatgtatcagtggactctacccaccccactaaaaagccagggactcgccgcccacccttgccacccagacctacacacccacgaagaaaacctttaccaccaaataatgtcactggaaagccaggaagtgcaggaatcatttcatcaggcccaataactacaccacccctgaggtcaacacccaggcctactggaactcccttggagagaatagagacagatataaagcaaccaacagttcctgcctctggagaagaactggaaaatataactgactttagctcaagcccaacaagagaaactgatcctcttgggaagccaagattcaaaggacctcatgtgcgatacatccaaaagcctgacaacagtccctgctccattactgactctgtcaaacggttccccaaagaggaggccacagaggggaatgccaccagcccaccacagaacccacccaccaacctcactgtggtcaccgtggaagggtgcccctcatttgtcatcttggactgggaaaagccactaaatgacactgtcactgaatatgaagttatatccagagaaaatgggtcattcagtgggaagaacaagtccattcaaatgacaaatcagacattttccacagtagaaaatctgaaaccaaacacgagttatgaattccaggtgaaacccaaaaacccgcttggtgaaggcccggtcagcaacacagtggcattcagtactgaatcagcggacccaagagtgagtgagccagtttctgcaggaagagatgccatctggactgaaagaccctttaattcagactcttactcagagtgtaagggcaaacaatatgtcaaaaggacatggtataaaaaatttgtaggagtgcagctgtgcaactctctcagatacaagatttacttgagcgactccctcacaggaaaattttataacataggtgatcagaggggccatggagaagatcactgccagtttgtggattcatttttagatggacgcactgggcagcaactcacttctgaccagttaccaatcaaagaaggttatttcagagcagttcgccaggaacctgtccaatttggagaaataggtggtcacacccaaatcaattatgttcagtggtatgaatgtgggactacaattcctggaaaatgg

SEQ ID NO: 3096 - DNA, 342 bp, Homo Sapiens
ccccaaccgtccccgctgagggtcctcctggggacctccctcaccatcccctgctatttcatcgaccccatgcaccctgtgaccaccgccccttctaccgccccactggccccaagaatcaagtggagccgtgtgtccaaggagaaggaggtagtgctgctggtggccactgaagggcgcgtgcgggtcaacagtgcctatcaggacaaggtctcactgcccaactacccggccatccccagtgacgccaccttggaagtccagagcctgcgctccaatgactctggggtctaccgctgcgaggtgatgcatggcatcgaggacagcgaggccaccctggaa

SEQ ID NO: 3097 - DNA, 2169 bp, Homo Sapiens
cagtccaccattgaggaacaggccaagacatttttggacaagtttaaccacgaagccgaagacctgttctatcaaagttcacttgcttcttggaattataacaccaatattactgaagagaatgtccaaaacatgaataatgctggggacaaatggtctgcctttttaaaggaacagtccacacttgcccaaatgtatccactacaagaaattcagaatctcacagtcaagcttcagctgcaggctcttcagcaaaatgggtcttcagtgctctcagaagacaagagcaaacggttgaacacaattctaaatacaatgagcaccatctacagtactggaaaagtttgtaacccagataatccacaagaatgcttattacttgaaccaggtttgaatgaaataatggcaaacagtttagactacaatgagaggctctgggcttgggaaagctggagatctgaggtcggcaagcagctgaggccattatatgaagagtatgtggtcttgaaaaatgagatggcaagagcaaatcattatgaggactatggggattattggagaggagactatgaagtaaatggggtagatggctatgactacagccgcggccagttgattgaagatgtggaacatacctttgaagagattaaaccattatatgaacatcttcatgcctatgtgagggcaaagttgatgaatgcctatccttcctatatcagtccaattggatgcctccctgctcatttgcttggtgatatgtggggtagattttggacaaatctgtactctttgacagttccctttggacagaaaccaaacatagatgttactgatgcaatggtggaccaggcctgggatgcacagagaatattcaaggaggccgagaagttctttgtatctgttggtcttcctaatatgactcaaggattctgggaaaattccatgctaacggacccaggaaatgttcagaaagcagtctgccatcccacagcttgggacctggggaagggcgacttcaggatccttatgtgcacaaaggtgacaatggacgacttcctgacagctcatcatgagatggggcatatccagtatgatatggcatatgctgcacaaccttttctgctaagaaatggagctaatgaaggattccatgaagctgttggggaaatcatgtcactttctgcagccacacctaagcatttaaaatccattggtcttctgtcacccgattttcaagaagacaatgaaacagaaataaacttcctgctcaaacaagcactcacgattgttgggactctgccatttacttacatgttagagaagtggaggtggatggtctttaaaggggaaattcccaaagaccagtggatgaaaaagtggtgggagatgaagcgagagatagttggggtggtggaacctgtgccccatgatgaaacatactgtgaccccgcatctctgttccatgtttctaatgattactcattcattcgatattacacaaggaccctttaccaattccagtttcaagaagcactttgtcaagcagctaaacatgaaggccctctgcacaaatgtgacatctcaaactctacagaagctggacagaaactgttcaatatgctgaggcttggaaaatcagaaccctggaccctagcattggaaaatgttgtaggagcaaagaacatgaatgtaaggccactgctcaactactttgagcccttatttacctggctgaaagaccagaacaagaattcttttgtgggatggagtaccgactggagtccatatgcagaccaaagcatcaaagtgaggataagcctaaaatcagctcttggagataaagcatatgaatggaacgacaatgaaatgtacctgttccgatcatctgttgcatatgctatgaggcagtactttttaaaagtaaaaaatcagatgattctttttggggaggaggatgtgcgagtggctaatttgaaaccaagaatctcctttaatttctttgtcactgcacctaaaaatgtgtctgatatcattcctagaactgaagttgaaaaggccatcaggatgtcccggagccgtatcaatgatgctttccgtctgaatgacaacagcctagagtttctggggatacagccaacacttggacctcctaaccagccccctgtttcc

SEQ ID NO: 3098 - DNA, 1527 bp, Homo Sapiens
caggtccgccggggccaccctacagtgcacagtgaaaccaagtatgtggagctaattgtgatcaacgaccaccagctgttcgagcagatgcgacagtcggtggtcctcaccagcaactttgccaagtccgtggtgaacctggccgatgtgatatacaaggagcagctcaacactcgcatcgtcctggttgccatggaaacatgggcagatggggacaagatccaggtgcaggatgacctcctggagaccctggcccggctcatggtctaccgacgggagggtctgcctgagcccagtgatgccacccacctcttctcgggcaggaccttccagagcacgagcagcggggcagcctacgtggggggcatatgctccctgtcccacggcgggggtgtgaacgagtacggcaacatgggggcgatggccgtgacccttgcccagacgctgggacagaacctgggcatgatgtggaacaaacaccggagctcggcaggggactgcaagtgtccagacatctggctgggctgcatcatggaggacactgggttctacctgccccgcaagttctcgcgctgtagcatcgacgagtacaaccagtttctgcaggagggtggtggcagctgcctcttcaacaagcccctcaagctcctggaccccccagagtgcgggaacggcttcgtggaggcaggggaggagtgcgactgcggctcggtgcaggagtgcagccgcgcaggtggcaactgctgcaagaaatgcaccctgactcacgacgccatgtgcagcgacgggctctgctgtcgccgctgcaagtacgaaccacggggtgtgtcctgccgagaggccgtgaacgagtgcgacatcgcggagacctgcaccggggactctagccagtgcccgcctaacctgcacaagctggacggttactactgtgaccatgagcagggccgctgctacggaggtcgctgcaaaacccgggaccggcagtgccaggttctttggggccatgcggctgctgatcgcttctgctacgagaagctgaatgtggaggggacggagcgtgggagctgtgggcgcaagggatctggctgggtccagtgcagtaagcaggacgtgctgtgtggcttcctcctctgtgtcaacatctctggagctcctcggctaggggacctggtgggagacatcagtagtgtcaccttctaccaccagggcaaggagctggactgcaggggaggccacgtgcagctggcggacggctctgacctgagctatgtggaggatggcacagcctgcgggcctaacatgttgtgcctggaccatcgctgcctgccagcttctgccttcaacttcagcacctgccccggcagtggggagcgccggatttgctcccaccacggggtctgcagcaatgaagggaagtgcatctgtcagccagactggacaggcaaagactgcagtatccataaccccctgcccacgtccccacccacgggggagacggagagatataaaggtcccagcggcaccaac

SEQ ID NO: 3099 - DNA, 1599 bp, Homo Sapiens
gagaccctcaaggcaactaagtatgtggagctggtgatcgtggcagacaaccgagagtttcagaggcaaggaaaagatctggaaaaagttaagcagcgattaatagagattgctaatcacgttgacaagttttacagaccactgaacattcggatcgtgttggtaggcgtggaagtgtggaatgacatggacaaatgctctgtaagtcaggacccattcaccagcctccatgaatttctggactggaggaagatgaagcttctacctcgcaaatcccatgacaatgcgcagcttgtcagtggggtttatttccaagggaccaccatcggcatggccccaatcatgagcatgtgcacggcagaccagtctgggggaattgtcatggaccattcagacaatccccttggtgcagccgtgaccctggcacatgagctgggccacaatttcgggatgaatcatgacacactggacaggggctgtagctgtcaaatggcggttgagaaaggaggctgcatcatgaacgcttccaccgggtacccatttcccatggtgttcagcagttgcagcaggaaggacttggagaccagcctggagaaaggaatgggggtgtgcctgtttaacctgccggaagtcagggagtctttcgggggccagaagtgtgggaacagatttgtggaagaaggagaggagtgtgactgtggggagccagaggaatgtatgaatcgctgctgcaatgccaccacctgtaccctgaagccggacgctgtgtgcgcacatgggctgtgctgtgaagactgccagctgaagcctgcaggaacagcgtgcagggactccagcaactcctgtgacctcccagagttctgcacaggggccagccctcactgcccagccaacgtgtacctgcacgatgggcactcatgtcaggatgtggacggctactgctacaatggcatctgccagactcacgagcagcagtgtgtcacgctctggggaccaggtgctaaacctgcccctgggatctgctttgagagagtcaattctgcaggtgatccttatggcaactgtggcaaagtctcgaagagttcctttgccaaatgcgagatgagagatgctaaatgtggaaaaatccagtgtcaaggaggtgccagccggccagtcattggtaccaatgccgtttccatagaaacaaacatccccctgcagcaaggaggccggattctgtgccgggggacccacgtgtacttgggcgatgacatgccggacccagggcttgtgcttgcaggcacaaagtgtgcagatggaaaaatctgcctgaatcgtcaatgtcaaaatattagtgtctttggggttcacgagtgtgcaatgcagtgccacggcagaggggtgtgcaacaacaggaagaactgccactgcgaggcccactgggcacctcccttctgtgacaagtttggctttggaggaagcacagacagcggccccatccggcaagcagggaaagaagcaaggcaggaagctgcagagtccaacagggagcgcggccagggccaggagcccgtgggatcgcaggagcatgcgtctactgcctcactgacactcatc

SEQ ID NO: 3100 - DNA, 1470 bp, Homo Sapiens
gatgtggtaacagagaccaagactgtggagttggtgattgtggctgatcactcggaggcccagaaataccgggacttccagcacctgctaaaccgcacactggaagtggccctcttgctggacacattcttccggcccctgaatgtacgagtggcactagtgggcctggaggcctggacccagcgtgacctggtggagatcagcccaaacccagctgtcaccctcgaaaacttcctccactggcgcagggcacatttgctgcctcgattgccccatgacagtgcccagctggtgactggtacttcattctctgggcctacggtgggcatggccattcagaactccatctgttctcctgacttctcaggaggtgtgaacatggaccactccaccagcatcctgggagtcgcctcctccatagcccatgagttgggccacagcctgggcctggaccatgatttgcctgggaatagctgcccctgtccaggtccagccccagccaagacctgcatcatggaggcctccacagacttcctaccaggcctgaacttcagcaactgcagccgacgggccctggagaaagccctcctggatggaatgggcagctgcctcttcgaacggctgcctagcctaccccctatggctgctttctgcggaaatatgtttgtggagccgggcgagcagtgtgactgtggcttcctggatgactgcgtcgatccctgctgtgattctttgacctgccagctgaggccaggtgcacagtgtgcatctgacggaccctgttgtcaaaattgccagctgcgcccgtctggctggcagtgtcgtcctaccagaggggattgtgacttgcctgaattctgcccaggagacagctcccagtgtccccctgatgtcagcctaggggatggcgagccctgcgctggcgggcaagctgtgtgcatgcacgggcgttgtgcctcctatgcccagcagtgccagtcactttggggacctggagcccagcccgctgcgccactttgcctccagaccgctaatactcggggaaatgcttttgggagctgtgggcgcaaccccagtggcagttatgtgtcctgcacccctagagatgccatttgtgggcagctccagtgccagacaggtaggacccagcctctgctgggctccatccgggatctactctgggagacaatagatgtgaatgggactgagctgaactgcagctgggtgcacctggacctgggcagtgatgtggcccagcccctcctgactctgcctggcacagcctgtggccctggcctggtgtgtatagaccatcgatgccagcgtgtggatctcctgggggcacaggaatgtcgaagcaaatgccatggacatggggtctgtgacagcaacaggcactgctactgtgaggagggctgggcaccccctgactgcaccactcagctcaaagcaaccagctccctgaccaca

SEQ ID NO: 3101 - DNA, 1533 bp, Homo Sapiens
aatctttcaaaactattaccccaatatctggaaatatacattatagtggaaaaagctttgtatgattatatgggatctgaaatgatggctgtaacacaaaaaattgtccaggttattgggcttgtcaacactatgtttacccagttcaaattgactgttatactgtcttccttggaattgtggtcaaatgaaaaccagatttccaccagtggggatgctgatgatatattacaaagatttttggcatggaaacgggactatctcatcctacggccccatgacatagcatacttacttgtttacaggaaacatcctaaatatgtgggagcaacatttcctggcactgtatgcaataaaagctatgatgcaggtattgctatgtatccagatgcaataggtttggagggattttcggttattatagctcaactgcttggccttaatgtaggattaacatatgatgacatcactcagtgtttctgtctgagagctacatgcatcatgaatcatgaagcagtgagtgccagtggtagaaagatttttagcaactgcagcatgcacgactatagatattttgtttcaaaatttgagactaaatgccttcagaagctttcaaatttgcaaccattacatcaaaatcaaccagtgtgtggtaatgggattttggaatccaatgaagaatgtgactgtggtaataaaaatgaatgtcaatttaagaagtgctgtgattataacacatgtaaactgaagggctcagtaaaatgtggttctggaccatgttgtacatcaaagtgtgagttgtcaatagcaggcactccatgtagaaagagtattgatccagagtgtgattttacagagtactgcaatggaacctctagtaattgtgttcctgacacttatgcattgaatggccgtttgtgcaagttgggaactgcctattgctataacggacaatgtcaaactactgataaccagtgtgccaagatatttggaaaaggtgctcaaggtgctccatttgcctgttttaaagaagttaattctctgcatgaaagatctgaaaactgtggttttaaaaattcacaaccattaccttgtgaacggaaggatgttctctgtggaaaattagcttgtgttcagccacataaaaatgctaataaaagtgacgctcaatctacagtttattcatatattcaagaccatgtatgtgtatctatagccactggttcctccatgagatcagatggaacagacaatgcctatgtggctgatggcaccatgtgtggtccagaaatgtactgtgtaaataaaacctgcagaaaagttcatttaatgggatataactgtaatgccaccacaaaatgcaaagggaaagggatatgtaataattttggtaattgtcaatgcttccctggacatagacctccagattgtaaattccagtttggttccccagggggtagtattgatgatggaaattttcagaaatctggtgacttttatactgaaaaaggctacaatacacactggaacaac

SEQ ID NO: 3102 - DNA, 1491 bp, Homo Sapiens
agggaagatttaaactccatgaagtatgtggagctttacctcgtggctgattatttagagtttcagaagaatcgacgagaccaggacgccaccaaacacaagctcatagagatcgccaactatgttgataagttttaccgatccttgaacatccggattgctctcgtgggcttggaagtgtggacccacgggaacatgtgtgaagtttcagagaatccatattctaccctctggtcctttctcagttggaggcgcaagctgcttgcccagaagtaccatgacaacgcccaattaatcacgggcatgtccttccacggcaccaccatcggcctggcccccctcatggccatgtgctctgtgtaccagtctggaggagtcaacatggaccactccgagaatgccattggcgtggctgccaccatggcccacgagatgggccacaactttggcatgacccatgattctgcagattgctgctcggccagtgcggctgatggtgggtgcatcatggcagctgccactgggcacccctttcccaaagtgttcaatggatgcaacaggagggagctggacaggtatctgcagtcaggtggtggaatgtgtctctccaacatgccagacaccaggatgttgtatggaggccggaggtgtgggaacgggtatctggaagatggggaagagtgtgactgtggagaagaagaggaatgtaacaacccctgctgcaatgcctctaattgtaccctgaggccgggggcggagtgtgctcacggctcctgctgccaccagtgtaagctgttggctcctgggaccctgtgccgcgagcaggccaggcagtgtgacctcccggagttctgtacgggcaagtctccccactgccctaccaacttctaccagatggatggtaccccctgtgagggcggccaggcctactgctacaacggcatgtgcctcacctaccaggagcagtgccagcagctgtggggacccggagcccgacctgcccctgacctctgcttcgagaaggtgaatgtggcaggagacacctttggaaactgtggaaaggacatgaatggtgaacacaggaagtgcaacatgagagatgcgaagtgtgggaagatccagtgtcagagctctgaggcccggcccctggagtccaacgcggtgcccattgacaccactatcatcatgaatgggaggcagatccagtgccggggcacccacgtctaccgaggtcctgaggaggagggtgacatgctggacccagggctggtgatgactggaaccaagtgtggctacaaccatatttgctttgaggggcagtgcaggaacacctccttctttgaaactgaaggctgtgggaagaagtgcaatggccatggggtctgtaacaacaaccagaactgccactgcctgccgggctgggccccgcccttctgcaacacaccgggccacgggggcagtatcgacagtgggcctatgccccctgagagt

SEQ ID NO: 3103 - DNA, 1488 bp, Homo Sapiens
tataatcatatggggtctgatacaactgttgtcgctcaaaaagttttccagttgattggattgacgaatgctatttttgtttcatttaatattacaattattctgtcttcattggagctttggatagatgaaaataaaattgcaaccactggagaagctaatgagttattacacacatttttaagatggaaaacatcttatcttgttttacgtcctcatgatgtggcatttttacttgtttacagagaaaagtcaaattatgttggtgcaacctttcaagggaagatgtgtgatgcaaactatgcaggaggtgttgttctgcaccccagaaccataagtctggaatcacttgcagttattttagctcaattattgagccttagtatggggatcacttatgatgacattaacaaatgccagtgctcaggagctgtctgcattatgaatccagaagcaattcatttcagtggtgtgaagatctttagtaactgcagcttcgaagactttgcacattttatttcaaagcagaagtcccagtgtcttcacaatcagcctcgcttagatccttttttcaaacagcaagcagtgtgtggtaatgcaaagctggaagcaggagaggagtgtgactgtgggactgaacaggattgtgcccttattggagaaacatgctgtgatattgccacatgtagatttaaagccggttcaaactgtgctgaaggaccatgctgcgaaaactgtctatttatgtcaaaagaaagaatgtgtaggccttcctttgaagaatgcgacctccctgaatattgcaatggatcatctgcatcatgcccagaaaaccactatgttcagactgggcatccgtgtggactgaatcaatggatctgtatagatggagtttgtatgagtggggataaacaatgtacagacacatttggcaaagaagtagagtttggcccttcagaatgttattctcaccttaattcaaagactgatgtatctggaaactgtggtataagtgattcaggatacacacagtgtgaagctgacaatctgcagtgcggaaaattaatatgtaaatatgtaggtaaatttttattacaaattccaagagccactattatttatgccaacataagtggacatctctgcattgctgtggaatttgccagtgatcatgcagacagccaaaagatgtggataaaagatggaacttcttgtggttcaaataaggtttgcaggaatcaaagatgtgtgagttcttcatacttgggttatgattgtactactgacaaatgcaatgatagaggtgtatgcaataacaaaaagcactgtcactgtagtgcttcatatttacctccagattgctcagttcaatcagatctatggcctggtgggagtattgacagtggcaattttccacctgtagctataccagccagactccctgaaaggcgctacattgagaacatttaccattccaaaccaatgaga

SEQ ID NO: 3104 - DNA, 1461 bp, Homo Sapiens
cggtttgttgagctggtagtggtcgtggataatattagatatcttttctctcaaagtaatgcaacaacagtgcagcatgaagtatttaacgttgtcaatatagtggattccttctatcatcctttggaggttgatgtaattttgactggaattgatatatggactgcatcaaatccacttcctaccagtggagacctagataatgttttagaggacttttctatttggaagaattataaccttaataatcgactacaacatgatgttgcacatcttttcataaaagacacacaaggcatgaagcttggtgttgcctatgttaaaggaatatgccagaatccttttaatactggagttgatgtttttgaagacaacaggttggtcgtttttgcaattactttgggccacgagcttggtcataatttgggtatgcaacatgacacccagtggtgtgtgtgcgagctacagtggtgcataatgcatgcctatagaaaggtgacaactaaatttagcaactgcagttatgcccaatattgggacagtactatcagtagtggattatgtattcaaccgcctccatatccagggaatatatttagactgaagtactgtgggaatctagtggttgaagaaggggaggaatgtgactgtggaaccatacggcagtgtgcaaaagatccctgttgtctgttaaactgtactctacatcctggggctgcttgtgcttttggaatatgttgcaaagactgcaaatttctgccatcaggaactttatgtagacaacaagttggtgaatgtgaccttccagagtggtgcaatgggacatcccatcaatgcccagatgatgtgtatgtgcaggacgggatctcctgtaatgtgaatgccttctgctatgaaaagacgtgtaataaccatgatatacaatgtaaagagatttttggccaagatgcaaggagtgcatctcagagttgctaccaagaaatcaacacccaaggaaaccgtttcggtcactgtggtattgtaggcacaacatatgtaaaatgttggacccctgatatcatgtgtgggagggttcagtgtgaaaatgtgggagtaattcccaatctgatagagcattctacagtgcagcagtttcacctcaatgacaccacttgctggggcactgattatcatttagggatggctatacctgatattggtgaggtgaaagatggcacagtatgtggtccagaaaagatctgcatccgtaagaagtgtgccagtatggttcatctgtcacaagcctgtcagcctaagacctgcaacatgaggggaatctgcaacaacaaacaacactgtcactgcaaccatgaatgggcacccccatactgcaaggacaaaggctatggaggtagtgctgatagtggcccacctcctaagaacaacatggaaggattaaatgtgatgggaaagttgcgttac

SEQ ID NO: 3105 - DNA, 1401 bp, Homo Sapiens
ccaaaatctgctggtgactggtggactcatgcatggtttctggagctagttgttgtggtgaaccatgatttcttcatttactctcaaagcaacatctcaaaggtgcaagaggatgtatttcttgttgtcaacatagtggattccatgtatcagcagttaggtacttacataattttgattggaattgaaatttggaatcaaggaaatgttttcccaatgacaagcatagaacaggtcctgaacgatttctctcaatggaaacaaatcagtctttcccagctacagcatgatgctgcacatatgttcataaaaaattcacttataagtatacttggcctagcctatgttgcaggaatatgtcgtccacctattgattgtggagttgataattttcaaggagatacctggtctctttttgccaacactgtggcccatgagttaggtcatacgttgggtatgcagcatgatgaagaattctgtttttgtggggaaagaggttgcatcatgaatacttttagagtgccagcagagaaattcaccaattgcagttacgctgattttatgaagaccaccttaaaccagggatcatgtctgcataatcctccaagattgggggaaatctttatgctaaagcgctgtgggaatggtgtggttgaaagagaagagcagtgtgactgtggatccgtacagcagtgtgaacaagacgcctgttgtctgttgaactgcactctaaggcctggggctgcctgtgcttttgggctttgttgcaaagactgcaagttcatgccatcaggggaactctgtagacaagaggtcaatgaatgtgaccttccagaatggtgcaatggaacatctcatcagtgtccagaagatagatatgtgcaggacgggatcccctgtagtgacagtgcctactgctatcaaaagaggtgtaataaccatgaccagcattgcagggagatttttggtaaagatgcaaaaagtgcatctcagaattgctataaagaaatcaactctcagggaaaccgttttggtcactgtggtataaatggcacaacatacctaaaatgtcatatctctgatgtcttttgtgggagagttcaatgtgagaatgtgagagacattcctcttctccaagatcattttactttgcagcacactcatatcaatggtgtcacctgctggggtattgactatcatttaaggatgaacatatctgacattggtgaagtgaaagatggtactgtgtgtggcccaggaaagatctgcatccataagaagtgtgtcagtctgtctgtcttgtcacatgtctgccttcctgagacctgcaatatgaaggggatctgcaataacaaacatcactgccactgtggctatgggtggtccccaccctactgccag

SEQ ID NO: 3106 - DNA, 1542 bp, Homo Sapiens
agtaaacggcagcttcgtcgatatcctcgtaatgtagaagaagaaaccaaatacattgaactgatgattgtgaatgatcaccttatgtttaaaaaacatcggctttccgttgtacataccaatacctatgcgaaatctgtggtgaacatggcagatttaatatataaagaccaacttaagaccaggatagtattggttgctatggaaacctgggcgactgacaacaagtttgccatatctgaaaatccattgatcaccctacgtgagtttatgaaatacaggagggattttatcaaagagaaaagtgatgcagttcaccttttttcgggaagtcaatttgagagtagccggagcggggcagcttatattggtgggatttgctcgttgctgaaaggaggaggcgtgaatgaatttgggaaaactgatttaatggctgttacacttgcccagtcattagcccataatattggtattatctcagacaaaagaaagttagcaagtggtgaatgtaaatgcgaggacacgtggtccgggtgcataatgggagacactggctattatcttcctaaaaagttcacccagtgtaatattgaagagtatcatgacttcctgaatagtggaggtggtgcctgccttttcaacaaaccttctaagcttcttgatcctcctgagtgtggcaatggcttcattgaaactggagaggagtgtgattgtggaaccccggccgaatgtgtccttgaaggagcagagtgttgtaagaaatgcaccttgactcaagactctcaatgcagtgacggtctttgctgtaaaaagtgcaagtttcagcctatgggcactgtgtgccgagaagcagtaaatgattgtgatattcgtgaaacgtgctcaggaaattcaagccagtgtgcccctaatattcataaaatggatggatattcatgtgatggtgttcagggaatttgctttggaggaagatgcaaaaccagagatagacaatgcaaatacatttgggggcaaaaggtgacagcatcagacaaatattgctatgagaaactgaatattgaagggacggagaagggtaactgtgggaaagacaaagacacatggatacagtgcaacaaacgggatgtgctttgtggttaccttttgtgtaccaatattggcaatatcccaaggcttggagaactcgatggtgaaatcacatctactttagttgtgcagcaaggaagaacattaaactgcagtggtgggcatgttaagcttgaagaagatgtagatcttggctatgtggaagatgggacaccttgtggtccccaaatgatgtgcttagaacacaggtgtcttcctgtggcttctttcaactttagtacttgcttgagcagtaaagaaggcactatttgctcaggaaatggagtttgcagtaatgagctgaagtgtgtgtgtaacagacactggataggttctgattgcaacacttacttccctcacaatgatgatgcaaagactggtatcactctgtctggcaatggtgttgctggcaccaat

SEQ ID NO: 3107 - DNA, 1518 bp, Homo Sapiens
gcagtcaacccatctcgtggtatattcgaggagatgaagtatttggaattgatgatcgttaacgatcataagacctacaaaaagcatagaagttcccatgctcacaccaacaattttgcgaaaagtgtggtgaatctggtggacagtatttacaaggagcagttaaatactagagtagtattagttgctgtagagacatggacagaaaaggatcagatagacatcactacaaatcccgtacagatgttgcatgaatttagtaagtacaggcagcgtataaaacagcacgccgatgctgtgcatctaatttctcgtgtgactttccactataagaggtccagcctgtcctacttcggaggggtatgttccagaacgcgtggagttggtgttaatgaatatgggctaccaatggctgtcgcccaggtgcttagtcagagcttagcccagaatctggggatccaatgggagccatcttcaagaaaaccaaagtgcgactgtactgagtcatggggggggtgcatcatggaggaaaccggagtgtcccactcccgtaaattcagtaaatgcagtattctagagtatagagactttctgcaaagaggcggcggagcgtgtctgtttaacagacctaccaaactgtttgagcccaccgagtgcggtaacgggtatgtagaggcaggtgaagagtgtgactgtggctttcatgtggaatgctacggtctatgctgtaaaaaatgcagtctatccaacggtgctcattgctccgacggcccctgttgtaacaacacatcttgtttgttccagccgcgtggatatgaatgcagggatgcggtaaacgagtgcgacatcactgaatactgtacgggcgactcaggccaatgtcctcccaatttgcacaaacaagacggctacgcttgtaaccagaatcaagggcgttgttataatggtgagtgtaagacccgtgacaatcaatgtcagtacatctgggggacgaaggccgccggaagcgacaagttctgctacgaaaagttaaacaccgagggtactgaaaagggtaattgtggtaaggacggtgacaggtggattcaatgttccaagcatgacgtgttttgtgggtttttgctgtgtactaaccttacgagagccccgagaattggccagctacaaggggaaatcatacctacaagtttctatcaccagggacgtgttatcgactgcagtggggcacacgtcgtactagacgatgacactgatgttgggtatgtggaagatggtacaccctgtggcccatccatgatgtgcttagataggaaatgtttacaaatccaagcgctaaacatgtccagctgtccccttgacagcaagggcaaggtgtgctcaggacatggagtttgttcaaatgaggcaacttgtatttgcgacttcacttgggcaggcacagattgttcaattcgtgacccagtcagaaacctacaccccccgaaagacgaggggcccaaaggtccctctgcgactaat

SEQ ID NO: 3108 - DNA, 1401 bp, Homo Sapiens
gttcaggaacatgagaaatacatagaatattatttggtcctggataatggtgagtttaaaaggtacaatgagaatcaagatgagatcagaaagagggtatttgagatggctaattatgtcaacatgctttataaaaagctcaatactcatgtggccttagttggtatggaaatctggactgacaaggataagataaagataaccccaaatgcaagcttcaccttggagaatttttctaaatggagggggagtgttctctcaagaagaaagcgtcatgatattgctcagttaatcacagcaacagaacttgctggaacgactgtgggtcttgcatttatgtctacaatgtgttctccttattctgttggcgttgttcaggaccacagcgataatcttcttagagttgcagggacaatggcacatgaaatgggccacaactttggaatgtttcatgacgactattcttgcaagtgtccttctacaatatgtgtgatggacaaagcactgagcttctatatacccacagacttcagttcctgcagccgtctcagctatgacaagttttttgaagataaattatcaaattgcctctttaatgctccattgcctacagatatcatatccactccaatttgtgggaaccagttggtggaaatgggagaggactgtgattgtgggacatctgaggaatgtaccaatatttgctgtgatgctaagacatgtaaaatcaaagcaacttttcaatgtgcattaggagaatgttgtgaaaaatgccaatttaaaaaggctgggatggtgtgcagaccagcaaaagatgagtgcgacctgcctgaaatgtgtaatggtaaatctggtaattgtcctgatgatagattccaagtcaatggcttcccttgccatcacgggaagggccactgcttgatggggacatgccccacactgcaggagcagtgcacagagctgtggggaccaggaactgaggttgcagataagtcatgttacaacaggaatgaaggtgggtcaaagtacgggtactgtcgcagagtggatgacacactcattccctgcaaagcaaatgataccatgtgtgggaagttgttctgtcaaggtgggtcggataatttgccctggaaaggacggatagtgactttcctgacatgtaaaacatttgatcctgaagacacaagtcaagaaataggcatggtggccaatggaactaagtgtggcgataacaaggtttgcattaatgcagaatgtgtggatattgagaaagcctacaaatcaaccaattgctcatctaagtgcaaaggacatgctgtgtgtgaccatgagctccagtgtcaatgtgaggaaggatggatccctcccgactgcgatgactcctcagtggtcttccacttc

SEQ ID NO: 3109 - DNA, 1443 bp, Homo Sapiens
tggatccattttaggattgttgaaattgtagtcgtcattgataattatctgtacattcgttatgaaaggaacgactcaaagttgctggaggatctatatgttattgttaatatagtggattccattttggatgtcattggtgttaaggtgttattatttggtttggagatctggaccaataaaaacctcattgtagtagatgatgtaaggaaatctgtgcacctgtattgcaagtggaagtcggagaacattacgccccggatgcaacatgacacctcacatcttttcacaactctaggattaagagggttaagtggcataggagcttttagaggaatgtgtacaccacaccgtagttgtgcaattgttactttcatgaacaaaactttgggcactttttcaattgcagtggctcatcatctaggtcataatttgggcatgaaccatgatgaggatacatgtcgttgttcacaacctagatgcataatgcatgaaggcaacccaccaataactaaatttagcaattgtagttatggtgatttttgggaatatactgtagagaggacaaagtgtttgcttgaaacagtacacacaaaggacatctttaatgtgaagcgctgtgggaatggtgttgttgaagaaggagaagagtgtgactgtggacctttaaagcattgtgcaaaagatccctgctgtctgtcaaattgcactctgactgatggttctacttgtgcttttgggctttgttgcaaagactgcaagttcctaccatcagggaaagtgtgtagaaaggaggtcaatgaatgtgatcttccagagtggtgcaatggtacttcccataagtgcccagatgacttttatgtggaagatggaattccctgtaaggagaggggctactgctatgaaaagagctgtcatgaccgcaatgaacagtgtaggaggatttttggtgcaggcgcaaatactgcaagtgagacttgctacaaagaattgaacaccttaggtgaccgtgttggtcactgtggtatcaaaaatgctacatatataaagtgtaatatctcagatgtccagtgtggaagaattcagtgtgagaatgtgacagaaattcccaatatgagtgatcatactactgtgcattgggctcgcttcaatgacataatgtgctggagtactgattaccatttggggatgaagggacctgatattggtgaagtgaaagatggaacagagtgtgggatagatcatatatgcatccacaggcactgtgtccatataaccatcttgaatagtaattgctcacctgcattttgtaacaagaggggcatctgcaacaataaacatcactgccattgcaattatctgtgggaccctcccaactgcctgataaaaggctatggaggtagtgttgacagtggcccaccccctaagagaaagaagaaaaag

SEQ ID NO: 3110 - DNA, 1467 bp, Homo Sapiens
tataaacacccaaagtacttggaattgatcctactctttgatcaaagtaggtataggtttgtgaacaacaatctttctcaagtcatacatgatgccattcttttgactgggattatggacacctactttcaagatgttcgtatgaggatacacttaaaggctcttgaagtatggacagattttaacaaaatacgcgttggatatccagagttagctgaagttttaggcagatttgtaatatataaaaaaagtgtattaaatgctcgcctgtcatcagattgggcacatttatatcttcaaagaaaatataatgatgctcttgcatggtcgtttggaaaagtgtgttctctagaatatgctggatcagtgagtactttactagatacaaatatccttgcccctgctacctggtctgctcatgagctgggtcatgctgtaggaatgtcacatgatgaacaatactgccaatgtaggggtaggcttaattgcatcatgggctcaggacgcactgggtttagcaattgcagttatatctctttttttaaacatatctcttcgggagcaacatgtctaaataatatcccaggactaggttatgtgcttaagagatgtggaaacaaaattgtggaggacaatgaggaatgtgactgtggttccacagaggagtgtcagaaagatcggtgttgccaatcaaattgtaagttgcaaccaggtgccaactgtagcattggactttgctgtcatgattgtcggtttcgtccatctggatacgtgtgtaggcaggaaggaaatgaatgtgaccttgcagagtactgcgacgggaattcaagttcctgcccaaatgacgtttataagcaggatggaaccccttgcaagtatgaaggccgttgtttcaggaaggggtgcagatccagatatatgcagtgccaaagcatttttggacctgatgccatggaggctcctagtgagtgctatgatgcagttaacttaataggtgatcaatttggtaactgtgagattacaggaattcgaaattttaaaaagtgtgaaagtgcaaattcaatatgtggcaggctacagtgtataaatgttgaaaccatccctgatttgccagagcatacgactataatttctactcatttacaggcagaaaatctcatgtgctggggcacaggctatcatctatccatgaaacccatgggaatacctgacctaggtatgataaatgatggcacctcctgtggagaaggccgggtatgttttaaaaaaaattgcgtcaatagctcagtcctgcagtttgactgtttgcctgagaaatgcaatacccggggtgtttgcaacaacagaaaaaactgccactgcatgtatgggtgggcacctccattctgtgaggaagtggggtatggaggaagcattgacagtgggcctccaggactgctcagaggggcgattccctcgtcaatttgg

SEQ ID NO: 3111 - DNA, 1524 bp, Homo Sapiens
aaatcagaaccagctgttccagatttatttcctctttatctagaaatgcatattgtggtggacaaaactttgtatgattactggggctctgatagcatgatagtaacaaataaagtcatcgaaattgttggccttgcaaattcaatgttcacccaatttaaagttactattgtgctgtcatcattggagttatggtcagatgaaaataagatttctacagttggtgaggcagatgaattattgcaaaaatttttagaatggaaacaatcttatcttaacctaaggcctcatgatattgcatatctactaatttatatggattatcctcgttatttgggagcagtgtttcctggaacaatgtgtattactcgttattctgcaggagttgcattgtaccccaaggagataactctggaggcatttgcagttattgtcacccagatgctggcactcagtctgggaatatcatatgacgacccaaagaaatgtcaatgttcagaatccacctgtataatgaatccagaagttgtgcaatccaatggtgtgaagacttttagcagttgcagtttgaggagctttcaaaatttcatttcaaatgtgggtgtcaaatgtcttcagaataagccacaaatgcaaaaaaaatctccgaaaccagtctgcggcaatggcagattggagggaaatgaaatctgtgattgtggtactgaggctcaatgtggacctgcaagctgttgtgattttcgaacttgtgtactgaaagacggagcaaaatgttataaaggactgtgctgcaaagactgtcaaattttacaatcaggcgttgaatgtaggccgaaagcacatcctgaatgtgacatcgctgaaaattgtaatggaagctcaccagaatgtggtcctgacataactttaatcaatggactttcatgcaaaaataataagtttatttgttatgacggagactgccatgatctcgatgcacgttgtgagagtgtatttggaaaaggttcaagaaatgctccatttgcctgctatgaagaaatacaatctcaatcagacagatttgggaactgtggtagggatagaaataacaaatatgtgttctgtggatggaggaatcttatatgtggaagattagtttgtacataccctactcgaaagcctttccatcaagaaaatggtgatgtgatttatgctttcgtacgagattctgtatgcataactgtagactacaaattgcctcgaacagttccagatccactggctgtcaaaaatggctctcagtgtgatattgggagggtttgtgtaaatcgtgaatgtgtagaatcaaggataattaaggcttcagcacatgtttgttcacaacagtgttctggacatggagtgtgtgattccagaaacaagtgccattgttcgccaggctataagcctccaaactgccaaatacgttccaaaggattttccatatttcctgaggaagatatgggttcaatcatggaaagagcatctgggaagactgaaaacacc

SEQ ID NO: 3112 - DNA, 1467 bp, Homo Sapiens
gaagcgcgcaggacccggaagtacctggaactgtacattgtggcagaccacaccctgttcttgactcggcaccgaaacttgaaccacaccaaacagcgtctcctggaagtcgccaactacgtggaccagcttctcaggactctggacattcaggtggcgctgaccggcctggaggtgtggaccgagcgggaccgcagccgccgccagctgcgcgccttcttccgcaaggggggcggcgcttgcctctccaatgccccggaccccggactcccggtgccgccggcgctctgcgggaacggcttcgtggaagcgggcgaggagtgtgactgcggccctggccaggagtgccgcgacctctgctgctttgctcacaactgctcgctgcgcccgggggcccagtgcgcccacggggactgctgcgtgcgctgcctgctgaagccggctggagcgctgtgccgccaggccatgggtgactgtgacctccctgagttttgcacgggcacctcctcccactgtcccccagacgtttacctactggacggctcaccctgtgccaggggcagtggctactgctgggatggcgcatgtcccacgctggagcagcagtgccagcagctctgggggcctggctcccacccagctcccgaggcctgtttccaggtggtgaactctgcgggagatgctcatggaaactgcggccaggacagcgagggccacttcctgccctgtgcagggagggatgccctgtgtgggaagctgcagtgccagggtggaaagcccagcctgctcgcaccgcacatggtgccagtggactctaccgttcacctagatggccaggaagtgacttgtcggggagccttggcactccccagtgcccagctggacctgcttggcctgggcctggtagagccaggcacccagtgtggacctagaatggtgtgccagagcaggcgctgcaggaagaatgccttccaggagcttcagcgctgcctgactgcctgccacagccacggggtttgcaatagcaaccataactgccactgtgctccaggctgggctccacccttctgtgacaagccaggctttggtggcagcatggacagtggccctgtgcaggctgaaaaccatgacaccttcctgctggccatgctcctcagcgtcctgctgcctctgctcccaggggccggcctggcctggtgttgctaccgactcccaggagcccatctgcagcgatgcagctggggctgcagaagggaccctgcgtgcagtggccccaaagatggcccacacagggaccaccccctgggcggcgttcaccccatggagttgggccccacagccactggacagccctggcccctggaccctgagaactctcatgagcccagcagccaccctgagaagcctctgccagcagtctcgcctgacccccaagatcaagtccagatgccaagatcctgcctctgg

SEQ ID NO: 3113 - DNA, 1917 bp, Homo Sapiens
attgcccccagccggccctgggccctcatggagcagtatgaggtcgtgttgccgcggcgtctgccaggcccccgagtccgccgagctctgccctcccacttgggcctgcacccagagagggtgagctacgtccttggggccacagggcacaacttcaccctccacctgcggaagaacagggacctgctgggttccggctacacagagacctatacggctgccaatggctccgaggtgacggagcagcctcgcgggcaggaccactgcttctaccagggccacgtagaggggtacccggactcagccgccagcctcagcacctgtgccggcctcaggggtttcttccaggtggggtcagacctgcacctgatcgagcccctggatgaaggtggcgagggcggacggcacgccgtgtaccaggctgagcacctgctgcagacggccgggacctgcggggtcagcgacgacagcctgggcagcctcctgggaccccggacggcagccgtcttcaggcctcggcccggggactctctgccatcccgagagacccgctacgtggagctgtatgtggtcgtggacaatgcagagttccagatgctggggagcgaagcagccgtgcgtcatcgggtgctggaggtggtgaatcacgtggacaagctatatcagaaactcaacttccgtgtggtcctggtgggcctggagatttggaatagtcaggacaggttccacgtcagccccgaccccagtgtcacactggagaacctcctgacctggcaggcacggcaacggacacggcggcacctgcatgacaacgtacagctcatcacgggtgtcgacttcaccgggactactgtggggtttgccagggtgtccgccatgtgctcccacagctcaggggctgtgaaccaggaccacagcaagaaccccgtgggcgtggcctgcaccatggcccatgagatgggccacaacctgggcatggaccatgatgagaacgtccagggctgccgctgccaggaacgcttcgaggccggccgctgcatcatggcaggcagcattggctccagtttccccaggatgttcagtgactgcagccaggcctacctggagagctttttggagcggccgcagtcggtgtgcctcgccaacgcccctgacctcagccacctggtgggcggccccgtgtgtgggaacctgtttgtggagcgtggggagcagtgcgactgcggcccccccgaggactgccggaaccgctgctgcaactctaccacctgccagctggctgagggggcccagtgtgcgcacggtacctgctgccaggagtgcaaggtgaagccggctggtgagctgtgccgtcccaagaaggacatgtgtgacctcgaggagttctgtgacggccggcaccctgagtgcccggaagacgccttccaggagaacggcacgccctgctccgggggctactgctacaacggggcctgtcccacactggcccagcagtgccaggccttctgggggccaggtgggcaggctgccgaggagtcctgcttctcctatgacatcctaccaggctgcaaggccagccggtacagggctgacatgtgtggcgttctgcagtgcaagggtgggcagcagcccctggggcgtgccatctgcatcgtggatgtgtgccacgcgctcaccacagaggatggcactgcgtatgaaccagtgcccgagggcacccggtgtggaccagagaaggtttgctggaaaggacgttgccaggacttacacgtttacagatccagcaactgctctgcccagtgccacaaccatggggtgtgcaaccacaagcaggagtgccactgccacgcgggctgggccccgccccactgcgcgaagctgctgactgaggtgcacgcagcgtccgggagcctcccc

SEQ ID NO: 3114 - DNA, 888 bp, Homo Sapiens
gctgtcttgccacagacccggtatgtggagctgttcattgtcgtagacaaggaaaggtatgacatgatgggaagaaatcagactgctgtgagagaagagatgattctcctggcaaactacttggatagtatgtatattatgttaaatattcgaattgtgctagttggactggagatttggaccaatggaaacctgatcaacatagttgggggtgctggtgatgtgctggggaacttcgtgcagtggcgggaaaagtttcttatcacacgtcggagacatgacagtgcacagctagttctaaagaaaggttttggtggaactgcaggaatggcatttgtgggaacagtgtgttcaaggagccacgcaggcgggattaatgtgtttggacaaatcactgtggagacatttgcttccattgttgctcatgaattgggtcataatcttggaatgaatcacgatgatgggagagattgttcctgtggagcaaagagctgcatcatgaattcaggagcatcgggttccagaaactttagcagttgcagtgcagaggactttgagaagttaactttaaataaaggaggaaactgccttcttaatattccaaagcctgatgaagcctatagtgctccctcctgtggtaataagttggtggacgctggggaagagtgtgactgtggtactccaaaggaatgtgaattggacccttgctgcgaaggaagtacctgtaagcttaaatcatttgctgagtgtgcatatggtgactgttgtaaagactgtcggttccttccaggaggtactttatgccgaggaaaaaccagtgagtgtgatgttccagagtactgcaatggttcttctcagttctgtcagccagatgtttttattcagaat

SEQ ID NO: 3115 - DNA, 4995 bp, Homo Sapiens
gagaaatctcctggagcctatttccttcccgagtttgcactttctcctcagggaagttttctggaagacacaacaggggagcagttcctcacttatcgctatgatgaccagacctcaagaaacactcgttcagatgaagacaaagatggcaactgggatgcttggggcgactggagtgactgctcccggacctgtgggggaggagcatcatattctctgcggagatgtttgactggaaggaattgtgaagggcagaacattcggtacaagacatgcagcaatcatgactgccctccagatgcagaagatttcagagcccagcagtgctcagcctacaatgatgtccagtatcaggggcgttactatgaatggcttccacgatataatgatcctgctgccccgtgtgcactcaagtgtcatgcacaaggacaaaacttggtggtggagctggcacctaaggtactggatggaactcgttgcaacacggactccttggacatgtgtatcagtggcatctgtcaggcagtgggctgcgatcggcaactgggaagcaatgccaaggaggacaactgtggagtctgtgccggcgatggctccacctgcaggcttgtacggggacaatcaaagtcacacgtttctcctgaaaaaagagaagaaaatgtaattgctgttcctttgggaagtcgaagtgtgagaattacagtgaaaggacctgcccacctctttattgaatcaaaaacacttcaaggaagcaaaggagaacacagctttaacagccccggcgtctttgtcgtagaaaacacaacagtggaatttcagaggggctccgagaggcaaacttttaagattccaggacctctgatggctgatttcatcttcaagaccaggtacactgcagccaaagacagcgtggttcagttcttcttttaccagcccatcagtcatcagtggagacaaactgacttctttccctgcactgtgacgtgtggaggaggttatcagctcaattctgctgaatgtgtggatatccgcttgaagagggtagttcctgaccattattgtcactactaccctgaaaatgtaaaaccaaaaccaaaactgaaggaatgcagcatggatccctgcccatcaagtgatggatttaaagagataatgccctatgaccacttccaacctcttcctcgctgggaacataatccttggactgcatgttccgtgtcctgtggaggagggattcagagacggagctttgtgtgtgtagaggaatccatgcatggagagatattgcaggtggaagaatggaagtgcatgtacgcacccaaacccaaggttatgcaaacttgtaatctgtttgattgccccaagtggattgccatggagtggtctcagtgcacagtgacttgtggccgagggttacggtaccgggttgttctgtgtattaaccaccgcggagagcatgttgggggctgcaatccacaactgaagttacacatcaaagaagaatgtgtcattcccatcccgtgttataaaccaaaagaaaaaagtccagtggaagcaaaattgccttggctgaaacaagcacaagaactagaagagaccagaatagcaacagaagaaccaacgttcattccagaaccctggtcagcctgcagtaccacgtgtgggccaggtgtgcaggtccgcgaggtgaagtgccgtgtgctcctcacattcacgcagactgagactgagctgcccgaggaagagtgtgaaggccccaagctgcccaccgaacggccctgcctcctggaagcatgtgatgagagcccggcctcccgagagctagacatccctctccctgaggacagtgagacgacttacgactgggagtacgctgggttcaccccttgcacagcaacatgcttgggaggccatcaagaagccatagcagtgtgcttacatatccagacccagcagacagtcaatgacagcttgtgtgatatggtccaccgtcctccagccatgagccaggcctgtaacacagagccctgtccccccaggtggcatgtgggctcttgggggccctgctcagctacctgtggagttggaattcagacccgagatgtgtactgcctgcacccaggggagacccctgcccctcctgaggagtgccgagatgaaaagccccatgctttacaagcatgcaatcagtttgactgccctcctggctggcacattgaagaatggcagcagtgttccaggacttgtggcgggggaactcagaacagaagagtcacctgtcggcagctgctaacggatggcagctttttgaatctctcagatgaattgtgccaaggacccaaggcatcgtctcacaagtcctgtgccaggacagactgtcctccacatttagctgtgggagactggtcgaagtgttctgtcagttgtggtgttggaatccagagaagaaagcaggtgtgtcaaaggctggcagccaaaggtcggcgcatccccctcagtgagatgatgtgcagggatctaccagggctccctcttgtaagatcttgccagatgcctgagtgcagtaaaatcaaatcagagatgaagacaaaacttggtgagcagggtccgcagatcctcagtgtccagagagtctacattcagacaagggaagagaagcgtattaacctgaccattggtagcagagcctatttgctgcccaacacatccgtgattattaagtgccccgtgcgacgattccagaaatctctgatccagtgggagaaggatggccgttgcctgcagaactccaaacggcttggcatcaccaagtcaggctcactaaaaatccacggtcttgctgcccccgacatcggcgtgtaccggtgcattgcaggctttgcacaggaaacagttgtgctcaagctcattggtactgacaaccggctcatcgcacgcccagccctcagggagcctatgagggaatatcctgggatggaccacagcgaagccaatagtttgggagtcacatggcacaaaatgaggcaaatgtggaataacaaaaatgacctttatctggatgatgaccacattagtaaccagcctttcttgagagctctgttaggccactgcagcaattctgcaggaagcaccaactcctgggagttgaagaataagcagtttgaagcagcagttaaacaaggagcatatagcatggatacagcccagtttgatgagctgataagaaacatgagtcagctcatggaaaccggagaggtcagcgatgatcttgcgtcccagctgatatatcagctggtggccgaattagccaaggcacagccaacacacatgcagtggcggggcatccaggaagagacacctcctgctgctcagctcagaggggaaacagggagtgtgtcccaaagctcgcatgcaaaaaactcaggcaagctgacattcaagccgaaaggacctgttctcatgaggcaaagccaacctccctcaatttcatttaataaaacaataaattccaggattggaaatacagtatacattacaaaaaggacagaggtcatcaatatactgtgtgaccttattacccccagtgaggccacatatacatggaccaaggatggaaccttgttacagccctcagtaaaaataattttggatggaactgggaagatacagatacagaatcctacaaggaaagaacaaggcatatatgaatgttctgtagctaatcatcttggttcagatgtggaaagttcttctgtgctgtatgcagaggcacctgtcatcttgtctgttgaaagaaatatcaccaaaccagagcacaaccatctgtctgttgtggttggaggcatcgtggaggcagcccttggagcaaacgtgacaatccgatgtcctgtaaaaggtgtccctcagcctaatataacttggttgaagagaggaggatctctgagtggcaatgtttccttgcttttcaatggatccctgttgttgcagaatgtttcccttgaaaatgaaggaacctacgtctgcatagccaccaatgctcttggaaaggcagtggcaacatctgtactccacttgctggaacgaagatggccagagagtagaatcgtatttctgcaaggacataaaaagtacattctccaggcaaccaacactagaaccaacagcaatgacccaacaggagaacccccgcctcaagagcctttttgggagcctggtaactggtcacattgttctgccacctgtggtcatttgggagcccgcattcagagaccccagtgtgtgatggccaatgggcaggaagtgagtgaggccctgtgtgatcacctccagaagccactggctgggtttgagccctgtaacatccgggactgcccagcgaggtggttcacaagtgtgtggtcacagtgctctgtgtcttgcggtgaaggataccacagtcggcaggtgacgtgcaagcggacaaaagccaatggaactgtgcaggtggtgtctccaagatcatgtgcccctaaagaccggcctctgggaagaaaaccatgttttggtcatccatgtgttcagtgggaaccagggaaccggtgtcctggacgttgcatgggccgtgctgtgaggatgcagcagcgtcacacagcttgtcaacacaacagctctgactccaactgtgatgacagaaagagacccaccttaagaaggaactgcacatcaggggcctgtgatgtgtgttggcacacaggcccttggaagccctgtacagcagcctgtggcaggggtttccagtctcggaaagtcgactgtatccacacaaggagttgcaaacctgtggccaagagacactgtgtacagaaaaagaaaccaatttcctggcggcactgtcttgggccctcctgtgatagagactgcacagacacaactcactactgtatgtttgtaaaacatcttaatttgtgttctctagaccgctacaaacaaaggtgctgccagtcatgtcaagaggga

SEQ ID NO: 3116 - DNA, 1551 bp, Homo Sapiens
caggactccaggggctgtgcccggtggtgccctcaggactcctcgtgtgtcaatgccaccgcctgtcgctgcaatccagggttcagctctttttctgagatcatcaccacccccatggagacttgtgacgacatcaacgagtgtgcaacactgtcgaaagtgtcatgcggaaaattctcggactgctggaacacagaggggagctacgactgcgtgtgcagcccaggatatgagcctgtttctggggcaaaaacattcaagaatgagagcgagaacacgtgtcaagatgtggacgaatgtcagcagaacccaaggctctgtaaaagctacggcacctgcgtcaacacccttggcagctatacctgccagtgcctgcctggcttcaagttcatacctgaggatccgaaggtctgcacagatgtgaatgaatgcacctccggacaaaacccatgccacagctccacccactgcctcaacaacgtgggcagctatcagtgccgctgccgcccgggctggcaaccgattccggggtcccccaatggcccaaacaataccgtctgtgaagatgtggacgagtgcagctccgggcagcatcagtgtgacagctccaccgtctgcttcaacaccgtgggttcatacagctgccgctgccgcccaggctggaagcccagacacggaatcccgaataaccaaaaggacactgtctgtgaagatatgactttctccacctggaccccgccccctggagtccacagccagacgctttcccgattcttcgacaaagtccaggacctgggcagagactacaagccaggcttggccaataacaccatccagagcatcttacaggcgctggatgagctgctggaggtccctggggacctggagaccctgccccgcttacagcagcactgtgtggccagtcacctgctggatggcctagaggatgtcctcagaggcctgagcaagaacctttccaatgggctgttgaacttcagttatcctgcaggcacagaattgtccctggaggtgcagaagcaagtagacaggagtgtcaccttgagacagaatcaggcagtgatgcagctcgactggaatcaggcacagaaatctggtgacccaggcccttctgtggtgggccttgtctccattccagggatgggcaagttgctggctgaggcccctctggtcctggaacctgagaagcagatgcttctgcatgagacacaccagggcttgctgcaggacggctcccccatcctgctctcagatgtgatctctgcctttctgagcaacaacgacacccaaaacctcagctccccagttaccttcaccttctcccaccgttcagtgatcccgagacagaaggtgctctgtgtcttctgggagcatggccagaatggatgtggtcactgggccaccacaggctgcagcacaataggcaccagagacaccagcaccatctgccgttgcacccacctgagcagctttgccgtcctcatggcccactacgatgtgcaggaggaggatcccgtgctgactgtcatcacc

SEQ ID NO: 3117 - DNA, 873 bp, Homo Sapiens
gacattaatgaatgtacaccaccctatagtgtatattgtggatttaacgctgtgtgttacaatgtcgaaggaagtttctactgtcaatgtgtcccaggatatagactgcattctgggaatgaacaattcagtaattccaatgagaacacctgtcaggacaccacctcctcaaagacaacccagggcaggaaagagctgcaaaagattgtggacaaatttgagtcacttctcaccaatcagactttatggagaacagaagggagacaagaaatctcatccacagctaccactattctccgggatgtggaatcgaaagttctagaaactgccttgaaagatccagaacaaaaagtcctgaaaatccaaaacgatagtgtagctattgaaactcaagcgattacagacaattgctctgaagaaagaaagacattcaacttgaacgtccaaatgaactcaatggacatccgttgcagtgacatcatccagggagacacacaaggtcccagtgccattgcctttatctcatattcttctcttggaaacatcataaatgcaactttttttgaagagatggataagaaagatcaagtgtatctgaactctcaggttgtgagtgctgctattggacccaaaaggaacgtgtctctctccaagtctgtgacgctgactttccagcacgtgaagatgacccccagtaccaaaaaggtcttctgtgtctactggaagagcacagggcagggcagccagtggtccagggatggctgcttcctgatacacgtgaacaagagtcacaccatgtgtaattgcagtcacctgtccagcttcgctgtcctgatggccctgaccagccaggaggaggatcccgtgctgact

SEQ ID NO: 3118 - DNA, 528 bp, Homo Sapiens
cccccttgtccaaaatacgcaagttgtcacaattccacacattgtacgtgcgaggatggttttagagctagatctggaagaacgtattttcacgacagcagcgaaaaatgcgaagacataaacgagtgtgagacggggctggcgaaatgtaaatacaaggcctattgtagaaataaggtaggaggatacatttgcagctgccttgttaagtatacacttttcaattttctggcaggtataatagattatgaccacccggattgttacgagaataacagtcaagggactactcaaagcaatgttgatatatgggtgagcggggtaaaaccgggattcgggaaacaattgccaggcgataaacgtacaaaacatatttgcgtatactgggaaggaagtgaggggggttggagcacagaagggtgctcacacgtacatagtaacggtagctacactaaatgcaagtgtttccatttgagttcttttgcagtgctggtcgccttggctcctaaagaagaccccgtcttaaca

SEQ ID NO: 3119 - DNA, 966 bp, Homo Sapiens
gatgtggacgagtgcagctccgggcagcatcagtgtgacagctccaccgtctgcttcaacaccgtgggttcatacagctgccgctgccgcccaggctggaagcccagacacggaatcccgaataaccaaaaggacactgtctgtgaagatatgactttctccacctggaccccgccccctggagtccacagccagacgctttcccgattcttcgacaaagtccaggacctgggcagagactccaagacaagctcagccgaggtcaccatccagaatgtcatcaaattggtggatgaactgatggaagctcctggagacgtagaggccctggcgccacctgtccggcacctcatagccacccagctgctctcaaaccttgaagatatcatgaggatcctggccaagagcctgcctaaaggccccttcacctacatttccccttcgaacacagagctgaccctgatgatccaggagcggggggacaagaacgtcactatgggtcagagcagcgcacgcatgaagctgaattgggctgtggcagctggagccgaggatccaggccccgccgtggcgggcatcctctccatccagaacatgacgacattgctggccaatgcctccttgaacctgcattccaagaagcaagccgaactggaggagatatatgaaagcagcatccgtggtgtccaactcagacgcctctctgccgtcaactccatctttctgagccacaacaacaccaaggaactcaactcccccatccttttcgccttctcccaccttgagtcctccgatggggaggcgggaagagaccctcctgccaaggacgtgatgcctgggccacggcaggagctgctctgtgccttctggaagagtgacagcgacaggggagggcactgggccaccgagggctgccaggtgctgggcagcaagaacggcagcaccacctgccaatgcagccacctg

SEQ ID NO: 3120 - DNA, 156 bp, Homo Sapiens
taccgccagagcatgaacaacttccagggcctccggagctttggctgccgcttcgggacgtgcacggtgcagaagctggcacaccagatctaccagttcacagataaggacaaggacaacgtcgcccccaggagcaagatcagcccccagggctac

SEQ ID NO: 3121 - DNA, 141 bp, Homo Sapiens
acccaagcccagctcctgcgagtgggctgtgtgctgggcacctgccaggtgcagaatctcagccaccgcctgtggcaactcatgggaccggccggccggcaggactcagctcctgtggaccccagcagcccccacagctat

SEQ ID NO: 3122 - DNA, 960 bp, Homo Sapiens
gctcaaaacatcacagcccggattggcgagccactggtgctgaagtgtaagggggcccccaagaaaccaccccagcggctggaatggaaactgaacacaggccggacagaagcttggaaggtcctgtctccccagggaggaggcccctgggacagtgtggctcgtgtccttcccaacggctccctcttccttccggctgtcgggatccaggatgaggggattttccggtgccaggcaatgaacaggaatggaaaggagaccaagtccaactaccgagtccgtgtctaccagattcctgggaagccagaaattgtagattctgcctctgaactcacggctggtgttcccaataaggtggggacatgtgtgtcagagggaagctaccctgcagggactcttagctggcacttggatgggaagcccctggtgcctaatgagaagggagtatctgtgaaggaacagaccaggagacaccctgagacagggctcttcacactgcagtcggagctaatggtgaccccagcccggggaggagatccccgtcccaccttctcctgtagcttcagcccaggccttccccgacaccgggccttgcgcacagcccccatccagccccgtgtctgggagcctgtgcctctggaggaggtccaattggtggtggagccagaaggtggagcagtagctcctggtggaaccgtaaccctgacctgtgaagtccctgcccagccctctcctcaaatccactggatgaaggatggtgtgcccttgccccttccccccagccctgtgctgatcctccctgagatagggcctcaggaccagggaacctacagctgtgtggccacccattccagccacgggccccaggaaagccgtgctgtcagcatcagcatcatcgaaccaggcgaggaggggccaactgcaggctctgtgggaggatcagggctgggaactctagcc

SEQ ID NO: 3123 - DNA, 1296 bp, Homo Sapiens
tgccgctttggagccctgtgcgaggccgagaccgggcgctgcgtgtgcccctctgaatgcgtggctttggcccagcccgtgtgtggctccgacgggcacacgtaccccagcgagtgcatgctgcacgtgcacgcctgcacacaccagatcagcctgcacgtggcctcagctggaccctgtgagacctgtggagatgccgtgtgtgcttttggggctgtgtgctccgcagggcagtgtgtgtgtccccggtgtgagcaccccccgcccggccccgtgtgtggcagcgacggtgtcacctacggcagtgcctgcgagctacgggaagccgcctgcctccagcagacacagatcgaggaggcccgggcagggccgtgcgagcaggccgagtgcggttccggaggctctggctctggggaggacggtgactgtgagcaggagctgtgccggcagcgcggtggcatctgggacgaggactcggaggacgggccgtgtgtctgtgacttcagctgccagagtgtcccaggcagcccggtgtgcggctcagatggggtcacctacagcaccgagtgtgagctgaagaaggccaggtgtgagtcacagcgagggctctacgtagcggcccagggagcctgccgaggccccaccttcgccccgctgccgcctgtggcccccttacactgtgcccagacgccctacggctgctgccaggacaatatcaccgcagcccggggcgtgggcctggctggctgccccagtgcctgccagtgcaacccccatggctcttacggcggcacctgtgacccagccacaggccagtgctcctgccgcccaggtgtggggggcctcaggtgtgaccgctgtgagcctggcttctggaactttcgaggcatcgtcaccgatggccggagtggctgtacaccctgcagctgtgatccccaaggcgccgtgcgggatgactgtgagcagatgacggggctgtgctcgtgtaagcccggggtggctggacccaagtgtgggcagtgtccagacggccgtgccctgggccccgcgggctgtgaagctgacgcttctgcgcctgcgacctgtgcggagatgcgctgtgagttcggtgcgcggtgcgtggaggagtctggctcagcccactgtgtctgcccgatgctcacctgtccagaggccaacgctaccaaggtctgtgggtcagatggagtcacatacggcaacgagtgtcagctgaagaccatcgcctgccgccagggcctgcaaatctctatccagagcctgggcccgtgccaggag

SEQ ID NO: 3124 - DNA, 1500 bp, Homo Sapiens
tggtatactgtaaattcagcatatggagataccattatcataccttgccgacttgacgtacctcagaatctcatgtttggcaaatggaaatatgaaaagcccgatggctccccagtatttattgccttcagatcctctacaaagaaaagtgtgcagtacgacgatgtaccagaatacaaagacagattgaacctctcagaaaactacactttgtctatcagtaatgcaaggatcagtgatgaaaagagatttgtgtgcatgctagtaactgaggacaacgtgtttgaggcacctacaatagtcaaggtgttcaagcaaccatctaaacctgaaattgtaagcaaagcactgtttctcgaaacagagcagctaaaaaagttgggtgactgcatttcagaagacagttatccagatggcaatatcacatggtacaggaatggaaaagtgctacatccccttgaaggagcggtggtcataatttttaaaaaggaaatggacccagtgactcagctctataccatgacttccaccctggagtacaagacaaccaaggctgacatacaaatgccattcacctgctcggtgacatattatggaccatctggccagaaaacaattcattctgaacaggcagtatttgatatttactatcctacagagcaggtgacaatacaagtgctgccaccaaaaaatgccatcaaagaaggggataacatcactcttaaatgcttagggaatggcaaccctcccccagaggaatttttgttttacttaccaggacagcccgaaggaataagaagctcaaatacttacacactaacggatgtgaggcgcaatgcaacaggagactacaagtgttccctgatagacaaaaaaagcatgattgcttcaacagccatcacagttcactatttggatttgtccttaaacccaagtggagaagtgactagacagattggtgatgccctacccgtgtcatgcacaatatctgctagcaggaatgcaactgtggtatggatgaaagataacatcaggcttcgatctagcccgtcattttctagtcttcattatcaggatgctggaaactatgtctgcgaaactgctctgcaggaggttgaaggactaaagaaaagagagtcattgactctcattgtagaaggcaaacctcaaataaaaatgacaaaaaaaactgatcccagtggactatctaaaacaataatctgccatgtggaaggttttccaaagccagccattcaatggacaattactggcagtggaagcgtcataaaccaaacagaggaatctccttatattaatggcaggtattatagtaaaattatcatttcccctgaagagaatgttacattaacttgcacagcagaaaaccaactggagagaacagtaaactccttgaatgtctctgctataagtattccagaacacgatgaggcagacgagataagtgatgaaaacagagaaaaggtgaatgaccaggcaaaa

SEQ ID NO: 3125 - DNA, 768 bp, Homo Sapiens
ctgaatgacttgaatgtttccccgcctgagctaacagtccatgtgggtgattcagctctgatgggatgtgttttccagagcacagaagacaaatgtatattcaagatagactggactctgtcaccaggagagcacgccaaggacgaatatgtgctatactattactccaatctcagtgtgcctattgggcgcttccagaaccgcgtacacttgatgggggacatcttatgcaatgatggctctctcctgctccaagatgtgcaagaggctgaccagggaacctatatctgtgaaatccgcctcaaaggggagagccaggtgttcaagaaggcggtggtactgcatgtgcttccagaggagcccaaagagctcatggtccatgtgggtggattgattcagatgggatgtgttttccagagcacagaagtgaaacacgtgaccaaggtagaatggatattttcaggacggcgcgcaaaggaggagattgtatttcgttactaccacaaactcaggatgtctgtggagtactcccagagctggggccacttccagaatcgtgtgaacctggtgggggacattttccgcaatgacggttccatcatgcttcaaggagtgagggagtcagatggaggaaactacacctgcagtatccacctagggaacctggtgttcaagaaaaccattgtgctgcatgtcagcccggaagagcctcgaacactggtgaccccggcagccctgaggcctctggtcttgggtggtaatcagttg

SEQ ID NO: 3126 - DNA, 1035 bp, Homo Sapiens
ggccgagccgtggttagctgtcctgccgcctgcttgtgcgccagcaacatcctcagctgctccaagcagcagctgcccaatgtgccccattccctgcccagttacacagcactactggacctcagtcacaacaacctgagccgcctgcgggccgagtggacccccacgcgcctgacccaactgcactccctgctgctgagccacaaccacctgaacttcatctcctctgaggccttttccccggtacccaacctgcgctacctggacctctcctccaaccagctgcgtacactggatgagttcctgttcagtgacctgcaagtactggaggtgctgctgctctacaataaccacatcatggcggtggaccggtgcgccttcgatgacatggcccagctgcagaaactctacttgagccagaaccagatctctcgcttccctctggaactggtcaaggaaggagccaagctacccaaactaacgctcctggatctctcttctaacaagctgaagaacttgccattgcctgacctgcagaagctgccggcctggatcaagaatgggctgtacctacataacaaccccctgaactgcgactgtgagctctaccagctgttttcacactggcagtatcggcagctgagctccgtgatggactttcaagaggatctgtactgcatgaactccaagaagctgcacaatgtcttcaacctgagtttcctcaactgtggcgagtacaaggagcgtgcctgggaggcccacctgggtgacaccttgatcatcaagtgtgacaccaagcagcaagggatgaccaaggtgtgggtgacaccaagtaatgaacgggtgctagatgaggtgaccaatggcacagtgagtgtgtctaaggatggcagtcttcttttccagcaggtgcaggtcgaggacggtggtgtgtatacctgctatgccatgggagagactttcaatgagacactgtctgtggaattgaaagtgcacaatttcaccttgcacggacaccatgacaccctcaacaca

SEQ ID NO: 3127 - DNA, 1077 bp, Homo Sapiens
gtgtgccccaccgcttgcatctgtgccactgacatcgtcagctgcaccaacaaaaacctgtccaaggtgcctgggaaccttttcagactgattaagagactggacctgagttataacagaattgggcttctggattctgagtggattccagtatcgtttgcaaagctgaacaccctaattcttcgtcataacaacatcaccagcatttccacgggcagtttttccacaactccaaatttgaagtgtcttgacttatcgtccaataagctgaagacggtgaaaaatgctgtattccaagagttgaaggttctggaagtgcttctgctttacaacaatcacatatcctatctcgatccttcagcgtttggagggctctcccagttgcagaaactctacttaagtggaaattttctcacacagtttccgatggatttgtatgttggaaggttcaagctggcagaactgatgtttttagatgtttcttataaccgaattccttccatgccaatgcaccacataaatttagtgccaggaaaacagctgagaggcatctaccttcatggaaacccatttgtctgtgactgttccctgtactccttgctggtcttttggtatcgtaggcactttagctcagtgatggattttaagaacgattacacctgtcgcctgtggtctgactccaggcactcgcgtcaggtacttctgctccaggatagctttatgaattgctctgacagcatcatcaatggttcctttcgtgcgcttggctttattcatgaggctcaggtcggggaaagactgatggtccactgtgacagcaagacaggtaatgcaaatacggatttcatctgggtgggtccagataacagactgctagagccggataaagagatggaaaacttttacgtgtttcacaatggaagtctggttatagaaagccctcgttttgaggatgctggagtgtattcttgtatcgcaatgaataagcaacgcctgttaaatgaaactgtggacgtcacaataaatgtgagcaatttcactgtaagcagatcccatgctcatgaggcatttaacaca

SEQ ID NO: 3128 - DNA, 1092 bp, Homo Sapiens
accccggactccgagggtttcccgccccgtgcgctccacaactgcccctacaaatgtatctgcgctgccgacctgctaagctgcactggcctagggctgcaggacgtgccagccgagttacctgccgctactgcggacctcgacctgagccacaacgcgctccagcgcctgcgccccggctggttggcgcccctcttccagctgcgcgccctgcacctagaccacaacgaactagatgcgctgggtcgcggcgtcttcgtcaacgccagcggcctgaggctgctcgatctatcatctaacacgttgcgggcgcttggccgccacgacctcgacgggctgggggcgctggagaagctgcttctgttcaataaccgcttggtgcacttggacgagcatgccttccacggcctgcgcgcgctcagccatctctacctgggctgcaacgaactcgcctcgttctccttcgaccacctgcacggtctgagcgccacccacctgcttactctggacctctcctccaaccggctgggacacatctccgtacctgagctggccgcgctgccggccttcctcaagaacggcctctacttgcacaacaaccctttgccttgcgactgccgcctctaccacctgctacagcgctggcaccagcggggcctgagcgccgtgcgcgactttgcgcgcgagtacgtatgcttggccttcaaggtacccgcgtcccgcgtgcgcttcttccagcacagccgcgtctttgagaactgctcgtcggccccagctcttggcctagagcggccggaagagcacctgtacgcgctggtgggtcggtccctgaggctttactgcaacaccagcgtcccggccatgcgcattgcctgggtttcgccgcagcaggagcttctcagggcgccaggatcccgcgatggcagcatcgcggtgctggccgacggcagcttggccataggcaacgtacaggagcagcatgcgggactcttcgtgtgcctggccactgggccccgcctgcaccacaaccagacgcacgagtacaacgtgagcgtgcactttccgcgcccagagcccgaggctttcaacaca

SEQ ID NO: 3129 - DNA, 1449 bp, Homo Sapiens
cacatagggtgcagcaatcagcgccgaagtccagaaaacagtgggagaagatataaccggattcaacatgggcaatgtgcctacactttcattcttccagaacacgatggcaactgtcgtgagagtacgacagaccagtacaacacaaacgctctgcagagagatgctccacacgtggaaccggatttctcttcccagaaacttcaacatctggaacatgtgatggaaaattatactcagtggctgcaaaaacttgagaattacattgtggaaaacatgaagtcggagatggcccagatacagcagaatgcagttcagaaccacacggctaccatgctggagataggaaccagcctcctctctcagactgcagagcagaccagaaagctgacagatgttgagacccaggtactaaatcaaacttctcgacttgagatacagctgctggagaattcattatccacctacaagctagagaagcaacttcttcaacagacaaatgaaatcttgaagatccatgaaaaaaacagtttattagaacataaaatcttagaaatggaaggaaaacacaaggaagagttggacaccttaaaggaagagaaagagaaccttcaaggcttggttactcgtcaaacatatataatccaggagctggaaaagcaattaaacagagctaccaccaacaacagtgtccttcagaagcagcaactggagctgatggacacagtccacaaccttgtcaatctttgcactaaagaaggtgttttactaaagggaggaaaaagagaggaagagaaaccatttagagactgtgcagatgtatatcaagctggttttaataaaagtggaatctacactatttatattaataatatgccagaacccaaaaaggtgttttgcaatatggatgtcaatgggggaggttggactgtaatacaacatcgtgaagatggaagtctagatttccaaagaggctggaaggaatataaaatgggttttggaaatccctccggtgaatattggctggggaatgagtttatttttgccattaccagtcagaggcagtacatgctaagaattgagttaatggactgggaagggaaccgagcctattcacagtatgacagattccacataggaaatgaaaagcaaaactataggttgtatttaaaaggtcacactgggacagcaggaaaacagagcagcctgatcttacacggtgctgatttcagcactaaagatgctgataatgacaactgtatgtgcaaatgtgccctcatgttaacaggaggatggtggtttgatgcttgtggcccctccaatctaaatggaatgttctatactgcgggacaaaaccatggaaaactgaatgggataaagtggcactacttcaaagggcccagttactccttacgttccacaactatgatgattcgacctttagatttt

SEQ ID NO: 3130 - DNA, 1434 bp, Homo Sapiens
tataacaactttcggaagagcatggacagcataggaaagaagcaatatcaggtccagcatgggtcctgcagctacactttcctcctgccagagatggacaactgccgctcttcctccagcccctacgtgtccaatgctgtgcagagggacgcgccgctcgaatacgatgactcggtgcagaggctgcaagtgctggagaacatcatggaaaacaacactcagtggctaatgaagcttgagaattatatccaggacaacatgaagaaagaaatggtagagatacagcagaatgcagtacagaaccagacggctgtgatgatagaaatagggacaaacctgttgaaccaaacagcggagcaaacgcggaagttaactgatgtggaagcccaagtattaaatcagaccacgagacttgaacttcagctcttggaacactccctctcgacaaacaaattggaaaaacagattttggaccagaccagtgaaataaacaaattgcaagataagaacagtttcctagaaaagaaggtgctagctatggaagacaagcacatcatccaactacagtcaataaaagaagagaaagatcagctacaggtgttagtatccaagcaaaattccatcattgaagaactagaaaaaaaaatagtgactgccacggtgaataattcagttcttcaaaagcagcaacatgatctcatggagacagttaataacttactgactatgatgtccacatcaaactcagctaaggaccccactgttgctaaagaagaacaaatcagcttcagagactgtgctgaagtattcaaatcaggacacaccacgaatggcatctacacgttaacattccctaattctacagaagagatcaaggcctactgtgacatggaagctggaggaggcgggtggacaattattcagcgacgtgaggatggcagcgttgattttcagaggacttggaaagaatataaagtgggatttggtaacccttcaggagaatattggctgggaaatgagtttgtttcgcaactgactaatcagcaacgctacgtgcttaaaatacaccttaaagactgggaagggaatgaggcttactcattgtatgaacatttctatctctcaagtgaagaactcaattataggattcaccttaaaggacttacagggacagccggcaaaataagcagcatcagccaaccaggaaatgattttagcacaaaggatggagacaacgacaaatgtatttgcaaatgttcacaaatgctaacaggaggctggtggtttgatgcatgtggtccttccaacttgaacggaatgtactatccacagaggcagaacacaaataagttcaacggcattaaatggtactactggaaaggctcaggctattcgctcaaggccacaaccatgatgatccgaccagcagatttc

SEQ ID NO: 3131 - DNA, 1437 bp, Homo Sapiens
acaaggcaggaggcggataggggctgcgagacacttgtagtccagcacggccactgtagctacaccttcttgctgcccaagtctgagccctgccctccggggcctgaggtctccagggactccaacaccctccagagagaatcactggccaacccactgcacctggggaagttgcccacccagcaggtgaaacagctggagcaggcactgcagaacaacacgcagtggctgaagaagctagagagggccatcaagacgatcttgaggtcgaagctggagcaggtccagcagcaaatggcccagaatcagacggcccccatgctagagctgggcaccagcctcctgaaccagaccactgcccagatccgcaagctgaccgacatggaggctcagctcctgaaccagacatcaagaatggatgcccagatgccagagacctttctgtccaccaacaagctggagaaccagctgctgctacagaggcagaagctccagcagcttcagggccaaaacagcgcgctggagaagcggttgcaggccctggagaccaagcagcaggaggagctggccagcatcctcagcaagaaggcgaagctgctgaacacgctgagccgccagagcgccgccctcaccaacatcgagcgcggcctgcgcggtgtcaggcacaactccagcctcctgcaggaccagcagcacagcctgcgccagctgctggtgttgttgcggcacctggtgcaagaaagggctaacgcctcggccccggccttcataatggcaggtgagcaggtgttccaggactgtgcagagatccagcgctctggggccagtgccagtggtgtctacaccatccaggtgtccaatgcaacgaagcccaggaaggtgttctgtgacctgcagagcagtggaggcaggtggaccctcatccagcgccgtgagaatggcaccgtgaattttcagcggaactggaaggattacaaacagggcttcggagacccagctggggagcactggctgggcaatgaagtggtgcaccagctcaccagaagggcagcctactctctgcgtgtggagctgcaagactgggaaggccacgaggcctatgcccagtacgaacatttccacctgggcagtgagaaccagctatacaggctttctgtggtcgggtacagcggctcagcagggcgccagagcagcctggtcctgcagaacaccagctttagcacccttgactcagacaacgaccactgtctctgcaagtgtgcccaagtgatgtctggagggtggtggtttgacgcctgtggcctgtcaaacctcaacggcgtctactaccacgctcccgacaacaagtacaagatggacggcatccgctggcactacttcaagggccccagctactcactgcgtgcctctcgcatgatgatacggcctttggacatc

SEQ ID NO: 3132 - DNA, 1413 bp, Homo Sapiens
caggaggacggttttgagggcactgaggagggctcgccaagagagttcatttacctaaacaggtacaagcgggcgggcgagtcccaggacaagtgcacctacaccttcattgtgccccagcagcgggtcacgggtgccatctgcgtcaactccaaggagcctgaggtgcttctggagaaccgagtgcataagcaggagctagagctgctcaacaatgagctgctcaagcagaagcggcagatcgagacgctgcagcagctggtggaggtggacggcggcattgtgagcgaggtgaagctgctgcgcaaggagagccgcaacatgaactcgcgggtcacgcagctctacatgcagctcctgcacgagatcatccgcaagcgggacaacgcgttggagctctcccagctggagaacaggatcctgaaccagacagccgacatgctgcagctggccagcaagtacaaggacctggagcacaagtaccagcacctggccacactggcccacaaccaatcagagatcatcgcgcagcttgaggagcactgccagagggtgccctcggccaggcccgtcccccagccaccccccgctgccccgccccgggtctaccaaccacccacctacaaccgcatcatcaaccagatctctaccaacgagatccagagtgaccagaacctgaaggtgctgccaccccctctgcccactatgcccactctcaccagcctcccatcttccaccgacaagccgtcgggcccatggagagactgcctgcaggccctggaggatggccacgacaccagctccatctacctggtgaagccggagaacaccaaccgcctcatgcaggtgtggtgcgaccagagacacgaccccgggggctggaccgtcatccagagacgcctggatggctctgttaacttcttcaggaactgggagacgtacaagcaagggtttgggaacattgacggcgaatactggctgggcctggagaacatttactggctgacgaaccaaggcaactacaaactcctggtgaccatggaggactggtccggccgcaaagtctttgcagaatacgccagtttccgcctggaacctgagagcgagtattataagctgcggctggggcgctaccatggcaatgcgggtgactcctttacatggcacaacggcaagcagttcaccaccctggacagagatcatgatgtctacacaggaaactgtgcccactaccagaagggaggctggtggtataacgcctgtgcccactccaacctcaacggggtctggtaccgcgggggccattaccggagccgctaccaggacggagtctactgggctgagttccgaggaggctcttactcactcaagaaagtggtgatgatgatccgaccgaaccccaacaccttccac

SEQ ID NO: 3133 - DNA, 1332 bp, Homo Sapiens
tccagaattgatcaagacaattcatcatttgattctctatctccagagccaaaatcaagatttgctatgttagacgatgtaaaaattttagccaatggcctccttcagttgggacatggtcttaaagactttgtccataagacgaagggccaaattaatgacatatttcaaaaactcaacatatttgatcagtctttttatgatctatcgctgcaaaccagtgaaatcaaagaagaagaaaaggaactgagaagaactacatataaactacaagtcaaaaatgaagaggtaaagaatatgtcacttgaactcaactcaaaacttgaaagcctcctagaagaaaaaattctacttcaacaaaaagtgaaatatttagaagagcaactaactaacttaattcaaaatcaacctgaaactccagaacacccagaagtaacttcacttaaaacttttgtagaaaaacaagataatagcatcaaagaccttctccagaccgtggaagaccaatataaacaattaaaccaacagcatagtcaaataaaagaaatagaaaatcagctcagaaggactagtattcaagaacccacagaaatttctctatcttccaagccaagagcaccaagaactactccctttcttcagttgaatgaaataagaaatgtaaaacatgatggcattcctgctgaatgtaccaccatttataacagaggtgaacatacaagtggcatgtatgccatcagacccagcaactctcaagtttttcatgtctactgtgatgttatatcaggtagtccatggacattaattcaacatcgaatagatggatcacaaaacttcaatgaaacgtgggagaactacaaatatggttttgggaggcttgatggagaattttggttgggcctagagaagatatactccatagtgaagcaatctaattatgttttacgaattgagttggaagactggaaagacaacaaacattatattgaatattctttttacttgggaaatcacgaaaccaactatacgctacatctagttgcgattactggcaatgtccccaatgcaatcccggaaaacaaagatttggtgttttctacttgggatcacaaagcaaaaggacacttcaactgtccagagggttattcaggaggctggtggtggcatgatgagtgtggagaaaacaacctaaatggtaaatataacaaaccaagagcaaaatctaagccagagaggagaagaggattatcttggaagtctcaaaatggaaggttatactctataaaatcaaccaaaatgttgatccatccaacagattcagaaagctttgaa

SEQ ID NO: 3134 - DNA, 1143 bp, Homo Sapiens
ggacccgtgcagtccaagtcgccgcgctttgcgtcctgggacgagatgaatgtcctggcgcacggactcctgcagctcggccaggggctgcgcgaacacgcggagcgcacccgcagtcagctgagcgcgctggagcggcgcctgagcgcgtgcgggtccgcctgtcagggaaccgaggggtccaccgacctcccgttagcccctgagagccgggtggaccctgaggtccttcacagcctgcagacacaactcaaggctcagaacagcaggatccagcaactcttccacaaggtggcccagcagcagcggcacctggagaagcagcacctgcgaattcagcatctgcaaagccagtttggcctcctggaccacaagcacctagaccatgaggtggccaagcctgcccgaagaaagaggctgcccgagatggcccagccagttgacccggctcacaatgtcagccgcctgcaccggctgcccagggattgccaggagctgttccaggttggggagaggcagagtggactatttgaaatccagcctcaggggtctccgccatttttggtgaactgcaagatgacctcagatggaggctggacagtaattcagaggcgccacgatggctcagtggacttcaaccggccctgggaagcctacaaggcggggtttggggatccccacggcgagttctggctgggtctggagaaggtgcatagcatcacgggggaccgcaacagccgcctggccgtgcagctgcgggactgggatggcaacgccgagttgctgcagttctccgtgcacctgggtggcgaggacacggcctatagcctgcagctcactgcacccgtggccggccagctgggcgccaccaccgtcccacccagcggcctctccgtacccttctccacttgggaccaggatcacgacctccgcagggacaagaactgcgccaagagcctctctggaggctggtggtttggcacctgcagccattccaacctcaacggccagtacttccgctccatcccacagcagcggcagaagcttaagaagggaatcttctggaagacctggcggggccgctactacccactgcaggccaccaccatgttgatccagcccatggcagcagaggcagcctcc

SEQ ID NO: 3135 - DNA, 903 bp, Homo Sapiens
gaggatgggggtccagcctgctacggcggatttgacctgtacttcattttggacaaatcaggaagtgtgctgcaccactggaatgaaatctattactttgtggaacagttggctcacaaattcatcagcccacagttgagaatgtcctttattgttttctccacccgaggaacaaccttaatgaaactgacagaagacagagaacaaatccgtcaaggcctagaagaactccagaaagttctgccaggaggagacacttacatgcatgaaggatttgaaagggccagtgagcagatttattatgaaaacagacaagggtacaggacagccagcgtcatcattgctttgactgatggagaactccatgaagatctctttttctattcagagagggaggctaataggtctcgagatcttggtgcaattgtttactgtgttggtgtgaaagatttcaatgagacacagctggcccggattgcggacagtaaggatcatgtgtttcccgtgaatgacggctttcaggctctgcaaggcatcatccactcaattttgaagaagtcctgcatcgaaattctagcagctgaaccatccaccatatgtgcaggagagtcatttcaagttgtcgtgagaggaaacggcttccgacatgcccgcaacgtggacagggtcctctgcagcttcaagatcaatgactcggtcacactcaatgagaagcccttttctgtggaagatacttatttactgtgtccagcgcctatcttaaaagaagttggcatgaaagctgcactccaggtcagcatgaacgatggcctctcttttatctccagttctgtcatcatcaccaccacacactgtagcctccacaaaattgcatcaggccccacaacagctgcttgcatggaa

SEQ ID NO: 3136 - DNA, 855 bp, Homo Sapiens
caggaacaaccttcatgcaggcgtgcctttgatttgtatttcgtcctggacaagtccggatctgttgcgaataattggatagagatctacaattttgttcagcaattggcagaacgttttgtaagtccggaaatgcgtctttccttcatcgtattctcaagtcaagcaactattattcttccactgacgggggacaggggtaaaatctcaaagggacttgaagacttaaaaagggtatccccagtgggcgagacttatatccatgagggcctgaaattagcaaacgagcagattcagaaagcgggtggcctaaaaacttcaagtatcattattgccctaaccgacggaaaattggacggtcttgtaccgtcatatgcagagaaagaggcaaagattagcaggtccctgggagcaagtgtttattgtgtaggcgtattagacttcgagcaggcacagctagagaggattgctgatagcaaagaacaggtttttcctgtgaaggggggtttccaggcgttaaaggggataatcaatagtattctagcacagagctgtacggagatattggaacttcaacctagtagcgtctgcgtcggtgaggagtttcagattgtattatcagggagggggtttatgctagggagtcgtaatggttctgtcttgtgtacctatactgtgaacgagacctacacgacatcagttaaacctgtgtccgtccagctaaacagtatgctttgccccgcaccaatcctgaacaaagccggcgagacactagacgtgagtgtatcattcaatggtggaaaaagtgttattagcgggtccctgatagtcactgcaactgaatgtagtaacggg

SEQ ID NO: 3137 - DNA, 978 bp, Homo Sapiens
ggctctttgcgttaccatggtcccgactggagaatcttccaccgtctagctttgggttccagaagggcgcatcatcatcatggccccggatggcgtcagcactggaggcaaggacaagcgggacacagatgccagggcagtttcgacctttatttcatccttgataagtctgggtcagtaaacaacaactggattgatctgtatatgtgggttgaggagacagttgcaaggtttcagagtcccaacataagaatgtgttttattacctactcaaccgacgggcagacggtgttgcctctaaccagtgacaagaataggataaaaaatgggctagatcaacttcagaaaatcgtgccggatggtcacacattcatgcaggccggctttaggaaagcaatacaacagattgagtctttcaacagtggcaacaaggtcccatccatgattatcgcgatgactgatggagagttagttgcacacgcgttccaggatacattgagggaggcgcagaaagcgagaaaactaggagctaacgtctacactctaggcgtagccgattataatctggatcagatcaccgccatcgcggactcccccggacacgtattcgctgtggagaacgggttcaaggcccttcgttcaacgatagatgcactaactagtaaagtgtgcttggatgttacctccgtagagccctctagcgaatgcgtgggagagccctatcatgtagtgattcatgggaatgggtttcaaaatttgaaaaagagggacgaggttatatgcaggtttatttttaatgagagcactattatagacgagaagcccacttccattgataacaatagcatgaattgtccaggccccaaacttgagaaacctggagaggagtattccatagaagtatctttgaacaagggcaagactttctttaaatccaatgtctctatcacgagcacgacttgcgggatatttagaaac

SEQ ID NO: 3138 - DNA, 261 bp, Homo Sapiens
tcagtcagagttgaacaggtagttaagcccccccaaaacaagacggaaagtgaaaatacttcagataaacccaaaagaaagaaaaagggaggcaaaaatggaaaaaatagaagaaacagaaagaagaaaaatccatgtaatgcagaatttcaaaatttctgcattcacggagaatgcaaatatatagagcacctggaagcagtaacatgcaaatgtcagcaagaatatttcggtgaacggtgtggggaaaagtccatgaaa

SEQ ID NO: 3139 - DNA, 651 bp, Homo Sapiens
actcacactgagatcaagagagtggcagaggaaaaggtcactttgccctgccaccatcaactggggcttccagaaaaagacactctggatattgaatggctgctcaccgataatgaagggaaccaaaaagtggtgatcacttactccagtcgtcatgtctacaataacttgactgaggaacagaagggccgagtggcctttgcttccaatttcctggcaggagatgcctccttgcagattgaacctctgaagcccagtgatgagggccggtacacctgtaaggttaagaattcagggcgctacgtgtggagccatgtcatcttaaaagtcttagtgagaccatccaagcccaagtgtgagttggaaggagagctgacagaaggaagtgacctgactttgcagtgtgagtcatcctctggcacagagcccattgtgtattactggcagcgaatccgagagaaagagggagaggatgaacgtctgcctcccaaatctaggattgactacaaccaccctggacgagttctgctgcagaatcttaccatgtcctactctggactgtaccagtgcacagcaggcaacgaagctgggaaggaaagctgtgtggtgcgagtaactgtacagtatgtacaaagcatcggcatggttgca

SEQ ID NO: 3140 - DNA, 690 bp, Homo Sapiens
caaaactcccagctgcaggaggagctgcggggcctgagagagacgttcagcaacttcacagcgagcacggaggcccaggtcaagggcttgagcacccagggaggcaatgtgggaagaaagatgaagtcgctagagtcccagctggagaaacagcagaaggacctgagtgaagatcactccagcctgctgctccacgtgaagcagttcgtgtctgacctgcggagcctgagctgtcagatggcggcgctccagggcaatggctcagaaaggacctgctgcccggtcaactgggtggagcacgagcgcagctgctactggttctctcgctccgggaaggcctgggctgacgccgacaactactgccggctggaggacgcgcacctggtggtggtcacgtcctgggaggagcagaaatttgtccagcaccacataggccctgtgaacacctggatgggcctccacgaccaaaacgggccctggaagtgggtggacgggacggactacgagacgggcttcaagaactggaggccggagcagccggacgactggtacggccacgggctcggaggaggcgaggactgtgcccacttcaccgacgacggccgctggaacgacgacgtctgccagaggccctaccgctgggtctgcgagacagagctggacaaggccagccaggagccacctctcctt

SEQ ID NO: 3141 - DNA, 681 bp, Homo Sapiens
caaagtgcacagctgcaagccgagctgcggagcctgaaggaagctttcagcaacttctcctcgagcaccctgacggaggtccaggcaatcagcacccacggaggcagcgtgggtgacaagatcacatccctaggagccaagctggagaaacagcagcaggacctgaaagcagatcacgatgccctgctcttccatctgaagcacttccccgtggacctgcgcttcgtggcctgccagatggagctcctccacagcaacggctcccaaaggacctgctgccccgtcaactgggtggagcaccaaggcagctgctactggttctctcactccgggaaggcctgggctgaggcggagaagtactgccagctggagaacgcacacctggtggtcatcaactcctgggaggagcagaaattcattgtacaacacacgaaccccttcaatacctggataggtctcacggacagtgatggctcttggaaatgggtggatggcacagactataggcacaactacaagaactgggctgtcactcagccagataattggcacgggcacgagctgggtggaagtgaagactgtgttgaagtccagccggatggccgctggaacgatgacttctgcctgcaggtgtaccgctgggtgtgtgagaaaaggcggaatgccaccggcgaggtggcc

SEQ ID NO: 3142 - DNA, 1056 bp, Homo Sapiens
gatatggaagacacagatgatgatgatgatgatgatgatgatgatgatgatgatgatgatgatgatgaggaggacaactctctttttccaacaagagagccaagaagccatttttttccatttgatctgtttccaatgtgtccatttggatgtcagtgctattcacgagttgtacattgctcagatttaggtttgacctcagtcccaaccaacattccatttgatactcgaatgcttgatcttcaaaacaataaaattaaggaaatcaaagaaaatgattttaaaggactcacttcactttatggtctgatcctgaacaacaacaagctaacgaagattcacccaaaagcctttctaaccacaaagaagttgcgaaggctgtatctgtcccacaatcaactaagtgaaataccacttaatcttcccaaatcattagcagaactcagaattcatgaaaataaagttaagaaaatacaaaaggacacattcaaaggaatgaatgctttacacgttttggaaatgagtgcaaaccctcttgataataatgggatagagccaggggcatttgaaggggtgacggtgttccatatcagaattgcagaagcaaaactgacctcagttcctaaaggcttaccaccaactttattggagcttcacttagattataataaaatttcaacagtggaacttgaggattttaaacgatacaaagaactacaaaggctgggcctaggaaacaacaaaatcacagatatcgaaaatgggagtcttgctaacataccacgtgtgagagaaatacatttggaaaacaataaactaaaaaaaatcccttcaggattaccagagttgaaatacctccagataatcttccttcattctaattcaattgcaagagtgggagtaaatgacttctgtccaacagtgccaaagatgaagaaatctttatacagtgcaataagtttattcaacaacccggtgaaatactgggaaatgcaacctgcaacatttcgttgtgttttgagcagaatgagtgttcagcttgggaactttggaatg

SEQ ID NO: 3143 - DNA, 2442 bp, Homo Sapiens
cacgtcaactgccctctcgttgtcaagatcaccctgcatgtccctgagcacctgattgctgatgggagccgcttcatcttgctggaggggagccagctggatgccagtgactggctgaaccctgcccaagtggttctcttctctcagcagaactccagcggaccctgggccatggacctctgtgcccggcggctcctggacccctgtgaacaccaatgtgaccccgaaactggggaatgcctctgctatgaaggctacatgaaggatccagtacataagcacctttgcattcggaacgaatgggggacaaaccaggggccatggccttacacaatatttcagcgaggctttgacctggttttgggagagcagccctctgataaaatatttagattcacctacactcttggggagggcatgtggttgcccctcagcaagagctttgtgattccaccagccgaactggccatcaatccatcagcaaagtgcaagacggacatgactgtgatggaggatgctgtggaggtcagagaggagctgatgacttcatcctccttcgacagcctggaggttctcttagattcctttgggccggtgcgcgactgcagcaaagataacgggggctgcagtaagaatttccgctgtatttcagatcgcaagctggactccactggttgcgtgtgcccatctggactcagtcccatgaaggacagctctggctgctatgaccgccacatcggggtggactgttccgacggcttcaacggcggctgtgagcagctgtgcctccagcagatggcgcccttcccggacgaccccaccttgtataacatcctcatgttctgtgggtgcatcgaggactacaagcttggtgtggatggacgctcttgccaactcatcacggagacctgtccagagggaagtgactgtggggaaagcagggagcttcccatgaaccagaccctctttggggagatgttctttggttacaacaaccattccaaggaagtggctgccggacaggtgctgaaaggaacattcaggcaaaacaactttgctcgtggtttagaccagcaactgccagatggtcttgtggtggccactgtgcccctggagaatcaatgcctagaggagatctcggagcccacccctgaccctgacttcctgactgggatggtgaacttcagtgaagtgtctgggtaccctgtgctgcagcactggaaggtccggtctgtgatgtaccacatcaaactcaaccaagtggccatctctcaggccctcagcaatgctctccactcgctggatggggctacatctcgtgcagattttgtggcgctgttggaccagttcggcaaccattacatccaggaagctatctacggctttgaggagtcctgttctatctggtacccaaacaagcaggtccagcggcgactctggctggagtatgaagacatcagtaaaggcaactccccatcagatgagtctgaggagcgggaaagagaccccaaggtgctgacattcccagaatacatcaccagcttgtcagactccggcaccaagcgcatggcggctggagtccgcatggagtgccagagcaagggacgatgcccctcgtcctgccccctgtgtcatgtgacatccagccctgacacccctgctgagccggttctgctggaggtgaccaaagcagcccccatctatgaactagtgaccaacaaccagacccagaggctcttgcaggaggctaccatgagctctctctggtgctcagggactggagatgtcatcgaggactggtgtcgatgtgactccactgcttttggagctgatggactccccacctgtgcgcctctcccacagcctgtgctgagactctccacggttcacgagcccagcagcactcttgtggtcctggagtgggaacactcagagccaccaatcggggtgcagattgtagattacctcctccgtcaagagaaagtcactgacaggatggaccactccaaagtggagacagaaacagtgctgagctttgtggacgacatcatctctggagcaaagtctccttgtgcaatgccatctcaggtgccggacaagcagctcaccaccatctctctgatcatacgatgcctggaacctgacaccatttacatgttcacgctgtggggagtggacaacacaggacggcgctccaggccaagcgacgtgatcgtgaagaccccatgccccgtggtggatgatgtcaaggctcaagaaatagcagacaagatctacaatctcttcaatggctacactagtgggaaggagcagcagaccgcctacaacaccctcctggatctgggttcccccaccttacaccgggtcctctaccactataaccagcactatgagagttttggggaattcacctggcgatgtgaggatgagttaggtcccagg

SEQ ID NO: 3144 - DNA, 471 bp, Homo Sapiens
ggagctactgcggcagctagtagggaaccagactcaccttgtagacttaagacagtaacggtctctactctaccggctttgagggaaagtgacattggctggtctggggcaagagccggtgcaggtgccggaaccggcgcaggagcggctgctgctgcggcctcccctgggagtccgggaagcgctggaacagctgcggagagtcgtctactattattcgtcaggaatgaactgccgggaaggatcgccgttcaggacgatctggataacactgagttacctttttttacgttggaaatgagcgggacagccgccgacatatcattggtccactggcgtcagcagtggcttgaaaacggtacactttactttcatgtatctatgtcttcatcaggtcagctggcacaggcaacggcaccaaccttgcaggagccgtcagagatagtagaagagcagatgcacatattacat

SEQ ID NO: 3145 - DNA, 507 bp, Homo Sapiens
ctacccgagatatgcacccaatgtccagggagcgtgcaaaatttgtcaaaagtggccttttattgtaaaacgacacgagagctaatgctgcatgcccgttgctgcctgaatcagaagggcaccatcttggggctggatctccagaactgttctctggaggaccctggtccaaactttcatcaggcacataccactgtcatcatagacctgcaagcaaaccccctcaaaggtgacttggccaacaccttccgtggctttactcagctccagactctgatactgccacaacatgtcaactgtcctggaggaattaatgcctggaatactatcacctcttatatagacaaccaaatctgtcaagggcaaaagaacctttgcaataacactggggacccagaaatgtgtcctgagaatggatcttgtgtacctgatggtccaggtcttttgcagtgtgtttgtgctgatggtttccatggatacaagtgtatgcgccagggctcgttctca

SEQ ID NO: 3146 - DNA, 3567 bp, Homo Sapiens
gccgcggcggcggcggcggtgtcgggctcagccgcagccgaggccaaggaatgtgaccggccctgtgtcaacggcggtcgctgcaaccctggcaccggccagtgcgtctgccccgccggctgggtgggcgagcaatgccagcactgcgggggccgcttcagactaactggatcttctgggtttgtgacagatggacctggaaattataaatacaaaacgaagtgcacgtggctcattgaaggacagccaaatagaataatgagacttcgtttcaatcattttgctacagagtgtagttgggaccatttatatgtttatgatggggactcaatttatgcaccgctagttgctgcatttagtggcctcattgttcctgagagagatggcaatgagactgtccctgaggttgttgccacatcaggttatgccttgctgcatttttttagtgatgctgcttataatttgactggatttaatattacttacagttttgatatgtgtccaaataactgctcaggccgaggagagtgtaagatcagtaatagcagcgatactgttgaatgtgaatgttctgaaaactggaaaggtgaagcatgtgacattcctcactgtacagacaactgtggttttcctcatcgaggcatctgcaattcaagtgatgtcagaggatgctcctgcttctcagactggcagggtcctggatgttcagttcctgtaccagctaaccagtcattttggactcgagaggaatattctaacttaaagctccccagagcatctcataaagctgtggtcaatggaaacattatgtgggttgttggaggatatatgttcaaccactcagattataacatggttctagcgtatgaccttgcttctagggagtggcttccactaaaccgttctgtgaacaatgtggttgttagatatggtcattctttggcattatacaaggataaaatttacatgtatggaggaaaaattgattcaactgggaatgtgaccaatgagttgagagtttttcacattcataatgagtcatgggtgttgttgacccctaaggcaaaggagcagtatgcagtggttgggcactctgcacacattgttacactgaagaatggccgagtggtcatgctggtcatctttggtcactgccctctctatggatatataagcaatgtgcaggaatatgatttggataagaacacatggagtatattacacacccagggtgcccttgtgcaagggggttacggccatagcagtgtttacgaccataggaccagggccctatacgttcatggtggctacaaggctttcagtgccaataagtaccggcttgcagatgatctctaccgatatgatgtggatacccagatgtggaccattcttaaggacagccgatttttccgttacttgcacacagctgtgatagtgagtggaaccatgctggtgtttggaggaaacacacacaatgacacatctatgagccatggcgccaaatgcttctcttcagatttcatggcctatgacattgcctgtgaccgctggtcagtgcttcccagacctgatctccaccatgatgtcaacagatttggccattcagcagtcttacacaacagcaccatgtatgtgttcggtggtttcaatagtctcctcctcagcgacatcctggtattcacctcggaacagtgtgatgcgcatcggagtgaagccgcttgtttagcagcaggacctggtattcggtgtgtgtggaacacagggtcgtctcagtgtatctcgtgggcgctggcaactgatgaacaagaagaaaagttaaaatcagaatgtttttccaaaagaactcttgaccatgacagatgtgaccagcacacagattgttacagctgcacagccaacaccaatgactgccactggtgcaatgaccattgtgtccccaggaaccacagctgctcagaaggccagatctccatttttaggtatgagaattgccccaaggataaccccatgtactactgtaacaagaagaccagctgcaggagctgtgccctggaccagaactgccagtgggagccccggaatcaggagtgcattgccctgcccgaaaatatctgtggcattggctggcatttggttggaaactcatgtttgaaaattactactgccaaggagaattatgacaatgctaaattgttctgtaggaaccacaatgcccttttggcttctcttacaacccagaagaaggtagaatttgtccttaagcagctgcgaataatgcagtcatctcagagcatgtccaagctcaccttaaccccatgggtcggccttcggaagatcaatgtgtcctactggtgctgggaagatatgtccccatttacaaatagtttactacagtggatgccgtctgagcccagtgatgctggattctgtggaattttatcagaacccagtactcggggactgaaggctgcaacctgcatcaacccactcaatggtagtgtctgtgaaaggcctgcaaaccacagtgctaagcagtgccggacaccatgtgccttgaggacagcatgtggagattgcaccagcggcagctctgagtgcatgtggtgcagcaacatgaagcagtgtgtggactccaatgcctatgtggcctccttcccttttggccagtgtatggaatggtatacgatgagcacctgcccccctgaaaattgttcaggctactgtacctgtagtcattgcttggagcaaccaggctgtggctggtgtactgatcccagcaatactggcaaagggaaatgcatagagggttcctataaaggaccagtgaagatgccttcgcaagcccctacaggaaatttctatccacagcccctgctcaattccagcatgtgtctagaggacagcagatacaactggtctttcattcactgtccagcttgccaatgcaacggccacagtaaatgcatcaatcagagcatctgtgagaagtgtgagaacctgaccacaggcaagcactgcgagacctgcatatctggcttctacggtgatcccaccaatggagggaaatgtcagccatgcaagtgcaatgggcacgcgtctctgtgcaacaccaacacgggcaagtgcttctgcaccaccaagggcgtcaagggggacgagtgccagctatgtgaggtagaaaatcgataccaaggaaaccctctcagaggaacatgttattatactcttcttattgactatcagttcacctttagtctatcccaggaagatgatcgctattacacagctatcaattttgtggctactcctgacgaacaaaacagggatttggacatgttcatcaatgcctccaagaatttcaacctcaacatcacctgggctgccagtttctcagctggaacccaggctggagaagagatgcctgttgtttcaaaaaccaacattaaggagtacaaagatagtttctctaatgagaagtttgattttcgcaaccacccaaatatcactttctttgtttatgtcagtaatttcacctggcccatcaaaattcaggtgcaaactgaacaa

SEQ ID NO: 3147 - DNA, 1245 bp, Homo Sapiens
ctctacgcgcaggtgtcccagtccaagccgtgcgagaggaccggctcctgcttctcgggccgctgtgtcaactccacctgcctctgcgacccgggctgggtgggggaccagtgccagcactgccagggcaggttcaagttaacagaaccttctggatatttaacagatggcccaattaactataaatataaaactaaatgtacttggctcattgaaggctatccaaatgcagtgttaagattaagattcaatcattttgctacagaatgtagctgggatcatatgtatgtttatgatggagattcaatatatgcacctttaatagctgtacttagtggtttgatagtccctgaaataaggggcaatgaaactgtgcctgaagttgttactacatctggctatgcactgttacatttttttagtgatgctgcgtataatctaactggtttcaacattttctattcaatcaattcttgtcctaacaattgctctggtcatgggaagtgtacaactagtgtctctgttccaagtcaagtatattgtgaatgtgataaatactggaagggtgaagcttgtgatattccttactgtaaagccaattgcggcagtccagatcacggttactgtgacctgactggagaaaaattatgtgtctgcaatgatagttggcaaggtcctgattgttctttgaatgttccctctactgagtcttactggattctgccaaacgttaaacccttcagtccttctgtaggtcgggcttcacataaagcagttttacacgggaaatttatgtgggtgattggtggatatacttttaactacagttcttttcaaatggtcctaaattacaatttagaaagcagtatatggaatgtaggaactccatcaaggggacctctccagagatatggacactctcttgctttatatcaggaaaacatctttatgtatggaggcagaattgaaacaaatgatggcaatgtcacagatgaattatgggtttttaacatacatagtcagtcatggagtacaaaaactcctactgttcttggacatggtcagcagtatgctgtggagggacattcagcacatattatggagttggatagtagagatgttgtcatgatcataatatttggatattctgcaatatatggttatacaagcagcatacaggaataccatatctgtgagttacttaaaaattgtaatttctttattgattgggaatgtttttctctt

SEQ ID NO: 3148 - DNA, 1278 bp, Homo Sapiens
gcccccaggggcacgcaggctgaagaaagtcccttcgtgggcaacccagggaatatcacaggtgcccggggactcacgggcacccttcggtgtcagctccaggttcagggagagccccccgaggtacattggcttcgggatggacagatcctggagctcgcggacagcacccagacccaggtgcccctgggtgaggatgaacaggatgactggatagtggtcagccagctcagaatcacctccctgcagctttccgacacgggacagtaccagtgtttggtgtttctgggacatcagaccttcgtgtcccagcctggctatgttgggctggagggcttgccttacttcctggaggagcccgaagacaggactgtggccgccaacacccccttcaacctgagctgccaagctcagggacccccagagcccgtggacctactctggctccaggatgctgtccccctggccacggctccaggtcacggcccccagcgcagcctgcatgttccagggctgaacaagacatcctctttctcctgcgaagcccataacgccaagggggtcaccacatcccgcacagccaccatcacagtgctcccccagcagccccgtaacctccacctggtctcccgccaacccacggagctggaggtggcttggactccaggcctgagcggcatctaccccctgacccactgcaccctgcaggctgtgctgtcagacgatgggatgggcatccaggcgggagaaccagaccccccagaggagcccctcacctcgcaagcatccgtgcccccccatcagcttcggctaggcagcctccatcctcacaccccttatcacatccgcgtggcatgcaccagcagccagggcccctcatcctggacccactggcttcctgtggagacgccggagggagtgcccctgggcccccctgagaacattagtgctacgcggaatgggagccaggccttcgtgcattggcaagagccccgggcgcccctgcagggtaccctgttagggtaccggctggcgtatcaaggccaggacaccccagaggtgctaatggacatagggctaaggcaagaggtgaccctggagctgcagggggacgggtctgtgtccaatctgacagtgtgtgtggcagcctacactgctgctggggatggaccctggagcctcccagtacccctggaggcctggcgcccagggcaagcacagccagtccaccagctggtgaaggaaccttcaactcctgccttctcgtggccctggtgg

SEQ ID NO: 3149 - DNA, 834 bp, Homo Sapiens
caggagaaccaagatggtcgttactctctgacctatatctacactgggctgtccaagcatgttgaagacgtccccgcgtttcaggcccttggctcactcaatgacctccagttctttagatacaacagtaaagacaggaagtctcagcccatgggactctggagacaggtggaaggaatggaggattggaagcaggacagccaacttcagaaggccagggaggacatctttatggagaccctgaaagacattgtggagtattacaacgacagtaacgggtctcacgtattgcagggaaggtttggttgtgagatcgagaataacagaagcagcggagcattctggaaatattactatgatggaaaggactacattgaattcaacaaagaaatcccagcctgggtccccttcgacccagcagcccagataaccaagcagaagtgggaggcagaaccagtctacgtgcagcgggccaaggcttacctggaggaggagtgccctgcgactctgcggaaatacctgaaatacagcaaaaatatcctggaccggcaagatcctccctctgtggtggtcaccagccaccaggccccaggagaaaagaagaaactgaagtgcctggcctacgacttctacccagggaaaattgatgtgcactggactcgggccggcgaggtgcaggagcctgagttacggggagatgttcttcacaatggaaatggcacttaccagtcctgggtggtggtggcagtgcccccgcaggacacagccccctactcctgccacgtgcagcacagcagcctggcccagcccctcgtggtgccctgggaggccagc

SEQ ID NO: 3150 - DNA, 297 bp, Homo Sapiens
atccagcgtactccaaagattcaggtttactcacgtcatccagcagagaatggaaagtcaaatttcctgaattgctatgtgtctgggtttcatccatccgacattgaagttgacttactgaagaatggagagagaattgaaaaagtggagcattcagacttgtctttcagcaaggactggtctttctatctcttgtactacactgaattcacccccactgaaaaagatgagtatgcctgccgtgtgaaccatgtgactttgtcacagcccaagatagttaagtgggatcgagacatg

SEQ ID NO: 3151 - DNA, 1548 bp, Homo Sapiens
gaggtgcgcttgtctgtacccccgctggtggaggtgatgcgaggaaagtctgtcattctggactgcacccctacgggaacccacgaccattatatgctggaatggttccttaccgaccgctcgggagctcgcccccgcctagcctcggctgagatgcagggctctgagctccaggtcacaatgcacgacacccggggccgcagtcccccataccagctggactcccaggggcgcctggtgctggctgaggcccaggtgggcgacgagcgagactacgtgtgcgtggtgagggcaggggcggcaggcactgctgaggccactgcgcggctcaacgtgtttgcaaagccagaggccactgaggtctcccccaacaaagggacactgtctgtgatggaggactctgcccaggagatcgccacctgcaacagccggaacgggaacccggcccccaagatcacgtggtatcgcaacgggcagcgcctggaggtgcccgtagagatgaacccagagggctacatgaccagccgcacggtccgggaggcctcgggcctgctctccctcaccagcaccctctacctgcggctccgcaaggatgaccgagacgccagcttccactgcgccgcccactacagcctgcccgagggccgccacggccgcctggacagccccaccttccacctcaccctgcactatcccacggagcacgtgcagttctgggtgggcagcccgtccaccccagcaggctgggtacgcgagggtgacactgtccagctgctctgccggggggacggcagccccagcccggagtatacgcttttccgccttcaggatgagcaggaggaagtgctgaatgtgaatctcgaggggaacttgaccctggagggagtgacccggggccagagcgggacctatggctgcagagtggaggattacgacgcggcagatgacgtgcagctctccaagacgctggagctgcgcgtggcctatctggaccccctggagctcagcgaggggaaggtgctttccttacctctaaacagcagtgcagtcgtgaactgctccgtgcacggcctgcccacccctgccctacgctggaccaaggactccactcccctgggcgatggccccatgctgtcgctcagttctatcaccttcgattccaatggcacctacgtatgtgaggcctccctgcccacagtcccggtcctcagccgcacccagaacttcacgctgctggtccaaggctcgccagagctaaagacagcggaaatagagcccaaggcagatggcagctggagggaaggagacgaagtcacactcatctgctctgcccgcggccatccagaccccaaactcagctggagccaattggggggcagccccgcagagccaatccccggacggcagggttgggtgagcagctctctgaccctgaaagtgaccagcgccctgagccgcgatggcatctcctgtgaagcctccaacccccacgggaacaagcgccatgtcttccacttcggcaccgtgagcccccagacctcccaggct

SEQ ID NO: 3152 - DNA, 2667 bp, Homo Sapiens
gatgttctggaaggagacagctcagaggaccgcgcttttcgcgtgcgcatcgcgggcgacgcgccactgcagggcgtgctcggcggcgccctcaccatcccttgccacgtccactacctgcggccaccgccgagccgccgggctgtgctgggctctccgcgggtcaagtggactttcctgtcccggggccgggaggcagaggtgctggtggcgcggggagtgcgcgtcaaggtgaacgaggcctaccggttccgcgtggcactgcctgcgtacccagcgtcgctcaccgacgtctccctggcgctgagcgagctgcgccccaacgactcaggtatctatcgctgtgaggtccagcacggcatcgatgacagcagcgacgctgtggaggtcaaggtcaaaggggtcgtctttctctaccgagagggctctgcccgctatgctttctccttttctggggcccaggaggcctgtgcccgcattggagcccacatcgccaccccggagcagctctatgccgcctaccttgggggctatgagcaatgtgatgctggctggctgtcggatcagaccgtgaggtatcccatccagaccccacgagaggcctgttacggagacatggatggcttccccggggtccggaactatggtgtggtggacccggatgacctctatgatgtgtactgttatgctgaagacctaaatggagaactgttcctgggtgaccctccagagaagctgacattggaggaagcacgggcgtactgccaggagcggggtgcagagattgccaccacgggccaactgtatgcagcctgggatggtggcctggaccactgcagcccagggtggctagctgatggcagtgtgcgctaccccatcgtcacacccagccagcgctgtggtgggggcttgcctggtgtcaagactctcttcctcttccccaaccagactggcttccccaataagcacagccgcttcaacgtctactgcttccgagactcggcccagccttctgccatccctgaggcctccaacccagcctccaacccagcctctgatggactagaggctatcgtcacagtgacagagaccctggaggaactgcagctgcctcaggaagccacagagagtgaatcccgtggggccatctactccatccccatcatggaggacggaggaggtggaagctccactccagaagacccagcagaggcccctaggacgctcctagaatttgaaacacaatccatggtaccgcccacggggttctcagaagaggaaggtaaggcattggaggaagaagagaaatatgaagatgaagaagagaaagaggaggaagaagaagaggaggaggtggaggatgaggctctgtgggcatggcccagcgagctcagcagcccgggccctgaggcctctctccccactgagccagcagcccaggagaagtcactctcccaggcgccagcaagggcagtcctgcagcctggtgcatcaccacttcctgatggagagtcagaagcttccaggcctccaagggtccatggaccacctactgagactctgcccactcccagggagaggaacctagcatccccatcaccttccactctggttgaggcaagagaggtgggggaggcaactggtggtcctgagctatctggggtccctcgaggagagagcgaggagacaggaagctccgagggtgccccttccctgcttccagccacacgggcccctgagggtaccagggagctggaggccccctctgaagataattctggaagaactgccccagcagggacctcagtgcaggcccagccagtgctgcccactgacagcgccagccgaggtggagtggccgtggtccccgcatcaggtgactgtgtccccagcccctgccacaatggtgggacatgcttggaggaggaggaaggggtccgctgcctatgtctgcctggctatgggggggacctgtgcgatgttggcctccgcttctgcaaccccggctgggacgccttccagggcgcctgctacaagcacttttccacacgaaggagctgggaggaggcagagacccagtgccggatgtacggcgcgcatctggccagcatcagcacacccgaggaacaggacttcatcaacaaccggtaccgggagtaccagtggatcggactcaacgacaggaccatcgaaggcgacttcttgtggtcggatggcgtccccctgctctatgagaactggaaccctgggcagcctgacagctacttcctgtctggagagaactgcgtggtcatggtgtggcatgatcagggacaatggagtgacgtgccctgcaactaccacctgtcctacacctgcaagatggggctggtgtcctgtgggccgccaccggagctgcccctggctcaagtgttcggccgcccacggctgcgctatgaggtggacactgtgcttcgctaccggtgccgggaaggactggcccagcgcaatctgccgctgatccgatgccaagagaacggtcgttgggaggccccccagatctcctgtgtgcccagaagacctgcccgagctctgcacccagaggaggacccagaaggacgtcaggggaggctactgggacgctggaaggcgctgttgatccccccttccagccccatgccaggtccc

SEQ ID NO: 3153 - DNA, 993 bp, Homo Sapiens
gatgaggaagcttcgggcgctgacacctcaggcgtcctggacccggactctgtcacacccacctacagcgccatgtgtcctttcggctgccactgccacctgcgggtggttcagtgctccgacctgggtctgaagtctgtgcccaaagagatctcccctgacaccacgctgctggacctgcagaacaacgacatctccgagctccgcaaggatgacttcaagggtctccagcacctctacgccctcgtcctggtgaacaacaagatctccaagatccatgagaaggccttcagcccactgcggaagctgcagaagctctacatctccaagaaccacctggtggagatcccgcccaacctacccagctccctggtggagctccgcatccacgacaaccgcatccgcaaggtgcccaagggagtgttcagcgggctccggaacatgaactgcatcgagatgggcgggaacccactggagaacagtggctttgaacctggagccttcgatggcctgaagctcaactacctgcgcatctcagaggccaagctgactggcatccccaaagacctccctgagaccctgaatgaactccacctagaccacaacaaaatccaggccatcgaactggaggacctgcttcgctactccaagctgtacaggctgggcctaggccacaaccagatcaggatgatcgagaacgggagcctgagcttcctgcccaccctccgggagctccacttggacaacaacaagttggccagggtgccctcagggctcccagacctcaagctcctccaggtggtctatctgcactccaacaacatcaccaaagtgggtgtcaacgacttctgtcccatgggcttcggggtgaagcgggcctactacaacggcatcagcctcttcaacaaccccgtgccctactgggaggtgcagccggccactttccgctgcgtcactgaccgcctggccatccagtttggcaactacaaaaag

SEQ ID NO: 3154 - DNA, 2598 bp, Homo Sapiens
gcggcgacgtcccgaccagagcgtgtgtggcccgatggggtcatcccctttgtcattgggggaaacttcactggtagccagagggcagtcttccggcaggccatgaggcactgggagaagcacacctgtgtcaccttcctggagcgcactgacgaggacagctatattgtgttcacctatcgaccttgcgggtgctgctcctacgtgggtcgccgcggcgggggcccccaggccatctccatcggcaagaactgtgacaagttcggcattgtggtccacgagctgggccacgtcgtcggcttctggcacgaacacactcggccagaccgggaccgccacgtttccatcgttcgtgagaacatccagccagggcaggagtataacttcctgaagatggagcctcaggaggtggagtccctgggggagacctatgacttcgacagcatcatgcattacgctcggaacacattctccaggggcatcttcctggataccattgtccccaagtatgaggtgaacggggtgaaacctcccattggccaaaggacacggctcagcaagggggacattgcccaagcccgcaagctttacaagtgcccagcctgtggagagaccctgcaagacagcacaggcaacttctcctcccctgaataccccaatggctactctgctcacatgcactgcgtgtggcgcatctctgtcacacccggggagaagatcatcctgaacttcacgtccctggacctgtaccgcagccgcctgtgctggtacgactatgtggaggtccgagatggcttctggaggaaggcgcccctccgaggccgcttctgcgggtccaaactccctgagcctatcgtctccactgacagccgcctctgggttgaattccgcagcagcagcaattgggttggaaagggcttctttgcagtctacgaagccatctgcgggggtgatgtgaaaaaggactatggccacattcaatcgcccaactacccagacgattaccggcccagcaaagtctgcatctggcggatccaggtgtctgagggcttccacgtgggcctcacattccagtcctttgagattgagcgccacgacagctgtgcctacgactatctggaggtgcgcgacgggcacagtgagagcagcaccctcatcgggcgctactgtggctatgagaagcctgatgacatcaagagcacgtccagccgcctctggctcaagttcgtctctgacgggtccattaacaaagcgggctttgccgtcaactttttcaaagaggtggacgagtgctctcggcccaaccgcgggggctgtgagcagcggtgcctcaacaccctgggcagctacaagtgcagctgtgaccccgggtacgagctggccccagacaagcgccgctgtgaggctgcttgtggcggattcctcaccaagctcaacggctccatcaccagcccgggctggcccaaggagtacccccccaacaagaactgcatctggcagctggtggcccccacccagtaccgcatctccctgcagtttgacttctttgagacagagggcaatgatgtgtgcaagtacgacttcgtggaggtgcgcagtggactcacagctgactccaagctgcatggcaagttctgtggttctgagaagcccgaggtcatcacctcccagtacaacaacatgcgcgtggagttcaagtccgacaacaccgtgtccaaaaagggcttcaaggcccacttcttctcagacaaggacgagtgctccaaggataacggcggctgccagcaggactgcatcaacacgttcggcagttatgagtgccaatgccgcagtggcttcgtcctccatgacaacaagcacgactgcaaagaagccggctgtgaccacaaggtgacatccaccagtggtaccatcaccagccccaactggcctgacaagtatcccagcaagaatgagtgcacgtgggccatctccagcacccccgggcaccgggtcaagctgaccttcatggagatggacatcgagtcccagcctgagtgtgcctacgaccacctagaggtgttcgacgggcgagacgccaaggcccccgtcctcggccgcttctgtgggagcaagaagcccgagcccgtcctggccacaggcagccgcatgttcctgcgcttctactcagataactcggtccagcgaaagggcttccaggcctcccacgccacagagtgcgggggccaggtacgggcagacgtgaagaccaaggacctttactcccacgcccagtttggcgacaacaactaccctgggggtgtggactgtgagtgggtcattgtggccgaggaaggctacggcgtggagctcgtgttccagacctttgaggtggaggaggagaccgactgcggctatgactacatggagctcttcgacggctacgacagcacagcccccaggctggggcgctactgtggctcagggcctcctgaggaggtgtactcggcgggagattctgtcctggtgaagttccactcggatgacaccatcaccaaaaaaggtttccacctgcgatacaccagcaccaagttccaggacacactccacagcaggaag

SEQ ID NO: 3155 - DNA, 324 bp, Homo Sapiens
aacgccaaaggaaactactgtaagaggaccccgctctacatcgacttcaaggagattgggtgggactcctggatcatcgctccgcctggatacgaagcctatgaatgccgtggtgtttgtaactaccccctggcagagcatctcacacccacaaagcatgcaattatccaggccttggtccacctcaagaattcccagaaagcttccaaagcctgctgtgtgcccacgaagctagagcccatctccatcctctatttagacaaaggcgtcgtcacctacaagtttaaatacgaaggcatggccgtctccgaatgtggctgtaga

SEQ ID NO: 3156 - DNA, 375 bp, Homo Sapiens
caagcagatggtatctcagctgaggttactgcctcttcctcaaaacatagcgggcctgaaaataaccagtgttccctccaccctttccaaatcagcttccgccagctgggttgggatcactggatcattgctccccctttctacaccccaaactactgtaaaggaacttgtctccgagtactacgcgatggtctcaattcccccaatcacgccattattcagaaccttatcaatcagttggtggaccagagtgtcccccggccctcctgtgtcccgtataagtatgttccaattagtgtccttatgattgaggcaaatgggagtattttgtacaaggagtatgagggtatgattgctgagtcttgtacatgcaga

SEQ ID NO: 3157 - DNA, 342 bp, Homo Sapiens
caagccaaacacaaacagcggaaacgccttaagtccagctgtaagagacaccctttgtacgtggacttcagtgacgtggggtggaatgactggattgtggctcccccggggtatcacgccttttactgccacggagaatgcccttttcctctggctgatcatctgaactccactaatcatgccattgttcagacgttggtcaactctgttaactctaagattcctaaggcatgctgtgtcccgacagaactcagtgctatctcgatgctgtaccttgacgagaatgaaaaggttgtattaaagaactatcaggacatggttgtggagggttgtgggtgtcgc

SEQ ID NO: 3158 - DNA, 330 bp, Homo Sapiens
cagtggattgaacctcggaattgcgccaggagatacctcaaggtagactttgcagatattggctggagtgaatggattatctcccccaagtcctttgatgcctattattgctctggagcatgccagttccccatgccaaagtctttgaagccatcaaatcatgctaccatccagagtatagtgagagctgtgggggtcgttcctgggattcctgagccttgctgtgtaccagaaaagatgtcctcactcagtattttattctttgatgaaaataagaatgtagtgcttaaagtataccctaacatgacagtagagtcttgcgcttgcaga

SEQ ID NO: 3159 - DNA, 348 bp, Homo Sapiens
agccctaagcatcactcacagcgggccaggaagaagaataagaactgccggcgccactcgctctatgtggacttcagcgatgtgggctggaatgactggattgtggccccaccaggctaccaggccttctactgccatggggactgcccctttccactggctgaccacctcaactcaaccaaccatgccattgtgcagaccctggtcaattctgtcaattccagtatccccaaagcctgttgtgtgcccactgaactgagtgccatctccatgctgtacctggatgagtatgataaggtggtactgaaaaattatcaggagatggtagtagagggatgtgggtgccgc

SEQ ID NO: 3160 - DNA, 414 bp, Homo Sapiens
gcagccaacaaacgaaaaaatcaaaaccgcaataaatccagctctcatcaggactcctccagaatgtccagtgttggagattataacacaagtgagcaaaaacaagcctgtaagaagcacgaactctatgtgagcttccgggatctgggatggcaggactggattatagcaccagaaggatacgctgcattttattgtgatggagaatgttcttttccacttaacgcccatatgaatgccaccaaccacgctatagttcagactctggttcatctgatgtttcctgaccacgtaccaaagccttgttgtgctccaaccaaattaaatgccatctctgttctgtactttgatgacagctccaatgtcattttgaaaaaatatagaaatatggtagtacgctcatgtggctgccac

SEQ ID NO: 3161 - DNA, 417 bp, Homo Sapiens
tccacggggagcaaacagcgcagccagaaccgctccaagacgcccaagaaccaggaagccctgcggatggccaacgtggcagagaacagcagcagcgaccagaggcaggcctgtaagaagcacgagctgtatgtcagcttccgagacctgggctggcaggactggatcatcgcgcctgaaggctacgccgcctactactgtgagggggagtgtgccttccctctgaactcctacatgaacgccaccaaccacgccatcgtgcagacgctggtccacttcatcaacccggaaacggtgcccaagccctgctgtgcgcccacgcagctcaatgccatctccgtcctctacttcgatgacagctccaacgtcatcctgaagaaatacagaaacatggtggtccgggcctgtggctgccac

SEQ ID NO: 3162 - DNA, 417 bp, Homo Sapiens
gcggtgaggccgctaagacgtcgtcaacccaagaagagtaatgaactaccgcaggcaaatagattaccaggtattttcgacgacgttaggggttctcacggacgtcaagtgtgcagaagacacgagctatatgtatcatttcaggaccttggttggttggattgggtaatcgctccgcagggatatagtgcgtactattgtgaaggtgaatgctcattcccacttgatagctgcatgaacgcaactaaccatgcaattttgcagtctttagtccaccttatgaagcctaatgccgtaccaaaagcgtgctgcgctccgactaagctatctgcgacgtccgttctatattatgattcctcaaataacgttatccttcgtaagcacagaaatatggtcgttaaagcctgcggctgtcat

SEQ ID NO: 3163 - DNA, 183 bp, Homo Sapiens
gcagtgaggccactgaggaggaggcagccgaagaaaagcaacgagctgccgcaggccaaccgactcccagggatctttgatgacgtccgcggctcccacggccggcaggtctgccgtcggcacgagctctacgtcagcttccaggacctcggctggctggtaattgctgactctccttgtttc

SEQ ID NO: 3164 - DNA, 387 bp, Homo Sapiens
cagaatctggatagtatgcttcatggcactgggatgaaatcagactccgaccagaaaaagtcagaaaatggagtaaccttagcaccagaggataccttgccttttttaaagtgctattgctcagggcactgtccagatgatgctattaataacacatgcataactaatggacattgctttgccatcatagaagaagatgaccagggagaaaccacattagcttcagggtgtatgaaatatgaaggatctgattttcagtgcaaagattctccaaaagcccagctacgccggacaatagaatgttgtcggaccaatttatgtaaccagtatttgcaacccacactgccccctgttgtcataggtccgttttttgatggcagcattcga

SEQ ID NO: 3165 - DNA, 339 bp, Homo Sapiens
aagaaagaggatggtgagagtacagcccccaccccccgtccaaaggtcttgcgttgtaaatgccaccaccattgtccagaagactcagtcaacaatatttgcagcacagacggatattgtttcacgatgatagaagaggatgactctgggttgcctgtggtcacttctggttgcctaggactagaaggctcagattttcagtgtcgggacactcccattcctcatcaaagaagatcaattgaatgctgcacagaaaggaacgaatgtaataaagacctacaccctacactgcctccattgaaaaacagagattttgttgatggacctatacaccacagg

SEQ ID NO: 3166 - DNA, 372 bp, Homo Sapiens
tcgcagaatcaagaacggctatgtgcgtttaaagatccgtatcagcaagaccttgggataggtgagagtagaatctctcatgaaaatgggacaatattatgctcgaaaggtagcacctgctatggcctttgggagaaatcaaaaggggacataaatcttgtaaaacaaggatgttggtctcacattggagatccccaagagtgtcactatgaagaatgtgtagtaactaccactcctccctcaattcagaatggaacataccgtttctgctgttgtagcacagatttatgtaatgtcaactttactgagaattttccacctcctgacacaacaccactcagtccacctcattcatttaaccgagatgagaca

SEQ ID NO: 3167 - DNA, 2475 bp, Homo Sapiens
gacttgaacgaggtccctcaggtcaccgtccagcctgcgtccaccgtccagaagcccggaggcactgtgatcttgggctgcgtggtggaacctccaaggatgaatgtaacctggcgcctgaatggaaaggagctgaatggctcggatgatgctctgggtgtcctcatcacccacgggaccctcgtcatcactgcccttaacaaccacactgtgggacggtaccagtgtgtggcccggatgcctgcgggggctgtggccagcgtgccagccactgtgacactagccaatctccaggacttcaagttagatgtgcagcacgtgattgaagtggatgagggaaacacagcagtcattgcctgccacctgcctgagagccaccccaaagcccaggtccggtacagcgtcaaacaagagtggctggaggcctccagaggtaactacctgatcatgccctcagggaacctccagattgtgaatgccagccaggaggacgagggcatgtacaagtgtgcagcctacaacccagtgacccaggaagtgaaaacctccggctccagcgacaggctacgtgtgcgccgctccaccgctgaggctgcccgcatcatctaccccccagaggcccaaaccatcatcgtcaccaaaggccagagtctcattctggagtgtgtggccagtggaatcccacccccacgggtcacctgggccaaggatgggtccagtgtcaccggctacaacaagacgcgcttcctgctgagcaacctcctcatcgacaccaccagcgaggaggactcaggcacctaccgctgcatggccgacaatggggttgggcagcccggggcagcggtcatcctctacaatgtccaggtgtttgaaccccctgaggtcaccatggagctatcccagctggtcatcccctggggccagagtgccaagcttacctgtgaggtgcgtgggaaccccccgccctccgtgctgtggctgaggaatgctgtgcccctcatctccagccagcgcctccggctctcccgcagggccctgcgcgtgctcagcatggggcctgaggacgaaggcgtctaccagtgcatggccgagaacgaggttgggagcgcccatgccgtagtccagctgcggacctccaggccaagcataaccccaaggctatggcaggatgctgagctggctactggcacacctcctgtatcaccctccaaacttggcaaccctgagcagatgctgagggggcaaccggcgctccccagacccccaacgtcagtggggcctgcttccccacagtgtccaggagagaaggggcagggggctcccgccgaggctcccatcatcctcagctcgccccgcacctccaagacagactcatatgaactggtgtggcggcctcggcatgagggcagtggccgggcgccaatcctctactatgtggtgaaacaccgcaaggtcacaaattcctctgacgattggaccatctctggcattccagccaaccagcaccgcctgaccctcaccagacttgaccccgggagcttgtatgaagtggagatggcagcttacaactgtgcgggagagggccagacagccatggtcaccttccgaactggacggcggcccaaacccgagatcatggccagcaaggagcagcagatccagagagacgaccctggagccagtccccagagcagcagccagccagaccacggccgcctctcccccccagaagctcccgacaggcccaccatctccacggcctccgagacctcagtgtacgtgacctggattccccgtgggaatggtgggttcccaatccagtccttccgtgtggagtacaagaagctaaagaaagtgggagactggattctggccaccagcgccatccccccatcacggctgtccgtggagatcacgggcctagagaaaggcacctcctacaagtttcgagtccgggctctgaacatgctgggggagagcgagcccagcgccccctctcggccctacgtggtgtcgggctacagcggtcgcgtgtacgagaggcccgtggcaggtccttatatcaccttcacggatgcggtcaatgagaccaccatcatgctcaagtggatgtacatcccagcaagtaacaacaacaccccaatccatggcttttatatctattatcgacccacagacagtgacaatgatagtgactacaagaaggatatggtggaaggggacaagtactggcactccatcagccacctgcagccagagacctcctacgacattaagatgcagtgcttcaatgaaggaggggagagcgagttcagcaacgtgatgatctgtgagaccaaagctcggaagtcttctggccagcctggtcgactgccacccccaactctggccccaccacagccgccccttcctgaaaccatagagcggccggtgggcactggggccatggtggctcgctccagcgacctgccctat

SEQ ID NO: 3168 - DNA, 558 bp, Homo Sapiens
gctgccggcacagtcttcactaccgtagaagaccttggctccaagatactcctcacctgctccttgaatgacagcgccacagaggtcacagggcaccgctggctgaaggggggcgtggtgctgaaggaggatgcgctgcccggccagaaaacggagttcaaggtggactcggacgaccagtggggagagtactcctgcgtcttcctccccgagcccatgggcacggccaacatccagctccacgggcctcccagagtgaaggctgtgaagtcgtcagaacacatcaacgagggggagacggccatgctggtctgcaagtcagagtccgtgccacctgtcactgactgggcctggtacaagatcactgactctgaggacaaggccctcatgaacggctccgagagcaggttcttcgtgagttcctcgcagggccggtcagagctacacattgagaacctgaacatggaggccgaccccggccagtaccggtgcaacggcaccagctccaagggctccgaccaggccatcatcacgctccgcgtgcgcagccacctggcc

SEQ ID NO: 3169 - DNA, 345 bp, Homo Sapiens
tgtatttttcccgtgattctgaatgagttatcatcaacagttgaaacgatcacgcatttcccggaagtaacggacggggaatgcgtgttcccctttcactataaaaatggtacgtactatgattgcatcaagagcaaggcaaggcacaaatggtgttccttaaacaaaacctatgaggggtattggaaattttgcagcgccgaagactttgcgaactgtgttttcccattttggtacagaaggcttatttattgggaatgcaccgacgacggagaggctttcggtaaaaaatggtgctctttgacaaaaaatttcaataaagatcgtatttggaagtactgcgaa

SEQ ID NO: 3170 - DNA, 240 bp, Homo Sapiens
gatgggaattccaccagaagtcctgaaactaatggcctcctctgtggagaccctgaggaaaactgtgcagctaccaccacacaatcaaagcggaaaggccacttctctaggtgccccaagcaatacaagcattactgcatcaaagggagatgccgcttcgtggtggccgagcagacgccctcctgtgtctgtgatgaaggctacattggagcaaggtgtgagagagttgacttgttttac

SEQ ID NO: 3171 - DNA, 312 bp, Homo Sapiens
aaagaatcatgtgatgtacagctttatataaagagacaatctgaacactccatcttagcaggagatccctttgaactagaatgccctgtgaaatactgtgctaacaggcctcatgtgacttggtgcaagctcaatggaacaacatgtgtaaaacttgaagatagacaaacaagttggaaggaagagaagaacatttcatttttcattctacattttgaaccagtgcttcctaatgacaatgggtcataccgctgttctgcaaattttcagtctaatctcattgaaagccactcaacaactctttatgtgaca

SEQ ID NO: 3172 - DNA, 648 bp, Homo Sapiens
gctccctttgacgtgattggacccccggagcccatcctggccgttgtgggtgaggacgccgagctgccctgtcgcctgtctccgaacgcgagcgccgagcacttggagctacgctggttccgaaagaaggtttcgccggccgtgctggtgcatagggacgggcgcgagcaggaagccgagcagatgcccgagtaccgcgggcgggcgacgctggtccaggacggcatcgccaaggggcgcgtggccttgaggatccgtggcgtcagagtctctgacgacggggagtacacgtgctttttcagggaggatggaagctacgaagaagccctggtgcatctgaaggtggctgctctgggctctgaccctcacatcagtatgcaagttcaagagaatggagaaatctgtctggagtgcacctcagtgggatggtacccagagccccaggtgcagtggagaacttccaagggagagaagtttccatctacatcagagtccaggaatcctgatgaagaaggtttgttcactgtggctgcttcagtgatcatcagagacacttctgcgaaaaatgtgtcctgctacatccagaatctccttcttggccaggagaagaaagtagaaatatccataccagcttcctccctcccaagg

SEQ ID NO: 3173 - DNA, 660 bp, Homo Sapiens
cagtttattgtcgtggggcccactgatcccatcttggccacggttggagaaaacactacgttacgctgccatctgtcacccgagaaaaatgctgaggacatggaggtgcggtggttccggtctcagttctcccccgcagtgtttgtgtataaaggtggcagagagagaacagaggagcagatggaggagtaccgaggaagaaccacctttgtgagcaaagacatcagcaggggcagcgtggccctggtcatacacaacatcacagcccaggaaaacggcacctaccgctgttacttccaagaaggcaggtcctacgatgaggccatcctgcacctcgtagtggcaggactaggctctaagcccctcatttcaatgaggggccatgaagacgggggcatccggctggagtgcatatctagagggtggtacccaaagcccctcacagtgtggagggacccctacggtggggttgcgcctgccctgaaagaggtctccatgcctgatgcagacggcctcttcatggtcaccacggctgtgatcatcagagacaagtctgtgaggaacatgtcctgctctatcaacaacaccctgctcggccagaagaaagaaagtgtcatttttattccagaatcctttatgcccagtgtgtctccctgtgca

SEQ ID NO: 3174 - DNA, 699 bp, Homo Sapiens
cagtttactgtcgtggggccagctaatcccatcctggccatggtgggagaaaacactacattacgctgccatctgtcacccgagaaaaatgctgaggacatggaggtgcggtggttccggtctcagttctcccccgcagtgtttgtgtataagggtgggagagagagaacagaggagcagatggaggagtaccggggaagaatcacctttgtgagcaaagacatcaacaggggcagcgtggccctggtcatacataacgtcacagcccaggagaatgggatctaccgctgttacttccaagaaggcaggtcctacgatgaggccatcctacgcctcgtggtggcaggccttgggtctaagcccctcattgaaatcaaggcccaagaggatgggagcatctggctggagtgcatatctggagggtggtacccagagcccctcacagtgtggagggacccctacggtgaggttgtgcccgccctgaaggaggtttccatcgctgatgctgacggcctcttcatggtcaccacagctgtgatcatcagagacaagtatgtgaggaatgtgtcctgctctgtcaacaacaccctgctcggccaggagaaggaaactgtcatttttattccagaatcctttatgcccagcgcatctccctggatggtggccctagctgtcatcctgaccgcatctccctggatg

SEQ ID NO: 3175 - DNA, 336 bp, Homo Sapiens
caggtcactgtcgtggggcccactgatcccatcctggccatggtgggagaaaacactacgttacgatgctgtctgtcacccgaggaaaatgctgaggacatggaggtgcggtggttccagtctcagttctcccctgcagtgtttgtgtataagggtggaagagagagaacagaggagcagaaggaggagtaccgagggagaaccacctttgtgagcaaagacagcaggggcagcgtggccctgatcatacacaatgttacagccgaggataacggcatctaccagtgttacttccaagaaggcaggtcctgcaatgaggccatcctgcaccttgtg

SEQ ID NO: 3176 - DNA, 675 bp, Homo Sapiens
cagttttctgtgcttggaccctctgggcccatcctggccatggtgggtgaagacgctgatctgccctgtcacctgttcccgaccatgagtgcagagaccatggagctgaagtgggtgagttccagcctaaggcaggtggtgaacgtgtatgcagatggaaaggaagtggaagacaggcagagtgcaccgtatcgagggagaacttcgattctgcgggatggcatcactgcagggaaggctgctctccgaatacacaacgtcacagcctctgacagtggaaagtacttgtgttatttccaagatggtgacttctatgaaaaagccctggtggagctgaaggttgcagcactgggttctgatcttcacgttgatgtgaagggttacaaggatggagggatccatctggagtgcaggtccactggctggtacccccaaccccaaatacagtggagcaacaacaagggagagaacatcccgactgtggaagcacctgtggttgcagacggagtgggcctgtatgcagtagcagcatctgtgatcatgagaggcagctctggggagggtgtatcctgtaccatcagaagttccctcctcggcctggaaaagacagccagcatttccatcgcagaccccttcttcaggagcgcccagaggtggatcgccgccctggcaggg

SEQ ID NO: 3177 - DNA, 657 bp, Homo Sapiens
cagttttctgtgcttggaccctctgggcccatcctggccatggtgggtgaagacgctgatctgccctgtcacctgttcccgaccatgagtgcagagaccatggagctgaagtgggtaagttccagcctaaggcaggtggtgaacgtgtatgcagatggaaaggaagtggaagacaggcagagtgcaccgtatcgagggagaacttcgattctgcgggatggcatcactgcagggaaggctgctctccgaatacacaacgtcacagcctctgacagtggaaagtacttgtgttatttccaagatggtgacttctatgaaaaagccctggtggagctgaaggttgcagcactgggttctaatcttcacgtcgaagtgaagggttatgaggatggagggatccatctggagtgcaggtccaccggctggtacccccaaccccaaatacagtggagcaacgccaagggagagaacatcccagctgtggaagcacctgtggttgcagatggagtgggcctatatgaagtagcagcatctgtgatcatgagaggcggctccggggagggtgtatcctgcatcatcagaaattccctcctcggcctggaaaagacagccagcatttccatcgcagaccccttcttcaggagcgcccagccctgg

SEQ ID NO: 3178 - DNA, 657 bp, Homo Sapiens
cagttttctgtgcttggaccctctgggcccatcctggccatggtgggtgaagacgctgatctgccctgtcacctgttcccgaccatgagtgcagagaccatggagctgaggtgggtgagttccagcctaaggcaggtggtgaacgtgtatgcagatggaaaggaagtggaagacaggcagagtgcaccgtatcgagggagaacttcgattctgcgggatggcatcactgcagggaaggctgctctccgaatacacaacgtcacagcctctgacagtggaaagtacttgtgttatttccaagatggtgacttctacgaaaaagccctggtggagctgaaggttgcagcattgggttctgatcttcacattgaagtgaagggttatgaggatggagggatccatctggagtgcaggtccactggctggtacccccaaccccaaataaagtggagcgacaccaagggagagaacatcccggctgtggaagcacctgtggttgcagatggagtgggcctgtatgcagtagcagcatctgtgatcatgagaggcagctctggtgggggtgtatcctgcatcatcagaaattccctcctcggcctggaaaagacagccagcatatccatcgcagaccccttcttcaggagcgcccagccctgg

SEQ ID NO: 3179 - DNA, 684 bp, Homo Sapiens
agtatttggaaggcggattttgacgtgacgggaccccatgcacctatcttagcgatggcaggcgggcatgtagagcttcaatgccaattatttcctaacataagcgcagaggatatggagctaaggtggtacaggtgtcagccaagtctagccgtccacatgcacgagcgtggaatggatatggatggcgaacagaagtggcaatacagaggtcgtaccactttcatgtccgatcatgtcgccagagggaaggccatggtacgtagtcatagagtcacaacttttgataacagaacttactgttgcaggttcaaagacggggtaaagtttggagaagctaccgtccaggtccaagtagctggtttgggaagggagccgaggattcaagtaaccgatcaacaggacggggtaagagctgaatgcacgagcgcagggtgctttccgaagtcatgggtagaaagaagggattttagagggcaggctaggcctgctgtgacgaatcttagtgcatctgctacgaccagattatgggctgtcgcgagttccctaacgctgtgggacagagctgtagaaggattatcctgctcaataagttccccgcttttacctgaaagacgtaaggtagccgaatctcatcttccagcgacctttagtaggagcagccagttcactgcttggaaggca

SEQ ID NO: 3180 - DNA, 660 bp, Homo Sapiens
ccagagaaactccagactgagctggcttctttaaaagtgaatggaccttcccagcccatcctcgtcagagtgggagaagatatacagctaacctgttacctgtcccccaaggcgaatgcacagagcatggaggtgaggtgggaccgatcccaccgttaccctgctgtgcatgtgtatatggatggggaccatgtggctggagagcagatggcagagtacagagggaggactgtgctggtgagtgacgccattgacgagggcagactgaccctgcagatactcagtgccagaccttcggacgacgggcagtaccgctgcctttttgaaaaagatgatgtctaccaagaggccagtttggatctgaaggtggtaggtctgggttcttccccactgatcactgtggaggggcaagaagatggagaaatgcagccgatgtgctcttcagatgggtggttcccacagccccacgtgccatggagggacatggaaggaaagacgataccatcatcttcccaggccctgactcaaggcagccacgggctgttccacgtgcagacattgctaagggtcacaaacatctccgctgtggacgtcacttgttccatcagcatcccctttttgggcgaggagaaaatcgcaactttttctctctcaggttgg

SEQ ID NO: 3181 - DNA, 660 bp, Homo Sapiens
cagtggcaagtcactggaccgggcaagtttgtccaggccttggtgggggaggacgccgtgttctcctgctccctctttcctgagaccagtgcagaggctatggaagtgcggttcttcaggaatcagttccatgctgtggtccacctctacagagatggggaagactgggaatctaagcagatgccacagtatcgagggagaactgagtttgtgaaggactccattgcaggggggcgtgtctctctaaggctaaaaaacatcactccctcggacatcggcctgtatgggtgctggttcagttcccagatttacgatgaggaggccacctgggagctgcgggtggcagcactgggctcacttcctctcatttccatcgtgggatatgttgacggaggtatccagttactctgcctgtcctcaggctggttcccccagcccacagccaagtggaaaggtccacaaggacaggatttgtcttcagactccagagcaaatgcagatgggtacagcctgtatgatgtggagatctccattatagtccaggaaaatgctgggagcatattgtgttccatccaccttgctgagcagagtcatgaggtggaatccaaggtattgataggagagacgtttttccagccctcaccttggcgcctggcttct

SEQ ID NO: 3182 - DNA, 318 bp, Homo Sapiens
gcactgggctcagttcctctcatttccatcgcgggatatgttgatagagacatccagctactctgtcagtcctcgggctggttcccccggcccacagcgaagtggaaaggtccacaaggacaggatttgtccacagactccaggacaaacagagacatgcatggcctgtttgatgtggagatctctctgaccgtccaagagaacgccgggagcatatcctgttccatgcggcatgctcatctgagccgagaggtggaatccagggtacagataggagatacctttttcaagcctatatcatggcacctggctaccaaa

SEQ ID NO: 3183 - DNA, 666 bp, Homo Sapiens
agctcagaggtcaaggtgctaggccctgagtatcccatcctggccctcgtcggggaggaggtggagttcccgtgccacctatggccacagctggatgcccagcaaatggagatccgctggttccggagtcagaccttcaatgtggtacacctgtaccaggagcagcaggagctccctggcaggcagatgccggcgttccggaacaggaccaagttggtcaaggacgacatcgcctatggcagcgtggtcctgcagcttcacagcatcatcccctctgacaagggcacatatggctgccgcttccactccgacaacttctctggcgaagctctctgggaactggaggtagcagggctgggctcagaccctcacctctcccttgagggcttcaaggaaggaggcattcagctgaggctcagatccagtggctggtaccccaagcctaaggttcagtggagagaccaccagggacagtgcctgcctccagagtttgaagccatcgtctgggatgcccaggacctgttcagtctggaaacatctgtggttgtccgagcgggagccctcagcaatgtgtccgtctccatccagaatctcctcttgagccagaagaaagagttggtggtccagatagcagacgtgttcgtacccggagcctctgcgtggaag

SEQ ID NO: 3184 - DNA, 399 bp, Homo Sapiens
attaacatcaccagctcagcttcccaggaaggaacgcgactaaacttaatctgtactgtatggcataagaaagaagaggctgaggggtttgtagtgtttttgtgcaaggacaggtctggagactgttctcctgagaccagtttaaaacagctgagacttaaaagggatcctgggatagatggtgttggtgaaatatcatctcagttgatgttcaccataagccaagtcacaccgttgcacagtgggacctaccagtgttgtgccagaagccagaagtcaggtatccgccttcagggccattttttctccattctattcacagagacagggaactacacagtgacgggattgaaacaaagacaacaccttgagttcagccataatgaaggcactctcagt

SEQ ID NO: 3185 - DNA, 486 bp, Homo Sapiens
ttcaaggtcgccacgccgtattccctgtatgtctgtcccgaggggcagaacgtcaccctcacctgcaggctcttgggccctgtggacaaagggcacgatgtgaccttctacaagacgtggtaccgcagctcgaggggcgaggtgcagacctgctcagagcgccggcccatccgcaacctcacgttccaggaccttcacctgcaccatggaggccaccaggctgccaacaccagccacgacctggctcagcgccacgggctggagtcggcctccgaccaccatggcaacttctccatcaccatgcgcaacctgaccctgctggatagcggcctctactgctgcctggtggtggagatcaggcaccaccactcggagcacagggtccatggtgccatggagctgcaggtgcagacaggcaaagatgcaccatccaactgtgtggtgtacccatcctcctcccaggagagtgaaaacatcacggctgca

SEQ ID NO: 3186 - DNA, 975 bp, Homo Sapiens
gcgctgctgaggaggcagacgtccggtcccttgtaccttgctgtgtgggacaaggctgacgactcagggggaagaatgactacagcctgcagtcctcataatcctcagtgcacagctgacttgggtgctcagtacatcacctgcactcctcattatgccaaaaaacaccaacgtttttatgatgaactgttagcctatggcgttttgaggcctctaagctcgcctattgaaggaatggtgatgaaagaaggagactgtaactttgtggcacctcaaggaatttcttcaattattaagcattacttgaaagaatcaggtgcagaagtctacttcagacatcgtgtgacacagatcaacctaagagatgacaaatgggaagtatccaaacaaacaggctcccctgagcagtttgatcttattgttctcacaatgccagttcctgagattctgcagcttcaaggtgacatcaccaccttaattagtgaatgccaaaggcagcaactggaggctgtgagctactcctctcgatatgctctgggcctcttttatgaagctggtacgaagattgatgtcccttgggctgggcagtacatcaccagtaatccctgcatacgcttcgtctccattgataataagaagcgcaatatagagtcatcagaaattgggccttccctcgtgattcacaccactgtcccatttggagttacatacttggaacacagcattgaggatgtgcaagagttagtcttccagcagctggaaaacattttgccgggtttgcctcagccaattgctaccaaatgccaaaaatggagacattcacaggttacaaatgctgctgccaactgtcctggccaaatgactctgcatcacaaacctttccttgcatgtggaggggatggatttactcagtccaactttgatggctgcatcacttctgccctatgtgttctggaagctttaaagaattatatt

SEQ ID NO: 3187 - DNA, 735 bp, Homo Sapiens
cgtgaagaagagatcacccccgtggtttccatagcatataaagtattagaggtctttcctaagggcagatgggttctgatcacctgttgtgcccctcagcctccacccccaataacgtacagtctgtgtggaactaaaaatattaaagtggcgaaaaaagtggtaaaaacgcacgagccggcctctttcaatcttaatgtgacgcttaaatcttctcccgaccttcttacatacttttgctgggcctcctcaacaagtggggcccacgttgactccgcgcgtctgcagatgcattgggagttatggtcaaaacccgtatccgagttgcgtgccaattttacgttacaggacagaggggctggacctagagtagaaatgatttgccaggcttcctctggttcccccccaataacaaacagtttaattggaaaggacggccaagttcatctgcagcagaggccctgtcacaggcagccggctaatttctctttcctaccttcacagacatcagactggttctggtgccaagcggccaataacgcaaatgtccagcatagtgccctaactgtagtaccccctggaggagaccagaaaatggaagattggcagggtcctcttgaatcacccattttggcgcttccactttatagatcaacccgtcgtctgagtgaggaggagttcggtgggtttaggataggaaacggagaagtaagaggaaggaaagcagccgctatg

SEQ ID NO: 3188 - DNA, 426 bp, Homo Sapiens
gtgtccgagcccacgacggtggcgtttgacgtgcggcccggcggcgtcgtgcattccttctcccataacgtgggcccgggggacaaatatacgtgtatgttcacttacgcctctcaaggagggaccaatgagcaatggcagatgagtctggggaccagcgaagaccaccagcacttcacctgcaccatctggaggccccaggggaagtcctatctgtacttcacacagttcaaggcagaggtgcggggcgctgagattgagtacgccatggcctactctaaagccgcatttgaaagggaaagtgatgtccctctgaaaactgaggaatttgaagtgaccaaaacagcagtggctcacaggcccggggcattcaaagctgagctgtccaagctggtgattgtggccaaggcatcgcgcactgagctg

SEQ ID NO: 3189 - DNA, 486 bp, Homo Sapiens
gccgcacccactccgccaggatgggaacccacaccagacgcgccatggtgcccctataaggtcttgccagaaggccctgaagcggggggaggccgtctgtgctttaggagcccagctaggggattccgttgtcaggcccctggatgtgttctgcacgcgcccgccggcagatcactaagggcgagtgtacttcgtaatagaagcgtccttcttcagtggcgtttagcgccagctgcggcgcgtcgtgtacgtgcattcgctttgaattgctcatggcgtggcgcatacacgagatttccttgtgaacgtgtcttattaggtgcgtcatgcagagattatctacttccagatgtgcatgattcagttctttataggttgtgcttgcaacctcttccactgagggccggaccggctgcagctgcccctgagacacccgaacctgcagagtgtgtagaattcactgctgaacccgccggtatgcaagat

SEQ ID NO: 3190 - DNA, 498 bp, Homo Sapiens
cttcaggtcacagtgcccgacaagaagaaggtggccatgctcttccagcccactgtgcttcgctgccacttctcaacatcctcccatcagcctgcagttgtgcagtggaagttcaagtcctactgccaggatcgcatgggagaatccttgggcatgtcctctacccgggcccaatctctcagcaagagaaacctggaatgggacccctacttggattgtttggacagcaggaggactgttcgagtagtagcttcaaaacagggctcgactgtcaccctgggagatttctacaggggcagagagatcacgattgttcatgatgcagatcttcaaattggaaagcttatgtggggagacagcggactctattactgtattatcaccaccccagatgacctggaggggaaaaatgaggactcagtggaactgctggtgttgggcaggacagggctgcttgctgatctcttgcccagttttgctgtggagattatgccagag

SEQ ID NO: 3191 - DNA, 726 bp, Homo Sapiens
ggcccggaaggccactatgagatgctgggcacctgccgcatggtgtgcgacccctaccccgcgcggggccccggcgccggcgcgcggaccgacggcggcgacgccctgagcgagcagagcggcgcgcccccgccttccacgctggtgcagggcccccaggggaagccgggccgcaccggcaagcccggccctccggggcctcccggggacccaggtcctcccggccctgtggggccgccgggggagaagggtgagccaggcaagccgggccctccggggctgccgggcgcggggggcagcggcgccatcagcactgccacctacaccacggtgccgcgcgtggccttctacgccggcctcaagaacccccacgagggttacgaggtactcaagtttgacgacgtggtcaccaacctaggcaacaactacgacgcggccagcggcaagtttacgtgcaacattcccggcacctactttttcacctaccatgtcctcatgcgcggcggcgacggcaccagtatgtgggcagacctctgcaagaatggccaggtgcgggccagtgctattgcccaggacgcggaccagaactacgactacgccagcaacagcgtgatcctgcacctggacgccggcgacgaggtcttcatcaagctggatggaggcaaagcacacggcggcaacagcaacaaatacagcacgttctctggcttcatcatctactccgac

SEQ ID NO: 3192 - DNA, 798 bp, Homo Sapiens
cattatgagatgatgggaacatgtagaatgatttgcgacccatacactgccgctcccggcggggaaccaccgggagctaaagcgcaacctcctgggccgtccacagcggctctggaggtaatgcaggaccttagtgcaaacccacccccgccctttatccaaggacctaagggggacccaggtaggccaggcaagcctgggcctcgtggtccaccgggagagccggggcctcctggtccaagaggtccacctggcgaaaagggggattctggtagaccaggccttccagggttgcaactaaccgccggaaccgccagcggcgttggtgtagttggaggcggcgctggggtcgggggtgattcagagggagaggttacgagtgccttaagcgctacttttagtggacctaagatagccttctacgtgggcctaaagtccccccacgaggggtacgaggttctgaaattcgatgatgtcgtaactaatctgggaaatcactatgacccaaccacgggcaaattttcctgtcaagtgcgtggcatatatttctttacttatcatatactaatgagaggaggtgacggcacctctatgtgggctgatctatgcaagaacggtcaggtgagggcctccgccatagcgcaagatgctgatcaaaattacgactatgcaagtaactccgttgtactgcatctggacagtggtgacgaggtttatgtgaaattagacgggggaaaagcgcatggcggcaataacaataagtatagtactttttcaggattccttttatatccagac

SEQ ID NO: 3193 - DNA, 1671 bp, Homo Sapiens
gctgacacggaggcggtggtctgcgtggggaccgcctgctacacggcccactcgggcaagctgagcgctgccgaggcccagaaccactgcaaccagaacgggggcaacctggccactgtgaagagcaaggaggaggcccagcacgtccagcgagtactggcccagctcctgaggcgggaggcagccctgacggcgaggatgagcaagttctggattgggctccagcgagagaagggcaagtgcctggaccctagtctgccgctgaagggcttcagctgggtgggcgggggggaggacacgccttactctaactggcacaaggagctccggaactcgtgcatctccaagcgctgtgtgtctctgctgctggacctgtcccagccgctccttcccagccgcctccccaagtggtctgagggcccctgtgggagcccaggctcccccggaagtaacattgagggcttcgtgtgcaagttcagcttcaaaggcatgtgccggcctctggccctggggggcccaggtcaggtgacctacaccacccccttccagaccaccagttcctccttggaggctgtgccctttgcctctgcggccaatgtagcctgtggggaaggtgacaaggacgagactcagagtcattatttcctgtgcaaggagaaggcccccgatgtgttcgactggggcagctcgggccccctctgtgtcagccccaagtatggctgcaacttcaacaatgggggctgccaccaggactgctttgaagggggggatggctccttcctctgcggctgccgaccaggattccggctgctggatgacctggtgacctgtgcctctcgaaacccttgcagctccagcccatgtcgtgggggggccacgtgcgtcctgggaccccatgggaaaaactacacgtgccgctgcccccaagggtaccagctggactcgagtcagctggactgtgtggacgtggatgaatgccaggactccccctgtgcccaggagtgtgtcaacacccctgggggcttccgctgcgaatgctgggttggctatgagccgggcggtcctggagagggggcctgtcaggatgtggatgagtgtgctctgggtcgctcgccttgcgcccagggctgcaccaacacagatggctcatttcactgctcctgtgaggagggctacgtcctggccggggaggacgggactcagtgccaggacgtggatgagtgtgtgggcccggggggccccctctgcgacagcttgtgcttcaacacacaagggtccttccactgtggctgcctgccaggctgggtgctggccccaaatggggtctcttgcaccatggggcctgtgtctctgggaccaccatctgggccccccgatgaggaggacaaaggagagaaagaagggagcaccgtgccccgtgctgcaacagccagtcccacaaggggccccgagggcacccccaaggctacacccaccacaagtagaccttcgctgtcatctgacgcccccatcacatctgccccactcaagatgctggcccccagtgggtccccaggcgtctggagggagcccagcatccatcacgccacagctgcctctggcccccaggagcctgcaggtggggactcctccgtggccacacaaaacaacgatggcactgacgggcaaaag

SEQ ID NO: 3194 - DNA, 810 bp, Homo Sapiens
gacccactgcttggcgcctttgctcgcagggacttccggaaaggctcccctcaactggtctgcagcctgcctggcccccagggcccacccggccccccaggagccccagggccctcaggaatgatgggacgaatgggctttcctggcaaagacggccaagatggacacgacggcgaccggggggacagcggagaggaaggtccacctggccggacaggtaaccggggaaagccaggaccaaagggcaaagccggggccattgggcgggctggcccccgtggccccaagggggtcaacggtacccccgggaagcatggcacaccaggcaagaaggggcccaagggcaagaagggggagccaggcctcccaggcccctgcagctgtggcagtggccataccaagtcagctttctcggtggcagtgaccaagagctacccacgggagcggctgcccatcaagtttgacaagattctgatgaacgagggtggccactacaatgcttccagcggcaagttcgtctgcggcgtgcctgggatctactacttcacctacgacatcacgctggccaacaagcacctggccatcggcctggtgcacaacggccagtaccgcatccggacctttgatgccaacaccggcaaccacgatgtggcctcaggctccaccatcctggctctcaagcagggtgacgaagtttggctgcagatcttctactcagagcagaacgggctcttctatgacccttactggacagacagcctctttacgggcttcctaatctatgccgaccaggatgaccccaacgaggta

SEQ ID NO: 3195 - DNA, 939 bp, Homo Sapiens
ctgggcccgacccccggcccgggatcctctgagctgcgctcggccttctcggcggcacgcaccacccccctggagggcacgtcggagatggcggtgaccttcgacaaggtgtacgtgaacatcgggggcgacttcgatgtggccaccggccagtttcgctgccgcgtgcccggcgcctacttcttctccttcacggctggcaaggccccgcacaagagcctgtcggtgatgctggtgcgaaaccgcgacgaggtgcaggcgctggccttcgacgagcagcggcggccaggcgcgcggcgcgcagccagccagagcgccatgctgcagctcgactacggcgacacagtgtggctgcggctgcatggcgccccgcagtacgcgctaggcgcgcccggcgccaccttcagcggctacctagtctacgccgacgccgacgctgacgcgcctgcgcgcgggccgcccgcgccccccgagccgcgctcggccttctcggcggcgcgcacgcgcagcttggtgggctcggacgctggccccgggccgcggcaccaaccactcgccttcgacaccgagttcgtcaacattggcggcgacttcgacgcggcggccggcgtgttccgctgccgtctgcccggcgcctacttcttctccttcacgctgggcaagctgccgcgtaagacgctgtcggttaagctgatgaagaaccgcgacgaggtgcaggccatgatttacgacgacggcgcgtcgcggcgccgcgagatgcagagccagagcgtgatgctggccctgcggcgcggcgacgccgtctggctgctcagccacgaccacgacggctacggcgcctacagcaaccacggcaagtacatcaccttctccggcttcctggtgtaccccgacctcgcccccgccgccccgccgggcctcggggcctcggagctactg

SEQ ID NO: 3196 - DNA, 684 bp, Homo Sapiens
tcgcccccactggacgacaacaagatccccagcctctgcccggggcaccccggccttccaggcacgccgggccaccatggcagccggggcttgccgggccgcgatggccgcgacggccgcgacggcgcgcccggggctccgggagagaaaggcgagggcgggaggccgggactgccgggacctcgaggggaccccgggccgcgaggagaggcgggacccgcggggcccaccgggcctgccggggagtgctcggtgcctccgcgatccgccttcagcgccaagcgctccgagagccgggtgcctccgccgtctgacgcacccttgcccttcgaccgcgtgctggtgaacgagcagggacattacgacgccgtcaccggcaagttcacctgccaggtgcctggggtctactacttcgccgtccatgccaccgtctaccgggccagcctgcagtttgatctggtgaagaatggcgaatccattgcctctttcttccagtttttcggggggtggcccaagccagcctcgctctcggggggggccatggtgaggctggagcctgaggaccaagtgtgggtgcaggtgggtgtgggtgactacattggcatctatgccagcatcaagacagacagcaccttctccggatttctggtgtactccgactggcacagctccccagtctttgct

SEQ ID NO: 3197 - DNA, 2064 bp, Homo Sapiens
tccattcccatccctcagaagttatttggggaggtgacttcccctctgttccccaagccttaccccaacaactttgaaacaaccactgtgatcacagtccccacgggatacagggtgaagctcgtcttccagcagtttgacctggagccttctgaaggctgcttctatgattatgtcaagatctctgctgataagaaaagcctggggaggttctgtgggcaactgggttctccactgggcaaccccccgggaaagaaggaatttatgtcccaagggaacaagatgctgctgaccttccacacagacttctccaacgaggagaatgggaccatcatgttctacaagggcttcctggcctactaccaagctgtggaccttgatgaatgtgcttcccggagcaaattaggggaggaggatccccagccccagtgccagcacctgtgtcacaactacgttggaggctacttctgttcctgccgtccaggctatgagcttcaggaagacaggcattcctgccaggctgagtgcagcagcgagctgtacacggaggcatcaggctacatctccagcctggagtaccctcggtcctacccccctgacctgcgctgcaactacagcatccgggtggagcggggcctcaccctgcacctcaagttcctggagccttttgatattgatgaccaccagcaagtacactgcccctatgaccagctacagatctatgccaacgggaagaacattggcgagttctgtgggaagcaaaggccccccgacctcgacaccagcagcaatgctgtggatctgctgttcttcacagatgagtcgggggacagccggggctggaagctgcgctacaccaccgagatcatcaagtgcccccagcccaagaccctagacgagttcaccatcatccagaacctgcagcctcagtaccagttccgtgactacttcattgctacctgcaagcaaggctaccagctcatagaggggaaccaggtgctgcattccttcacagctgtctgccaggatgatggcacgtggcatcgtgccatgcccagatgcaagatcaaggactgtgggcagccccgaaacctgcctaatggtgacttccgttacaccaccacaatgggagtgaacacctacaaggcccgtatccagtactactgccatgagccatattacaagatgcagaccagagctggcagcagggagtctgagcaaggggtgtacacctgcacagcacagggcatttggaagaatgaacagaagggagagaagattcctcggtgcttgccagtgtgtgggaagcccgtgaaccccgtggaacagaggcagcgcatcatcggagggcaaaaagccaagatgggcaacttcccctggcaggtgttcaccaacatccacgggcgcgggggcggggccctgctgggcgaccgctggatcctcacagctgcccacaccctgtatcccaaggaacacgaagcgcaaagcaacgcctctttggatgtgttcctgggccacacaaatgtggaagagctcatgaagctaggaaatcaccccatccgcagggtcagcgtccacccggactaccgtcaggatgagtcctacaattttgagggggacatcgccctgctggagctggaaaatagtgtcaccctgggtcccaacctcctccccatctgcctccctgacaacgataccttctacgacctgggcttgatgggctatgtcagtggcttcggggtcatggaggagaagattgctcatgacctcaggtttgtccgtctgcccgtagctaatccacaggcctgtgagaactggctccggggaaagaataggatggatgtgttctctcaaaacatgttctgtgctggacacccatctctaaagcaggacgcctgccagggggatagtgggggcgtttttgcagtaagggacccgaacactgatcgctgggtggccacgggcatcgtgtcctggggcatcgggtgcagcaggggctatggcttctacaccaaagtgctcaactacgtggactggatcaagaaagagatggaggaggaggac

SEQ ID NO: 3198 - DNA, 2019 bp, Homo Sapiens
gagcctaccatgtatggggagatcctgtcccctaactatcctcaggcatatcccagtgaggtagagaaatcttgggacatagaagttcctgaagggtatgggattcacctctacttcacccatctggacattgagctgtcagagaactgtgcgtatgactcagtgcagataatctcaggagacactgaagaagggaggctctgtggacagaggagcagtaacaatccccactctccaattgtggaagagttccaagtcccatacaacaaactccaggtgatctttaagtcagacttttccaatgaagagcgttttacggggtttgctgcatactatgttgccacagacataaatgaatgcacagattttgtagatgtcccttgtagccacttctgcaacaatttcattggtggttacttctgctcctgccccccggaatatttcctccatgatgacatgaagaattgcggagttaattgcagtggggatgtattcactgcactgattggggagattgcaagtcccaattatcccaaaccatatccagagaactcaaggtgtgaataccagatccggttggagaaagggttccaagtggtggtgaccttgcggagagaagattttgatgtggaagcagctgactcagcgggaaactgccttgacagtttagtttttgttgcaggagatcggcaatttggtccttactgtggtcatggattccctgggcctctaaatattgaaaccaagagtaatgctcttgatatcatcttccaaactgatctaacagggcaaaaaaagggctggaaacttcgctatcatggagatccaatgccctgccctaaggaagacactcccaattctgtttgggagcctgcgaaggcaaaatatgtctttagagatgtggtgcagataacctgtctggatgggtttgaagttgtggagggacgtgttggtgcaacatctttctattcgacttgtcaaagcaatggaaagtggagtaattccaaactgaaatgtcaacctgtggactgtggcattcctgaatccattgagaatggtaaagttgaagacccagagagcactttgtttggttctgtcatccgctacacttgtgaggagccatattactacatggaaaatggaggaggtggggagtatcactgtgctggtaacgggagctgggtgaatgaggtgctgggcccggagctgccgaaatgtgttccagtctgtggagtccccagagaaccctttgaagaaaaacagaggataattggaggatccgatgcagatattaaaaacttcccctggcaagtcttctttgacaacccatgggctggtggagcgctcattaatgagtactgggtgctgacggctgctcatgttgtggagggaaacagggagccaacaatgtatgttgggtccacctcagtgcagacctcacggctggcaaaatccaagatgctcactcctgagcatgtgtttattcatccgggatggaagctgctggaagtcccagaaggacgaaccaattttgataatgacattgcactggtgcggctgaaagacccagtgaaaatgggacccaccgtctctcccatctgcctaccaggcacctcttccgactacaacctcatggatggggacctgggactgatctcaggctggggccgaacagagaagagagatcgtgctgttcgcctcaaggcggcaaggttacctgtagctcctttaagaaaatgcaaagaagtgaaagtggagaaacccacagcagatgcagaggcctatgttttcactcctaacatgatctgtgctggaggagagaagggcatggatagctgtaaaggggacagtggtggggcctttgctgtacaggatcccaatgacaagaccaaattctacgcagctggcctggtgtcctgggggccccagtgtgggacctatgggctctacacacgggtaaagaactatgttgactggataatgaagactatgcaggaaaatagcaccccccgtgaggac

SEQ ID NO: 3199 - DNA, 231 bp, Homo Sapiens
tccgtgcagctcacggagaagcgaatggacaaagtcggcaagtaccccaaggagctgcgcaagtgctgcgaggacggcatgcgggagaaccccatgaggttctcgtgccagcgccggacccgtttcatctccctgggcgaggcgtgcaagaaggtcttcctggactgctgcaactacatcacagagctgcggcggcagcacgcgcgggccagccacctgggcctggccagg

SEQ ID NO: 3200 - DNA, 231 bp, Homo Sapiens
aacgtgaacttccaaaaggcgattaatgagaaattgggtcagtatgcttccccgacagccaagcgctgctgccaggatggggtgacacgtctgcccatgatgcgttcctgcgagcagcgggcagcccgcgtgcagcagccggactgctgggagcccttcctgtcctgctgccaatttgctgagagtctgcgcaagaagagcagggacaagggccaggcgggcctccaacga

SEQ ID NO: 3201 - DNA, 222 bp, Homo Sapiens
acgctgcaaaagaagatagaagaaatagctgctaaatataaacattcagtagtgaagaaatgttgttacgatggagcctgcgttaataatgatgaaacctgtgagcagcgagctgcacggattagtttagggccaagatgcatcaaagctttcactgaatgttgtgtcgtcgcaagccagctccgtgctaatatctctcataaagacatgcaattgggaagg

SEQ ID NO: 3202 - DNA, 2739 bp, Homo Sapiens
tgcttctgtgatcactatgcatggactcagtggaccagctgctcaaaaacttgcaattctggaacccagagcagacacagacaaatagtagtagataagtactaccaggaaaacttttgtgaacagatttgcagcaagcaggagactagagaatgtaactggcaaagatgccccatcaactgcctcctgggagattttggaccatggtcagactgtgacccttgtattgaaaaacagtctaaagttagatctgtcttgcgtcccagtcagtttgggggacagccatgcactgagcctctggtagcctttcaaccatgcattccatctaagctctgcaaaattgaagaggctgactgcaagaataaatttcgctgtgacagtggccgctgcattgccagaaagttagaatgcaatggagaaaatgactgtggagacaattcagatgaaagggactgtgggaggacaaaggcagtatgcacacggaagtataatcccatccctagtgtacagttgatgggcaatgggtttcattttctggcaggagagcccagaggagaagtccttgataactctttcactggaggaatatgtaaaactgtcaaaagcagtaggacaagtaatccataccgtgttccggccaatctggaaaatgtcggctttgaggtacaaactgcagaagatgacttgaaaacagatttctacaaggatttaacttctcttggacacaatgaaaatcaacaaggctcattctcaagtcagggggggagctctttcagtgtaccaattttttattcctcaaagagaagtgaaaatatcaaccataattctgccttcaaacaagccattcaagcctctcacaaaaaggattctagttttattaggatccataaagtgatgaaagtcttaaacttcacaacgaaagctaaagatctgcacctttctgatgtctttttgaaagcacttaaccatctgcctctagaatacaactctgctttgtacagccgaatattcgatgactttgggactcattacttcacctctggctccctgggaggcgtgtatgaccttctctatcagtttagcagtgaggaactaaagaactcaggtttaaccgaggaagaagccaaacactgtgtcaggattgaaacaaagaaacgcgttttatttgctaagaaaacaaaagtggaacataggtgcaccaccaacaagctgtcagagaaacatgaaggttcatttatacagggagcagagaaatccatatccctgattcgaggtggaaggagtgaatatggagcagctttggcatgggagaaagggagctctggtctggaggagaagacattttctgagtggttagaatcagtgaaggaaaatcctgctgtgattgactttgagcttgcccccatcgtggacttggtaagaaacatcccctgtgcagtgacaaaacggaacaacctcaggaaagctttgcaagagtatgcagccaagttcgatccttgccagtgtgctccatgccctaataatggccgacccaccctctcagggactgaatgtctgtgtgtgtgtcagagtggcacctatggtgagaactgtgagaaacagtctccagattataaatccaatgcagtagacggacagtggggttgttggtcttcctggagtacctgtgatgctacttataagagatcgagaacccgagaatgcaataatcctgccccccaacgaggagggaaacgctgtgagggggagaagcgacaagaggaagactgcacattttcaatcatggaaaacaatggacaaccatgtatcaatgatgatgaagaaatgaaagaggtcgatcttcctgagatagaagcagattccgggtgtcctcagccagttcctccagaaaatggatttatccggaatgaaaagcaactatacttggttggagaagatgttgaaatttcatgccttactggctttgaaactgttggataccagtacttcagatgcttaccagacgggacctggagacaaggggatgtggaatgccaacggacggagtgcatcaagccagttgtgcaggaagtcctgacaattacaccatttcagagattgtatagaattggtgaatccattgagctaacttgccccaaaggctttgttgttgctgggccatcaaggtacacatgccaggggaattcctggacaccacccatttcaaactctctcacctgtgaaaaagatactctaacaaaattaaaaggccattgtcagctgggacagaaacaatcaggatctgaatgcatttgtatgtctccagaagaagactgtagccatcattcagaagatctctgtgtgtttgacacagactccaacgattactttacttcacccgcttgtaagtttttggctgagaaatgtttaaataatcagcaactccattttctacatattggttcctgccaagacggccgccagttagaatggggtcttgaaaggacaagactttcatccaacagcacaaagaaagaatcctgtggctatgacacctgctatgactgggaaaaatgttcagcctccacttccaaatgtgtctgcctattgcccccacagtgcttcaagggtggaaaccaactctactgtgtcaaaatgggatcatcaacaagtgagaaaacattgaacatctgtgaagtgggaactataagatgtgcaaacaggaagatggaaatactgcatcctggaaagtgtttggcc

SEQ ID NO: 3203 - DNA, 375 bp, Homo Sapiens
aaccctggggcttctctggacggccgccctggggaccgggtgaatctctcctgcggaggagtctctcatcccatccgctgggtctgggcacccagcttcccggcctgcaagggcctgtccaaaggacgccgaccgatcctgtgggcctcttcgagcgggacccccaccgtgcctcccctccagcctttcgtcggccgcctacgctccctggactctggtatccggcggctggagctcctcttgagcgcgggggactcgggcacttttttctgcaagggccgccacgaggacgagagccgtacagtgcttcacgtgctgggggacaggacctattgcaaggcccccgggcctacccatgggtccgtgtatccccag

SEQ ID NO: 3204 - DNA, 2463 bp, Homo Sapiens
tcctctccagtcaactgccagtgggacttctatgccccttggtcagaatgcaatggctgtaccaagactcagactcgcaggcggtcagttgctgtgtatgggcagtatggaggccagccttgtgttggaaatgcttttgaaacacagtcctgtgaacctacaagaggatgtccaacagaggagggatgtggagagcgtttcaggtgcttttcaggtcagtgcatcagcaaatcattggtttgcaatggggattctgactgtgatgaagacagtgctgatgaagacagatgtgaggactcagaaaggagaccttcctgtgatatcgataaacctcctcctaacatagaacttactggaaatggttacaatgaactcactggccagtttaggaacagagtcatcaataccaaaagttttggtggtcaatgtagaaaggtgtttagtggggatggaaaagatttctacaggctgagtggaaatgtcctgtcctatacattccaggtgaaaataaataatgattttaattatgaattttacaatagtacttggtcttatgtaaaacatacgtcgacagaacacacatcatctagtcggaagcgctccttttttagatcttcatcatcttcttcacgcagttatacttcacataccaatgaaatccataaaggaaagagttaccaactgctggttgttgagaacactgttgaagtggctcagttcattaataacaatccagaatttttacaacttgctgagccattctggaaggagctttcccacctcccctctctgtatgactacagtgcctaccgaagattaatcgaccagtacgggacacattatctgcaatctgggtcgttaggaggagaatacagagttctattttatgtggactcagaaaaattaaaacaaaatgattttaattcagtcgaagaaaagaaatgtaaatcctcaggttggcattttgtcgttaaattttcaagtcatggatgcaaggaactggaaaacgctttaaaagctgcttcaggaacccagaacaatgtattgcgaggagaaccgttcatcagagggggaggtgcaggcttcatatctggccttagttacctagagctggacaatcctgctggaaacaaaaggcgatattctgcctgggcagaatctgtgactaatcttcctcaagtcataaaacaaaagctgacacctttatatgagctggtaaaggaagtaccttgtgcctctgtgaaaaaactatacctgaaatgggctcttgaagagtatctggatgaatttgacccctgtcattgccggccttgtcaaaatggtggtttggctactgttgaggggacccattgtctgtgccattgcaaaccgtacacatttggtgcggcgtgtgagcaaggagtcctcgtagggaatcaagcaggaggggttgatggaggttggagttgctggtcctcttggagcccctgtgtccaagggaagaaaacaagaagccgtgaatgcaataacccacctcccagtgggggtgggagatcctgcgttggagaaacgacagaaagcacacaatgcgaagatgaggagctggagcacttgaggttgcttgaaccacattgctttcctttgtctttggttccaacagaattctgtccatcacctcctgccttgaaagatggatttgttcaagatgaaggtacaatgtttcctgtggggaaaaatgtagtgtacacttgcaatgaaggatactctcttattggaaacccagtggccagatgtggagaagatttacggtggcttgttggggaaatgcattgtcagaaaattgcctgtgttctacctgtactgatggatggcatacagagtcacccccaaaaacctttctacacagttggtgagaaggtgactgtttcctgttcaggtggcatgtccttagaaggtccttcagcatttctctgtggctccagccttaagtggagtcctgagatgaagaatgcccgctgtgtacaaaaagaaaatccgttaacacaggcagtgcctaaatgtcagcgctgggagaaactgcagaattcaagatgtgtttgtaaaatgccctacgaatgtggaccttccttggatgtatgtgctcaagatgagagaagcaaaaggatactgcctctgacagtttgcaagatgcatgttctccactgtcagggtagaaattacacccttactggtagggacagctgtactctgcctgcctcagctgagaaagcttgtggtgcctgcccactgtggggaaaatgtgatgctgagagcagcaaatgtgtctgccgagaagcatcggagtgcgaggaagaagggtttagcatttgtgtggaagtgaacggcaaggagcagacgatgtctgagtgtgaggcgggcgctctgagatgcagagggcagagcatctctgtcaccagcataaggccttgtgctgcggaaacccag

SEQ ID NO: 3205 - DNA, 1662 bp, Homo Sapiens
gcagctacacccgcagcagttacctgccagctgagcaactggtcagagtggacagattgctttccgtgccaggacaaaaagtaccgacaccggagcctcttgcagccaaacaagtttgggggaaccatctgcagtggtgacatctgggatcaagccagctgctccagttctacaacttgtgtaaggaaagcacagtgtggacaggatttccagtgtaaggagacaggtcgctgcctgaaacgccaccttgtgtgtaatggagaccaggactgccttgatggctctgatgaggacgactgtgaagatgtcagggccattgacgaagactgcagccagtatgaaccaattccaggatcacagaaggcagccttggggtacaatatcctgacccaggaagatgctcagagtgtgtacgatgccagttattatgggggccagtgtgagacggtatacaatggggaatggagggagcttcgatatgactccacctgtgaacgtctctactatggagatgatgagaaatactttcggaaaccctacaactttctgaagtaccactttgaagccctggcagatactggaatctcctcagagttttatgataatgcaaatgaccttctttccaaagttaaaaaagacaagtctgactcatttggagtgaccatcggcataggcccagccggcagccctttattggtgggtgtaggtgtatcccactcacaagacacttcattcttgaacgaattaaacaagtataatgagaagaaattcattttcacaagaatcttcacaaaggtgcagactgcacattttaagatgaggaaggatgacattatgctggatgaaggaatgctgcagtcattaatggagcttccagatcagtacaattatggcatgtatgccaagttcatcaatgactatggcacccattacatcacatctggatccatgggtggcatttatgaatatatcctggtgattgacaaagcaaaaatggaatcccttggtattaccagcagagatatcacgacatgttttggaggctccttgggcattcaatatgaagacaaaataaatgttggtggaggtttatcaggagaccattgtaaaaaatttggaggtggcaaaactgaaagggccaggaaggccatggctgtggaagacattatttctcgggtgcgaggtggcagttctggctggagcggtggcttggcacagaacaggagcaccattacataccgttcctgggggaggtcattaaagtataatcctgttgttatcgattttgagatgcagcctatccacgaggtgctgcggcacacaagcctggggcctctggaggccaagcgccagaacctgcgccgcgccttggaccagtatctgatggaattcaatgcctgccgatgtgggccttgcttcaacaatggggtgcccatcctcgagggcaccagctgcaggtgccagtgccgcctgggtagcttgggtgctgcctgtgagcaaacacagacagaaggagccaaagcagatgggagctggagttgctggagctcctggtctgtatgcagagcaggcatccaggaaaggagaagagagtgtgacaatccagcacctcagaatggaggggcctcgtgtccagggcggaaagtacagacgcaggcttgc

SEQ ID NO: 3206 - DNA, 1611 bp, Homo Sapiens
agtgtggatgttaccctgatgcccattgattgtgagctgtctagttggtcctcttggaccacatgtgacccctgtcagaagaaaaggtacaggtatgcctacttgctccagccctctcagttccatggggaaccgtgcaacttctctgacaaggaagtcgaagactgtgttaccaacagaccatgcagaagtcaagtgcgatgtgaaggctttgtgtgtgcacagacaggaaggtgtgtaaaccgcagacttctttgcaatggggacaatgactgtggagaccagtcagatgaagcaaactgtagaaggatttataaaaaatgtcagcatgaaatggaccaatactggggaattggcagtctggccagtgggataaatttgttcacaaacagttttgagggcccagttcttgatcacaggtattatgcaggtggatgctccccgcattacatcctgaacacgaggtttaggaagccctacaatgtggaaagctacacgccacagacccaaggcaaatacgaattcatattaaaagagtatgaatcatactcagattttgaacgcaatgtcacagagaaaatggcaagcaagtctggtttcagttttggttttaaaatacctggaatatttgaacttggcatcagtagtcaaagtgatcgaggcaaacactatattaggagaaccaaacgattctctcatactaaaagcgtatttctgcatgcacgctctgaccttgaagtagcacattacaagctgaaacccagaagcctcatgctccattacgagttccttcagagagttaagcggctgcccctggagtacagctacggggaatacagagatctcttccgtgattttgggacccactacatcacagaggctgtgcttgggggcatttatgaatacaccctcgttatgaacaaagaggccatggagagaggagattatactcttaacaacgtccatgcctgtgccaaaaatgattttaaaattggtggtgccattgaagaggtctacgtcagtctgggtgtgtctgtaggcaaatgcagaggtattctgaatgaaataaaagacagaaacaagagggacaccatggtggaggacttggtggtcctggtacgaggaggggcaagtgagcacatcaccaccctggcataccaggagctgccgacggcggacctgatgcaggagtggggagacgctgtgcagtacaacccagccatcatcaaagttaaggtggagcctctgtatgaactagtgacagccacagattttgcctattccagcacagtgaggcagaacatgaagcaggcactggaggagttccagaaggaagttagttcctgccactgtgctccctgccaaggaaatggagtccctgtcctgaaaggatcacgctgtgactgcatctgtcctgttggatcccaaggcctagcctgtgaggtctcctatcggaagaatacccccattgatgggaagtggaattgctggtcaaattggtcttcatgctctggaagacgtaagacaagacaaaggcagtgtaacaatccacctcctcaaaatgggggtagcccctgttcaggccctgcttcagaaacacttgactgctcc

SEQ ID NO: 3207 - DNA, 732 bp, Homo Sapiens
cagtacacgaccagttatgacccagagctaacagaaagcagtggctctgcatcacacatagactgcagaatgagcccctggagtgaatggtcacaatgcgatccttgtctcagacaaatgtttcgttcaagaagcattgaggtctttggacaatttaatgggaaaagatgcaccgacgctgtgggagacagacgacagtgtgtgcccacagagccctgtgaggatgctgaggatgactgcggaaatgactttcaatgcagtacaggcagatgcataaagatgcgacttcggtgtaatggtgacaatgactgcggagacttttcagatgaggatgattgtgaaagtgagccccgtcccccctgcagagacagagtggtagaagagtctgagctggcacgaacagcaggctatgggatcaacattttagggatggatcccctaagcacaccttttgacaatgagttctacaatggactctgtaaccgggatcgggatggaaacactctgacatactaccgaagaccttggaacgtggcttctttgatctatgaaaccaaaggcgagaaaaatttcagaaccgaacattacgaagaacaaattgaagcatttaaaagtatcatccaagagaagacatcaaattttaatgcagctatatctctaaaatttacacccactgaaacaaataaagctgaacaatgttgtgaggaaacagcctcctcaatttctttacat

SEQ ID NO: 3208 - DNA, 906 bp, Homo Sapiens
cagaatctgtttacgaaagacgtgacagtgatcgagggagaggttgcgaccatcagttgccaagtcaataagagtgacgactctgtgattcagctactgaatcccaacaggcagaccatttatttcagggacttcaggcctttgaaggacagcaggtttcagttgctgaatttttctagcagtgaactcaaagtatcattgacaaacgtctcaatttctgatgaaggaagatacttttgccagctctataccgatcccccacaggaaagttacaccaccatcacagtcctggtcccaccacgtaatctgatgatcgatatccagaaagacactgcggtggaaggtgaggagattgaagtcaactgcactgctatggccagcaagccagccacgactatcaggtggttcaaagggaacacagagctaaaaggcaaatcggaggtggaagagtggtcagacatgtacactgtgaccagtcagctgatgctgaaggtgcacaaggaggacgatggggtcccagtgatctgccaggtggagcaccctgcggtcactggaaacctgcagacccagcggtatctagaagtacagtataagcctcaagtgcacattcagatgacttatcctctacaaggcttaacccgggaaggggacgcgcttgagttaacatgtgaagccatcgggaagccccagcctgtgatggtaacttgggtgagagtcgatgatgaaatgcctcaacacgccgtactgtctgggcccaacctgttcatcaataacctaaacaaaacagataatggtacataccgctgtgaagcttcaaacatagtggggaaagctcactcggattatatgctgtatgtatacgattcccgagcaggtgaagaaggctcgatcagggcagtggatcat

SEQ ID NO: 3209 - DNA, 657 bp, Homo Sapiens
atgcctgtcaaaacttccaaggcatatctcaccgttctgggtgttcctgaaaagcctcagattagtggattctcatcaccagttatggagggtgacttgatgcagctgacttgcaaaacatctggtagtaaacctgcagctgatataagatggttcaaaaatgacaaagagattaaagatgtaaaatatttaaaagaagaggatgcaaatcgcaagacattcactgtcagcagcacactggacttccgagtggaccggagtgatgatggagtggcggtcatctgcagagtagatcacgaatccctcaatgccacccctcaggtagccatgcaggtgctagaaatacactatacaccatcagttaagattataccatcgactccttttccacaagaaggacagcctttaattttgacttgtgaatccaaaggaaaaccactgccagaacctgttttgtggacaaaggatggcggagaattaccagatcctgaccgaatggttgtgagtggtagggagctaaacattcttttcctgaacaaaacggataatggtacatatcgatgtgaagccacaaacaccattggccaaagcagtgcggaatatgttctcattgtgcatgatcctaatgctttggctggccagaatggccctgaccat

SEQ ID NO: 3210 - DNA, 645 bp, Homo Sapiens
atggtgaaagccggaacttgctgtgccacatgcaaggagttctaccagatgaagcagaccgtgctgcagctgaagcaaaagattgctctgctccccaacaatgcagctgacctgggcaagtatatcactggtgacaaggtgctggcctcaaacacctaccttccaggacctcctggcctgcctgggggccagggccctcccggctcaccaggaccaaagggaagcccaggcttccccggtatgccaggccctcctgggcagcccggcccacggggctcaatgggacccatgggaccatctcctgatctgtcccacattaagcaaggccggaggggccctgtgggtccaccaggggcaccaggaagagatggttctaagggggagagaggagcgcctgggcccagagggtctccaggaccccctggttctttcgacttcctgctacttatgctggctgacatccgcaatgacatcactgagctgcaggaaaaggtgttcgggcaccggactcactcttcagcagaggagttccctttacctcaggaatttcccagctacccagaagccatggacctgggctctggagatgaccatccaagaagaactgagacaagagacttgagagcccccagagacttctaccca

SEQ ID NO: 3211 - DNA, 219 bp, Homo Sapiens
aagagcatgcaggtacccttctccagatgttgcttctcatttgcggagcaagagattcccctgagggcaatcctgtgttacagaaataccagctccatctgctccaatgagggcttaatattcaagctgaagagaggcaaagaggcctgcgccttggacacagttggatgggttcagaggcacagaaaaatgctgaggcactgcccgtcaaaaagaaaa

SEQ ID NO: 3212 - DNA, 222 bp, Homo Sapiens
gggccagcttctgtcccaaccacctgctgctttaacctggccaataggaagataccccttcagcgactagagagctacaggagaatcaccagtggcaaatgtccccagaaagctgtgatcttcaagaccaaactggccaaggatatctgtgccgaccccaagaagaagtgggtgcaggattccatgaagtatctggaccaaaaatctccaactccaaagcca

SEQ ID NO: 3213 - DNA, 246 bp, Homo Sapiens
ttcaacccccagggacttgctcagccagatgcactcaacgtcccatctacttgctgcttcacatttagcagtaagaagatctccttgcagaggctgaagagctatgtgatcaccaccagcaggtgtccccagaaggctgtcatcttcagaaccaaactgggcaaggagatctgtgctgacccaaaggagaagtgggtccagaattatatgaaacacctgggccggaaagctcacaccctgaagact

SEQ ID NO: 3214 - DNA, 198 bp, Homo Sapiens
ggaccttaccacccctcagagtgctgcttcacctacactacctacaagatcccgcgtcagcggattatggattactatgagaccaacagccagtgctccaagcccggaattgtcttcatcaccaaaaggggccattccgtctgtaccaaccccagtgacaagtgggtccaggactatatcaaggacatgaaggagaac

SEQ ID NO: 3215 - DNA, 276 bp, Homo Sapiens
cagttcacaaatgatgcagagacagagttaatgatgtcaaagcttccactggaaaatccagtagttctgaacagctttcactttgctgctgactgctgcacctcctacatctcacaaagcatcccgtgttcactcatgaaaagttattttgaaacgagcagcgagtgctccaagccaggtgtcatattcctcaccaagaaggggcggcaagtctgtgccaaacccagtggtccgggagttcaggattgcatgaaaaagctgaagccctactcaata

SEQ ID NO: 3216 - DNA, 291 bp, Homo Sapiens
cagccaaaagttcctgagtgggtgaacaccccatccacctgctgcctgaagtattatgagaaagtgttgccaaggagactagtggtgggatacagaaaggccctcaactgtcacctgccagcaatcatcttcgtcaccaagaggaaccgagaagtctgcaccaaccccaatgacgactgggtccaagagtacatcaaggatcccaacctacctttgctgcctaccaggaacttgtccacggttaaaattattacagcaaagaatggtcaaccccagctcctcaactcccag

SEQ ID NO: 3217 - DNA, 213 bp, Homo Sapiens
gctcgagggaccaatgtgggccgggagtgctgcctggagtacttcaagggagccattccccttagaaagctgaagacgtggtaccagacatctgaggactgctccagggatgccatcgtttttgtaactgtgcagggcagggccatctgttcggaccccaacaacaagagagtgaagaatgcagttaaatacctacaaagccttgagaggtct

SEQ ID NO: 3218 - DNA, 207 bp, Homo Sapiens
gcacaagttggtaccaacaaagagctctgctgcctcgtctatacctcctggcagattccacaaaagttcatagttgactattctgaaaccagcccccagtgccccaagccaggtgtcatcctcctaaccaagagaggccggcagatctgtgctgaccccaataagaagtgggtccagaaatacatcagcgacctgaagctgaatgcc

SEQ ID NO: 3219 - DNA, 231 bp, Homo Sapiens
ggcaccaatgatgctgaagactgctgcctgtctgtgacccagaaacccatccctgggtacatcgtgaggaacttccactaccttctcatcaaggatggctgcagggtgcctgctgtagtgttcaccacactgaggggccgccagctctgtgcacccccagaccagccctgggtagaacgcatcatccagagactgcagaggacctcagccaagatgaagcgccgcagcagt

SEQ ID NO: 3220 - DNA, 228 bp, Homo Sapiens
cagccagatgcaatcaatgccccagtcacctgctgttataacttcaccaataggaagatctcagtgcagaggctcgcgagctatagaagaatcaccagcagcaagtgtcccaaagaagctgtgatcttcaagaccattgtggccaaggagatctgtgctgaccccaagcagaagtgggttcaggattccatggaccacctggacaagcaaacccaaactccgaagact

SEQ ID NO: 3221 - DNA, 210 bp, Homo Sapiens
gcaagcaactttgactgctgtcttggatacacagaccgtattcttcatcctaaatttattgtgggcttcacacggcagctggccaatgaaggctgtgacatcaatgctatcatctttcacacaaagaaaaagttgtctgtgtgcgcaaatccaaaacagacttgggtgaaatatattgtgcgtctcctcagtaaaaaagtcaagaacatg

SEQ ID NO: 3222 - DNA, 333 bp, Homo Sapiens
agtgatggaggggctcaggactgttgcctcaagtacagccaaaggaagattcccgccaaggttgtccgcagctaccggaagcaggaaccaagcttaggctgctccatcccagctatcctgttcttgccccgcaagcgctctcaggcagagctatgtgcagacccaaaggagctctgggtgcagcagctgatgcagcatctggacaagacaccatccccacagaaaccagcccagggctgcaggaaggacaggggggcctccaagactggcaagaaaggaaagggctccaaaggctgcaagaggactgagcggtcacagacccctaaagggcca

SEQ ID NO: 3223 - DNA, 207 bp, Homo Sapiens
ggcccctacggcgccaacatggaagacagcgtctgctgccgtgattacgtccgttaccgtctgcccctgcgcgtggtgaaacacttctactggacctcagactcctgcccgaggcctggcgtggtgttgctaaccttcagggataaggagatctgtgccgatcccagagtgccctgggtgaagatgattctcaataagctgagccaa

SEQ ID NO: 3224 - DNA, 243 bp, Homo Sapiens
aatccagtacttctggacagattccatgctactagtgctgactgctgcatctcctacaccccacgaagcatcccgtgttcactcctggagagttactttgaaacgaacagcgagtgctccaagccgggtgtcatcttcctcaccaagaaggggcgacgtttctgtgccaaccccagtgataagcaagttcaggtttgcatgagaatgctgaagctggacacacggatcaagaccaggaagaat

SEQ ID NO: 3225 - DNA, 279 bp, Homo Sapiens
gtggtcatcccctctccctgctgcatgttctttgtttccaagagaattcctgagaaccgagtggtcagctaccagctgtccagcaggagcatatgcctcaaggcaggagtgatcttcaccaccaagaagggccagcagttctgtggcgaccccaagcaggagtgggtccagaggtacatgaagaacctggacgccaagcagaagaaggcttcccctagggccagggcagtggctgtcaagggccctgtccagagatatcctggcaaccaaaccacctgc

SEQ ID NO: 3226 - DNA, 381 bp, Homo Sapiens
caaggtgtctttgaggactgctgcctggcctaccactaccccattgggtgggctgtgctccggcgcgcctggacttaccggatccaggaggtgagcgggagctgcaatctgcctgctgcgatattctacctccccaagagacacaggaaggtgtgtgggaaccccaaaagcagggaggtgcagagagccatgaagctcctggatgctcgaaataaggtttttgcaaagctccaccacaacacgcagaccttccaagcaggccctcatgctgtaaagaagttgagttctggaaactccaagttatcatcatccaagtttagcaatcccatcagcagcagcaagaggaatgtctccctcctgatatcagctaattcaggactg

SEQ ID NO: 3227 - DNA, 213 bp, Homo Sapiens
acacgtgggagtgacatatccaagacctgctgcttccaatacagccacaagccccttccctggacctgggtgcgaagctatgaattcaccagtaacagctgctcccagcgggctgtgatattcactaccaaaagaggcaagaaagtctgtacccatccaaggaaaaaatgggtgcaaaaatacatttctttactgaaaactccgaaacaattg

SEQ ID NO: 3228 - DNA, 264 bp, Homo Sapiens
ttcctactgccacccagcactgcctgctgtactcagctctaccgaaagccactctcagacaagctactgaggaaggtcatccaggtggaactgcaggaggctgacggggactgtcacctccaggctttcgtgcttcacctggctcaacgcagcatctgcatccacccccagaaccccagcctgtcacagtggtttgagcaccaagagagaaagctccatgggactctgcccaagctgaattttgggatgctaaggaaaatgggc

SEQ ID NO: 3229 - DNA, 324 bp, Homo Sapiens
tcagaagccatacttcccattgcctccagctgttgcacggaggtttcacatcatatttccagaaggctcctggaaagagtgaatatgtgtcgcatccagagagctgatggggattgtgacttggctgctgtcatccttcatgtcaagcgcagaagaatctgtgtcagcccgcacaaccatactgttaagcagtggatgaaagtgcaagctgccaagaaaaatggtaaaggaaatgtttgccacaggaagaaacaccatggcaagaggaacagtaacagggcacatcaggggaaacacgaaacatacggccataaaactccttat

SEQ ID NO: 3230 - DNA, 207 bp, Homo Sapiens
tcacttgctgctgacacgccgaccgcctgctgcttcagctacacctcccggcagattccacagaatttcatagctgactactttgagacgagcagccagtgctccaagcctggtgtcatcttcctaaccaagcgaagccggcaggtctgtgctgaccccagtgaggagtgggtccagaaatatgtcagcgacctggagctgagtgcc

SEQ ID NO: 3231 - DNA, 204 bp, Homo Sapiens
cttgctgctgacacgccgaccgcctgctgcttcagctacacctcccggcagattccacagaatttcatagctgactactttgagacgagcagccagtgctccaagcccagtgtcatcttcctaaccaagagaggccggcaggtctgtgctgaccccagtgaggagtgggtccagaaatacgtcagtgacctggagccgagtgcc

SEQ ID NO: 3232 - DNA, 207 bp, Homo Sapiens
gcaccaatgggctcagaccctcccaccgcctgctgcttttcttacaccgcgaggaagcttcctcgcaactttgtggtagattactatgagaccagcagcctctgctcccagccagctgtggtattccaaaccaaaagaagcaagcaagtctgtgctgatcccagtgaatcctgggtccaggagtacgtgtatgacctggaactgaac

SEQ ID NO: 3233 - DNA, 207 bp, Homo Sapiens
gcaccaatgggctcagaccctcccaccgcctgctgcttttcttacaccgcgaggaagcttcctcacaactttgtggtagattactatgagaccagcagcctctgctcccagccagctgtggtattccaaaccaaaagaggcaagcaagtctgcgccgaccccagtgagtcctgggtccaggagtacgtgtatgacctggaactgaac

SEQ ID NO: 3234 - DNA, 204 bp, Homo Sapiens
tccccatattcctcggacaccacaccctgctgctttgcctacattgcccgcccactgccccgtgcccacatcaaggagtatttctacaccagtggcaagtgctccaacccagcagtcgtctttgtcacccgaaagaaccgccaagtgtgtgccaacccagagaagaaatgggttcgggagtacatcaactctttggagatgagc

SEQ ID NO: 3235 - DNA, 228 bp, Homo Sapiens
cagccagttgggattaatacttcaactacctgctgctacagatttatcaataagaaaatccctaagcagaggctggagagctacagaaggaccaccagtagccactgtccccgggaagctgtaatcttcaagaccaaactggacaaggagatctgtgctgaccccacacagaagtgggtccaggactttatgaagcacctggacaagaaaacccaaactccaaagctt

SEQ ID NO: 3236 - DNA, 228 bp, Homo Sapiens
cagccagattcagtttccattccaatcacctgctgctttaacgtgatcaataggaaaattcctatccagaggctggagagctacacaagaatcaccaacatccaatgtcccaaggaagctgtgatcttcaagacccaacggggcaaggaggtctgtgctgaccccaaggagagatgggtcagggattccatgaagcatctggaccaaatatttcaaaatctgaagcca

SEQ ID NO: 3237 - DNA, 978 bp, Homo Sapiens
accacgccagaaccttgtgagctggacgatgaagatttccgctgcgtctgcaacttctccgaacctcagcccgactggtccgaagccttccagtgtgtgtctgcagtagaggtggagatccatgccggcggtctcaacctagagccgtttctaaagcgcgtcgatgcggacgccgacccgcggcagtatgctgacacggtcaaggctctccgcgtgcggcggctcacagtgggagccgcacaggttcctgctcagctactggtaggcgccctgcgtgtgctagcgtactcccgcctcaaggaactgacgctcgaggacctaaagataaccggcaccatgcctccgctgcctctggaagccacaggacttgcactttccagcttgcgcctacgcaacgtgtcgtgggcgacagggcgttcttggctcgccgagctgcagcagtggctcaagccaggcctcaaggtactgagcattgcccaagcacactcgcctgccttttcctgcgaacaggttcgcgccttcccggcccttaccagcctagacctgtctgacaatcctggactgggcgaacgcggactgatggcggctctctgtccccacaagttcccggccatccagaatctagcgctgcgcaacacaggaatggagacgcccacaggcgtgtgcgccgcactggcggcggcaggtgtgcagccccacagcctagacctcagccacaactcgctgcgcgccaccgtaaaccctagcgctccgagatgcatgtggtccagcgccctgaactccctcaatctgtcgttcgctgggctggaacaggtgcctaaaggactgccagccaagctcagagtgctcgatctcagctgcaacagactgaacagggcgccgcagcctgacgagctgcccgaggtggataacctgacactggacgggaatcccttcctggtccctggaactgccctcccccacgagggctcaatgaac

SEQ ID NO: 3238 - DNA, 327 bp, Homo Sapiens
gcctactaccagcagctgaacacggagctcaaggagaacctgaaggacaccatgaccaagcgctaccaccagccgggccatgaggctgtgaccagcgctgtggaccagctgcagcaggagttccactgctgtggcagcaacaactcacaggactggcgagacagtgagtggatccgctcacaggaggccggtggccgtgtggtcccagacagctgctgcaagacggtggtggctctttgtggacagcgagaccatgcctccaacatctacaaggtggagggcggctgcatcaccaagttggagaccttcatccaggagcacctgagg

SEQ ID NO: 3239 - DNA, 3027 bp, Homo Sapiens
agttctcttggaggaacagacaaggagctgaggctagtggatggtgaaaacaagtgtagcgggagagtggaagtgaaagtccaggaggagtggggaacggtgtgtaataatggctggagcatggaagcggtctctgtgatttgtaaccagctgggatgtccaactgctatcaaagcccctggatgggctaattccagtgcaggttctggacgcatttggatggatcatgtttcttgtcgtgggaatgagtcagctctttgggattgcaaacatgatggatggggaaagcatagtaactgtactcaccaacaagatgctggagtgacctgctcagatggatccaatttggaaatgaggctgacgcgtggagggaatatgtgttctggaagaatagagatcaaattccaaggacggtggggaacagtgtgtgatgataacttcaacatagatcatgcatctgtcatttgtagacaacttgaatgtggaagtgctgtcagtttctctggttcatctaattttggagaaggctctggaccaatctggtttgatgatcttatatgcaacggaaatgagtcagctctctggaactgcaaacatcaaggatggggaaagcataactgtgatcatgctgaggatgctggagtgatttgctcaaagggagcagatctgagcctgagactggtagatggagtcactgaatgttcaggaagattagaagtgagattccaaggagaatgggggacaatatgtgatgacggctgggacagttacgatgctgctgtggcatgcaagcaactgggatgtccaactgccgtcacagccattggtcgagttaacgccagtaagggatttggacacatctggcttgacagcgtttcttgccagggacatgaacctgctgtctggcaatgtaaacaccatgaatggggaaagcattattgcaatcacaatgaagatgctggcgtgacatgttctgatggatcagatctggagctaagacttagaggtggaggcagccgctgtgctgggacagttgaggtggagattcagagactgttagggaaggtgtgtgacagaggctggggactgaaagaagctgatgtggtttgcaggcagctgggatgtggatctgcactcaaaacatcttatcaagtgtactccaaaatccaggcaacaaacacatggctgtttctaagtagctgtaacggaaatgaaacttctctttgggactgcaagaactggcaatggggtggacttacctgtgatcactatgaagaagccaaaattacctgctcagcccacagggaacccagactggttggaggggacattccctgttctggacgtgttgaagtgaagcatggtgacacgtggggctccatctgtgattcggacttctctctggaagctgccagcgttctatgcagggaattacagtgtggcacagttgtctctatcctggggggagctcactttggagagggaaatggacagatctgggctgaagaattccagtgtgagggacatgagtcccatctttcactctgcccagtagcaccccgcccagaaggaacttgtagccacagcagggatgttggagtagtctgctcaagatacacagaaattcgcttggtgaatggcaagaccccgtgtgagggcagagtggagctcaaaacgcttggtgcctggggatccctctgtaactctcactgggacatagaagatgcccatgttctttgccagcagcttaaatgtggagttgccctttctaccccaggaggagcacgttttggaaaaggaaatggtcagatctggaggcatatgtttcactgcactgggactgagcagcacatgggagattgtcctgtaactgctctaggtgcttcattatgtccttcagagcaagtggcctctgtaatctgctcaggaaaccagtcccaaacactgtcctcgtgcaattcatcgtctttgggcccaacaaggcctaccattccagaagaaagtgctgtggcctgcatagagagtggtcaacttcgcctggtaaatggaggaggtcgctgtgctgggagagtagagatctatcatgagggctcctggggcaccatctgtgatgacagctgggacctgagtgatgcccacgtggtttgcagacagctgggctgtggagaggccattaatgccactggttctgctcattttggggaaggaacagggcccatctggctggatgagatgaaatgcaatggaaaagaatcccgcatttggcagtgccattcacacggctgggggcagcaaaattgcaggcacaaggaggatgcgggagttatctgctcagaattcatgtctctgagactgaccagtgaagccagcagagaggcctgtgcagggcgtctggaagttttttacaatggagcttggggcactgttggcaagagtagcatgtctgaaaccactgtgggtgtggtgtgcaggcagctgggctgtgcagacaaagggaaaatcaaccctgcatctttagacaaggccatgtccattcccatgtgggtggacaatgttcagtgtccaaaaggacctgacacgctgtggcagtgcccatcatctccatgggagaagagactggccagcccctcggaggagacctggatcacatgtgacaacaagataagacttcaggaaggacccacttcctgttctggacgtgtggagatctggcatggaggttcctgggggacagtgtgtgatgactcttgggacttggacgatgctcaggtggtgtgtcaacaacttggctgtggtccagctttgaaagcattcaaagaagcagagtttggtcaggggactggaccgatatggctcaatgaagtgaagtgcaaagggaatgagtcttccttgtgggattgtcctgccagacgctggggccatagtgagtgtgggcacaaggaagacgctgcagtgaattgcacagatatttcagtgcagaaaaccccacaaaaagccacaacaggtcgctcatcccgtcagtcatcc

SEQ ID NO: 3240 - DNA, 3957 bp, Homo Sapiens
tttaatggaacagatttggagttgaggctggtcaatggagacggtccctgctctgggacagtggaggtgaaattccagggacagtgggggactgtgtgtgatgatgggtggaacactactgcctcaactgtcgtgtgcaaacagcttggatgtccattttctttcgccatgtttcgttttggacaagccgtgactagacatggaaaaatttggcttgatgatgtttcctgttatggaaatgagtcagctctctgggaatgtcaacaccgggaatggggaagccataactgttatcatggagaagatgttggtgtgaactgttacggtgaagccaatctgggtttgaggctagtggatggaaacaactcctgttcagggagagtggaggtgaaattccaagaaaggtggggaactatatgtgatgatgggtggaacttgaatactgctgccgtggtgtgcaggcaactaggatgtccatcttcttttatttcttctggagttgttaatagccctgctgtattgcgccccatttggctggatgacattttatgccaggggaatgagttggcactctggaattgcagacatcgtggatggggaaatcatgactgcagtcacaatgaggatgtcacattaacttgttatgatagtagtgatcttgaactaaggcttgtaggtggaactaaccgctgtatggggagagtagagctgaaaatccaaggaaggtgggggaccgtatgccaccataagtggaacaatgctgcagctgatgtcgtatgcaagcagttgggatgtggaaccgcacttcacttcgctggcttgcctcatttgcagtcagggtctgatgttgtatggcttgatggtgtctcctgctccggtaatgaatcttttctttgggactgcagacattccggaaccgtcaattttgactgtcttcatcaaaacgatgtgtctgtgatctgctcagatggagcagatttggaactgcgactagcagatggaagtaacaattgttcagggagagtagaggtgagaattcatgaacagtggtggacaatatgtgaccagaactggaagaatgaacaagcccttgtggtttgtaagcagctaggatgtccgttcagcgtctttggcagtcgtcgtgctaaacctagtaatgaagctagagacatttggataaacagcatatcttgcactgggaatgagtcagctctctgggactgcacatatgatggaaaagcaaagcgaacatgcttccgaagatcagatgctggagtaatttgttctgataaggcagatctggacctaaggcttgtcggggctcatagcccctgttatgggagattggaggtgaaataccaaggagagtgggggactgtgtgtcatgacagatggagcacaaggaatgcagctgttgtgtgtaaacaattgggatgtggaaagcctatgcatgtgtttggtatgacctattttaaagaagcatcaggacctatttggctggatgacgtttcttgcattggaaatgagtcaaatatctgggactgtgaacacagtggatggggaaagcataattgtgtacacagagaggatgtgattgtaacctgctcaggtgatgcaacatggggcctgaggctggtgggcggcagcaaccgctgctcgggaagactggaggtgtactttcaaggacggtggggcacagtgtgtgatgacggctggaacagtaaagctgcagctgtggtgtgtagccagctggactgcccatcttctatcattggcatgggtctgggaaacgcttctacaggatatggaaaaatttggctcgatgatgtttcctgtgatggagatgagtcagatctctggtcatgcaggaacagtgggtggggaaataatgactgcagtcacagtgaagatgttggagtgatctgttctgatgcatcggatatggagctgaggcttgtgggtggaagcagcaggtgtgctggaaaagttgaggtgaatgtccagggtgccgtgggaattctgtgtgctaatggctggggaatgaacattgctgaagttgtttgcaggcaacttgaatgtgggtctgcaatcagggtctccagagagcctcatttcacagaaagaacattacacatcttaatgtcgaattctggctgcactggaggggaagcctctctctgggattgtatacgatgggagtggaaacagactgcgtgtcatttaaatatggaagcaagtttgatctgctcagcccacaggcagcccaggctggttggagctgatatgccctgctctggacgtgttgaagtgaaacatgcagacacatggcgctctgtctgtgattctgatttctctcttcatgctgccaatgtgctgtgcagagaattaaactgtggagatgccatatctctttctgtgggagatcactttggaaaagggaatggtctaacttgggccgaaaagttccagtgtgaagggagtgaaactcaccttgcattatgccccattgttcaacatccggaagacacttgtatccacagcagagaagttggagttgtctgttcccgatatacagatgtccgacttgtgaatggcaaatcccagtgtgacgggcaagtggagatcaacgtgcttggacactggggctcactgtgtgacacccactgggacccagaagatgcccgtgttctatgcagacagctcagctgtgggactgctctctcaaccacaggaggaaaatatattggagaaagaagtgttcgtgtgtggggacacaggtttcattgcttagggaatgagtcacttctggataactgtcaaatgacagttcttggagcacctccctgtatccatggaaatactgtctctgtgatctgcacaggaagcctgacccagccactgtttccatgcctcgcaaatgtatctgacccatatttgtctgcagttccagagggcagtgctttgatctgcttagaggacaaacggctccgcctagtggatggggacagccgctgtgccgggagagtagagatctatcacgacggcttctggggcaccatctgtgatgacggctgggacctgagcgatgcccacgtggtgtgtcaaaagctgggctgtggagtggccttcaatgccacggtctctgctcactttggggaggggtcagggcccatctggctggatgacctgaactgcacaggaatggagtcccacttgtggcagtgcccttcccgcggctgggggcagcacgactgcaggcacaaggaggacgcaggggtcatctgctcagaattcacagccttgaggctctacagtgaaactgaaacagagagctgtgctgggagattggaagtcttctataacgggacctggggcagcgtcggcaggaggaacatcaccacagccatagcaggcattgtgtgcaggcagctgggctgtggggagaatggagttgtcagcctcgcccctttatctaagacaggctctggtttcatgtgggtggatgacattcagtgtcctaaaacgcatatctccatatggcagtgcctgtctgccccatgggagcgaagaatctccagcccagcagaagagacctggatcacatgtgaagatagaataagagtgcgtggaggagacaccgagtgctctgggagagtggagatctggcacgcaggctcctggggcacagtgtgtgatgactcctgggacctggccgaggcggaagtggtgtgtcagcagctgggctgtggctctgctctggctgccctgagggacgcttcgtttggccagggaactggaaccatctggttggatgacatgcggtgcaaaggaaatgagtcatttctatgggactgtcacgccaaaccctggggacagagtgactgtggacacaaggaagatgctggcgtgaggtgctctggacagtcgctgaaatcactgaatgcctcctcaggtcat

SEQ ID NO: 3241 - DNA, 1809 bp, Homo Sapiens
tgggatcagatgtgcattgagaaagaagccaacaaaacatataactgtgaaaatttaggtctcagtgaaatccctgacactctaccaaacacaacagaatttttggaattcagctttaattttttgcctacaattcacaatagaaccttcagcagactcatgaatcttacctttttggatttaactaggtgccagattaactggatacatgaagacacttttcaaagccatcatcaattaagcacacttgtgttaactggaaatcccctgatattcatggcagaaacatcgcttaatgggcccaagtcactgaagcatcttttcttaatccaaacgggaatatccaatctcgagtttattccagtgcacaatctggaaaacttggaaagcttgtatcttggaagcaaccatatttcctccattaagttccccaaagacttcccagcacggaatctgaaagtactggattttcagaataatgctatacactacatctctagagaagacatgaggtctctggagcaggccatcaacctaagcctgaacttcaatggcaataatgttaaaggtattgagcttggggcttttgattcaacggtcttccaaagtttgaactttggaggaactccaaatttgtctgttatattcaatggtctgcagaactctactactcagtctctctggctgggaacatttgaggacattgatgacgaagatattagttcagccatgctcaagggactctgtgaaatgtctgttgagagcctcaacctgcaggaacaccgcttctctgacatctcatccaccacatttcagtgcttcacccaactccaagaattggatctgacagcaactcacttgaaagggttaccctctgggatgaagggtctgaacttgctcaagaaattagttctcagtgtaaatcatttcgatcaattgtgtcaaatcagtgctgccaatttcccctcccttacacacctctacatcagaggcaacgtgaagaaacttcaccttggtgttggctgcttggagaaactaggaaaccttcagacacttgatttaagccataatgacatagaggcttctgactgctgcagtctgcaactcaaaaacctgtcccacttgcaaaccttaaacctgagccacaatgagcctcttggtctccagagtcaggcattcaaagaatgtcctcagctagaactcctcgatttggcatttacccgcttacacattaatgctccacaaagtcccttccaaaacctccatttccttcaggttctgaatctcacttactgcttccttgataccagcaatcagcatcttctagcaggcctaccagttctccggcatctcaacttaaaagggaatcactttcaagatgggactatcacgaagaccaacctacttcagaccgtgggcagcttggaggttctgattttgtcctcttgtggtctcctctctatagaccagcaagcattccacagcttgggaaaaatgagccatgtagacttaagccacaacagcctgacatgcgacagcattgattctcttagccatcttaagggaatctacctcaatctggctgccaacagcattaacatcatctcaccccgtctcctccctatcttgtcccagcagagcaccattaatttaagtcataaccccctggactgcacttgctcgaatattcatttcttaacatggtacaaagaaaacctgcacaaacttgaaggctcggaggagaccacgtgtgcaaacccgccatctctaaggggagttaagctatctgatgtcaagctttcctgtggg

SEQ ID NO: 3242 - DNA, 816 bp, Homo Sapiens
cccgaggaacctctagtggtgaaggtggaagagggagataacgctgtgctgcagtgcctcaaggggacctcagatggccccactcagcagctgacctggtctcgggagtccccgcttaaacccttcttaaaactcagcctggggctgccaggcctgggaatccacatgaggcccctggccatctggcttttcatcttcaacgtctctcaacagatggggggcttctacctgtgccagccggggcccccctctgagaaggcctggcagcctggctggacagtcaatgtggagggcagcggggagctgttccggtggaatgtttcggacctaggtggcctgggctgtggcctgaagaacaggtcctcagagggccccagctccccttccgggaagctcatgagccccaagctgtatgtgtgggccaaagaccgccctgagatctgggagggagagcctccgtgtctcccaccgagggacagcctgaaccagagcctcagccaggacctcaccatggcccctggctccacactctggctgtcctgtggggtaccccctgactctgtgtccaggggccccctctcctggacccatgtgcaccccaaggggcctaagtcattgctgagcctagagctgaaggacgatcgcccggccagagatatgtgggtaatggagacgggtctgttgttgccccgggccacagctcaagacgctggaaagtattattgtcaccgtggcaacctgaccatgtcattccacctggagatcactgctcggccagtactatggcactggctgctgaggactggtggctggaag

SEQ ID NO: 3243 - DNA, 840 bp, Homo Sapiens
ctcaaggagcctctctccttccatgtcatctggatcgcatccttttacaaccattcctggaaacaaaatctggtctcaggttggctgagtgatttgcagactcatacctgggacagcaattccagcaccatcgttttcctgtggccctggtccaggggaaacttcagcaatgaggagtggaaggaactggaaacattattccgtatacgcaccattcggtcatttgagggaattcgtagatacgcccatgaattgcagtttgaatatccttttgagatacaggtgacaggaggctgtgagctgcactctggaaaggtctcaggaagcttcttgcagttagcttatcaaggatcagactttgtgagcttccagaacaattcatggttgccatatccagtggctgggaatatggccaagcatttctgcaaagtgctcaatcagaatcagcatgaaaatgacataacacacaatcttctcagtgacacctgcccacgtttcatcttgggtcttcttgatgcaggaaaggcacatctccagcggcaagtgaagcccgaggcctggctgtcccatggccccagtcctggccctggccatctgcagcttgtgtgccatgtctcaggattctacccaaagcccgtgtgggtgatgtggatgcggggtgagcaggagcagcagggcactcagcgaggggacatcttgcccagtgctgatgggacatggtatctccgcgcaaccctggaggtggccgctggggaggcagctgacctgtcctgtcgggtgaagcacagcagtctagagggccaggacatcgtcctctactgggagcatcacagttccgtg

SEQ ID NO: 3244 - DNA, 858 bp, Homo Sapiens
agtgaacatgccttccaggggccgacctcctttcatgttatccagacctcgtcctttaccaatagtacctgggcacaaactcaaggctcaggctggttggatgatttgcagattcatggctgggatagcgactcaggcactgccatattcctgaagccttggtctaaaggtaactttagtgataaggaggttgctgagttagaggagatattccgagtctacatctttggattcgctcgagaagtacaagactttgccggtgatttccagatgaaatacccctttgagatccagggcatagcaggctgtgagctacattctggaggtgccatagtaagcttcctgaggggagctctaggaggattggatttcctgagtgtcaagaatgcttcatgtgtgccttccccagaaggtggcagcagggcacagaaattctgtgcactaatcatacaatatcaaggtatcatggaaactgtgagaattctcctctatgaaacctgcccccgatatctcttgggcgtcctcaatgcaggaaaagcagatctgcaaagacaagtgaagcctgaggcctggctgtccagtggccccagtcctggacctggccgtctgcagcttgtgtgccatgtctcaggattctacccaaagcccgtgtgggtgatgtggatgcggggtgagcaggagcagcagggcactcagctaggggacatcctgcccaatgctaactggacatggtatctccgagcaaccctggatgtggcagatggggaggcggctggcctgtcctgtcgggtgaagcacagcagtttagagggccaggacatcatcctctactggagaaaccccacctccattggctca

SEQ ID NO: 3245 - DNA, 855 bp, Homo Sapiens
aatgcagacgcatcccaggaacacgtctccttccatgtcatccagatcttctcatttgtcaaccaatcctgggcacgaggtcagggctcaggatggctggacgagttgcagactcatggctgggacagtgaatcaggcacaataattttcctgcataactggtccaagggcaacttcagcaatgaagagttgtcagacctagagttgttatttcgtttctacctctttggattaactcgggagattcaagaccatgcaagtcaagattactcgaaatatccctttgaagtacaggtgaaagcgggctgtgagctgcattctggaaagagcccagaaggcttctttcaggtagctttcaacggattagatttactgagtttccagaatacaacatgggtgccatctccaggctgtggaagtttggcccaaagtgtctgtcatctactcaatcatcagtatgaaggcgtcacagaaacagtgtataatctcataagaagcacttgcccccgatttctcttgggtctcctggatgcagggaagatgtatgtacacaggcaagtgaggccagaagcctggctgtccagtcgccccagccttgggtctggccagctgttgctggtttgtcatgcctccggcttctacccaaagcctgtttgggtgacatggatgcggaatgaacaggagcaactgggcactaaacatggtgatattcttcctaatgctgatgggacatggtatcttcaggtgatcctggaggtggcatctgaggagcctgctggcctgtcttgtcgagtgagacacagcagtctaggaggccaggacatcatcctctactggggacaccacttttccatg

SEQ ID NO: 3246 - DNA, 846 bp, Homo Sapiens
gaagtcccgcaaaggcttttccccctccgctgcctccagatctcgtccttcgccaatagcagctggacgcgcaccgacggcttggcgtggctgggggagctgcagacgcacagctggagcaacgactcggacaccgtccgctctctgaagccttggtcccagggcacgttcagcgaccagcagtgggagacgctgcagcatatatttcgggtttatcgaagcagcttcaccagggacgtgaaggaattcgccaaaatgctacgcttatcctatcccttggagctccaggtgtccgctggctgtgaggtgcaccctgggaacgcctcaaataacttcttccatgtagcatttcaaggaaaagatatcctgagtttccaaggaacttcttgggagccaacccaagaggccccactttgggtaaacttggccattcaagtgctcaaccaggacaagtggacgagggaaacagtgcagtggctccttaatggcacctgcccccaatttgtcagtggcctccttgagtcagggaagtcggaactgaagaagcaagtgaagcccaaggcctggctgtcccgtggccccagtcctggccctggccgtctgctgctggtgtgccatgtctcaggattctacccaaagcctgtatgggtgaagtggatgcggggtgagcaggagcagcagggcactcagccaggggacatcctgcccaatgctgacgagacatggtatctccgagcaaccctggatgtggtggctggggaggcagctggcctgtcctgtcgggtgaagcacagcagtctagagggccaggacatcgtcctctactggggtgggagctacacctcc

SEQ ID NO: 3247 - DNA, 855 bp, Homo Sapiens
gctccccaggctctacaatcctatcatctagcagcagaggagcagctgtccttccgcatgctccaaacttcctcctttgccaaccacagctgggcacacagtgagggctcaggatggctgggtgacctgcagactcatggctgggacactgtcttgggcaccatccgctttctgaagccctggtcccatggaaacttcagcaagcaggagctgaaaaacttacagtcactgttccagttatacttccatagttttatccagatagtgcaagcttctgctggtcaatttcagcttgaataccccttcgagatccagatattagctggctgtagaatgaatgccccacaaatcttcttaaatatggcatatcaagggtcagatttcctgagtttccaaggaatttcctgggagccatctccaggagcagggatccgggcccagaacatctgtaaagtgctcaatcgctacctagatattaaggaaatactgcaaagccttcttggtcacacctgccctcgatttctagcggggctcatggaagcaggggagtcagaactgaaacggaaagtgaagccagaggcctggctgtcctgtggccccagtcctggccctggccgtctgcagcttgtgtgccatgtctcaggattctacccaaagcccgtgtgggtgatgtggatgcggggtgagcaggagcagcggggcactcagcgaggggacgtcctgcctaatgctgacgagacatggtatctccgagcaaccctggatgtggcggctggggaggcagctggcctgtcctgtcgggtgaaacacagcagtctagggggccatgatctaatcatccattggggtggatat

SEQ ID NO: 3248 - DNA, 555 bp, Homo Sapiens
aaagagattacgaatgccttggaaacctggggtgccttgggtcaggacatcaacttggacattcctagttttcaaatgagtgatgatattgacgatataaaatgggaaaaaacttcagacaagaaaaagattgcacaattcagaaaagagaaagagactttcaaggaaaaagatacatataagctatttaaaaatggaactctgaaaattaagcatctgaagaccgatgatcaggatatctacaaggtatcaatatatgatacaaaaggaaaaaatgtgttggaaaaaatatttgatttgaagattcaagagagggtctcaaaaccaaagatctcctggacttgtatcaacacaaccctgacctgtgaggtaatgaatggaactgaccccgaattaaacctgtatcaagatgggaaacatctaaaactttctcagagggtcatcacacacaagtggaccaccagcctgagtgcaaaattcaagtgcacagcagggaacaaagtcagcaaggaatccagtgtcgagcctgtcagctgtccagagaaaggtctggac

SEQ ID NO: 3249 - DNA, 606 bp, Homo Sapiens
caagtgcaagtggtgacccaggatgaaagagagcagctgtacacacctgcttccttaaaatgctctctgcaaaatgcccaggaagccctcattgtgacatggcagaaaaagaaagctgtaagcccagaaaacatggtcaccttcagcgagaaccatggggtggtgatccagcctgcctataaggacaagataaacattacccagctgggactccaaaactcaaccatcaccttctggaatatcaccctggaggatgaagggtgttacatgtgtctcttcaatacctttggttttgggaagatctcaggaacggcctgcctcaccgtctatgtacagcccatagtatcccttcactacaaattctctgaagaccacctaaatatcacttgctctgccactgcccgcccagcccccatggtcttctggaaggtccctcggtcagggattgaaaatagtacagtgactctgtctcacccaaatgggaccacgtctgttaccagcatcctccatatcaaagaccctaagaatcaggtggggaaggaggtgatctgccaggtgctgcacctggggactgtgaccgactttaagcaaaccgtcaacaaaggc

SEQ ID NO: 3250 - DNA, 645 bp, Homo Sapiens
atggatgaaaaacagattacacagaactactcgaaagtactcgcagaagttaacacttcatggcctgtaaagatggctacaaatgctgtgctttgttgccctcctatcgcattaagaaatttgatcataataacatgggaaataatcctgagaggccagccttcctgcacaaaagcctacaagaaagaaacaaatgagaccaaggaaaccaactgtactgatgagagaataacctgggtctccagacctgatcagaattcggaccttcagattcgtaccgtggccatcactcatgacgggtattacagatgcataatggtaacacctgatgggaatttccatcgtggatatcacctccaagtgttagttacacctgaagtgaccctgtttcaaaacaggaatagaactgcagtatgcaaggcagttgcagggaagccagctgcgcatatctcctggatcccagagggcgattgtgccactaagcaagaatactggagcaatggcacagtgactgttaagagtacatgccactgggaggtccacaatgtgtctaccgtgacctgccacgtctcccatttgactggcaacaagagtctgtacatagagctacttcctgttccaggtgccaaaaaatcagcaaaatta

SEQ ID NO: 3251 - DNA, 261 bp, Homo Sapiens
atggatataaatgctgtgctttgttgccctcctatcgcattaagaaatctgatcataataacatgggaaataatcctgagaggccagccttcctgcacaaaagcctacaagaaagaaacaaatgagaccaaggaaaccaactgtactgttgagagaataacctgggtctctagacctgatcagaattcggaccttcagattcgtccggtggacaccactcatgacgggtattacagaggcatagtggtaacacctgatggg

SEQ ID NO: 3252 - DNA, 792 bp, Homo Sapiens
ccccggtttatgggcaccatatcagatgtaaagaccaatgtccagttgctgaaaggtcgtgtggacaacatcagcaccctggattctgaaattaaaaagaatagtgacggcatggaggcagctggcgttcagatccagatggtgaatgagagcctgggttatgtgcgttctcagttcctgaagttaaaaaccagtgtggagaaggccaacgcacagatccagatcttaacaagaagttgggaagaagtcagtaccttaaatgcccaaatcccagagttaaaaagtgatttggagaaagccagtgctttaaatacaaagatccgggcactccagggcagcttggagaatatgagcaagttgctcaaacgacaaaatgatattctacaggtggtttctcaaggctggaagtacttcaaggggaacttctattacttttctctcattccaaagacctggtatagtgccgagcagttctgtgtgtccaggaattcacacctgacctcggtgacctcagagagtgagcaggagtttctgtataaaacagcggggggactcatctactggattggcctgactaaagcagggatggaaggggactggtcctgggtggatgacacgccattcaacaaggtccaaagtgcgaggttctggattccaggtgagcccaacaatgctgggaacaatgaacactgtggcaatataaaggctccctcacttcaggcctggaatgatgccccatgtgacaaaacgtttcttttcatttgtaagcgaccctatgtcccatcagaaccg

SEQ ID NO: 3253 - DNA, 1029 bp, Homo Sapiens
gcagtgtccaaggtccccagctccataagtcaggaacaatccaggcaagacgcgatctaccagaacctgacccagcttaaagctgcagtgggtgagctctcagagaaatccaagctgcaggagatctaccaggagctgacccagctgaaggctgcagtgggtgagcttccagagaaatctaagctgcaggagatctaccaggagctgacccggctgaaggctgcagtgggtgagcttccagagaaatctaagctgcaggagatctaccaggagctgacctggctgaaggctgcagtgggtgagcttccagagaaatctaagatgcaggagatctaccaggagctgactcggctgaaggctgcagtgggtgagcttccagagaaatctaagcagcaggagatctaccaggagctgacccggctgaaggctgcagtgggtgagcttccagagaaatctaagcagcaggagatctaccaggagctgacccggctgaaggctgcagtgggtgagcttccagagaaatctaagcagcaggagatctaccaggagctgacccagctgaaggctgcagtggaacgcctgtgccacccctgtccctgggaatggacattcttccaaggaaactgttacttcatgtctaactcccagcggaactggcacgactccatcaccgcctgcaaagaagtgggggcccagctcgtcgtaatcaaaagtgctgaggagcagaacttcctacagctgcagtcttccagaagtaaccgcttcacctggatgggactttcagatctaaatcaggaaggcacgtggcaatgggtggacggctcacctctgttgcccagcttcaagcagtattggaacagaggagagcccaacaacgttggggaggaagactgcgcggaatttagtggcaatggctggaacgacgacaaatgtaatcttgccaaattctggatctgcaaaaagtccgcagcctcctgctccagggatgaagaacagtttctttctccagcccctgccaccccaaacccc

SEQ ID NO: 3254 - DNA, 1545 bp, Homo Sapiens
atgtctctgtggctcctagagggggttccaatgaggcaggctgctgtcacctcgacctccttgaccatcaagtctgtcttcacccggagcgagctcaagttctccccacagtggagtcaccatgggaagattgtgacctgccagcttcaggatgcagatgggaagttcctctccaatgacacggtgcagctgaacgtgaagcacaccccgaagttggagatcaaggtcactcccagtgatgccatagtgagggagggggactctgtgaccatgacctgcgaggtcagcagcagcaacccggagtacacgacggtatcctggctcaaggatgggacctcgctgaagaagcagaatacattcacgctaaacctgcgcgaagtgaccaaggaccagagtgggaagtactgctgtcaggtctccaatgacgtgggcccgggaaggtcggaagaagtgttcctgcaagtgcagtatgccccggaaccttccacggttcagatcctccactcaccggctgtggagggaagtcaagtcgagtttctttgcatgtcactggccaatcctcttccaacaaattacacgtggtaccacaatgggaaagaaatgcagggaaggacagaggagaaagtccacatcccaaagatcctcccctggcacgctgggacttattcctgtgtggcagaaaacattcttggtactggacagaggggcccgggagctgagctggatgtccagtatcctcccaagaaggtgaccacagtgattcaaaaccccatgccgattcgagaaggagacacagtgaccctttcctgtaactacaattccagtaaccccagtgttacccggtatgaatggaaaccccatggcgcctgggaggagccatcgcttggggtgctgaagatccaaaacgttggctgggacaacacaaccatcgcctgcgcagcttgtaatagttggtgctcgtgggcctcccctgtcgccctgaatgtccagtatgccccccgagacgtgagggtccggaaaatcaagcccctttccgagattcactctggaaactcggtcagcctccaatgtgacttctcaagcagccaccccaaagaagtccagttcttctgggagaaaaatggcaggcttctggggaaagaaagccagctgaattttgactccatctccccagaagatgctgggagttacagctgctgggtgaacaactccataggacagacagcgtccaaggcctggacacttgaagtgctgtatgcacccaggaggctgcgtgtgtccatgagcccgggggaccaagtgatggaggggaagagtgcaaccctgacctgtgagagcgacgccaaccctcccgtctcccactacacctggtttgactggaataaccaaagcctcccctaccacagccagaagctgagattggagccggtgaaggtccagcactcgggtgcctactggtgccaggggaccaacagtgtgggcaagggccgttcgcctctcagcaccctcaccgtctactatagcccggagaccatcggcaggcga

SEQ ID NO: 3255 - DNA, 708 bp, Homo Sapiens
gaagaggtgctttggcatacatcagttccctttgccgagaacatgtctctagaatgtgtgtatccatcaatgggcatcttaacacaggtggagtggttcaagatcgggacccagcaggattccatagccattttcagccctactcatggcatggtcataaggaagccctatgctgagagggtttactttttgaattcaacgatggcttccaataacatgactcttttctttcggaatgcctctgaagatgatgttggctactattcctgctctctttacacttacccacagggaacttggcagaaggtgatacaggtggttcagtcagatagttttgaggcagctgtgccatcaaatagccacattgtttcggaacctggaaagaatgtcacactcacttgtcagcctcagatgacgtggcctgtgcaggcagtgaggtgggaaaagatccagccccgtcagatcgacctcttaacttactgcaacttggtccatggcagaaatttcacctccaagttcccaagacaaatagtgagcaactgcagccacggaaggtggagcgtcatcgtcatccccgatgtcacagtctcagactcggggctttaccgctgctacttgcaggccagcgcaggagaaaacgaaaccttcgtgatgagattgactgtagccgagggtaaaaccgataaccaatataccctctttgtggct

SEQ ID NO: 3256 - DNA, 609 bp, Homo Sapiens
tgccagggatcagctgaccatgtggttagcatctcgggagtgcctcttcagttacaaccaaacagcatacagacgaaggttgacagcattgcatggaagaagttgctgccctcacaaaatggatttcatcacatattgaagtgggagaatggctctttgccttccaatacttccaatgatagattcagttttatagtcaagaacttgagtcttctcatcaaggcagctcagcagcaggacagtggcctctactgcctggaggtcaccagtatatctggaaaagttcagacagccacgttccaggtttttgtatttgataaagttgagaaaccccgcctacaggggcaggggaagatcctggacagagggagatgccaagtggctctgtcttgcttggtctccagggatggcaatgtgtcctatgcttggtacagagggagcaagctgatccagacagcagggaacctcacctacctggacgaggaggttgacattaatggcactcacacatatacctgcaatgtcagcaatcctgttagctgggaaagccacaccctgaatctcactcaggactgtcagaatgcccatcaggaattcagattttggccg

SEQ ID NO: 3257 - DNA, 2010 bp, Homo Sapiens
caggacccctgggctgctgagccccgtgccgcctgcggccccagcagctgctacgctctcttcccacggcgccgcaccttcctggaggcctggcgggcctgccgcgagctggggggcgacctggccactcctcggacccccgaggaggcccagcgtgtggacagcctggtgggtgcgggcccagccagccggctgctgtggatcgggctgcagcggcaggcccggcaatgccagctgcagcgcccactgcgcggcttcacgtggaccacaggggaccaggacacggctttcaccaactgggcccagccagcctctggaggcccctgcccggcccagcgctgtgtggccctggaggcaagtggcgagcaccgctggctggagggctcgtgcacgctggctgtcgacggctacctgtgccagtttggcttcgagggcgcctgcccggcgctgcaagatgaggcgggccaggccggcccagccgtgtataccacgcccttccacctggtctccacagagtttgagtggctgcccttcggctctgtggccgctgtgcagtgccaggctggcaggggagcctctctgctctgcgtgaagcagcctgagggaggtgtgggctggtcacgggctgggcccctgtgcctggggactggctgcagccctgacaacgggggctgcgaacacgaatgtgtggaggaggtggatggtcacgtgtcctgccgctgcactgagggcttccggctggcagcagacgggcgcagttgcgaggacccctgtgcccaggctccgtgcgagcagcagtgtgagcccggtgggccacaaggctacagctgccactgtcgcctgggtttccggccagcggaggatgatccgcaccgctgtgtggacacagatgagtgccagattgccggtgtgtgccagcagatgtgtgtcaactacgttggtggcttcgagtgttattgtagcgagggacatgagctggaggctgatggcatcagctgcagccctgcaggggccatgggtgcccaggcttcccaggacctcggagatgagttgctggatgacggggaggatgaggaagatgaagacgaggcctggaaggccttcaacggtggctggacggagatgcctgggatcctgtggatggagcctacgcagccgcctgactttgccctggcctatagaccgagcttcccagaggacagagagccacagataccctacccggagcccacctggccacccccgctcagtgcccccagggtcccctaccactcctcagtgctctccgtcacccggcctgtggtggtctctgccacgcatcccacactgccttctgcccaccagcctcctgtgatccctgccacacacccagctttgtcccgtgaccaccagatccccgtgatcgcagccaactatccagatctgccttctgcctaccaacccggtattctctctgtctctcattcagcacagcctcctgcccaccagccccctatgatctcaaccaaatatccggagctcttccctgcccaccagtcccccatgtttccagacacccgggtcgctggcacccagaccaccactcatttgcctggaatcccacctaaccatgcccctctggtcaccaccctcggtgcccagctaccccctcaagccccagatgcccttgtcctcagaacccaggccacccagcttcccattatcccaactgcccagccctctctgaccaccacctccaggtcccctgtgtctcctgcccatcaaatctctgtgcctgctgccacccagcccgcagccctccccaccctcctgccctctcagagccccactaaccagacctcacccatcagccctacacatccccattccaaagccccccaaatcccaagggaagatggccccagtcccaagttggccctgtggctgccctcaccagctcccacagcagccccaacagccctgggggaggctggtcttgccgagcacagccagagggatgaccggtggctg

SEQ ID NO: 3258 - DNA, 660 bp, Homo Sapiens
tttactgtcacggttcccaaggacctatatgtggtagagtatggtagcaatatgacaattgaatgcaaattcccagtagaaaaacaattagacctggctgcactaattgtctattgggaaatggaggataagaacattattcaatttgtgcatggagaggaagacctgaaggttcagcatagtagctacagacagagggcccggctgttgaaggaccagctctccctgggaaatgctgcacttcagatcacagatgtgaaattgcaggatgcaggggtgtaccgctgcatgatcagctatggtggtgccgactacaagcgaattactgtgaaagtcaatgccccatacaacaaaatcaaccaaagaattttggttgtggatccagtcacctctgaacatgaactgacatgtcaggctgagggctaccccaaggccgaagtcatctggacaagcagtgaccatcaagtcctgagtggtaagaccaccaccaccaattccaagagagaggagaagcttttcaatgtgaccagcacactgagaatcaacacaacaactaatgagattttctactgcacttttaggagattagatcctgaggaaaaccatacagctgaattggtcatcccagaactacctctggcacatcctccaaatgaaagg

SEQ ID NO: 3259 - DNA, 1284 bp, Homo Sapiens
ctggaggtccaggtccctgaagacccagtggtggcactggtgggcaccgatgccaccctgtgctgctccttctcccctgagcctggcttcagcctggcacagctcaacctcatctggcagctgacagataccaaacagctggtgcacagctttgctgagggccaggaccagggcagcgcctatgccaaccgcacggccctcttcccggacctgctggcacagggcaacgcatccctgaggctgcagcgcgtgcgtgtggcggacgagggcagcttcacctgcttcgtgagcatccgggatttcggcagcgctgccgtcagcctgcaggtggccgctccctactcgaagcccagcatgaccctggagcccaacaaggacctgcggccaggggacacggtgaccatcacgtgctccagctaccagggctaccctgaggctgaggtgttctggcaggatgggcagggtgtgcccctgactggcaacgtgaccacgtcgcagatggccaacgagcagggcttgtttgatgtgcacagcatcctgcgggtggtgctgggtgcaaatggcacctacagctgcctggtgcgcaaccccgtgctgcagcaggatgcgcacagctctgtcaccatcacaccccagagaagccccacaggagccgtggaggtccaggtccctgaggacccggtggtggccctagtgggcaccgatgccaccctgcgctgctccttctcccccgagcctggcttcagcctggcacagctcaacctcatctggcagctgacagacaccaaacagctggtgcacagtttcaccgaaggccgggaccagggcagcgcctatgccaaccgcacggccctcttcccggacctgctggcacaaggcaatgcatccctgaggctgcagcgcgtgcgtgtggcggacgagggcagcttcacctgcttcgtgagcatccgggatttcggcagcgctgccgtcagcctgcaggtggccgctccctactcgaagcccagcatgaccctggagcccaacaaggacctgcggccaggggacacggtgaccatcacgtgctccagctaccggggctaccctgaggctgaggtgttctggcaggatgggcagggtgtgcccctgactggcaacgtgaccacgtcgcagatggccaacgagcagggcttgtttgatgtgcacagcgtcctgcgggtggtgctgggtgcgaatggcacctacagctgcctggtgcgcaaccccgtgctgcagcaggatgcgcacggctctgtcaccatcaca

SEQ ID NO: 3260 - DNA, 402 bp, Homo Sapiens
aacaagattttggtgaagcagtcgcccatgcttgtagcgtacgacaatgcggtcaaccttagctgcaagtattcctacaatctcttctcaagggagttccgggcatcccttcacaaaggactggatagtgctgtggaagtctgtgttgtatatgggaattactcccagcagcttcaggtttactcaaaaacggggttcaactgtgatgggaaattgggcaatgaatcagtgacattctacctccagaatttgtatgttaaccaaacagatatttacttctgcaaaattgaagttatgtatcctcctccttacctagacaatgagaagagcaatggaaccattatccatgtgaaagggaaacacctttgtccaagtcccctatttcccggaccttctaagccc

SEQ ID NO: 3261 - DNA, 489 bp, Homo Sapiens
ctgagcaaatgcaggaccgtggcgggccccgtggggggatccctgagtgtgcagtgtccctatgagaaggaacacaggaccctcaacaaatactggtgcagaccaccacagattttcctatgtgacaagattgtggagaccaaagggtcagcaggaaaaaggaacggccgagtgtccatcagggacagtcctgcaaacctcagcttcacagtgaccctggagaatctcacagaggaggatgcaggcacctactggtgtggggtggatacaccatggctccgagactttcatgatcccgttgtcgaggttgaggtgtccgtgttcccggcatcaacgtcaatgacacctgcaagtatcactgcggccaagacctcaacaatcacaactgcatttccacctgtatcatccactaccctgtttgcagtgggtgccacccacagtgccagcatccaggaggaaactgaggaggtggtgaactcacagctcccg

SEQ ID NO: 3262 - DNA, 489 bp, Homo Sapiens
ggctattttcctctgagccaccccatgaccgtggcgggccccgtggggggatccctgagtgtgcagtgtcgctatgagaaggaacacaggaccctcaacaaattctggtgcagaccaccacagattctccgatgtgacaagattgtggagaccaaagggtcagcagggaaaaggaatggccgagtgtccatcagggacagtcctgcaaacctcagcttcacagtgaccctggagaatctcacagaggaggacgcaggcacctactggtgtggggtggatacaccgtggctccgagactttcatgatcccattgtcgaggttgaggtgtccgtgttcccggccgggacgaccacagcctccagcccccagagctccatgggcacctcaggtcctcccacgaagctgcccgtgcacacctggcccagcgtgaccagaaaggacagccccgaacccagcccacaccctggctccctgttcagcaatgtccgc

SEQ ID NO: 3263 - DNA, 468 bp, Homo Sapiens
ctgaagggccccggctctgtgactggcactgcgggggactctctgacagtgtggtgtcagtatgagagcatgtacaagggatataacaagtactggtgccgaggacagtacgacacgtcatgtgagagcattgtggagaccaagggagaagagaaggtggagaggaatggccgcgtgtccatcagagaccacccggaggctctcgccttcactgtgaccatgcagaacctcaatgaagatgatgctggatcttactggtgcaaaattcagacagtgtgggtcctggattcatggtcacgcgatccctcggacctggttagggtgtatgtttccccagcaattacaaccccaaggaggaccacacatccagccacacctcccatcttcctggtggtgaaccctgggcgaaacctcagcaccagggaggtgttgacccaaaattcagggttccggctcagcagccctcac

SEQ ID NO: 3264 - DNA, 402 bp, Homo Sapiens
atccaaggcccagagtctgtgagagccccagagcaggggtccctgacggttcaatgccactataagcaaggatgggagacctacattaagtggtggtgccgaggggtgcgctgggatacatgcaagatcctcattgaaaccagagggtcggagcaaggagagaagagtgaccgtgtgtccatcaaggacaatcagaaagaccgcacgttcactgtgaccatggaggggctcaggcgagatgacgcagatgtttactggtgtgggattgaaagaagaggacctgaccttgggactcaagtgaaagtgatcgttgacccagagggagcggcttccacaacagcaagctcacctaccaacagcaatatggcagtgttcatcggctcccacaagaggaaccactac

SEQ ID NO: 3265 - DNA, 441 bp, Homo Sapiens
gcaaaaattacaggtcctacgactgtcaacggttccgagcagggctctttaaccgtgcagtgcgcttatgggagtgggtgggaaacatatctaaagtggcgttgtcagggggcagattggaattattgtaatatcctggtaaagactaatggctccgagcaggaggtcaaaaaaaacagagtgtccatcagagataatcaaaagaaccatgttttcaccgtcaccatggagaacttgaagagagatgatgcggactcttactggtgtgggacagagaggccgggcatagatttaggtgttaaggtacaagtgacaatcaaccctggaacgcaaacagctgtttctgagtggacgacaactaccgccagcctggcgttcactgccgccgctacacagaagacgagctccccattaacccgttcacccctgaaatcaacgcat

SEQ ID NO: 3266 - DNA, 516 bp, Homo Sapiens
actcaaatcaccggtccaacaacagtgaatggcttggagcggggctccttgaccgtgcagtgtgtttacagatcaggctgggagacctacttgaagtggtggtgtcgaggagctatttggcgtgactgcaagatccttgttaaaaccagtgggtcagagcaggaggtgaagagggaccgggtgtccatcaaggacaatcagaaaaaccgcacgttcactgtgaccatggaggatctcatgaaaactgatgctgacacttactggtgtggaattgagaaaactggaaatgaccttggggtcacagttcaagtgaccattgacccagcaccagtcacccaagaagaaactagcagctccccaactctgaccggccaccacttggacaacagcagccgggatgtccccagagcaggtactgcagcccctggagggcgacctctgctatgcagacctgaccctgcagctggccggaacctccccgcgaaaggctaccacgaagctttcctctgcccaggt

SEQ ID NO: 3267 - DNA, 687 bp, Homo Sapiens
ctggagggcccagaggaaatcagcgggttcgaaggggacactgtgtccctgcagtgcacctacagggaagagctgagggaccaccggaagtactggtgcaggaagggtgggatcctcttctctcgctgctctggcaccatctatgcagaagaagaaggccaggagacaatgaagggcagggtgtccatccgtgacagccgccaggagctctcgctcattgtgaccctgtggaacctcaccctgcaagacgctggggagtactggtgtggggtcgaaaaacggggccccgatgagtctttactgatctctctgttcgtctttccaggaccctgctgtcctccctccccttctcccaccttccagcctctggctacaacacgcctgcagcccaaggcaaaagctcagcaaacccagcccccaggattgacttctcctgggctctacccggcagccaccacagccaagcaggggaagacaggggctgaggcccctccattgccagggacttcccagtacgggcacgaaaggacttctcagtacacaggaacctctcctcacccagcgacctctcctcctgcagggagctcccgcccccccatgcagctgaactccacctcagcagaggacaccagtccagctctcagcagtggcagctctaagcccagggtgtccatcccgatggtccgc

SEQ ID NO: 3268 - DNA, 411 bp, Homo Sapiens
ttccaggactcctgttacatttttctccaagaagccatcaaagtagaaagcatagaggatgtcagaaatcagtgtactgaccatggagcggacatgataagcatacataatgaagaagaaaatgcttttatactggatactttgaaaaagcaatggaaaggcccagatgatatcctactaggcatgttttatgacacagatgatgcgagtttcaagtggtttgataattcaaatatgacatttgataagtggacagaccaagatgatgatgaggatttagttgacacctgtgcttttctgcacatcaagacaggtgaatggaaaaaaggaaattgtgaagtttcttctgtggaaggaacactatgcaaaacagctatcccatacaaaaggaaatatttatcagataaccac

SEQ ID NO: 3269 - DNA, 582 bp, Homo Sapiens
agcccgctttccaccccgacctctgcccaggccgcaggccccagctcaggctcgtgcccacccaccaagttccagtgccgcaccagtggcttatgcgtgcccctcacctggcgctgcgacagggacttggactgcagcgatggcagcgatgaggaggagtgcaggattgagccatgtacccagaaagggcaatgcccaccgccccctggcctcccctgcccctgcaccggcgtcagtgactgctctgggggaactgacaagaaactgcgcaactgcagccgcctggcctgcctagcaggcgagctccgttgcacgctgagcgatgactgcattccactcacgtggcgctgcgacggccacccagactgtcccgactccagcgacgagctcggctgtggaaccaatgagatcctcccggaaggggatgccacaaccatggggccccctgtgaccctggagagtgtcacctctctcaggaatgccacaaccatggggccccctgtgaccctggagagtgtcccctctgtcgggaatgccacatcctcctctgccggagaccagtctggaagcccaactgcctat

SEQ ID NO: 3270 - DNA, 726 bp, Homo Sapiens
gatccaaatttctggctgcaagtgcaggagtcagtgacggtacaggagggtttgtgcgtcctcgtgccctgcactttcttccatcccataccctactacgacaagaactccccagttcatggttactggttccgggaaggagccattatatccggggactctccagtggccacaaacaagctagatcaagaagtacaggaggagactcagggcagattccgcctccttggggatcccagtaggaacaactgctccctgagcatcgtagacgccaggaggagggataatggttcatacttctttcggatggagagaggaagtaccaaatacagttacaaatctccccagctctctgtgcatgtgacagacttgacccacaggcccaaaatcctcatccctggcactctagaacccggccactccaaaaacctgacctgctctgtgtcctgggcctgtgagcagggaacacccccgatcttctcctggttgtcagctgcccccacctccctgggccccaggactactcactcctcggtgctcataatcaccccacggccccaggaccacggcaccaacctgacctgtcaggtgaagttcgctggagctggtgtgactacggagagaaccatccagctcaacgtcacctatgttccacagaacccaacaactggtatctttccaggagatggctcagggaaacaagagaccagagcaggagtggttcat

SEQ ID NO: 3271 - DNA, 777 bp, Homo Sapiens
agtcttgacaacaacggtactgctaccccagagttacctacccagggaacattttcaaatgtttctacaaatgtatcctaccaagaaactacaacacctagtacccttggaagtaccagcctgcaccctgtgtctcaacatggcaatgaggccacaacaaacatcacagaaacgacagtcaaattcacatctacctctgtgataacctcagtttatggaaacacaaactcttctgtccagtcacagacctctgtaatcagcacagtgttcaccaccccagccaacgtttcaactccagagacaaccttgaagcctagcctgtcacctggaaatgtttcagacctttcaaccactagcactagccttgcaacatctcccactaaaccctatacatcatcttctcctatcctaagtgacatcaaggcagaaatcaaatgttcaggcatcagagaagtgaaattgactcagggcatctgcctggagcaaaataagacctccagctgtgcggagtttaagaaggacaggggagagggcctggcccgagtgctgtgtggggaggagcaggctgatgctgatgctggggcccaggtatgctccctgctccttgcccagtctgaggtgaggcctcagtgtctactgctggtcttggccaacagaacagaaatttccagcaaactccaacttatgaaaaagcaccaatctgacctgaaaaagctggggatcctagatttcactgagcaagatgttgcaagccaccagagctattcccaaaagacc

SEQ ID NO: 3272 - DNA, 1215 bp, Homo Sapiens
cagaagacaattaaaaagcaagttgtcctcgaagaaggtacaattgcttttaaaaattgggttaaaacaggcacagaagtttacagacagttttggatctttgatgtgcaaaatccacaggaagtgatgatgaacagcagcaacattcaagttaagcaaagaggtccttatacgtacagagttcgttttctagccaaggaaaatgtaacccaggacgctgaggacaacacagtctctttcctgcagcccaatggtgccatcttcgaaccttcactatcagttggaacagaggctgacaacttcacagttctcaatctggctgtggcagctgcatcccatatctatcaaaatcaatttgttcaaatgatcctcaattcacttattaacaagtcaaaatcttctatgttccaagtcagaactttgagagaactgttatggggctatagggatccatttttgagtttggttccataccctgttactaccacagttggtctgttttatccttacaacaatactgcagatggagtttataaagttttcaatggaaaagataacataagtaaagttgccataatcgacacatataaaggtaaaaggaatctgtcctattgggaaagtcactgcgacatgattaatggtacagatgcagcctcatttccaccttttgttgagaaaagccaggtattgcagttcttttcttctgatatttgcaggtcaatctatgctgtatttgaatccgacgttaatctgaaaggaatccctgtgtatagatttgttcttccatccaaggcctttgcctctccagttgaaaacccagacaactattgtttctgcacagaaaaaattatctcaaaaaattgtacatcatatggtgtgctagacatcagcaaatgcaaagaagggagacctgtgtacatttcacttcctcattttctgtatgcaagtcctgatgtttcagaacctattgatggattaaacccaaatgaagaagaacataggacatacttggatattgaacctataactggattcactttacaatttgcaaaacggctgcaggtcaacctattggtcaagccatcagaaaaaattcaagtattaaagaatctgaagaggaactatattgtgcctattctttggcttaatgagactgggaccattggtgatgagaaggcaaacatgttcagaagtcaagtaactggaaaaataaac

SEQ ID NO: 3273 - DNA, 390 bp, Homo Sapiens
cgggcccagctggagcgaagcttgcgggacgtcgtagagaaaaccatccaaaagtacggcaccaaccccgaggagaccgcggccgaggagagctgggactatgtgcagttccagctgcgctgctgcggctggcactacccgcaggactggttccaagtcctcatcctgagaggtaacgggtcggaggcgcaccgcgtgccctgctcctgctacaacttgtcggcgaccaacgactccacaatcctagataaggtgatcttgccccagctcagcaggcttggacacctggcgcggtccagacacagtgcagacatctgcgctgtccctgcagagagccacatctaccgcgagggctgcgcgcagggcctccagaagtggctgcacaacaac

SEQ ID NO: 3274 - DNA, 774 bp, Homo Sapiens
gtcccgaggtggcgccagcagtggagcggtccgggcaccaccaagcgctttcccgagaccgtcctggcgcgatgcgtcaagtacactgaaattcatcctgagatgagacatgtagactgccaaagtgtatgggatgctttcaagggtgcatttatttcaaaacatccttgcaacattactgaagaagactatcagccactaatgaagttgggaactcagaccgtaccttgcaacaagattcttctttggagcagaataaaagatctggcccatcagttcacacaggtccagcgggacatgttcaccctggaggacacgctgctaggctaccttgctgatgacctcacatggtgtggtgaattcaacacttccaaaataaactatcaatcttgcccagactggagaaaggactgcagcaacaaccctgtttcagtattctggaaaacggtttcccgcaggtttgcagaagctgcctgtgatgtggtccatgtgatgctcaatggatcccgcagtaaaatctttgacaaaaacagcacttttgggagtgtggaagtccataatttgcaaccagagaaggttcagacactagaggcctgggtgatacatggtggaagagaagattccagagacttatgccaggatcccaccataaaagagctggaatcgattataagcaaaaggaatattcaattttcctgcaagaatatctacagacctgacaagtttcttcagtgtgtgaaaaatcctgaggattcatcttgcacatctgagatc

SEQ ID NO: 3275 - DNA, 252 bp, Homo Sapiens
ttcaagatacctatagaggaacttgaggacagagtgtttgtgaattgcaataccagcatcacatgggtagagggaacggtgggaacactgctctcagacattacaagactggacctgggaaaacgcatcctggacccacgaggaatatataggtgtaatgggacagatatatacaaggacaaagaatctaccgtgcaagttcattatcgaatgtgccagagctgtgtggagctggatccagccaccgtggct

SEQ ID NO: 3276 - DNA, 312 bp, Homo Sapiens
gatggtaatgaagaaatgggtggtattacacagacaccatataaagtctccatctctggaaccacagtaatattgacatgccctcagtatcctggatctgaaatactatggcaacacaatgataaaaacataggcggtgatgaggatgataaaaacataggcagtgatgaggatcacctgtcactgaaggaattttcagaattggagcaaagtggttattatgtctgctaccccagaggaagcaaaccagaagatgcgaacttttatctctacctgagggcaagagtgtgtgagaactgcatggagatggat

SEQ ID NO: 3277 - DNA, 282 bp, Homo Sapiens
cagtcaatcaaaggaaaccacttggttaaggtgtatgactatcaagaagatggttcggtacttctgacttgtgatgcagaagccaaaaatatcacatggtttaaagatgggaagatgatcggcttcctaactgaagataaaaaaaaatggaatctgggaagtaatgccaaggaccctcgagggatgtatcagtgtaaaggatcacagaacaagtcaaaaccactccaagtgtattacagaatgtgtcagaactgcattgaactaaatgcagccaccatatct

SEQ ID NO: 3278 - DNA, 1113 bp, Homo Sapiens
aagaaagtggtgctgggcaaaaaaggggatacagtggaactgacctgtacagcttcccagaagaagagcatacaattccactggaaaaactccaaccagataaagattctgggaaatcagggctccttcttaactaaaggtccatccaagctgaatgatcgcgctgactcaagaagaagcctttgggaccaaggaaactttcccctgatcatcaagaatcttaagatagaagactcagatacttacatctgtgaagtggaggaccagaaggaggaggtgcaattgctagtgttcggattgactgccaactctgacacccacctgcttcaggggcagagcctgaccctgaccttggagagcccccctggtagtagcccctcagtgcaatgtaggagtccaaggggtaaaaacatacagggggggaagaccctctccgtgtctcagctggagctccaggatagtggcacctggacatgcactgtcttgcagaaccagaagaaggtggagttcaaaatagacatcgtggtgctagctttccagaaggcctccagcatagtctataagaaagagggggaacaggtggagttctccttcccactcgcctttacagttgaaaagctgacgggcagtggcgagctgtggtggcaggcggagagggcttcctcctccaagtcttggatcacctttgacctgaagaacaaggaagtgtctgtaaaacgggttacccaggaccctaagctccagatgggcaagaagctcccgctccacctcaccctgccccaggccttgcctcagtatgctggctctggaaacctcaccctggcccttgaagcgaaaacaggaaagttgcatcaggaagtgaacctggtggtgatgagagccactcagctccagaaaaatttgacctgtgaggtgtggggacccacctcccctaagctgatgctgagcttgaaactggagaacaaggaggcaaaggtctcgaagcgggagaaggcggtgtgggtgctgaaccctgaggcggggatgtggcagtgtctgctgagtgactcgggacaggtcctgctggaatccaacatcaaggttctgcccacatggtccaccccggtgcagcca

SEQ ID NO: 3279 - DNA, 447 bp, Homo Sapiens
atgcaaaaaggtgatcagaatcctcaaattgcggcacatgtcataagtgaggccagcagtaaaacaacatctgtgttacagtgggctgaaaaaggatactacaccatgagcaacaacttggtaaccctggaaaatgggaaacagctgaccgttaaaagacaaggactctattatatctatgcccaagtcaccttctgttccaatcgggaagcttcgagtcaagctccatttatagccagcctctgcctaaagtcccccggtagattcgagagaatcttactcagagctgcaaatacccacagttccgccaaaccttgcgggcaacaatccattcacttgggaggagtatttgaattgcaaccaggtgcttcggtgtttgtcaatgtgactgatccaagccaagtgagccatggcactggcttcacgtcctttggcttactcaaactc

SEQ ID NO: 3280 - DNA, 1758 bp, Homo Sapiens
cagatcgatttgaatataacctgccgctttgcaggtgtattccacgtggagaaaaatggtcgctacagcatctctcggacggaggccgctgacctctgcaaggctttcaatagcaccttgcccacaatggcccagatggagaaagctctgagcatcggatttgagacctgcaggtatgggttcatagaagggcatgtggtgattccccggatccaccccaactccatctgtgcagcaaacaacacaggggtgtacatcctcacatccaacacctcccagtatgacacatattgcttcaatgcttcagctccacctgaagaagattgtacatcagtcacagacctgcccaatgcctttgatggaccaattaccataactattgttaaccgtgatggcacccgctatgtccagaaaggagaatacagaacgaatcctgaagacatctaccccagcaaccctactgatgatgacgtgagcagcggctcctccagtgaaaggagcagcacttcaggaggttacatcttttacaccttttctactgtacaccccatcccagacgaagacagtccctggatcaccgacagcacagacagaatccctgctaccagtacgtcttcaaataccatctcagcaggctgggagccaaatgaagaaaatgaagatgaaagagacagacacctcagtttttctggatcaggcattgatgatgatgaagattttatctccagcaccatttcaaccacaccacgggcttttgaccacacaaaacagaaccaggactggacccagtggaacccaagccattcaaatccggaagtgctacttcagacaaccacaaggatgactgatgtagacagaaatggcaccactgcttatgaaggaaactggaacccagaagcacaccctcccctcattcaccatgagcatcatgaggaagaagagaccccacattctacaagcacaatccaggcaactcctagtagtacaacggaagaaacagctacccagaaggaacagtggtttggcaacagatggcatgagggatatcgccaaacacccagagaagactcccattcgacaacagggacagctgcagcctcagctcataccagccatccaatgcaaggaaggacaacaccaagcccagaggacagttcctggactgatttcttcaacccaatctcacaccccatgggacgaggtcatcaagcaggaagaaggatggatatggactccagtcatagtacaacgcttcagcctactgcaaatccaaacacaggtttggtggaagatttggacaggacaggacctctttcaatgacaacgcagcagagtaattctcagagcttctctacatcacatgaaggcttggaagaagataaagaccatccaacaacttctactctgacatcaagcaataggaatgatgtcacaggtggaagaagagacccaaatcattctgaaggctcaactactttactggaaggttatacctctcattacccacacacgaaggaaagcaggaccttcatcccagtgacctcagctaagactgggtcctttggagttactgcagttactgttggagattccaactctaatgtcaatcgttccttatcaggagaccaagacacattccaccccagtggggggtcccataccactcatggatctgaatcagatggacactcacatgggagtcaagaaggtggagcaaacacaacctctggtcctataaggacaccccaaattccagaa

SEQ ID NO: 3281 - DNA, 369 bp, Homo Sapiens
cagctactatttaataaaacaaaatctgtagaattcacgttttgtaatgacactgtcgtcattccatgctttgttactaatatggaggcacaaaacactactgaagtatacgtaaagtggaaatttaaaggaagagatatttacacctttgatggagctctaaacaagtccactgtccccactgactttagtagtgcaaaaattgaagtctcacaattactaaaaggagatgcctctttgaagatggataagagtgatgctgtctcacacacaggaaactacacttgtgaagtaacagaattaaccagagaaggtgaaacgatcatcgagctaaaatatcgtgttgtttcatggttttctccaaatgaa

SEQ ID NO: 3282 - DNA, 507 bp, Homo Sapiens
atgtgctccagaggttgggattcgtgtctggctctggaattgctactgctgcctctgtcactcctggtgaccagcattcaaggtcacttggtacatatgaccgtggtctccggcagcaacgtgactctgaacatctctgagagcctgcctgagaactacaaacaactaacctggttttatactttcgaccagaagattgtagaatgggattccagaaaatctaagtactttgaatccaaatttaaaggcagggtcagacttgatcctcagagtggcgcactgtacatctctaaggtccagaaagaggacaacagcacctacatcatgagggtgttgaaaaagactgggaatgagcaagaatggaagatcaagctgcaagtgcttggtgagtcaggggagccaaagagcaaatccccactccagtggccccagatggaccactgtagggcttcctgggaggcatggggcactctcggggaggaggagagaaaaacctcaggacaggtt

SEQ ID NO: 3283 - DNA, 1044 bp, Homo Sapiens
cggctcagctggtatgacccagatttccaggcaaggctcacccgttccaactcgaagtgccagggccagctggaggtctacctcaaggacggatggcacatggtttgcagccagagctggggccggagctccaagcagtgggaggaccccagtcaagcgtcaaaagtctgccagcggctgaactgtggggtgcccttaagccttggccccttccttgtcacctacacacctcagagctcaatcatctgctacggacaactgggctccttctccaactgcagccacagcagaaatgacatgtgtcactctctgggcctgacctgcttagaaccccagaagacaacacctccaacgacaaggcccccgcccaccacaactccagagcccacagctcctcccaggctgcagctggtggcacagtctggcggccagcactgtgccggcgtggtggagttctacagcggcagcctggggggtaccatcagctatgaggcccaggacaagacccaggacctggagaacttcctctgcaacaacctccagtgtggctccttcttgaagcatctgccagagactgaggcaggcagagcccaagacccaggggagccacgggaacaccagcccttgccaatccaatggaagatccagaactcaagctgtacctccctggagcattgcttcaggaaaatcaagccccagaaaagtggccgagttcttgccctcctttgctcaggtttccagcccaaggtgcagagccgtctggtggggggcagcagcatctgtgaaggcaccgtggaggtgcgccagggggctcagtgggcagccctgtgtgacagctcttcagccaggagctcgctgcggtgggaggaggtgtgccgggagcagcagtgtggcagcgtcaactcctatcgagtgctggacgctggtgacccaacatcccgggggctcttctgtccccatcagaagctgtcccagtgccacgaactttgggagagaaattcctactgcaagaaggtgtttgtcacatgccaggatccaaacccc

SEQ ID NO: 3284 - DNA, 225 bp, Homo Sapiens
gaacagaagctgaatgagtatgtggctaagggtctgaccgacagcatccaccgttaccactcagacaatagcaccaaggcagcgtgggactccatccagtcatttctgcagtgttgtggtataaatggcacgagtgattggaccagtggcccaccagcatcttgcccctcagatcgaaaagtggagggttgctatgcgaaagcaagactgtggtttcattccaat

SEQ ID NO: 3285 - DNA, 957 bp, Homo Sapiens
gactgtggccttcccccagatgtacctaatgcccagccagctttggaaggccgtacaagttttcccgaggatactgtaataacgtacaaatgtgaagaaagctttgtgaaaattcctggcgagaaggactcagtgatctgccttaagggcagtcaatggtcagatattgaagagttctgcaatcgtagctgcgaggtgccaacaaggctaaattctgcatccctcaaacagccttatatcactcagaattattttccagtcggtactgttgtggaatatgagtgccgtccaggttacagaagagaaccttctctatcaccaaaactaacttgccttcagaatttaaaatggtccacagcagtcgaattttgtaaaaagaaatcatgccctaatccgggagaaatacgaaatggtcagattgatgtaccaggtggcatattatttggtgcaaccatctccttctcatgtaacacagggtacaaattatttggctcgacttctagtttttgtcttatttcaggcagctctgtccagtggagtgacccgttgccagagtgcagagaaatttattgtccagcaccaccacaaattgacaatggaataattcaaggggaacgtgaccattatggatatagacagtctgtaacgtatgcatgtaataaaggattcaccatgattggagagcactctatttattgtactgtgaataatgatgaaggagagtggagtggcccaccacctgaatgcagaggaaaatctctaacttccaaggtcccaccaacagttcagaaacctaccacagtaaatgttccaactacagaagtctcaccaacttctcagaaaaccaccacaaaaaccaccacaccaaatgctcaagcaacacggagtacacctgtttccaggacaaccaagcattttcatgaaacaaccccaaataaaggaagtggaaccacttca

SEQ ID NO: 3286 - DNA, 561 bp, Homo Sapiens
ttttcccaacaaatatatggtgttgtgtatgggaatgtaactttccatgtaccaagcaatgtgcctttaaaagaggtcctatggaaaaaacaaaaggataaagttgcagaactggaaaattctgaattcagagctttctcatcttttaaaaatagggtttatttagacactgtgtcaggtagcctcactatctacaacttaacatcatcagatgaagatgagtatgaaatggaatcgccaaatattactgataccatgaagttctttctttatgtgcttgagtctcttccatctcccacactaacttgtgcattgactaatggaagcattgaagtccaatgcatgataccagagcattacaacagccatcgaggacttataatgtactcatgggattgtcctatggagcaatgtaaacgtaactcaaccagtatatattttaagatggaaaatgatcttccacaaaaaatacagtgtactcttagcaatccattatttaatacaacatcatcaatcattttgacaacctgtatcccaagcagcggtcattcaagacacaga

SEQ ID NO: 3287 - DNA, 231 bp, Homo Sapiens
ctgcagtgctacaactgtcctaacccaactgctgactgcaaaacagccgtcaattgttcatctgattttgatgcgtgtctcattaccaaagctgggttacaagtgtataacaagtgttggaagtttgagcattgcaatttcaacgacgtcacaacccgcttgagggaaaatgagctaacgtactactgctgcaagaaggacctgtgtaactttaacgaacagcttgaaaat

SEQ ID NO: 3288 - DNA, 1155 bp, Homo Sapiens
catccatctccagccccacctgaccagctcaacaccagcagtgcagagagtgagctctgggagccaggggagcggcttccggtccgtctgacaaacgggagcagcagctgcagcgggacggtggaggtgcggctcgaggcgtcctgggagcccgcgtgcggggcgctctgggacagccgcgccgccgaggccgtgtgccgagcactgggctgcggcggggcggaggccgcctctcagctcgccccgccgacccctgagctgccgcccccgcctgcagccgggaacaccagcgtagcagctaatgccactctggccggggcgcccgccctcctgtgcagcggcgccgagtggcggctctgcgaggtggtggagcacgcgtgccgcagcgacgggaggcgggcccgtgtcacctgtgcagagaaccgcgcgctgcgcctggtggacggtggcggcgcctgcgccggccgcgtggagatgctggagcatggcgagtggggatcagtgtgcgatgacacttgggacctggaggacgcccacgtggtgtgcaggcaactgggctgcggctgggcagtccaggccctgcccggcttgcacttcatgcccggccgcgggcctatccaccgggaccaggtgaactgctcgggggccgaagcttacctgtgggactgcccggggctgccaggacagcactactgcggccacaaagaggacgcgggcgtggtgtgctcagagcaccagtcctggcgcctgacagggggcgctgaccgctgcgaggggcaggtggaggtacacttccgaggggtctggaacacagtgtgtgacagtgagtggtacccatcggaggccaaggtgctctgccagtccttgggctgtggaactgcggttgagaggcccaaggggctgccccactccttgtccggcaggatgtactactcatgcaatggggaggagctcaccctctccaactgctcctggcggttcaacaactccaacctctgcagccagtcgctggcagccagggtcctctgctcagcttcccggagtttgcacaatctgtccactcccgaagtccctgcaagtgttcagacagtcactatagaatcttctgtgacagtgaaaatagagaacaaggaatctcgggagctaatgctcctc

SEQ ID NO: 3289 - DNA, 303 bp, Homo Sapiens
gctggctatgtgtttagagataaggtgatgtcagagtttaataacaacttccggcagcagatggagaattacccgaaaaacaaccacactgcttcgatcctggacaggatgcaggcagattttaagtgctgtggggctgctaactacacagattgggagaaaatcccttccatgtcgaagaaccgagtccccgactcctgctgcattaatgttactgtgggctgtgggattaatttcaacgagaaggcgatccataaggagggctgtgtggagaagattgggggctggctgaggaaaaatgtg

SEQ ID NO: 3290 - DNA, 414 bp, Homo Sapiens
tcagtgggccaatacaattgtccaggccaatacacattctcaatgccatcagacagccatgtttcttcatgctctgaggactgggttggctaccagaggaaatgctactttatttctactgtgaagaggagctggacttcagcccaaaatgcttgttctgaacatggtgctactcttgctgtcattgattctgaaaaggacatgaactttctaaaacgatacgcaggtagagaggaacactgggttggactgaaaaaggaacctggtcacccatggaagtggtcaaatggcaaagaatttaacaactggttcaacgttacagggtctgacaagtgtgtttttctgaaaaacacagaggtcagcagcatggaatgtgagaagaatttatactggatatgtaacaaaccttacaaa

SEQ ID NO: 3291 - DNA, 465 bp, Homo Sapiens
gcccaagaggtgcagcagtctccccactgcacgactgtccccgtgggagcctccgtcaacatcacctgctccaccagcgggggcctgcgtgggatctacctgaggcagctcgggccacagccccaagacatcatttactacgaggacggggtggtgcccactacggacagacggttccggggccgcatcgacttctcagggtcccaggacaacctgactatcaccatgcaccgcctgcagctgtcggacactggcacctacacctgccaggccatcacggaggtcaatgtctacggctccggcaccctggtcctggtgacagaggaacagtcccaaggatggcacagatgctcggacgccccaccaagggcctctgccctccctgccccaccgacaggctccgccctccctgacccgcagacagcctctgccctccctgacccgccagcagcctctgccctccct

SEQ ID NO: 3292 - DNA, 465 bp, Homo Sapiens
cagcgcttcgcacaggctcagcagcagctgccgctcgagtcacttgggtgggacgtagctgagctgcagctgaatcacacaggacctcagcaggaccccaggctatactggcaggggggcccagcactgggccgctccttcctgcatggaccagagctggacaaggggcagctacgtatccatcgtgatggcatctacatggtacacatccaggtgacgctggccatctgttcctccacgacggcctccaggcaccaccccaccaccctggccgtgggaatctgctctcccgcctcccgtagcatcagcctgctgcgtctcagcttccaccaaggttgtaccattgcctcccagcgcctgacgcccctggcccgaggggacacactctgcaccaacctcactgggacacttttgccttcccgaaacactgatgagaccttctttggagtgcagtgggtgcgtccc

SEQ ID NO: 3293 - DNA, 729 bp, Homo Sapiens
cgctatctgcaggtgtctcagcagctccagcagacgaacagggttctggaagtcactaacagcagcctgaggcagcagctccgcctcaagataacgcagctgggacagagtgcagaggatctgcaggggtccaggagagagctggcgcagagtcaggaagcactacaggtggaacagagggctcatcaggcggccgaagggcagctacaggcctgccaggcagacagacagaagacgaaggagaccttgcaaagtgaggagcaacagaggagggccttggagcagaagctgagcaacatggagaacagactgaagcccttcttcacatgcggctcagcagacacctgctgtccgtcgggatggataatgcatcagaaaagctgcttttacatctcacttacttcaaaaaattggcaggagagccaaaaacaatgtgaaactctgtcttccaagctggccacattcagtgaaatttatccacaatcacactcttactacttcttaaattcactgttgccaaatggtggttcagggaattcatattggactggcctcagctctaacaaggattggaagttgactgatgatacacaacgcactaggacttatgctcaaagctcaaaatgtaacaaggtacataaaacttggtcatggtggacactggagtcagagtcatgtagaagttctcttccctacatctgtgagatgacagctttcaggtttccagat

SEQ ID NO: 3294 - DNA, 480 bp, Homo Sapiens
cagcagcagggccggctggacaaactgacagtcacctcccagaacctgcagctggagaacctgcgcatgaagcttcccaagcctcccaagcctgtgagcaagatgcgcatggccaccccgctgctgatgcaggcgctgcccatgggagccctgccccaggggcccatgcagaatgccaccaagtatggcaacatgacagaggaccatgtgatgcacctgctccagaatgctgaccccctgaaggtgtacccgccactgaaggggagcttcccggagaacctgagacaccttaagaacaccatggagaccatagactggaaggtctttgagagctggatgcaccattggctcctgtttgaaatgagcaggcactccttggagcaaaagcccactgacgctccaccgaaagagtcactggaactggaggacccgtcttctgggctgggtgtgaccaagcaggatctgggcccagtccccatg

SEQ ID NO: 3295 - DNA, 333 bp, Homo Sapiens
ctgtggatgcacaaggtcccagcatcattgatggtgagcctgggggaagacgcccacttccaatgcccgcacaatagcagcaacaacgccaacgtcacctggtggcgcgtcctccatggcaactacacgtggccccctgagttcttgggcccgggcgaggaccccaatggtacgctgatcatccagaatgtgaacaagagccatgggggcatatacgtgtgccgggtccaggagggcaacgagtcataccagcagtcctgcggcacctacctccgcgtgcgccagccgccccccaggcccttcctggacatgggggagggcaccaagaaccga

SEQ ID NO: 3296 - DNA, 393 bp, Homo Sapiens
gccagatcggaggaccggtaccggaatcccaaaggtagtgcttgttcgcggatctggcagagcccacgtttcatagccaggaaacggggcttcacggtgaaaatgcactgctacatgaacagcgcctccggcaatgtgagctggctctggaagcaggagatggacgagaatccccagcagctgaagctggaaaagggccgcatggaagagtcccagaacgaatctctcgccaccctcaccatccaaggcatccggtttgaggacaatggcatctacttctgccagcagaagtgcaacaacacctcggaggtctaccagggctgcggcacagagctgcgagtcatgggattcagcaccttggcacagctgaagcagaggaacacgctgaaggat

SEQ ID NO: 3297 - DNA, 624 bp, Homo Sapiens
gttatccacgtgaccaaggaagtgaaagaagtggcaacgctgtcctgtggtcacaatgtttctgttgaagagctggcacaaactcgcatctactggcaaaaggagaagaaaatggtgctgactatgatgtctggggacatgaatatatggcccgagtacaagaaccggaccatctttgatatcactaataacctctccattgtgatcctggctctgcgcccatctgacgagggcacatacgagtgtgttgttctgaagtatgaaaaagacgctttcaagcgggaacacctggctgaagtgacgttatcagtcaaagctgacttccctacacctagtatatctgactttgaaattccaacttctaatattagaaggataatttgctcaacctctggaggttttccagagcctcacctctcctggttggaaaatggagaagaattaaatgccatcaacacaacagtttcccaagatcctgaaactgagctctatgctgttagcagcaaactggatttcaatatgacaaccaaccacagcttcatgtgtctcatcaagtatggacatttaagagtgaatcagaccttcaactggaatacaaccaagcaagagcattttcctgataac

SEQ ID NO: 3298 - DNA, 267 bp, Homo Sapiens
tttgtcaacaaggaccagatcgccaaggatgtgaagcagttctatgaccaggccctacagcaggccgtggtggatgatgacgccaacaacgccaaggctgtggtgaagaccttccacgagacgcttgactgctgtggctccagcacactgactgctttgaccacctcagtgctcaagaacaatttgtgtccctcgggcagcaacatcatcagcaacctcttcaaggaggactgccaccagaagatcgatgacctcttctccgggaag

SEQ ID NO: 3299 - DNA, 354 bp, Homo Sapiens
ggcaagctgaagcaggagatgggcggcatcgtgactgagctcattcgagactacaacagcagtcgcgaggacagcctgcaggatgcctgggactacgtgcaggctcaggtgaagtgctgcggctgggtcagcttctacaactggacagacaacgctgagctcatgaatcgccctgaggtcacctacccctgttcctgcgaagtcaagggggaagaggacaacagcctttctgtgaggaagggcttctgcgaggcccccggcaacaggacccagagtggcaaccaccctgaggactggcctgtgtaccaggagggctgcatggagaaggtgcaggcgtggctgcaggagaacctg

SEQ ID NO: 3300 - DNA, 375 bp, Homo Sapiens
acgccggaggtgaaggtggcttgctccgaagatgtggacttgccctgcaccgccccctgggatccgcaggttccctacacggtctcctgggtcaagttattggagggtggtgaagagaggatggagacaccccaggaagaccacctcaggggacagcactatcatcagaaggggcaaaatggttctttcgacgcccccaatgaaaggccctattccctgaagatccgaaacactaccagctgcaactcggggacatacaggtgcactctgcaggacccggatgggcagagaaacctaagtggcaaggtgatcttgagagtgacaggatgccctgcacagcgtaaagaagagacttttaagaaatacagagcggag

SEQ ID NO: 3301 - DNA, 612 bp, Homo Sapiens
aaagactcagaaatcttcacagtgaatgggattctgggagagtcagtcactttccctgtaaatatccaagaaccacggcaagttaaaatcattgcttggacttctaaaacatctgttgcttatgtaacaccaggagactcagaaacagcacccgtagttactgtgacccacagaaattattatgaacggatacatgccttaggtccgaactacaatctggtcattagcgatctgaggatggaagacgcaggagactacaaagcagacataaatacacaggctgatccctacaccaccaccaagcgctacaacctgcaaatctatcgtcggcttgggaaaccaaaaattacacagagtttaatggcatctgtgaacagcacctgtaatgtcacactgacatgctctgtagagaaagaagaaaagaatgtgacatacaattggagtcccctgggagaagagggtaatgtccttcaaatcttccagactcctgaggaccaagagctgacttacacgtgtacagcccagaaccctgtcagcaacaattctgactccatctctgcccggcagctctgtgcagacatcgcaatgggcttccgtactcaccacaccggg

SEQ ID NO: 3302 - DNA, 672 bp, Homo Sapiens
gctcctctgaagattcaagcttatttcaatgagactgcagacctgccatgccaatttgcaaactctcaaaaccaaagcctgagtgagctagtagtattttggcaggaccaggaaaacttggttctgaatgaggtatacttaggcaaagagaaatttgacagtgttcattccaagtatatgggccgcacaagttttgattcggacagttggaccctgagacttcacaatcttcagatcaaggacaagggcttgtatcaatgtatcatccatcacaaaaagcccacaggaatgattcgcatccaccagatgaattctgaactgtcagtgcttgctaacttcagtcaacctgaaatagtaccaatttctaatataacagaaaatgtgtacataaatttgacctgctcatctatacacggttacccagaacctaagaagatgagtgttttgctaagaaccaagaattcaactatcgagtatgatggtattatgcagaaatctcaagataatgtcacagaactgtacgacgtttccatcagcttgtctgtttcattccctgatgttacgagcaatatgaccatcttctgtattctggaaactgacaagacgcggcttttatcttcacctttctctatagagcttgaggaccctcagcctcccccagaccacattcct

SEQ ID NO: 3303 - DNA, 483 bp, Homo Sapiens
agccagttccgggtgtcgccgctggatcggacctggaacctgggcgagacagtggagctgaagtgccaggtgctgctgtccaacccgacgtcgggctgctcgtggctcttccagccgcgcggcgccgccgccagtcccaccttcctcctatacctctcccaaaacaagcccaaggcggccgaggggctggacacccagcggttctcgggcaagaggttgggggacaccttcgtcctcaccctgagcgacttccgccgagagaacgagggctgctatttctgctcggccctgagcaactccatcatgtacttcagccacttcgtgccggtcttcctgccagcgaagcccaccacgacgccagcgccgcgaccaccaacaccggcgcccaccatcgcgtcgcagcccctgtccctgcgcccagaggcgtgccggccagcggcggggggcgcagtgcacacgagggggctggacttcgcctgtgat

SEQ ID NO: 3304 - DNA, 447 bp, Homo Sapiens
ctccagcagacccctgcatacataaaggtgcaaaccaacaagatggtgatgctgtcctgcgaggctaaaatctccctcagtaacatgcgcatctactggctgagacagcgccaggcaccgagcagtgacagtcaccacgagttcctggccctctgggattccgcaaaagggactatccacggtgaagaggtggaacaggagaagatagctgtgtttcgggatgcaagccggttcattctcaatctcacaagcgtgaagccggaagacagtggcatctacttctgcatgatcgtcgggagccccgagctgaccttcgggaagggaactcagctgagtgtggttgatttccttcccaccactgcccagcccaccaagaagtccaccctcaagaagagagtgtgccggttacccaggccagagacccagaagggcccactttgtagcccc

SEQ ID NO: 3305 - DNA, 459 bp, Homo Sapiens
aattcagttctgcaacagactccagcttatattaaagtacagactaataaaatggtgatgttatcttgtgaagcgaaaataagtctatcaaacatgtgcatttactggctaagacagcgtcaagctccttcctctgattcacaccacgagttcttgaccttatgggatagcgcgaaagggactatacacggggaggaggtcgaacaggagaagattgccgttttcagagacgcgtctaggtttatcttgaaccttaccagtgtaaagcccgaggacagcggcatctacttttgcatgattgtggggagcccagagctaaccttcggaaaggggactcagcttagcgtcgtcgtagatttcttacccacaactgctcaaccaacgaaaaaaagcactctgaaaaagagagtgtgcagattgccaagacctgagacccaaaagggaccgctatgcagtcct

SEQ ID NO: 3306 - DNA, 252 bp, Homo Sapiens
tcccacaaggatgaggtgattaaggaagtccaggagttttacaaggacacctacaacaagctgaaaaccaaggatgagccccagcgggaaacgctgaaagccatccactatgcgttgaactgctgtggtttggctgggggcgtggaacagtttatctcagacatctgccccaagaaggacgtactcgaaaccttcaccgtgaagtcctgtcctgatgccatcaaagaggtcttcgacaataaattccacatc

SEQ ID NO: 3307 - DNA, 1143 bp, Homo Sapiens
gtttgggaaaaaacagtcaacacagaagaaaatgtttatgctacacttggctctgatgtcaacctgacctgccaaacacagacagtaggcttcttcgtgcagatgcaatggtccaaggtcaccaataagatagacctgattgctgtctatcatccccaatacggcttctactgtgcctatgggagaccctgtgagtcacttgtgactttcacagaaactcctgagaatgggtcaaaatggactctgcacttaaggaatatgtcttgttcagtcagtggaaggtacgagtgtatgcttgttctgtatccagagggcattcagactaaaatctacaaccttctcattcagacacacgttacagcagatgaatggaacagcaaccatacgatagaaatagagataaatcagactctggaaataccatgctttcaaaatagctcctcaaaaatttcatctgagttcacctatgcatggtcggtggaggataatggaactcaggaaacacttatctcccaaaatcacctcatcagcaattccacattacttaaagatagagtcaagcttggtacagactacagactccacctctctccagtccaaatcttcgatgatgggcggaagttctcttgccacattagagtcggtcctaacaaaatcttgaggagctccaccacagtcaaggtttttgctaaaccagaaatccctgtgattgtggaaaataactccacggatgtcttggtagagagaagattcacctgcttactaaagaatgtatttcccaaagcaaatatcacatggtttatagatggaagttttcttcatgatgaaaaagaaggaatatatattactaatgaagagagaaaaggcaaagatggatttttggaactgaagtctgttttaacaagggtacatagtaataaaccagcccaatcagacaacttgaccatttggtgtatggctctgtctccagtcccaggaaataaagtgtggaacatctcatcagaaaagatcacttttctcttaggttctgaaatttcctcaacagaccctccactgagtgttacagaatctacccttgacacccaaccttctccagccagcagtgtatctcctgcaagtaagaatgttttcacactgagctat

SEQ ID NO: 3308 - DNA, 300 bp, Homo Sapiens
gatggtggtttcgatttatccgatgcccttcctgacaatgaaaacaagaaacccactgcaatccccaagaaacccagtgctggggatgactttgacttaggagatgctgttgttgatggagaaaatgacgacccacgaccaccgaacccacccaaaccgatgccaaatccaaaccccaaccaccctagttcctccggtagcttttcagatgctgaccttgcggatggcgtttcaggtggagaaggaaaaggaggcagtgatggtggaggcagccacaggaaagaaggggaagaggccgac

SEQ ID NO: 3309 - DNA, 1317 bp, Homo Sapiens
gactgggttattcctcccatcagctgcccagaaaatgaaaaaggcccatttcctaaaaacctggttcagatcaaatccaacaaagacaaagaaggcaaggttttctacagcatcactggccaaggagctgacacaccccctgttggtgtctttattattgaaagagaaacaggatggctgaaggtgacagagcctctggatagagaacgcattgccacatacactctcttctctcacgctgtgtcatccaacgggaatgcagttgaggatccaatggagattttgatcacggtaaccgatcagaatgacaacaagcccgaattcacccaggaggtctttaaggggtctgtcatggaaggtgctcttccaggaacctctgtgatggaggtcacagccacagacgcggacgatgatgtgaacacctacaatgccgccatcgcttacaccatcctcagccaagatcctgagctccctgacaaaaatatgttcaccattaacaggaacacaggagtcatcagtgtggtcaccactgggctggaccgagagagtttccctgcgtataccctggtggttcaagctgctgaccttcaaggtgaggggttaagcacaacagcaacagctgtgatcacagtcactgacaccaacgataatcctccgatcttcaatcccaccacgtacaagggtcaggtgcctgagaacgaggctaacgtcgtaatcaccacactgaaagtgactgatgctgatgcccccaataccccagcgtgggaggctgtatacaccatattgaatgatgatggtggacaatttgtcgtcaccacaaatccagtgaacaacgatggcattttgaaaacagcaaagggcttggattttgaggccaagcagcagtacattctacacgtagcagtgacgaatgtggtaccttttgaggtctctctcaccacctccacagccaccgtcaccgtggatgtgctggatgtgaatgaagcccccatctttgtgcctcctgaaaagagagtggaagtgtccgaggactttggcgtgggccaggaaatcacatcctacactgcccaggagccagacacatttatggaacagaaaataacatatcggatttggagagacactgccaactggctggagattaatccggacactggtgccatttccactcgggctgagctggacagggaggattttgagcacgtgaagaacagcacgtacacagccctaatcatagctacagacaatggttctccagttgctactggaacagggacacttctgctgatcctgtctgatgtgaatgacaacgccccc

SEQ ID NO: 3310 - DNA, 1677 bp, Homo Sapiens
ggttggatgtggaatcaatttttcttacttgaagaatatacaggatctgattatcagtacgtaggcaagctacattcagaccaagataaaggagatggatcactcaaatatatcttatctggagatggagctggtactctttttattattgatgaaaaaacaggtgatattcatgccacaaggcgaattgatagggaggaaaaggccttttatactctacgcgcacaagctattaacagaagaactctgaggccagtagagccagagtcagagtttgtgatcaaaattcatgatatcaatgacaatgagccaacgttcccagaagaaatctatacagctagtgttcccgaaatgtctgttgtaggtacttctgtggtgcaagtcacagctacagatgccgatgacccttcatatgggaacagcgccagagtcatttacagcatacttcaagggcagccctatttctctgtggagcctgaaacaggtatcatcaggactgctttaccgaacatgaacagagaaaacagagagcaataccaagtggtcatccaggccaaagacatgggcggccagatgggaggcttatcggggacaaccactgtgaacatcacgctgacagatgtcaatgacaacccaccacgtttcccccagaacactattcatcttcgagttcttgaatcctccccagttggcacagccattggaagtgtcaaagcaactgatgctgacactgggaaaaatgctgaagtagaataccgaattattgatggtgacggtactgatatgtttgacatcgtgactgagaaggacacacaggaaggcatcatcactgtgaaaaagccactcgactatgagagccgaagactttatactctgaaagtcgaagcagaaaacacccatgtagatccccgtttttattacctaggaccatttaaagatactaccatagtgaaaatctctatagaagatgtggatgaacctcctgtttttagtaggtcctcctatctgtttgaagttcatgaagatattgaagtgggcacaatcattggtactgtaatggcaagggacccagattctatttccagccccattagattttccttggatcgccatactgaccttgacagaatctttaacattcattcaggaaatggatctctttatacatcaaaacctcttgaccgtgaactatctcagtggcataatcttactgttattgctgctgaaatcaacaatcccaaagagacaacacgcgtggctgtttttgtgagaattttggatgttaatgacaatgccccacagtttgctgtgttctatgacacttttgtatgtgaaaatgccagaccagggcagctaatacagactataagtgcagtagacaaagatgaccctttaggtggacagaaattttttttcagtttagctgctgtcaatccaaacttcacagtacaggataatgaagataatactgccagaatcttaaccagaaaaaatggattcaatagacatgaaatcagtacctatctcttgcctgtggtgatatcagacaatgattacccaattcagagcagcacaggcacactgaccattcgagtgtgtgcttgtgacagccaaggcaacatgcaatcctgcagtgctgaagccctgctcctccctgccggcctcagcactggggcc

SEQ ID NO: 3311 - DNA, 1692 bp, Homo Sapiens
ggctgggtctggaaccagttcttcgtgatagaggagtacaccgggcctgaccccgtgcttgtgggcaggcttcattcagatattgactctggtgatgggaacattaaatacattctctcaggggaaggagctggaaccatttttgtgattgatgacaaatcagggaacattcatgccaccaagacgttggatcgagaagagagagcccagtacacgttgatggctcaggcggtggacagggacaccaatcggccactggagccaccgtcggaattcattgtcaaggtccaggacattaatgacaaccctccggagttcctgcacgagacctatcatgccaacgtgcctgagaggtccaatgtgggaacgtcagtaatccaggtgacagcttcagatgcagatgaccccacttatggaaatagcgccaagttagtgtacagtatcctcgaaggacaaccctatttttcggtggaagcacagacaggtatcatcagaacagccctacccaacatggacagggaggccaaggaggagtaccacgtggtgatccaggccaaggacatgggtggacatatgggcggactctcagggacaaccaaagtgatgatcacactgaccgatgtcaatgacaacccaccaaagtttccgcagagcgtataccagatgtctgtgtcagaagcagccgtccctggggaggaagtaggaagagtgaaagctaaagatccagacattggagaaaatggcttagtcacatacaatattgttgatggagatggtatggaatcatttgaaatcacaacggactatgaaacacaggagggggtgataaagctgaaaaagcctgtagattttgaaaccaaaagagcctatagcttgaaggtagaggcagccaacgtgcacatcgacccgaagtttatcagcaatggccctttcaaggacactgtgaccgtcaagatcgcagtagaagatgctgatgagccccctatgttcttggccccaagttacatccacgaagtccaagaaaatgcagctgctggcaccgtggttgggagagtgcatgccaaagaccctgatgctgccaacagcccgataaggtattccatcgatcgtcacactgacctcgacagatttttcactattaatccagaggatggttttattaaaactacaaaacctctggatagagaggaaacagcctggctcaacatcactgtctttgcagcagaaatccacaatcggcatcaggaagccaaagtcccagtggccattagggtccttgatgtcaacgataatgctcccaagtttgctgccccttatgaaggtttcatctgtgagagtgatcagaccaagccactttccaaccagccaattgttacaattagtgcagatgacaaggatgacacggccaatggaccaagatttatcttcagcctaccccctgaaatcattcacaatccaaatttcacagtcagagacaaccgagataacacagcaggcgtgtacgcccggcgtggagggttcagtcggcagaagcaggacttgtaccttctgcccatagtgatcagcgatggcggcatcccgcccatgagtagcaccaacaccctcaccatcaaagtctgcgggtgcgacgtgaacggggcactgctctcctgcaacgcagaggcctacattctgaacgccggcctgagcaca

SEQ ID NO: 3312 - DNA, 1665 bp, Homo Sapiens
ggctgggtatggaatcaattttttgtgctggaagaatacgtgggctccgagcctcagtatgtgggaaagctccattccgacttagacaagggagagggcactgtgaaatacaccctctcaggagatggcgctggcaccgtttttaccattgatgaaaccacaggggacattcatgcaataaggagcctagatagagaagagaaacctttctacactcttcgtgctcaggctgtggacatagaaaccagaaagcccctggagcctgaatcagaattcatcatcaaagtgcaggatattaatgataatgagccaaagtttttggatggaccttatgttgctactgttccagaaatgtctcctgtgggtgcatatgtactccaggtcaaggccacagatgcagatgacccgacctatggaaacagtgccagagtcgtttacagcattcttcagggacaaccttatttctctattgatcccaagacaggtgttattagaacagctttgccaaacatggacagagaagtcaaagaacaatatcaagtactcatccaagccaaggatatgggaggacagcttggaggattagccggaacaacaatagtcaacatcactctcaccgatgtcaatgacaatccacctcgattccccaaaagcatcttccacttgaaagttcctgagtcttcccctattggttcagctattggaagaataagagctgtggatcctgattttggacaaaatgcagaaattgaatacaatattgttccaggagatgggggaaatttgtttgacatcgtcacagatgaggatacacaagagggagtcatcaaattgaaaaagcctttagattttgaaacaaagaaggcatacactttcaaagttgaggcttccaaccttcaccttgaccaccggtttcactcggcgggccctttcaaagacacagctacggtgaagatcagcgtgctggacgtagatgagccaccggttttcagcaagccgctctacaccatggaggtttatgaagacactccggtagggaccatcattggcgctgtcactgctcaagacctggatgtaggcagcagtgctgttaggtacttcatagattggaagagtgatggggacagctactttacaatagatggaaatgaaggaaccatcgccactaatgaattactagacagagaaagcactgcgcagtataatttctccataattgcgagtaaagttagtaaccctttattgaccagcaaagtcaatatactgattaatgtcttagatgtaaatgaatttcctccagaaatatctgtgccatatgagacagccgtgtgtgaaaatgccaagccaggacagataattcagatagtcagtgctgcagaccgagatctttcacctgctgggcaacaattctcctttagattatcacctgaggctgctatcaaaccaaattttacagttcgtgacttcagaaacaacacagcggggattgaaacccgaagaaatggatacagccgcaggcagcaagagttgtatttcctccctgttgtaatagaagacagcagctaccctgtccagagcagcacaaacacaatgactattcgagtctgtagatgtgactctgatggcaccatcctgtcttgtaatgtggaagcaatttttctacct

SEQ ID NO: 3313 - DNA, 1665 bp, Homo Sapiens
tccattgtggtatctcccattttaattccagagaatcagagacagcctttcccaagagatgttggcaaggtagtcgatagtgacaggccagaaaggtccaagttccggctcactggaaagggagtggatcaagagcctaaaggaattttcagaatcaatgagaacacagggagcgtctccatgacacggaccttggacagagaagtaatcgctgtttatcaactatttgtggagaccactgatgtcaatggcaaaactctcgaggggccggtgcctctggaagtcattgtgattgatcagaatgacaaccgaccgatctttcgggaaggcccctacatcggccacgtcatggaagggtcacccacaggcaccacagtgatgcggatgacagcctttgatgcagatgacccagccaccgataatgccctcctgcggtataatatccgtcggcagacgcctgacaagccatctcccaacatgttctacatcgatcctgagaaaggagacattgtcactgttgtgtcacctgcgctgctggaccgagagactctggaaaatcccaagtatgaactgatcatcgaggctcaagatatggctggactggatgttggattaacaggcacggccacagccacgatcatgatcgatgacaaaaatgatcactcaccaaaattcaccaagaaagagtttcaagccacagtcgaggaaggagctgtgggagttattgtcaatttgacagttgaagataaggatgaccccgccacaggtgcatggagggctgcctacaccatcatcaacggaaaccccgggcagagctttgaaatccacaccaaccctcaaaccaacgaagggatgctttctgttgtcaaaccattggactatgaaatttctgccttccacaccctgctgatcaaagtggaaaatgaagacccactcgtacccgacgtctcctacggccccagctccacagccaccgtccacatcactgtcctggatgtcaacgagggcccagtcttctacccagaccccatgatggtgaccaggcaggaggacctctctgtgggcagcgtgctgctgacagtgaatgccacggaccccgactccctgcagcatcaaaccatcaggtattctgtttacaaggacccagcaggttggctgaatattaaccccatcaatgggactgttgacaccacagctgtgctggaccgtgagtccacatttgtcgacaacagcgtgtacactgctctcttcctggcaattgacagtggcaaccctcccgctacgggcactgggactttgctgataaccctggaggacgtgaatgacaatgccccgttcatttaccccacagtagctgaagtctgtgatgatgccaaaaacctcagtgtagtcattttgggagcatcagataaggatcttcacccgaatacagatcctttcaaatttgaaatccacaaacaagctgttcctgataaagtctggaagatctccaagatcaacaatacacacgccctggtaagccttcttcaaaatctgaacaaagcaaactacaacctgcccatcatggtgacagattcagggaaaccacccatgacgaatatcacagatctcagggtacaagtgtgctcctgcaggaattccaaagtggactgcaacgcggcgggg

SEQ ID NO: 3314 - DNA, 1638 bp, Homo Sapiens
ctcccctaccccctggttcagatcaagtcggacaagcagcagctgggcagcgtcatctacagcatccagggacccggcgtggatgaggagccccggggcgtcttctctatcgacaagttcacagggaaggtcttcctcaatgccatgctggaccgcgagaagactgatcgcttcaggctaagagcgtttgccctggacctgggaggatccaccctggaggaccccacggacctggagattgtagttgtggatcagaatgacaaccggccagccttcctgcaggaggcgttcactggccgcgtgctggagggtgcagtcccaggcacctatgtgaccagggcagaggccacagatgccgacgaccccgagacggacaacgcagcgctgcggttctccatcctgcagcagggcagccccgagctcttcagcatcgacgagctcacaggagagatccgcacagtgcaagtggggctggaccgcgaggtggtcgcggtgtacaatctgaccctgcaggtggcggacatgtctggagacggcctcacagccactgcctcagccatcatcacccttgatgacatcaatgacaatgcccccgagttcaccagggatgagttcttcatggaggccatagaggccgtcagcggagtggatgtgggacgcctggaagtggaggacagggacctgccaggctccccaaactgggtggccaggttcactatcctggaaggcgaccccgatgggcagttcaccatccgcacggaccccaagaccaacgagggtgttctgtccattgtgaaggccctggactatgagagctgtgaacactacgaactcaaagtgtcggtgcagaatgaggccccgctgcaggcggctgcccttagggctgagcggggccaggccaaggtccgcgtgcatgtgcaggacaccaacgagccccccgtgttccaggagaacccacttcggaccagcctagcagagggggcacccccaggcactctggtggccaccttctctgcccgggaccctgacacagagcagctgcagaggctcagctactccaaggactacgacccggaagactggctgcaagtggacgcagccactggccggatccagacccagcacgtgctcagcccggcgtcccccttcctcaagggcggctggtacagagccatcgtcctggcccaggatgacgcctcccagccccgcaccgccaccggcaccctgtccatcgagatcctggaggtgaacgaccatgcacctgtgctggccccgccgccgccgggcagcctgtgcagcgagccacaccaaggcccaggcctcctcctgggcgccacggatgaggacctgcccccccacggggcccccttccacttccagctgagccccaggctcccagagctcggccggaactggagcctcagccaggtcaacgtgagccacgcgcgcctgcggccgcgacaccaggtccccgaaggcctgcaccgcctcagcctgctgctccgggactcggggcagccgccccagcagcgcgagcagcctctgaacgtgaccgtgtgccgctgcggcaaggacggcgtctgcctgccgggggccgcagcgctgctggcggggggcacaggcctcagcctgggcgca

SEQ ID NO: 3315 - DNA, 2304 bp, Homo Sapiens
aaggcccagcctgcagagctgtctgtggaagttccagaaaactatggtggaaatttccctttatacctgaccaagttgccgctgccccgtgagggggctgaaggccagatcgtgctgtcaggggactcaggcaaggcaactgagggcccatttgctatggatccagattctggcttcctgctggtgaccagggccctggaccgagaggagcaggcagagtaccagctacaggtcaccctggagatgcaggatggacatgtcttgtggggtccacagcctgtgcttgtgcacgtgaaggatgagaatgaccaggtgccccatttctctcaagccatctacagagctcggctgagccggggtaccaggcctggcatccccttcctcttccttgaggcttcagaccgggatgagccaggcacagccaactcggatcttcgattccacatcctgagccaggctccagcccagccttccccagacatgttccagctggagcctcggctgggggctctggccctcagccccaaggggagcaccagccttgaccacgccctggagaggacctaccagctgttggtacaggtcaaggacatgggtgaccaggcctcaggccaccaggccactgccaccgtggaagtctccatcatagagagcacctgggtgtccctagagcctatccacctggcagagaatctcaaagtcctatacccgcaccacatggcccaggtacactggagtgggggtgatgtgcactatcacctggagagccatcccccgggaccctttgaagtgaatgcagagggaaacctctacgtgaccagagagctggacagagaagcccaggctgagtacctgctccaggtgcgggctcagaattcccatggcgaggactatgcggcccctctggagctgcacgtgctggtgatggatgagaatgacaacgtgcctatctgccctccccgtgaccccacagtcagcatccctgagctcagtccaccaggtactgaagtgactagactgtcagcagaggatgcagatgcccccggctcccccaattcccacgttgtgtatcagctcctgagccctgagcctgaggatggggtagaggggagagccttccaggtggaccccacttcaggcagtgtgacgctgggggtgctcccactccgagcaggccagaacatcctgcttctggtgctggccatggacctggcaggcgcagagggtggcttcagcagcacgtgtgaagtcgaagtcgcagtcacagatatcaatgatcacgcccctgagttcatcacttcccagattgggcctataagcctccctgaggatgtggagcccgggactctggtggccatgctaacagccattgatgctgacctcgagcccgccttccgcctcatggattttgccattgagaggggagacacagaagggacttttggcctggattgggagccagactctgggcatgttagactcagactctgcaagaacctcagttatgaggcagctccaagtcatgaggtggtggtggtggtgcagagtgtggcgaagctggtggggccaggcccaggccctggagccaccgccacggtgactgtgctagtggagagagtgatgccaccccccaagttggaccaggagagctacgaggccagtgtccccatcagtgccccagccggctctttcctgctgaccatccagccctccgaccccatcagccgaaccctcaggttctccctagtcaatgactcagagggctggctctgcattgagaaattctccggggaggtgcacaccgcccagtccctgcagggcgcccagcctggggacacctacacggtgcttgtggaggcccaggatacagatgagccgagactgagcgcttctgcacccctggtgatccacttcctaaaggcccctcctgccccagccctgactcttgcccctgtgccctcccaatacctctgcacaccccgccaagaccatggcttgatcgtgagtggacccagcaaggaccccgatctggccagtgggcacggtccctacagcttcacccttggtcccaaccccacggtgcaacgggattggcgcctccagactctcaatggttcccatgcctacctcaccttggccctgcattgggtggagccacgtgaacacataatccccgtggtggtcagccacaatgcccagatgtggcagctcctggttcgagtgatcgtgtgtcgctgcaacgtggaggggcagtgcatgcgcaaggtgggccgcatgaagggcatgcccacgaagctgtcggca

SEQ ID NO: 3316 - DNA, 2295 bp, Homo Sapiens
caagaggggaagtttagtggacccctgaaacccatgacattttctatttatgaaggccaagaaccgagtcaaattatattccagtttaaggccaatcctcctgctgtgacttttgaactaactggggagacagacaacatatttgtgatagaacgggagggacttctgtattacaacagagccttggacagggaaacaagatctactcacaatctccaggttgcagccctggacgctaatggaattatagtggagggtccagtccctatcaccatagaagtgaaggacatcaacgacaatcgacccacgtttctccagtcaaagtacgaaggctcagtaaggcagaactctcgcccaggaaagcccttcttgtatgtcaatgccacagacctggatgatccggccactcccaatggccagctttattaccagattgtcatccagcttcccatgatcaacaatgttatgtactttcagatcaacaacaaaacgggagccatctctcttacccgagagggatctcaggaattgaatcctgctaagaatccttcctataatctggtgatctcagtgaaggacatgggaggccagagtgagaattccttcagtgataccacatctgtggatatcatagtgacagagaatatttggaaagcaccaaaacctgtggagatggtggaaaactcaactgatcctcaccccatcaaaatcactcaggtgcggtggaatgatcccggtgcacaatattccttagttgacaaagagaagctgccaagattcccattttcaattgaccaggaaggagatatttacgtgactcagcccttggaccgagaagaaaaggatgcatatgttttttatgcagttgcaaaggatgagtacggaaaaccactttcatatccgctggaaattcatgtaaaagttaaagatattaatgataatccacctacatgtccgtcaccagtaaccgtatttgaggtccaggagaatgaacgactgggtaacagtatcgggacccttactgcacatgacagggatgaagaaaatactgccaacagttttctaaactacaggattgtggagcaaactcccaaacttcccatggatggactcttcctaatccaaacctatgctggaatgttacagttagctaaacagtccttgaagaagcaagatactcctcagtacaacttaacgatagaggtgtctgacaaagatttcaagaccctttgttttgtgcaaatcaacgttattgatatcaatgatcagatccccatctttgaaaaatcagattatggaaacctgactcttgctgaagacacaaacattgggtccaccatcttaaccatccaggccactgatgctgatgagccatttactgggagttctaaaattctgtatcatatcataaagggagacagtgagggacgcctgggggttgacacagatccccataccaacaccggatatgtcataattaaaaagcctcttgattttgaaacagcagctgtttccaacattgtgttcaaagcagaaaatcctgagcctctagtgtttggtgtgaagtacaatgcaagttcttttgccaagttcacgcttattgtgacagatgtgaatgaagcacctcaattttcccaacacgtattccaagcgaaagtcagtgaggatgtagctataggcactaaagtgggcaatgtgactgccaaggatccagaaggtctggacataagttattcactgaggggagacacaagaggttggcttaaaattgaccacgtgactggtgagatctttagtgtggctccattggacagagaagccggaagtccatatcgggtacaagtggtggccacagaagtaggggggtcttccttgagctctgtgtcagagttccacctgatccttatggatgtgaatgacaaccctcccaggctagccaaggactacacgggcttgttcttctgccatcccctcagtgcacctggaagtctcatttttgaggctactgatgatgatcagcacttatttcggggtccccattttacattttccctcggcagtggaagcttacaaaacgactgggaagtttccaaaatcaatggtactcatgcccgactgtctaccaggcacacagactttgaggagagggagtatgtcgtcttgatccgcatcaatgatgggggtcggccacccttggaaggcattgtttctttaccagttacattctgcagttgtgtggaaggaagttgtttccggccagcaggtcaccagactgggatacccactgtgggcatg

SEQ ID NO: 3317 - DNA, 1665 bp, Homo Sapiens
ggatgggtatggaatcagttctttgttttagaagaacatatgggaccagatcctcagtatgttggaaagctgcactccaattctgacaaaggtgatggatctgtcaagtacatccttactggagagggtgctgggactatatttatcattgacgataccacgggtgatatccactcaacaaaaagcctagacagagagcagaagacccactatgtgcttcatgctcaagctattgatagacgtacaaacaaacctcttgagcctgaatccgagttcatcatcaaagtgcaagacatcaatgacaacgctccaaaattcacagatggaccatacattgttactgtgcctgaaatgtcagatatgggtacctctgttctacaggtgacagctactgatgcagatgaccctacctatggaaacagcgctcgggtggtttacagcattctccagggacaaccctacttctccgtcgaccctaaaacaggagttattagaacggccttacataacatggacggagaagccagagaacattactccgtagtcattcaagccaaagacatggctgggcaagttggagggctttcaggatctacaacagtcaacatcaccttaaccgatgtcaatgacaacacaccacgctttcctcaaaaacactatcagctatatgttcctgagtcagctcaagttggttcagctgttgggaaaatcaaggcaaatgatgctgacactggctcaaatgctgacatgacctactccatcataaatggtgatggcatgggaatattctcaatctccactgacaaagagaccagagaaggaatcctttctttaaagaagccactgaactatgagaaaaagaagtcatataccctcaacatagaaggagcaaatacacatcttgattttcgcttttctcacttgggtccttttaaagatgctactatgctgaagatcattgttggggatgtagatgaaccaccactattttccatgccttcctacctcatggaagtctacgaaaatgccaagattgggaccgtcgttggtacagttttggcacaagatcctgacagtattaacagcttagtaagatacttcatcaactacaatgttgaagacgacagatttttcaacattgatgccaatactgggaccattaggactacaaaggttctcgacagagaagaaactccatggtacaacatcacagtcactgcttcagaaattgataatcctgatttgctgagccatgtcacagtgggtattagagttctggatgtcaatgacaatccacccgaacttgccagggaatatgatattattgtatgtgaaaattctaagcctggccaggttattcataccatcagtgccactgataaagatgattttgccaatggaccaaggtttaacttctttcttgatgagcgcctgcctgtaaatccaaacttcactctgaaggacaatgaagataacacagccagcattctgacaaggcggaggagatttagtcgaactgttcaggatgtgtattatctgcccattatgatctctgatggtggaatcccctctctcagcagcagcagcaccctcaccatcagggtttgtgcatgcgagagagatgggcgtgtgcggacctgccatgcagaagccttcctgtcctcg

SEQ ID NO: 3318 - DNA, 981 bp, Homo Sapiens
ggctgggtgtggaaccaattttttgtaccagaggaaatgaatacgactagtcatcacatcggccagctaagatctgatttagacaatggaaacaattctttccagtacaagcttttgggagctggagctggaagtacttttatcattgatgaaagaacaggtgacatatatgccatacagaagcttgatagagaggagcgatccctctacatcttaagagcccaggtaatagacatcgctactggaagggctgtggaacctgagtctgagtttgtcatcaaagtttcggatatcaatgacaatgaaccaaaattcctagatgaaccttatgaggccattgtaccagagatgtctccagaaggaacattagttatccaggtgacagcaagtgatgctgacgatccctcaagtggtaataatgctcgtctcctctacagcttacttcaaggccagccatatttttctgttgaaccaacaacaggagtcataagaatatcttctaaaatggatagagaactgcaagatgagtattgggtaatcattcaagccaaggacatgattggtcagccaggagcgttgtctggaacaacaagtgtattaattaaactttcagatgttaatgacaataagcctatatttaaagaaagtttataccgcttgactgtctctgaatctgcacccactgggacttctataggaacaatcatggcatatgataatgacataggagagaatgcagaaatggattacagcattgaagaggatgattcgcaaacatttgacattattactaatcatgaaactcaagaaggaatagttatattaaaaaagaaagtggattttgagcaccagaaccactacggtattagagcaaaagttaaaaaccatcatgttcctgagcagctcatgaagtaccacactgaggcttccaccactttcattaagatccaggtggaagatgttgatgagcctcctcttttc

SEQ ID NO: 3319 - DNA, 1695 bp, Homo Sapiens
gactgggtcatctctccaatcaacttgccagaaaactccaggggaccttttcctcaagagcttgtcaggatcaggtctgatagagataaaaacctttcactgcggtacagtgtaactgggccaggagctgaccagcctccaactggtatcttcattatcaaccccatctcgggtcagctgtcggtgacaaagcccctggatcgcgagcagatagcccggtttcatttgagggcacatgcagtagatattaatggaaatcaagtggagaaccccattgacattgtcatcaatgttattgacatgaatgacaacagacctgagttcttacaccaggtttggaatgggacagttcctgagggatcaaagcctggaacatatgtgatgaccgtaacagcaattgatgctgacgatcccaatgccctcaatgggatgttgaggtacagaatcgtgtctcaggctccaagcaccccttcacccaacatgtttacaatcaacaatgagactggtgacatcatcacagtggcagctggacttgatcgagaaaaagtgcaacagtatacgttaataattcaagctacagacatggaaggcaatcccacatatggcctttcaaacacagccacggccgtcatcacagtgacagatgtcaatgacaatcctccagagtttactgccatgacgttttatggtgaagttcctgagaacagggtagacatcatagtagctaatctaactgtgaccgataaggatcaaccccatacaccagcctggaacgcagtgtacagaatcagtggcggagatcctactggacggttcgccatccagaccgaccaaaacagcaacgacgggttagtcaccgtggtcaaaccaatcgactttgaagcaaataggatgtttgtccttactgttgctgcagaaaatcaagtgccattagccaagggaattcagcacccgcctcagtcaactgcaaccatgtctgttacagttattgacgtaaatgaaaacccttattttgcccccaatcctaagatcattcgccaagaagaagggcttcatgccggtaccatgttgacaacattcactgctcaggacccagatcgatatatgcagcaaaatattagatacactaaattatctgatcctgccaattggctaaaaatagatcctgtgaatggacaaataactacaattgctgttttggaccgagaatcaccaaatgtgaaaaacaatatatataatgctactttccttgcttctgacaatggaattcctcctatgagtggaacaggaacgctgcagatctatttacttgatattaatgacaatgcccctcaagtgttacctcaagaggcagagacttgcgaaactccagaccccaattcaattaatattacagcacttgattatggcattgatccaaatgctggaccatttgcttttgatcttcctttatctccagtgactattaagagaaattggaccatcactcggcttaatggtgattttgctcagcttaatttaaagataaaatttcttgaagctggtatctatgaagttcccatcataatcacagattcgggtaatcctcccaaatcaaatatttccatactgcgcgtgaaggtttgccagtgtgactccaacggggactgcacagatgtggacaggattgtgggtgcggggcttggcaccggtgcc

SEQ ID NO: 3320 - DNA, 1680 bp, Homo Sapiens
agctgggtttggaaccagtttttcgttctggaagagtacactgggaccgaccctttgtatgtcggcaagcttcattcagatatggacaggggagacggatccatcaaatacatcctctcgggagaaggtgctggcatcgtgtttaccatcgacgacaccactggagacatccacgccattcagaggctcgatcgagaggaaagagcccagtatactctaagggctcaagccctagacaggcggacgggcaggccaatggagcccgagtcagagttcatcatcaaaattcaagacatcaatgacaatgagcccaagttcctggacggaccttatgtggccactgtgccagaaatgtcccctgtgggtacctccgtcatccaagtgacagccacagatgcagatgacccgacctacggcaacagtgccagggtggtgtacagcattcttcagggccagccatatttttctgtggactctaaaacaggtgtaattaggacagcgctcatgaacatggacagagaagccaaagaatactacgaagtgattatccaagccaaggacatgggagggcagcttggaggattagctgggaccacaacagtgaacatcaccctctcagatgtcaatgataacccaccccgctttccccagaaacattaccagatgagtgtgttggaatcagctccaattagctccactgtcgggagagtgtttgccaaggacttggatgaaggcatcaatgcagagatgaaatatactattgtggatggagatggtgcagatgcctttgacattagcacagatcccaatttccaagttggtatcataactgtgaagaagcccctgagttttgaaagcaagaaaagctacaccttaaaggtggagggagccaatcctcacctagagatgcgttttctgaacttgggcccatttcaggacacaacaacagtgcacatcagtgtggaagacgtggacgagccccctgtgtttgaacctggcttttactttgtggaggtgcctgaggatgtggcgattggaacaaccatacagatcatttctgccaaggacccagatgtgaccaacaactcaatcagatactccattgatagaagcagtgaccctggaagatttttctatgttgacattacaacaggtgccctaatgacagcaagacccctagaccgggaagaattttcttggcataatatcactgtccttgctatggaaatgaacaatccctcccaggttggaagtgttcctgtcacaatcaaagtcttagatgtgaatgacaatgctccagagttccccagattctatgaagcttttgtctgtgagaacgccaaggcaggacagctgatccagacagtgagtgcggtggaccaagatgacccacgcaatggtcagcatttctactacagcttggctcctgaggctgctaacaaccccaactttaccataagggacaaccaagataacacagcacggattctaaccaggaggtctggtttccggcagcaggagcagagtgtctttcacctgcctatcctgatagcagatagcgggcagcccgtgctgagcagcacaggcacactgaccatccaagtgtgcagctgtgatgacgacggccacgtcatgtcctgcagcccagaggcctacatgctcccagtcagtttgagccgg

SEQ ID NO: 3321 - DNA, 378 bp, Homo Sapiens
ctggccacaccctacgaggcagctgtatgcgaggatgccaagccaggccagctcatccagaccatcagcgtggtggacagagacgagccccaaggcgggcaccgcttctatttccgcctggtgcctgaagctcccagcaaccctcatttctctctgcttgacatccaagacaacaccgctgcagtgcacacgcagcacgtgggcttcaaccggcaggagcaggacgtgttcttcctgcccatcctggtggtagacagtgggccgcccacactgagcagcacaggcacgctcaccatccgcatctgtggctgcgacagctccggcaccatccagtcctgcaacaccacggcctttgtcatggccgcctccctcagcccc

SEQ ID NO: 3322 - DNA, 2916 bp, Homo Sapiens
caggtgaaccggctgcccttcttcaccaaccacttctttgatacatacctgctgatcagcgaggacacgcctgtgggttcttctgtgacccagttgctggcccaagacatggacaatgaccccctggtgtttggcgtgtctggggaggaggcctctcgcttctttgcagtggagcctgacactggcgtggtgtggctccggcagccactggacagagagaccaagtcagagttcaccgtggagttctctgtcagcgaccaccagggggtgatcacacggaaggtgaacatccaggtcggggatgtgaatgacaacgcgcccacatttcacaatcagccctacagcgtccgcatccctgagaatacaccagtggggacgcccatcttcatcgtgaatgccacagaccccgacttgggggcagggggcagcgtcctctactccttccagcccccctcccaattcttcgccattgacagcgcccgcggtatcgtcacagtgatccgggagctggactacgagaccacacaggcctaccagctcacggtcaacgccacagatcaagacaagaccaggcctctgtccaccctggccaacttggccatcatcatcacagatgtccaggacatggaccccatcttcatcaacctgccttacagcaccaacatctacgagcattctcctccgggcacgacggtgcgcatcatcaccgccatagaccaggataaaggacgtccccggggcattggctacaccatcgtttcagggaataccaacagcatctttgccctggactacatcagcggagtgctgaccttgaatggcctgctggaccgggagaaccccctgtacagccatggcttcatcctgactgtgaagggcacggagctgaacgatgaccgcaccccatctgacgctacagtcaccacgaccttcaatatcctggttattgacatcaatgacaatgccccggagttcaacagctccgagtacagcgtggccatcactgagctggcacaggtcggctttgcccttccactcttcatccaggtggtggacaaggatgagaatttgggcctgaacagcatgtttgaggtgtacttggtggggaacaactcccaccacttcatcatctccccgacctccgtccaggggaaggcggacattcgtattcgggtggccatcccactggactacgagaccgtggaccgctacgactttgatctctttgccaatgagagtgtgcctgaccatgtgggctatgccaaggtgaagatcactctcatcaatgaaaatgacaaccggcccatcttcagccagccactgtacaacatcagcctgtacgagaacgtcaccgtggggacctctgtgctgacagtcctggcaactgacaatgatgcaggcacctttggggaagtcagctacttcttcagtgatgaccctgacaggttctcgctggacaaggacacgggactcatcatgctgattgccaggctggactatgagctcatccagcgcttcaccctgacgatcattgcccgggacgggggcggcgaggagaccacaggccgggtcaggatcaatgtgttggatgtcaacgacaacgtgcccaccttccagaaggatgcctacgtgggtgctctgcgggagaacgagccttctgtcacacagctggtgcggctccgggcaacagatgaagactcccctcccaacaaccagatcacctacagcattgtcagtgcatctgcctttggcagctacttcgacatcagcctgtacgagggctatggagtgatcagcgtcagtcgccccctggattatgaacagatatccaatgggctgatttatctgacggtcatggccatggatgctggcaacccccctctcaacagcaccgtccctgtcaccatcgaggtgtttgatgagaatgacaaccctcccaccttcagcaagcccgcctacttcgtctccgtggtggagaacatcatggcaggagccacggtgctgttcctgaatgccacagacctggaccgctcccgggagtacggccaggagtccatcatctactccttggaaggctccacccagtttcggatcaatgcccgctcaggggaaatcaccaccacgtctctgcttgaccgagagaccaagtctgaatacatcctcatcgttcgcgcagtggacgggggtgtgggccacaaccagaaaactggcatcgccaccgtaaacatcaccctcctggacatcaacgacaaccaccccacgtggaaggacgcaccctactacatcaacctggtggagatgacccctccagactctgacgtgaccacggtggtggctgttgacccagacctgggggagaatggcaccctggtgtacagcatccagccacccaacaagttctacagcctcaacagcaccacgggcaagatccgcaccacccacgccatgctggaccgggagaaccccgacccccatgaggccgagctgatgcgcaaaatcgtcgtctctgttactgactgtggcaggccccctctgaaagccaccagcagtgccacagtgtttgtgaacctcttggatctcaatgacaatgaccccacctttcagaacctgccttttgtggccgaggtgcttgaaggcatcccggcgggggtctccatctaccaagtggtggccatcgacctcgatgagggcctgaacggcctggtgtcctaccgcatgccggtgggcatgccccgcatggacttcctcatcaacagcagcagcggcgtggtggtcaccaccaccgagctggaccgcgagcgcatcgcggagtaccagctgcgggtggtggccagtgatgcaggcacgcccaccaagagctccaccagcacgctcaccatccatgtgctggatgtgaacgacgagacgcccaccttc

SEQ ID NO: 3323 - DNA, 1677 bp, Homo Sapiens
agctgggtctggaaccagttctttgtcattgaggaatatgctggtccagagcctgttctcattggcaagctgcactcggatgttgaccggggagagggccgcaccaagtacctgttgaccggggagggggcaggcaccgtatttgtgattgatgaggccacaggcaatattcatgttaccaagagccttgaccgggaggaaaaggcgcaatatgtgctactggcccaagccgtggaccgagcctccaaccggcccctggagcccccatcagagttcatcatcaaagtgcaagacatcaacgacaatccacccatttttccccttgggccctaccatgccaccgtgcccgagatgtccaatgtcgggacatcagtgatccaggtgactgctcacgatgctgatgaccccagctatgggaacagtgccaagctggtgtacactgttctggatggactgcctttcttctctgtggacccccagactggagtggtgcgtacagccatccccaacatggaccgggagacacaggaggagttcttggtggtgatccaggccaaggacatgggcggccacatgggggggctgtcaggcagcactacggtgactgtcacgctcagcgatgtcaacgacaacccccccaagttcccacagagcctataccagttctccgtggtggagacagctggacctggcacactggtgggccggctccgggcccaggacccagacctgggggacaacgccctgatggcatacagcatcctggatggggaggggtctgaggccttcagcatcagcacagacttgcagggtcgagacgggctcctcactgtccgcaagcccctagactttgagagccagcgctcctactccttccgtgtcgaggccaccaacacgctcattgacccagcctatctgcggcgagggcccttcaaggatgtggcctctgtgcgtgtggcagtgcaagatgccccagagccacctgccttcacccaggctgcctaccacctgacagtgcctgagaacaaggccccggggaccctggtaggccagatctccgcggctgacctggactcccctgccagcccaatcagatactccatcctcccccactcagatccggagcgttgcttctctatccagcccgaggaaggcaccatccatacagcagcacccctggatcgcgaggctcgcgcctggcacaacctcactgtgctggctacagagctcgacagttctgcacaggcctcgcgcgtgcaagtggccatccagaccctggatgagaatgacaatgctccccagctggctgagccctacgatacttttgtgtgtgactctgcagctcctggccagctgattcaggtcatccgggccctggacagggatgaagttggcaacagtagccatgtctcctttcaaggtcctctgggccctgatgccaactttactgtccaggacaaccgagatggctccgccagcctgctgctgccctcccgccctgctccaccccgccatgccccctacttggttcccatagaactgtgggactgggggcagccggcgctgagcagcactgccacagtgactgttagtgtgtgccgctgccagcctgacggctctgtggcatcctgctggcctgaggctcacctctcagctgctgggctcagcaccggcgcc

SEQ ID NO: 3324 - DNA, 1782 bp, Homo Sapiens
attgacagtgttcaacaggaaacagatgatcttactaagcaaacaaagtgtcactataagttccaggaaaagatctaccagcctctacggcgatccaagagaagatgggttatcaccaccttggagatggaggaggaagacccgggaccctttcccaaactcattggtgagctgttcaataatatgtcttataacatgtcactaatgtatctaatcagtggacctggtgtggatgaatatccagagattggtttgttttctctagaagatcatgagaacggaaggatatatgttcaccgccctgtcgatcgagaaatgacaccatctttcacggtttattttgatgttgtggagcgctcaacaggaaaaattgtggatacatccttgattttcaacattaggatcagtgatgtgaatgatcatgcaccccagtttccagagaaggaatttaacatcactgtgcaagaaaaccaatctgcagggcaacctatttttcagatgttagcagtcgatttggatgaagaaaacactccaaattctcaagtcctttacttcctcatttctcaaacaccattactgaaagaaagtggtttccgggttgatcgccttagtggagaaatacgactctctggctgcttagattatgagaccgctcctcagtttacactgctaatcagagccagggactgtggagaaccgtcactgtcatccacgaccaccgttcacgtggatgtgcaagaaggcaacaaccacaggcctgcatttacccaggagaactataaggttcagattcctgaaggccgagccagccagggcgtgttgcgtctcctggttcaagatcgagattctccatttacatcagcttggagagcaaaattcaacatattgcatggcaatgaagaggggcattttgacatttcgactgaccctgagaccaacgaagggatattaaatgttatcaagcctttggattatgagactcgcccagcgcaaagcctcatcattgtcgtggagaatgaggagaggctcgtcttctgtgagagaggaaagcttcagccgccaaggaaggcagcagccagcgccactgtgagtgtgcaggtgacagacgccaacgacccaccagcctttcacccccagagcttcattgtcaataaagaggagggcgccaggcctgggaccctgttgggaacttttaatgccatggatccagacagccagataagatatgaactggttcatgacccagcaaattgggtcagcgtcgacaaaaactccggagtggtcatcaccgtggagccaattgaccgagaatcccctcatgtaaataacagtttttatgtaatcatcattcacgctgttgatgatggcttcccaccgcagactgctacagggaccctaatgctcttcctgtctgacatcaatgacaacgtcccgactctccggccacgttcccgctacatggaggtctgtgagtctgctgtgcatgagcccctccacatcgaggcagaggatccggacctggagccgttctctgacccatttacatttgaattggacaatacctggggaaatgcggaggacacatggaagttggggagaaattggggtcaatcagttgaacttttaaccttgagaagcctgccacgtggtaattacttggtgccactcttcattggagacaaacagggactttcccagaagcaaactgtccatgtaaggatctgcccctgtgccagtgggctcacatgtgtggagcttgcagatgcagaagtggggcttcat

SEQ ID NO: 3325 - DNA, 1641 bp, Homo Sapiens
gattgggtggttgctccaatatctgtccctgaaaatggcaagggtcccttcccccagagactgaatcagctcaagtctaataaagatagagacaccaagattttctacagcatcacggggccgggggcagacagcccccctgagggtgtcttcgctgtagagaaggagacaggctggttgttgttgaataagccactggaccgggaggagattgccaagtatgagctctttggccacgctgtgtcagagaatggtgcctcagtggaggaccccatgaacatctccatcatagtgaccgaccagaatgaccacaagcccaagtttacccaggacaccttccgagggagtgtcttagagggagtcctaccaggtacttctgtgatgcagatgacagccacagatgaggatgatgccatctacacctacaatggggtggttgcttactccatccatagccaagaaccaaaggacccacacgacctcatgttcacaattcaccggagcacaggcaccatcagcgtcatctccagtggcctggaccgggaaaaagtccctgagtacacactgaccatccaggccacagacatggatggggacggctccaccaccacggcagtggcagtagtggagatccttgatgccaatgacaatgctcccatgtttgacccccagaagtacgaggcccatgtgcctgagaatgcagtgggccatgaggtgcagaggctgacggtcactgatctggacgcccccaactcaccagcgtggcgtgccacctaccttatcatgggcggtgacgacggggaccattttaccatcaccacccaccctgagagcaaccagggcatcctgacaaccaggaagggtttggattttgaggccaaaaaccagcacaccctgtacgttgaagtgaccaacgaggccccttttgtgctgaagctcccaacctccacagccaccatagtggtccacgtggaggatgtgaatgaggcacctgtgtttgtcccaccctccaaagtcgttgaggtccaggagggcatccccactggggagcctgtgtgtgtctacactgcagaagaccctgacaaggagaatcaaaagatcagctaccgcatcctgagagacccagcagggtggctagccatggacccagacagtgggcaggtcacagctgtgggcaccctcgaccgtgaggatgagcagtttgtgaggaacaacatctatgaagtcatggtcttggccatggacaatggaagccctcccaccactggcacgggaacccttctgctaacactgattgatgtcaacgaccatggcccagtccctgagccccgtcagatcaccatctgcaaccaaagccctgtgcgccaggtgctgaacatcacggacaaggacctgtctccccacacctcccctttccaggcccagctcacagatgactcagacatctactggacggcagaggtcaacgaggaaggtgacacagtggtcttgtccctgaagaagttcctgaagcaggatacatatgacgtgcacctttctctgtctgaccatggcaacaaagagcagctgacggtgatcagggccactgtgtgcgactgccatggccatgtcgaaacctgccctggaccctggaaaggaggt

SEQ ID NO: 3326 - DNA, 1695 bp, Homo Sapiens
gactgggtcatcccgcccatcaacgtgcccgagaactcgcgcgggcccttcccgcagcagctcgtgaggatccggtccgacaaagacaatgacatccccatccggtacagcatcacgggagtgggcgccgaccagccccccatggaggtcttcagcattgactccatgtccggccggatgtacgtcacaaggcccatggaccgggaggagcacgcctcttaccacctccgagcccacgctgtggacatgaatggcaacaaggtggagaaccccatcgacctgtacatctacgtcatcgacatgaatgacaaccgccctgagttcatcaaccaggtctacaacggctccgtggacgagggctccaagccaggcacctacgtgatgaccgtcacggccaacgatgctgacgacagcaccacggccaacgggatggtgcggtaccggatcgtgacccagaccccacagagcccgtcccagaatatgttcaccatcaacagcgagactggagatatcgtcacagtggcggctggcctggaccgagagaaagttcagcagtacacagtcatcgttcaggccacagatatggaaggaaatctcaactatggcctctcaaacacagccacagccatcatcacggtgacagatgtgaatgacaacccgccagaatttaccgccagcacgtttgcaggggaggtccccgaaaaccgcgtggagaccgtggtcgcaaacctcacggtgatggaccgagatcagccccactctccaaactggaatgccgtttaccgcatcatcagtggggatccatccgggcacttcagcgtccgcacagatcccgtaaccaacgagggcatggtcaccgtggtgaaggcagtcgactacgagctcaacagagctttcatgctgacagtgatggtgtccaaccaggcgcccctggccagcggaatccagatgtccttccagtccacggcaggggtgaccatctccatcatggacatcaacgaggctccctacttcccctcaaaccacaagctgatccgcctggaggagggcgtgccccccggcaccgtgctgaccacgttttcagctgtggaccctgaccggttcatgcagcaggctgtgagatactcaaagctgtcagacccagcgagctggctgcacatcaatgccaccaacggccagatcaccacggcggcagtgctggaccgtgagtccctctacaccaaaaacaacgtctacgaggccaccttcctggcagctgacaatgggatacccccggccagcggcaccgggaccctccagatctatctcattgacatcaacgacaacgcccctgagctgctgcccaaggaggcgcagatctgcgagaagcccaacctgaacgccatcaacatcacggcggccgacgctgacgtcgaccccaacatcggcccctacgtcttcgagctgccctttgtcccggcggccgtgcggaagaactggaccatcacccgcctgaacggtgactatgcccaactcagcttgcgcatcctgtacctggaggccgggatgtatgacgtccccatcatcgtcacagactctggaaaccctcccctgtccaacacgtccatcatcaaagtcaaggtgtgcccatgtgatgacaacggggactgcaccaccattggcgcagtggcagcggctggtctgggcaccggtgcc

SEQ ID NO: 3327 - DNA, 1290 bp, Homo Sapiens
gattggatttggaaccagatgcacattgatgaagagaaaaacacctcacttccccatcatgtaggcaagatcaagtcaagcgtgagtcgcaagaatgccaagtacctgctcaaaggagaatatgtgggcaaggtcttccgggtcgatgcagagacaggagacgtgttcgccattgagaggctggaccgggagaatatctcagagtaccacctcactgctgtcattgtggacaaggacactggtgaaaacctggagactccttccagcttcaccatcaaagttcatgacgtgaacgacaactggcctgtgttcacgcatcggttgttcaatgcgtccgtgcctgagtcgtcggctgtggggacctcagtcatctctgtgacagcagtggatgcagacgaccccactgtgggagaccacgcctctgtcatgtaccaaatcctgaaggggaaagagtattttgccatcgataattctggacgtattatcacaataacgaaaagcttggaccgagagaagcaggccaggtatgagatcgtggtggaagcgcgagatgcccagggcctccggggggactcgggcacggccaccgtgctggtcactctgcaagacatcaatgacaacttccccttcttcacccagaccaagtacacatttgtcgtgcctgaagacacccgtgtgggcacctctgtgggctctctgtttgttgaggacccagatgagccccagaaccggatgaccaagtacagcatcttgcggggcgactaccaggacgctttcaccattgagacaaaccccgcccacaacgagggcatcatcaagcccatgaagcctctggattatgaatacatccagcaatacagcttcatcgtcgaggccacagaccccaccatcgacctccgatacatgagccctcccgcgggaaacagagcccaggtcattatcaacatcacagatgtggacgagccccccattttccagctggtcctgcagatctccgcaatagacaaggacataacaccacgaaacgtgaagttcaaattcaccttgaatactgagaacaactttaccctcacggataatcacgataacacggccaacatcacagtcaagtatgggcagtttgaccgggagcataccaaggtccacttcctacccgtggtcatctcagacaatgggatgccaagtcgcacgggcaccagcacgctgaccgtggccgtgtgcaagtgcaacgagcagggcgagttcaccttctgcgaggatatggccgcccaggtggacgtgagcatccag

SEQ ID NO: 3328 - DNA, 1686 bp, Homo Sapiens
agctggatgtggaatcagttctttctcctggaggaatacacaggatccgattatcagtatgtgggcaagttacattcagaccaggatagaggagatggatcacttaaatatatcctttcaggagatggagcaggagatctcttcattattaatgaaaacacaggcgacatacaggccaccaagaggctggacagggaagaaaaacccgtttacatccttcgagctcaagctataaacagaaggacagggagacccgtggagcccgagtctgaattcatcatcaagatccatgacatcaatgacaatgaaccaatattcaccaaggaggtttacacagccactgtccctgaaatgtctgatgtcggtacatttgttgtccaagtcactgcgacggatgcagatgatccaacatatgggaacagtgctaaagttgtctacagtattctacagggacagccctatttttcagttgaatcagaaacaggtattatcaagacagctttgctcaacatggatcgagaaaacagggagcagtaccaagtggtgattcaagccaaggatatgggcggccagatgggaggattatctgggaccaccaccgtgaacatcacactgactgatgtcaacgacaaccctccccgattcccccagagtacataccagtttaaaactcctgaatcttctccaccggggacaccaattggcagaatcaaagccagcgatgctgatgtgggagaaaatgctgaaattgagtacagcatcacagacggtgaggggctggatatgtttgatgtcatcaccgaccaggaaacccaggaagggattataactgtcaaaaagctcttggactttgaaaagaagaaagtgtatacccttaaagtggaagcctccaatccttatgttgagccacgatttctctacttggggcctttcaaagattcagccacggttagaattgtggtggaggatgtagatgagccacctgtcttcagcaaactggcctacatcttacaaataagagaagatgctcagataaacaccacaataggctccgtcacagcccaagatccagatgctgccaggaatcctgtcaagtactctgtagatcgacacacagatatggacagaatattcaacattgattctggaaatggttcgatttttacatcgaaacttcttgaccgagaaacactgctatggcacaacattacagtgatagcaacagagatcaataatccaaagcaaagtagtcgagtacctctatatattaaagttctagatgtcaatgacaacgccccagaatttgctgagttctatgaaacttttgtctgtgaaaaagcaaaggcagatcagttgattcagaccttgcatgctgttgacaaggatgacccttatagtgggcaccaattttcgttttccttggcccctgaagcagccagtggctcaaactttaccattcaagacaacaaagacaacacggcgggaatcttaactcggaaaaatggctataatagacacgagatgagcacctatctcttgcctgtggtcatttcagacaacgactacccagttcaaagcagcactgggacagtgactgtccgggtctgtgcatgtgaccaccacgggaacatgcaatcctgccacgcggaggcgctcatccaccccacgggactgagcacgggggct

SEQ ID NO: 3329 - DNA, 1680 bp, Homo Sapiens
agctgggtgtggaatcagttctttgtgctggaggaatacatgggttcagaccccctctatgtaggaaagcttcactctgatgttgataaaggagatggttccatcaaatacatcttgtcaggcgaaggggcaagttccattttcattattgatgagaacactggggatattcatgccaccaagagactggatcgtgaggagcaggcctactacacgctccgagctcaagcgctggataggctcaccaacgaacccgtggagcccgagtcggagtttgtcatcaaaattcaggatatcaacgacaatgaacccaaatttttggatggcccatacacggcaggagttcccgaaatgtctcccgtggggacctcagtggtacaagtgacagcgacggatgctgatgatcctacatatggcaacagtgccagagtggtctacagtattctgcaaggacagccgtacttctcagtggagccaaagacaggagtcatcaagactgcccttccaaacatggatagagaggctaaagaccagtatttgcttgttattcaggcaaaggatatggttggtcaaaatggaggactgtcaggaactacatcagtcactgtgaccctaactgatgtcaacgataatccacctcgctttcctcgaaggtcttatcaatataacgtcccagagtcattacctgtagcctcagttgtggccagaattaaagctgctgatgcagatattggagctaatgctgaaatggagtacaagattgtggatggtgatggtttgggcatttttaagatttctgttgacaaagaaacccaggaaggaatcattactatacagaaggagctggattttgaagccaaaacaagttacacgctacggatagaagctgcaaataaagatgccgaccctcgctttctgagcttgggtccgttcagtgacacgacaactgtgaagataattgtggaagatgtagatgagccccctgtgttctcttcacccttgtaccctatggaggtgtcggaagctacccaggttgggaatatcattggcactgtagcagctcatgacccagattcttccaatagccctgtgaggtactcaattgacagaaacacagacttggagagatacttcaatattgatgccaacagtggggtcatcacaactgccaagtctttggatcgagagacaaatgctattcacaatatcacagtccttgcaatggagagccagaatccatctcaagtaggaagaggctatgtggccatcactatacttgacatcaatgataacgcccctgaatttgccatggactatgagaccaccgtctgtgaaaatgcccagccggggcaggttatccagaaaatcagtgctgtggataaagatgagccatccaatggacaccagttttacttcagcttaacaacggatgcaacaaataaccacaacttttcattgaaagataacaaagacaacacagcctcaatactgaccaggagaaacggcttccggagacaggaacaatcagtttactatctgccaattttcattgtggacagtggatctccctcacttagcagcaccagcaccctcaccatccgcgtgtgtgactgtgatgctgacggcgtagcccagacctgcaatgcagaggcctatgtcctacctgctggcctcagtaca

SEQ ID NO: 3330 - DNA, 1680 bp, Homo Sapiens
ggctgggtttggaatcaaatgtttgtcctggaagagttttctggacctgaaccgattcttgttggccggctacacacagacctggatcctgggagcaaaaaaatcaagtatatcctatcaggtgatggagctgggaccatatttcaaataaatgatgtaactggagatatccatgctataaaaagacttgaccgggaggaaaaggctgagtataccctaacagctcaagcagtggactgggagacaagcaaacctctggagcctccttctgaatttattattaaagttcaagacatcaatgacaatgcaccagagtttcttaatggaccctatcatgctactgtgccagaaatgtccattttgggtacatctgtcactaacgtcactgcgaccgacgctgatgacccagtttatggaaacagtgcaaagttggtttatagtatattggaagggcagccttatttttccattgagcctgaaacagctattataaaaactgcccttcccaacatggacagagaagccaaggaggagtacctggttgttatccaagccaaagatatgggtggacactctggtggcctgtctgggaccacgacacttacagtgactcttactgatgttaatgacaatcctccaaaatttgcacagagcctgtatcacttctcagtaccggaagatgtggttcttggcactgcaataggaagggtgaaggccaatgatcaggatattggtgaaaatgcacagtcatcatatgatatcatcgatggagatggaacagcactttttgaaatcacttctgatgcccaggcccaggatggcattataaggctaagaaaacctctggactttgagaccaaaaaatcctatacgctaaaggtagaggcagccaatgtccatattgacccacgcttcagtggcagggggccctttaaagacacggcgacagtcaaaatcgtggttgaagatgctgatgagcctccggtcttctcttcaccgacttacctacttgaagttcatgaaaatgctgctctaaactccgtgattgggcaagtgactgctcgtgaccctgatatcacttccagtcctataaggttttccatcgaccggcacactgacctggagaggcagttcaacattaatgcagacgatgggaagataacgctggcaacaccacttgacagagaattaagtgtatggcacaacataacaatcattgctactgaaattaggaaccacagtcagatatcacgagtacctgttgctattaaagtgctggatgtcaatgacaacgcccctgaattcgcatccgaatatgaggcatttttatgtgaaaatggaaaacccggccaagtcattcaaactgttagcgccatggacaaagatgatcccaaaaacggacattatttcttatacagtctccttccagaaatggtcaacaatccgaatttcaccatcaagaaaaatgaagataattccctcagtattttggcaaagcataatggattcaaccgccagaagcaagaagtctatcttttaccaatcataatcagtgatagtggaaatcctccactgagcagcactagcaccttgacaatcagggtctgtggctgcagcaatgacggtgtcgtccagtcttgcaatgtcgaagcttatgtccttccaattggactcagtatg

SEQ ID NO: 3331 - DNA, 1686 bp, Homo Sapiens
ggctggatgtggaatcagttcttcttattggaagagtacacaggtactgacacacaatatgtaggcaagcttcacactgaccaagataaaggagatggaaatttaaaatacatactaacaggagatggggctggcagtctatttgttatagatgaaaatacaggagacattcatgctgcaaagaaactagacagagaagaaaaatctctgtacattcttcgtgccaaggctatagacagaaaaactgggcggcaggtggaaccggaatcggaatttatcattaaaatacatgatatcaatgacaatgagccaaaatttacaaaagacttatacactgccagtgttcctgaaatgtctggagtcggtacatctgttatacaagtaactgcaacagatgcagatgacgccaactatggaaatagtgccaaagtggtctatagcatattgcaaggacagccatatttttcagtggacccagaatcaggcataataaaaactgcattaccagacatgagcagagaaaatagagagcagtaccaggttgttatacaggccaaagacatgggtggccagatgggaggcctttctggaaccaccacagtgaacatcacgctgacagatgtcaacaacaaccctcctcgatttccccagagtacgtatcaatttaattctcctgagtctgtacctcttggaactcatcttggaaggataaaagccaatgaccctgacgtgggggaaaatgcagaaatggagtatagcattgctgaaggagatggtgcagacatgttcgatgtcatcactgacaaggatacacaggaagggattataactgtcaaacagaatttagattttgaaaatcaaatgctctatactttaagagtggatgcaagtaacactcaccctgatccacgattcttacacctgggacctttcaaagatacagctgtggtcaaaatatctgtggaagatatagatgagcctcctgtgttcactaaagtctcttacttgatagaagtagatgaagatgtaaaggagggcagtatcattggacaggttacagcatacgatccagatgccaggaacaatttaataaagtactctgttgatcggcatactgatatggaccgtatttttggtattcactcagaaaatggttctattttcactttgaaagcccttgaccgggaatcatctccttggcataacatcactgttacagccacagaaataaataacccaaaacaaagtagccacatccctgtcttcatcagaattctagatataaatgaccatgctccggaatttgccatgtattatgaaacatttgtttgtgaaaatgcaaaacctgggcagttgattcagactgtcagtgtcatggataaggatgaccctccccgaggtcacaaattcttttttgaaccagtgccagaatttactctcaatccgaatttcaccattgtagataataaagataatacagcaggaatcatgactcggaaagatggctacagtcgcaacaaaatgagcacctacttattgccgattttaatctttgacaacgattatccaattcaaagcagcactggtacactcactatccgtgtgtgtgcctgcgataatcaaggaaacatgcaatcctgcaccgcagaagccctgatcctttcagccggcctgagcacgggagct

SEQ ID NO: 3332 - DNA, 2814 bp, Homo Sapiens
gacttggcaccttattttacttctgagccgctctctgctgtccagaaacttggtggacctgtagtactgcattgttctgctcaacctgtgaccactcgtatctcatggctgcataacggaaaaacattggatggaaacctggaacatattaagattcatcaggggactctgacaattctttctctcaactcctctcttttgggttactaccagtgccttgccaacaatagcatcggtgccattgtgagtggccctgcgacagtatctgtggcagttcttggtgattttggttcatccacaaagcatgttattacagcagaagaaaaaagtgctggtttcattggctgcagggtaccggagagtaaccccaaagctgaggtgcgctataaaatccggggaaaatggctggaacattccacagagaattacttaatccttccatcaggaaatcttcagattttgaatgtatccttagaggacaagggatcatacaaatgtgcagcttataatcctgtcacacatcaattaaaagttgaacctattggccgaaagctccttgtgagtcgtccttcttcagatgatgttcacattcttcaccccacccattcacaggcattagctgttctttctcgtagccctgtaaccttggagtgtgtggtgagtggggtcccggctcctcaagtgtattggctaaaggacgggcaggacattgcaccagaaagcaactggagaaggttgtattctcatcttgccactgatagcgttgacccggcggactccggaaactattcctgcatggcgggaaacaagtctggagatgtaaaatatgtgacttacatggttaatgtacttgaacatgcttccatttctaaaggactacaggatcagatagtgtctctgggtgccacagtacactttacctgcgacgttcatgggaacccagcccccaactgtacctggtttcacaatgcacagcctattcatccttctgcacgacatctaactgcaggaaacggactgaaaatcagtggggttactgtggaagatgttgggatgtatcagtgtgtagcagataatgggattggatttatgcactctactggaagacttgaaattgaaaatgacggtggattcaagccagttataattacggcaccagtaagtgcaaaggttgcagacggagactttgttactctgtcctgcaatgccagtgggctgccggttccggtcattcgttggtatgacagccatggattgataaccagccatccatctcaagtcctgagatcgaaatcccgaaaatcacagttatcaagacctgagggcttgaacctggagcctgtgtacttcgtcctgtcccaagctggtgcaagctctctccatattcaggctgtgactcaggaacatgcggggaaatacatctgcgaagctgcaaatgaacatggtaccacacaggcagaagcatctctcatggttgttccttttgaaacaaatacaaaagcagagacagtcacacttcctgatgctgctcagaatgatgacagaagtaagagagatggttcagaaactgggttactgagctcatttccggtgaaggtccatcccagtgcagtggaatcagcaccagagaaaaacgccagcggcatctctgttcctgatgcccccatcatactgagccccccacagacccacacaccagacacgtacaacctggtgtggagggcaggcaaggatggtgggctgcccatcaatgcttactttgtgaagtatcgaaagctggatgatggggttggcatgctgggaagctggcacacggttcgagtcccaggaagtgaaaatgagctccatttagctgagctggagccatctagtctttatgaagtcttgatggtagcaagaagcgcagcaggtgaaggccaacctgccatgcttaccttccgaaccagcaaagaaaaaacagcgtcatcaaaaaacacccaggcatcctctccacccgtgggcatccctaagtatcccgttgtttcagaggctgcaaacaacaattttggagtggtacttacagattcctctaggcacagtggagttccagaggcaccagatcggcctaccatctccactgcatcagagacatcagtctatgtcacttggattcctcgggcaaacgggggttctccaatcactgccttcaaagtcgaatataaacggatgaggaccagcaattggctggtggcagctgaagacatccctccttccaaactttcagtggaagttcgtagtttagaaccaggttcaacatacaaatttagggtcattgccatcaaccattatggtgagagttttcggagttcagcatctcgtccttatcaagtggttgggttccccaatcgcttttccagccgtccaataactggacctcacattgcatacacagaggctgtcagcgatactcagatcatgctaaagtggacgtacattccatcaagtaacaataacactcccattcaaggattttatatctattaccgaccaacagatagtgacaatgacagtgattacaagagggatgttgtagaaggttcaaagcagtggcacatgattggccacctgcagccagaaacctcctatgacattaaaatgcaatgcttcaatgaaggaggagaaagtgaatttagcaatgtgatgatctgcgagactaaagtgaaacgtgttcctggagcttctgaatatcctgtcaaagacttgagtacccctccaaattctttgggaagtggaggaaatgtggggcctgcaaccagccctgccagaagcagtgac

SEQ ID NO: 3333 - DNA, 960 bp, Homo Sapiens
cagaagctctctaagcacaagacaccagcacagccacagctcaaagcggccaactgctgtgaggaggtgaaggagctcaaggcccaagttgccaaccttagcagcctgctgagtgaactgaacaagaagcaggagagggactgggtcagcgtggtcatgcaggtgatggagctggagagcaacagcaagcgcatggagtcgcggctcacagatgctgagagcaagtactccgagatgaacaaccaaattgacatcatgcagctgcaggcagcacagacggtcactcagacctccgcagatgccatctacgactgctcttccctctaccagaagaactaccgcatctctggagtgtataagcttcctcctgatgacttcctgggcagccctgaactggaggtgttctgtgacatggagacttcaggcggaggctggaccatcatccagagacgaaaaagtggccttgtctccttctaccgggactggaagcagtacaagcagggctttggcagcatccgtggggacttctggctggggaacgaacacatccaccggctctccagacagccaacccggctgcgtgtagagatggaggactgggagggcaacctgcgctacgctgagtatagccactttgttttgggcaatgaactcaacagctatcgcctcttcctggggaactacactggcaatgtggggaacgacgccctccagtatcataacaacacagccttcagcaccaaggacaaggacaatgacaactgcttggacaagtgtgcacagctccgcaaaggtggctactggtacaactgctgcacagactccaacctcaatggagtgtactaccgcctgggtgagcacaataagcacctggatggcatcacctggtatggctggcatggatctacctactccctcaaacgggtggagatgaaaatccgcccagaagacttcaagcct

SEQ ID NO: 3334 - DNA, 1182 bp, Homo Sapiens
cagctcactactgaatccatgccattcaatgttgcagaggggaaggaggttcttctccttgtccacaatctgccccagcaactttttggctacagctggtacaaaggggaaagagtggatggcaaccgtcaaattgtaggatatgcaataggaactcaacaagctaccccagggcccgcaaacagcggtcgagagacaatataccccaatgcatccctgctgatccagaacgtcacccagaatgacacaggattctacaccctacaagtcataaagtcagatcttgtgaatgaagaagcaactggacagttccatgtatacccggagctgcccaagccctccatctccagcaacaactccaaccctgtggaggacaaggatgctgtggccttcacctgtgaacctgagactcaggacacaacctacctgtggtggataaacaatcagagcctcccggtcagtcccaggctgcagctgtccaatggcaacaggaccctcactctactcagtgtcacaaggaatgacacaggaccctatgagtgtgaaatacagaacccagtgagtgcgaaccgcagtgacccagtcaccttgaatgtcacctatggcccggacacccccaccatttccccttcagacacctattaccgtccaggggcaaacctcagcctctcctgctatgcagcctctaacccacctgcacagtactcctggcttatcaatggaacattccagcaaagcacacaagagctctttatccctaacatcactgtgaataatagtggatcctatacctgccacgccaataactcagtcactggctgcaacaggaccacagtcaagacgatcatagtcactgagctaagtccagtagtagcaaagccccaaatcaaagccagcaagaccacagtcacaggagataaggactctgtgaacctgacctgctccacaaatgacactggaatctccatccgttggttcttcaaaaaccagagtctcccgtcctcggagaggatgaagctgtcccagggcaacaccaccctcagcataaaccctgtcaagagggaggatgctgggacgtattggtgtgaggtcttcaacccaatcagtaagaaccaaagcgaccccatcatgctgaacgtaaactataatgctctaccacaagaaaatggcctctcacctggg

SEQ ID NO: 3335 - DNA, 1215 bp, Homo Sapiens
gagatctctatcaccctggagcctgcccagccgagcgaaggggacaacgtcacgctggtcgtccatgggctttcgggggaactgctcgcctacagctggtatgcggggcccacactcagcgtgtcatacctggtggccagctacatcgtgagcacaggcgatgagactcctggcccggcccacacggggcgggaggctgtgcgccccgatggcagcctggacatccagggcatcctgccccggcactcaggcacctacatcctgcagaccttcaacaggcagttgcagaccgaggtgggctacggacacgtgcaggtccatgagatcctggcccagcccacagtcttggccaacagcacagcgctggtggaacgtcgagacaccctgcgccttatgtgcagcagccccagccccaccgccgaggtccgctggttcttcaacggtggggccctgcccgtcgctctccgcctgggcctgtcccctgacggccgggtgctggccaggcatggcatccgccgggaggaggccggcgcctatcagtgtgaggtgtggaacccggtcagtgtcagccgcagcgagcccatcaacctgaccgtgtactttggcccagagcgtgtggccatcctccaggattccaccacccgcacaggctgcaccatcaaagttgacttcaacacgtccctcaccctgtggtgcgtgtccaggtcctgcccagagcccgagtatgtgtggaccttcaacgggcaggccctaaagaacggccaagaccacctcaacatcagcagcatgacagccgcccaggaggggacgtacacatgtattgcgaagaacaccaagaccctgctatctggatctgcctcagtcgtggtcaagctctctgctgcagcagttgccacgatgatcgtgcccgtgcccaccaagccaacggagggccaggacgtaacactgaccgtgcagggctaccccaaggacctgctggtctacgcctggtaccgcgggcctgcctccgagcccaaccggctgctcagccagctgccgtcaggaacctggattgcaggccccgcgcacacaggccgggaggtgggcttccccaactgctcgctgttggtgcagaagctgaacctcacagacactggccgctacacactcaagaccgtcacagtgcagggcaagactgagacactggaagtggagctgcaggtggcccccctgggg

SEQ ID NO: 3336 - DNA, 1062 bp, Homo Sapiens
cagatttttatcacccaaaccctaggtattaagggttataggacagtcgtcgcgttggataaggttccagaggacgtacaagaatactcctggtattggggggctaacgactctgcgggtaatatgatcatctcacacaagcctccgagcgcccagcaaccgggacccatgtatacaggtagagagcgtgtaaatagggaaggttcactactaataagaccaactgcattaaatgataccgggaactataccgtgcgtgttgtagccggaaacgaaacgcagcgtgccacaggttggctggaggtattggaattaggaagcaatctggggataagtgtgaacgcttcatccttagtagaaaatatggactctgtagctgccgattgtctaacgaatgtgaccaatataacctggtatgtaaatgacgtgcccacttcttcctctgacaggatgacaatatcacctgacgggaagaccttagtaatattgagagtttctcgttatgaccgtaccatacagtgcatgatagagagctttcccgagatattccaaaggagtgagcgtatttcattaacggttgcttatggccccgactacgtgctattgaggagtaatcccgatgactttaacgggattgtgactgcggaaatcgggagccaagtagaaatggaatgtatctgttacagcttccttgatttaaaatatcattggattcataacggtagcctattgaattttagcgacgcaaagatgaacctttcttcattagcgtgggaacaaatgggccgttacagatgcaccgtagaaaatccagtaacacagttgataatgtatatggatgttaggatacaggccccgcatgaagaccttacatgttgcccacagaggtttctgcatcttaggattcacggggacgttcctcaccatgccgacagcgctggatggaggttgcacctgtggtcacccgacccttgcagcgatcaaccactactaaatcaagataaaagcggcagtatgtccgtccacccaagaccggaggacaaaacgagaagggcttctcgt

SEQ ID NO: 3337 - DNA, 375 bp, Homo Sapiens
gcactttacattcaaaaaattccagagcaacctcagaaaaatcaagaccttcttctgtcagtacagggtgtgccggatacgtttcaggacttcaattggtatcttggggaggagacatacggtggaactaggttgtttacatacatacctggtattcaaagacctcagagggacggaagtgccatgggacagagagacatcgtgggcttccctaatggatctatgttgctacgtcgtgcccagccaaccgatagcggcacttatcaggttgcaataactataaattctgaatggactatgaaagccaaaacggaagtgcaggttgctgaaaaaaacaaagagctgccctcaacgcaccttcccacaaacgccgga

SEQ ID NO: 3338 - DNA, 1260 bp, Homo Sapiens
cagttgactcttaacgcaaacccgttagacgccacacagagcgaggatgttgttctaccagtttttgggacaccgagaacgccccaaattcatgggagaagccgtgagcttgccaagccaagcattgctgtatcacctgggactgcaatcgagcagaaggatatggtaacattctactgcaccacgaaagatgtaaacatcaccatccactgggtctccaataatctttcaattgtgttccatgagagaatgcaactatctaaggatggaaagatcctgacgatattgattgtgcaacgtgaagattctggcacatatcaatgtgaagctagggatgccttgttaagtcagcgtagcgatcccattttccttgacgtaaaatacggcccagaccccgttgaaataaaactagagtctggtgtcgcgtcaggtgaggtagtcgaggtcatggaaggaagctctatgactttcctagccgagacgaaaagtcatcctccgtgtgcatacacttggtttcttcttgacagtatcttaagtcatacaaccagaacgttcacaatacatgctgtcagtagagagcatgaagggttgtatcgttgtctagtgtctaatagtgctacccatttatcatcattaggcactctaaaagttcgtgtactggaaacgttaacaatgccacaagtcgttccatccagtctaaacctggtcgaaaacgctaggagtgtcgaccttacttgccaaaccgtaaatcagtcagtcaacgtgcagtggttcttgagtgggcaaccattactgcctagtgaacatttacagttaagtgctgataacagaacattaatcatacacggcttgcaaagaaatgacaccggaccctacgcgtgtgaggtctggaactggggcagcagagcaaggtcagaacccttagagctgacaattaattatggtcctgaccaagtgcacattactagggagtccgcatcagaaatgatcagtaccatagaggctgaattaaatagctctctaacgctgcagtgttgggcagagtccaaaccgggtgcggaatatcgttggaccctggagcattccacgggcgaacaccttggcgaacagttgattattcgtgcattaacttgggagcacgatggcatctataattgtacggcatccaatagtcttacagggctggcgagatcaacatcagtgcttgtaaaggttgtaggtccacagtctagtagccttagcagcggcgcgatagccggg

SEQ ID NO: 3339 - DNA, 618 bp, Homo Sapiens
tggctctttattgcatcagcgccctttgaagttgctgaaggggagaatgttcatctctctgtggtttatctgcccgagaatctttacagctatggctggtacaaagggaaaacggtggagcccaaccagctaatcgcagcatatgtaatagacactcacgttaggactccagggcctgcatacagcggtcgagagacaatatcacccagtggagatctgcatttccagaacgtcaccctagaggacacgggatactacaacctacaagtcacatacagaaattctcagattgaacaggcatctcaccatctccgtgtatacgagtcagtggctcagccctccatccaagccagcagcaccacagtcacagagaagggctccgtggtcctgacctgccacacaaataacactggaacctctttccagtggattttcaacaaccagcgtctgcaggtcacgaagaggatgaagctgtcctggtttaaccatgtgctcaccatagaccccatcaggcaggaggacgctggggagtatcagtgtgaggtctccaacccagtcagctccaacaggagcgaccccctcaagctgactgtaaaatcagatgacaacactctaggc

SEQ ID NO: 3340 - DNA, 363 bp, Homo Sapiens
aagctcactattgaatccatgccgctcagtgtcgcagaggggaaggaggtgcttctacttgtccacaatctgccccagcatctttttggctacagctggtacaaaggggaaagagtggatggcaacagtctaattgtaggatatgtaataggaactcaacaagctaccccaggggccgcatacagcggtcgagagacaatatacaccaatgcatccctgctgatccagaatgtcacccagaatgacataggattctacaccctacaagtcataaagtcagatcttgtgaatgaagaagcaactggacagttccatgtataccaagaaaatgccccaggccttcctgtgggggccgtcgccggc

SEQ ID NO: 3341 - DNA, 360 bp, Homo Sapiens
ttcacaatcgaggctctgccatccagcgccgctgagggtaaagatgtactgttgttggcatgtaacatctccgaaacaatacaggcgtactattggcacaaaggtaagactgcggaagggtcacctcttattgctggctacataacagatatacaagcgaatattccaggagccgcctactcaggcagggagactgtgtacccgaatggctccctgctttttcaaaacatcacgttagaggacgctggtagttacactttaagaactatcaatgcctcatacgacagtgaccaggctacaggccagttgcacgtgcatcagaacaatgttccaggcttaccagtgggtgcagtggcaggt

SEQ ID NO: 3342 - DNA, 1953 bp, Homo Sapiens
aagctcactattgaatccacgccgttcaatgtcgcagaggggaaggaggtgcttctacttgtccacaatctgccccagcatctttttggctacagctggtacaaaggtgaaagagtggatggcaaccgtcaaattataggatatgtaataggaactcaacaagctaccccagggcccgcatacagtggtcgagagataatataccccaatgcatccctgctgatccagaacatcatccagaatgacacaggattctacaccctacacgtcataaagtcagatcttgtgaatgaagaagcaactggccagttccgggtatacccggagctgcccaagccctccatctccagcaacaactccaaacccgtggaggacaaggatgctgtggccttcacctgtgaacctgagactcaggacgcaacctacctgtggtgggtaaacaatcagagcctcccggtcagtcccaggctgcagctgtccaatggcaacaggaccctcactctattcaatgtcacaagaaatgactcagcaagctacaaatgtgaaacccagaacccagtgagtgccaggcgcagtgattcagtcatcctgaatgtcctctatggcccggatgcccccaccatttcccctctaaacacatcttacagatcaggggaaaatctgaacctctcctgccacgcagcctctaacccacctgcacagtactcttggtttgtcaatgggactttccagcaatccacccaagagctctttatccccaacatcactgtgaataatagtggatcctatacgtgccaagcccataactcagacactggcctcaataggaccacagtcacgacgatcacagtctatgcagagccacccaaacccttcatcaccagcaacaactccaaccccgtggaggatgaggatgctgtagccttaacctgtgaacctgagattcagaacacaacctacctgtggtgggtaaataatcagagcctcccggtcagtcccaggctgcagctgtccaatgacaacaggaccctcactctactcagtgtcacaaggaatgatgtaggaccctatgagtgtggaatccagaacgaattaagtgttgaccacagcgacccagtcatcctgaatgtcctctatggcccagacgaccccaccatttccccctcatacacctattaccgtccaggggtgaacctcagcctctcctgccatgcagcctctaacccacctgcacagtattcttggctgattgatgggaacatccagcaacacacacaagagctctttatctccaacatcactgagaagaacagcggactctatacctgccaggccaataactcagccagtggccacagcaggactacagtcaagacaatcacagtctctgcggagctgcccaagccctccatctccagcaacaactccaaacccgtggaggacaaggatgctgtggccttcacctgtgaacctgaggctcagaacacaacctacctgtggtgggtaaatggtcagagcctcccagtcagtcccaggctgcagctgtccaatggcaacaggaccctcactctattcaatgtcacaagaaatgacgcaagagcctatgtatgtggaatccagaactcagtgagtgcaaaccgcagtgacccagtcaccctggatgtcctctatgggccggacacccccatcatttcccccccagactcgtcttacctttcgggagcgaacctcaacctctcctgccactcggcctctaacccatccccgcagtattcttggcgtatcaatgggataccgcagcaacacacacaagttctctttatcgccaaaatcacgccaaataataacgggacctatgcctgttttgtctctaacttggctactggccgcaataattccatagtcaagagcatcacagtctctgcatctggaacttctcctggtctctcagct

SEQ ID NO: 3343 - DNA, 858 bp, Homo Sapiens
aagctcactattgaatccacgccattcaatgtcgcagaggggaaggaggttcttctactcgcccacaacctgccccagaatcgtattggttacagctggtacaaaggcgaaagagtggatggcaacagtctaattgtaggatatgtaataggaactcaacaagctaccccagggcccgcatacagtggtcgagagacaatataccccaatgcatccctgctgatccagaacgtcacccagaatgacacaggattctataccctacaagtcataaagtcagatcttgtgaatgaagaagcaaccggacagttccatgtatacccggagctgcccaagccctccatctccagcaacaactccaaccccgtggaggacaaggatgctgtggccttcacctgtgaacctgaggttcagaacacaacctacctgtggtgggtaaatggtcagagcctcccggtcagtcccaggctgcagctgtccaatggcaacatgaccctcactctactcagcgtcaaaaggaacgatgcaggatcctatgaatgtgaaatacagaacccagcgagtgccaaccgcagtgacccagtcaccctgaatgtcctctatggcccagatgtccccaccatttccccctcaaaggccaattaccgtccaggggaaaatctgaacctctcctgccacgcagcctctaacccacctgcacagtactcttggtttatcaatgggacgttccagcaatccacacaagagctctttatccccaacatcactgtgaataatagcggatcctatatgtgccaagcccataactcagccactggcctcaataggaccacagtcacgatgatcacagtctctgga

SEQ ID NO: 3344 - DNA, 621 bp, Homo Sapiens
accaatattgatgtcgtgccgttcaatgtcgcagaagggaaggaggtccttctagtagtccataatgagtcccagaatctttatggctacaactggtacaaaggggaaagggtgcatgccaactatcgaattataggatatgtaaaaaatataagtcaagaaaatgccccagggcccgcacacaacggtcgagagacaatataccccaatggaaccctgctgatccagaacgtcacccacaatgacgcaggaatctataccctacacgttataaaagaaaatcttgtgaatgaagaagtaaccagacaattctacgtattctcggagccacccaagccctccatcaccagcaacaacttcaatccggtggagaacaaagatattgtggttttaacctgtcaacctgagactcagaacacaacctacctgtggtgggtaaacaatcagagcctcctggtcagtcccaggctgctgctctccactgacaacaggaccctcgttctactcagcgccacaaagaatgacataggaccctatgaatgtgaaatacagaacccagtgggtgccagccgcagtgacccagtcaccctgaatgtccgctatgagtcagtacaagcaagt

SEQ ID NO: 3345 - DNA, 858 bp, Homo Sapiens
cagctcactattgaagctgtgccatccaatgctgcagaggggaaggaggttcttctacttgtccacaatctgccccaggaccctcgtggctacaactggtacaaaggggaaacagtggatgccaaccgtcgaattataggatatgtaatatcaaatcaacagattaccccagggcctgcatacagcaatcgagagacaatataccccaatgcatccctgctgatgcggaacgtcaccagaaatgacacaggatcctacaccctacaagtcataaagctaaatcttatgagtgaagaagtaactggccagttcagcgtacatccggagactcccaagccctccatctccagcaacaactccaaccccgtggaggacaaggatgctgtggccttcacctgtgaacctgagactcagaacacaacctacctgtggtgggtaaatggtcagagtctcccggtcagtcccaggctgcagctgtccaatggcaacaggaccctcactctactcagtgtcacaaggaatgacgtaggaccctatgaatgtgaaatacagaacccagcgagtgcaaacttcagtgacccagtcaccctgaatgtcctctatggcccagatgcccccaccatttccccttcagacacctattaccatgcaggggtaaatctcaacctctcctgccatgcggcctctaatccaccctcacagtattcttggtctgtcaatggcacattccagcaatacacacaaaagctctttatccccaacatcactacaaagaacagcggatcctatgcctgccacaccactaactcagccactggccgcaacaggaccacagtcaggatgatcacagtctctgat

SEQ ID NO: 3346 - DNA, 399 bp, Homo Sapiens
tatcaaagagagaaacataacggcggtagagaggaagtcaccaaggttgccactcagaagcaccgacagtcaccgctcaactggacctccagtcatttcggagaggtgactgggagcgccgagggctgggggccggaggagccgctcccctactcccgggctttcggagagggtgcgtccgcgcggccgcgctgctgcaggaacggcggtacctgcgtgctgggcagcttctgcgtgtgcccggcccacttcaccggccgctactgcgagcatgaccagaggcgcagtgaatgcggcgccctggagcacggagcctggaccctccgcgcctgccacctctgcaggtgcatcttcggggccctgcactgcctccccctccagacgcctgaccgctgtgac

SEQ ID NO: 3347 - DNA, 594 bp, Homo Sapiens
taccaaagggagaaacacaacggtggccgtgaggaagttaccaaggtggcgactcagaaacacagacagtcaccgctgaactggactagcagccactttggcgaggtgacgggttccgctgaaggttggggacccgaggagcctttaccttacagttgggcgttcggcgaaggagcgtccgctcgtccaaggtgttgtcgtaacggcgggacgtgcgtactagggagtttctgcgtatgcccagcacacttcactggtagatactgcgaacacgatcaacgtagatccgaatgcggtgccttagaacacggagcctggactttaagagcttgccacctgtgtaggtgcatctttggagctttgcattgcttaccactacagacccctgataggtgcgatccgaaggacttcctagcttctcacgcgcacggccctagcgccggtggcgcacccagtctattacttttgctaccctgtgcgctactacaccgtcttttaaggccggatgccccggcacatcctagatcactagtcccgtcagtgttacaacgtgagcgtagaccatgtggcaggccaggtttgggccaccgtctg

SEQ ID NO: 3348 - DNA, 684 bp, Homo Sapiens
atcctgggcggcagagaggccgaggcgcacgcgcggccctacatggcgtcggtgcagctgaacggcgcgcacctgtgcggcggcgtcctggtggcggagcagtgggtgctgagcgcggcgcactgcctggaggacgcggccgacgggaaggtgcaggttctcctgggcgcgcactccctgtcgcagccggagccctccaagcgcctgtacgacgtgctccgcgcagtgccccacccggacagccagcccgacaccatcgaccacgacctcctgctgctacagctgtcggagaaggccacactgggccctgctgtgcgccccctgccctggcagcgcgtggaccgcgacgtggcaccgggaactctctgcgacgtggccggctggggcatagtcaaccacgcgggccgccgcccggacagcctgcagcacgtgctcttgccagtgctggaccgcgccacctgcaaccggcgcacgcaccacgacggcgccatcaccgagcgcttgatgtgcgcggagagcaatcgccgggacagctgcaagggtgactccgggggcccgctggtgtgcgggggcgtgctcgagggcgtggtcacctcgggctcgcgcgtttgcggcaaccgcaagaagcccgggatctacacccgcgtggcgagctatgcggcctggatcgacagcgtcctggcc

SEQ ID NO: 3349 - DNA, 3639 bp, Homo Sapiens
gaagattgcaatgaacttcctccaagaagaaatacagaaattctgacaggttcctggtctgaccaaacatatccagaaggcacccaggctatctataaatgccgccctggatatagatctcttggaaatataataatggtatgcaggaagggagaatgggttgctcttaatccattaaggaaatgtcagaaaaggccctgtggacatcctggagatactccttttggtacttttacccttacaggaggaaatgtgtttgaatatggtgtaaaagctgtgtatacatgtaatgaggggtatcaattgctaggtgagattaattaccgtgaatgtgacacagatggatggaccaatgatattcctatatgtgaagttgtgaagtgtttaccagtgacagcaccagagaatggaaaaattgtcagtagtgcaatggaaccagatcgggaataccattttggacaagcagtacggtttgtatgtaactcaggctacaagattgaaggagatgaagaaatgcattgttcagacgatggtttttggagtaaagagaaaccaaagtgtgtggaaatttcatgcaaatccccagatgttataaatggatctcctatatctcagaagattatttataaggagaatgaacgatttcaatataaatgtaacatgggttatgaatacagtgaaagaggagatgctgtatgcactgaatctggatggcgtccgttgccttcatgtgaagaaaaatcatgtgataatccttatattccaaatggtgactactcacctttaaggattaaacacagaactggagatgaaatcacgtaccagtgtagaaatggtttttatcctgcaacccggggaaatacagccaaatgcacaagtactggctggatacctgctccgagatgtaccttgaaaccttgtgattatccagacattaaacatggaggtctatatcatgagaatatgcgtagaccatactttccagtagctgtaggaaaatattactcctattactgtgatgaacattttgagactccgtcaggaagttactgggatcacattcattgcacacaagatggatggtcgccagcagtaccatgcctcagaaaatgttattttccttatttggaaaatggatataatcaaaattatggaagaaagtttgtacagggtaaatctatagacgttgcctgccatcctggctacgctcttccaaaagcgcagaccacagttacatgtatggagaatggctggtctcctactcccagatgcatccgtgtcaaaacatgttccaaatcaagtatagatattgagaatgggtttatttctgaatctcagtatacatatgccttaaaagaaaaagcaaaatatcaatgcaaactaggatatgtaacagcagatggtgaaacatcaggatcaattacatgtgggaaagatggatggtcagctcaacccacgtgcattaaatcttgtgatatcccagtatttatgaatgccagaactaaaaatgacttcacatggtttaagctgaatgacacattggactatgaatgccatgatggttatgaaagcaatactggaagcaccactggttccatagtgtgtggttacaatggttggtctgatttacccatatgttatgaaagagaatgcgaacttcctaaaatagatgtacacttagttcctgatcgcaagaaagaccagtataaagttggagaggtgttgaaattctcctgcaaaccaggatttacaatagttggacctaattccgttcagtgctaccactttggattgtctcctgacctcccaatatgtaaagagcaagtacaatcatgtggtccacctcctgaactcctcaatgggaatgttaaggaaaaaacgaaagaagaatatggacacagtgaagtggtggaatattattgcaatcctagatttctaatgaagggacctaataaaattcaatgtgttgatggagagtggacaactttaccagtgtgtattgtggaggagagtacctgtggagatatacctgaacttgaacatggctgggcccagctttcttcccctccttattactatggagattcagtggaattcaattgctcagaatcatttacaatgattggacacagatcaattacgtgtattcatggagtatggacccaacttccccagtgtgtggcaatagataaacttaagaagtgcaaatcatcaaatttaattatacttgaggaacatttaaaaaacaagaaggaattcgatcataattctaacataaggtacagatgtagaggaaaagaaggatggatacacacagtctgcataaatggaagatgggatccagaagtgaactgctcaatggcacaaatacaattatgcccacctccacctcagattcccaattctcacaatatgacaaccacactgaattatcgggatggagaaaaagtatctgttctttgccaagaaaattatctaattcaggaaggagaagaaattacatgcaaagatggaagatggcagtcaataccactctgtgttgaaaaaattccatgttcacaaccacctcagatagaacacggaaccattaattcatccaggtcttcacaagaaagttatgcacatgggactaaattgagttatacttgtgagggtggtttcaggatatctgaagaaaatgaaacaacatgctacatgggaaaatggagttctccacctcagtgtgaaggccttccttgtaaatctccacctgagatttctcatggtgttgtagctcacatgtcagacagttatcagtatggagaagaagttacgtacaaatgttttgaaggttttggaattgatgggcctgcaattgcaaaatgcttaggagaaaaatggtctcaccctccatcatgcataaaaacagattgtctcagtttacctagctttgaaaatgccatacccatgggagagaagaaggatgtgtataaggcgggtgagcaagtgacttacacttgtgcaacatattacaaaatggatggagccagtaatgtaacatgcattaatagcagatggacaggaaggccaacatgcagagacacctcctgtgtgaatccgcccacagtacaaaatgcttatatagtgtcgagacagatgagtaaatatccatctggtgagagagtacgttatcaatgtaggagcccttatgaaatgtttggggatgaagaagtgatgtgtttaaatggaaactggacggaaccacctcaatgcaaagattctacaggaaaatgtgggccccctccacctattgacaatggggacattacttcattcccgttgtcagtatatgctccagcttcatcagttgagtaccaatgccagaacttgtatcaacttgagggtaacaagcgaataacatgtagaaatggacaatggtcagaaccaccaaaatgcttacatccgtgtgtaatatcccgagaaattatggaaaattataacatagcattaaggtggacagccaaacagaagctttattcgagaacaggtgaatcagttgaatttgtgtgtaaacggggatatcgtctttcatcacgttctcacacattgcgaacaacatgttgggatgggaaactggagtatccaacttgtgcaaaaaga

SEQ ID NO: 3350 - DNA, 936 bp, Homo Sapiens
gaagtgaaaccttgtgattttccagaaattcaacatggaggtctatattataagagtttgcgtagactatactttccagcagctgcaggacaatcttactcctattactgtgaccaaaattttgtgactccttcaggaagttactgggattacattcactgcacacaagatgggtggttgccaacagtcccatgcctcagaacatgctcaaaatcagatatagaaattgaaaatggattcatttctgaatcttcctctatttatattttaaataaagaaatacaatataaatgtaaaccaggatatgcaacagcagatggaaattcttcaggttcaattacatgtttgcaaaatggatggtcagcacaaccaatttgcattaaattttgtgatatgcctgtttttgagaattccagagccaagagtaatggcatgcggtttaagctccatgacacattggactacgaatgctacgatggatatgaaatcagttatggaaacaccacaggttccatagtgtgtggtgaagatgggtggtcccatttcccaacatgttataattcttcagaaaagtgtgggcctcctccacctattagcaatggtgataccacctcctttctactaaaagtgtatgtgccacagtcaagagtcgagtaccaatgccagtcctactatgaacttcagggttctaattatgtaacatgtagtaatggagagtggtcggaaccaccaagatgcatacatccatgtataataactgaagaaaacatgaataaaaataacatacagttaaaaggaaaaagtgacataaaatattatgcaaaaacaggggataccattgaatttatgtgtaaattgggatataatgcgaatacatcagttctatcatttcaagcagtgtgtagggaaggcatagtggaataccccagatgcgaa

SEQ ID NO: 3351 - DNA, 1077 bp, Homo Sapiens
aaggtcacttatacatctcaagaggatctggtggagaaaaagtgcttagcaaaaaaatatactcacctctcctgcgataaagtcttctgccagccatggcagagatgcattgagggcacctgtgtttgtaaactaccgtatcagtgcccaaagaatggcactgcagtgtgtgcaactaacaggagaagcttcccaacatactgtcaacaaaagagtttggaatgtcttcatccagggacaaagtttttaaataacggaacatgcacagccgaaggaaagtttagtgtttccttgaagcatggaaatacagattcagagggaatagttgaagtaaaacttgtggaccaagataagacaatgttcatatgcaaaagcagctggagcatgagggaagccaacgtggcctgccttgaccttgggtttcaacaaggtgctgatactcaaagaaggtttaagttgtctgatctctctataaattccactgaatgtctacatgtgcattgccgaggattagagaccagtttggctgaatgtacttttactaagagaagaactatgggttaccaggatttcgctgatgtggtttgttatacacagaaagcagattctccaatggatgacttctttcagtgtgtgaatgggaaatacatttctcagatgaaagcctgtgatggtatcaatgattgtggagaccaaagtgatgaactgtgttgtaaagcatgccaaggcaaaggcttccattgcaaatcgggtgtttgcattccaagccagtatcaatgcaatggtgaggtggactgcattacaggggaagatgaagttggctgtgcaggctttgcatctgtggctcaagaagaaacagaaattttgactgctgacatggatgcagaaagaagacggataaaatcattattacctaaactatcttgtggagttaaaaacagaatgcacattcgaaggaaacgaattgtgggaggaaagcgagcacaactgggaaaaatgaagcaaatctcattggatatttttaaaggtctccacagagtttatgccatattggaattttgttgtataattctcaaa

SEQ ID NO: 3352 - DNA, 1011 bp, Homo Sapiens
tgcccccagaactgccactgccacagcgacctgcagcacgtcatctgcgacaaggtggggctgcagaagatccccaaggtgtcagagaagaccaagctgctcaacctacagcgcaacaacttcccggtgctggctgccaattcgttccgggccatgccgaacctcgtgtcattgcacctgcagcactgccagatccgcgaggtggccgccggtgccttccgcggcctcaagcaacttatctacttgtacctgtcccataacgacatccgcgtgctgcgcgcaggtgccttcgacgacctgaccgagctgacctacctctacctggaccacaacaaggtcactgagctgccccgggggttgctctccccgctggtcaacctcttcatcttgcagctcaacaacaacaagatccgtgagctgcgcgcaggcgccttccagggagccaaggacctgcgctggctctacctgtcggaaaacgcgttgagctccctgcagcccggggccctggacgacgtggagaacctcgccaaattccacgtggacaggaaccagctgtccagctacccctcagctgccctgagcaagctacgggtggtggaggagctgaagctgtcccacaaccccctgaaaagcatcccggacaatgccttccagtcctttggcagatacctggagaccctctggctggacaacaccaacctggagaagttctcagatggtgccttcctgggtgtaaccacgctgaaacacgtccatttggagaacaaccgcttgaaccagctaccctccaacttccccttcgacagcctggagaccctcgcccttaccaataacccctggaagtgtacctgccagctccggggccttcggcggtggctggaagccaaggcctcccgcccagatgccacctgtgcctcacctgccaagttcaagggccagcacatccgtgacacggacgccttccgcagctgcaagttccccaccaagaggtccaagaaagctggccgccat

SEQ ID NO: 3353 - DNA, 2196 bp, Homo Sapiens
cagcgctgcccacaggcctgcatctgtgacaactccaggcgacacgttgcctgccggtaccagaacctcactgaggtgccagacgccatccctgagctgacccagcggctggacctgcagggcaatttgctgaaggtgatccccgcagccgccttccagggcgtgcctcacctcacacacctggacctgcgccactgcgaggtggagctggtggccgagggcgccttccgtggcctgggccgcctgctcctgctcaacctggcctccaaccacctgcgtgagctgccccaggaggcgctggacgggctgggctcgttgcggcggctggagctggaggggaacgcactggaggagctgcggccggggacgttcggggcactgggtgcgctggccacgctaaacctggcccacaacgccctggtttacctgcccgccatggccttccaggggctactgcgcgtccgctggctgcggctgtcgcacaacgcgctcagcgtgctggcccccgaggccctggctggcctgcccgccctgagacggctcagcctacaccacaacgagctccaggctctgcccgggcctgtcttgtcccaggcccgcggcctggcccgtctggagctgggccacaacccgctcacctacgcgggcgaggaggacgggctggcgctgcccggcctgcgggagctgctgctggacggcggggccctgcaggccctgggtcccagggccttcgcacactgtccgcgcctgcacaccctcgacctccgcgggaaccagctagacaccctgcccccgctgcagggcccgggccagctgcgccggctgcggctgcaggggaatccgctgtggtgcggctgccaggcgcggcccctactcgagtggctggcgcgggcgcgcgtgcgctcggacggcgcgtgccaggggccgcggcgcctgcggggcgaggctctggacgccctgcggccctgggacctgcgctgccctggggacgcggcgcaggaagaggaagagctggaagagcgggctgtggccgggccccgcgcccctccgcgcggccctccgcgcggccccggggaggagcgggcagtcgcgccttgccctcgcgcctgcgtgtgcgtccccgagtcccggcacagcagctgcgagggctgcggcctgcaggcggtgccccgcggcttccgcagcgacacccagctcctggacctgaggcggaaccacttcccctcggtgccccgagcggccttccccggcctgggccacctggtgtcgctgcacctgcagcactgcggcatcgcggagctggaagcgggcgccctggccgggctgggccgcctgatctacctgtacctctccgacaaccagctcgcaggcctcagcgctgctgcccttgaaggggctccccgcctcggctacctgtacctagaacgcaaccgtttcctgcaggtgccaggggctgccctgcgcgccctgcccagcctcttctccctgcacctgcatgacaacgctgtggaccgcctggcacctggggacctggggagaacacgggccttgcgctgggtctacctgagtggaaaccgcatcaccgaagtgtcccttggggcgctgggcccagctcgggagctggagaagctgcacctggacaggaatcagctgcgagaggtgcccactggggccttggaggggctgcctgccctcctggagctgcagctctcgggcaacccactcagggccttgcgtgacggagccttccagcctgtgggcaggtcgctgcagcacctcttcctgaacagcagtggcctggagcagatttgtcctggggccttttcaggcctggggcccgggctccagagcctgcacctgcagaagaaccagcttcgggccctgcctgccctgcccagtctcagccagctggagctcatcgacctcagcagcaatcccttccactgtgactgccagctgcttccgctgcacaggtggcttactgggctgaacctgcgggtgggggccacctgcgccacccctcccaatgcccgtggccagagggtgaaggctgcagctgctgtctttgaagactgcccgggctgggctgccagaaaggccaagcggacaccagcctccaggcccagtgccaggagaacccccatcaaaggaagacagtgtggagcagataaggtggggaaggagaagggtcgtctc

SEQ ID NO: 3354 - DNA, 3174 bp, Homo Sapiens
attgaaataccatcttcagttcaacaggttccaacaatcataaaacagtcaaaagtccaagttgcctttcccttcgatgagtattttcaaattgaatgtgaagctaaaggaaatccagaaccaacattttcgtggactaaggatggcaaccctttttatttcactgaccatcggataattccatcgaacaattcaggaacattcaggatcccaaacgaggggcacatatctcactttcaagggaaataccgctgctttgcttcaaataaactgggaatcgctatgtcagaagaaatagaatttatagttccaagtgttccaaaattcccaaaagaaaaaattgaccctcttgaagtggaggagggagatccaattgtcctcccatgcaatcctcccaaaggcctcccacctttacacatttattggatgaatattgaattagaacacatcgaacaagatgaaagagtatacatgagccaaaagggagatctatacttcgcaaacgtggaagaaaaggacagtcgcaatgactactgttgctttgctgcatttccaagattaaggactattgtacagaaaatgccaatgaaactaacagttaacagttcaaattccatcaagcaaagaaaacccaaactgctgttgcctcccactgagagtggcagtgagtcttcaattaccatcctcaaaggggaaatcttgctgcttgagtgttttgctgaaggcttgccaactccacaggttgattggaacaaaattggtggtgacttaccaaaggggagagaagcaaaagaaaattatggcaagactttgaagatagagaatgtctcctaccaggacaaaggaaattatcgctgcacagccagcaatttcttgggaacagccactcacgattttcacgttatagtagaagagcctcctcgctggacaaagaagcctcagagtgctgtgtatagcaccggaagcaatggcatcttgttatgtgaggctgaaggagaacctcaacccacaatcaagtggagagtcaatggctccccagttgacaatcatccatttgctggtgatgttgtcttccccagggaaatcagttttaccaaccttcaaccaaatcatactgctgtgtaccagtgtgaagcctcaaatgtccatggaactatccttgccaatgccaatattgatgttgtggatgtccgtccattgatacaaaccaaagatggagaaaattacgctacagtggttgggtacagtgctttcttacattgcgagttctttgcttcacctgaggcagtcgtgtcctggcagaaggtggaagaagtgaaacccctggagggcaggcggtatcatatctatgaaaatggcacattgcagatcaacagaaccaccgaagaagatgctgggtcttactcatgttgggtagaaaatgctataggaaaaactgcagtcacagccaatttggatattagaaatgctacaaaacttagagtttctcctaagaatcctcgtatccccaaattgcatatgcttgaattacattgtgaaagcaaatgtgactcacatttgaaacacagtttgaagttgtcctggagtaaagatggagaagcctttgaaattaatggcacagaagatggcaggataattattgatggagctaatttgaccatatctaatgtaactttagaggaccaaggtatttactgctgttcagctcatactgctctagacagtgctgccgatataactcaagtaactgttcttgatgttccggatccaccagaaaaccttcacttgtctgaaagacagaacaggagtgttcggctgacctgggaagctggagctgaccacaacagcaatattagcgagtatattgttgaatttgaaggaaacaaagaagagcctggaaggtgggaggaactgaccagagtccaaggaaagaaaaccacagttatcttacctttggctccatttgtgagataccagttcagggtcatagccgtgaacgaagtagggagaagtcagcctagccagccgtcagaccatcatgaaacaccaccagcagctccagataggaatccacaaaacataagggttcaagcctctcaacccaaggaaatgattataaagtgggagcctttgaaatccatggagcagaatggaccaggcctagagtacagagtgacctggaagccacagggagccccagtggagtgggaagaagaaacagtcacaaaccacacattgcgggtgatgacgcctgctgtctatgccccttatgatgtcaaggtccaggctatcaatcaactaggatctgggcctgaccctcagtcagtgactctctattctggagaagactatcctgatacagctccagtgatccatggggtggacgttataaacagtacattagttaaagttacctggtcaacagttccaaaggacagagtacatggacgtctgaaaggctatcagataaattggtggaaaacaaaaagtctgttggatggaagaacacatcccaaagaagtgaacattctaagattttcaggacaaagaaactctggaatggttccttccttagatgcctttagtgaatttcatttaacagtcttagcctataactctaaaggagctggtcctgaaagtgagccttatatatttcaaacaccagaaggagtacctgaacagccaacttttctaaaggtcatcaaagttgataaagacactgccactttatcttggggactacctaagaaattaaatggaaacttaactggctatcttttgcaatatcagataataaatgacacctacgagattggagaattaaatgatattaacattacaactccatcaaagcccagctggcacctctcaaacctgaatgcaactaccaagtacaaattctacttgagggcttgcacttcacagggctgtggaaaaccgatcacggaggaaagctccaccttaggagaagggagtaaaggtatcgggaagatatcaggagtaaatcttactcaaaagactcacccagtagaggtatttgagccgggagctgaacatatagttcgcctaatgactaagaattggggcgataacgatagcatttttcaagatgtaattgagacaagagggagagaatatgctggtttatatgatgacatctccactcaaggctgg

SEQ ID NO: 3355 - DNA, 585 bp, Homo Sapiens
cgccgcgtggtcagcggccaaaaggtgtgttttgctgacttcaagcatccctgctacaaaatggcctacttccatgaactgtccagccgagtgagctttcaggaggcacgcctggcttgtgagagtgagggaggagtcctcctcagccttgagaatgaagcagaacagaagttaatagagagcatgttgcaaaacctgacaaaacccgggacagggatttctgatggtgatttctggatagggctttggaggaatggagatgggcaaacatctggtgcctgcccagatctctaccagtggtctgatggaagcaattcccagtaccgaaactggtacacagatgaaccttcctgcggaagtgaaaagtgtgttgtgatgtatcaccaaccaactgccaatcctggccttgggggtccctacctttaccagtggaatgatgacaggtgtaacatgaagcacaattatatttgcaagtatgaaccagagattaatccaacagcccctgtagaaaagccttatcttacaaatcaaccaggagacacccatcagaatgtggttgttactgaagcaggtataattcccaat

SEQ ID NO: 3356 - DNA, 3489 bp, Homo Sapiens
agacagacgatgctcacccagtcagtaagaagagtccagcctgggaagaagaaccccagcatctttgccaagcctgccgacaccctggagagccctggtgagtggacaacatggttcaacatcgactacccaggcgggaagggcgactatgagcggctggacgccattcgcttctactatggggaccgtgtatgtgcccgtcccctgcggctagaggctcggaccactgactggacacctgcgggcagcactggccaggtggtccatggtagtccccgtgagggtttctggtgcctcaacagggagcagcggcctggccagaactgctctaattacaccgtacgcttcctctgcccaccaggatccctgcgccgagacacagagcgcatctggagcccatggtctccctggagcaagtgctcagctgcctgtggtcagactggggtccagactcgcacacgcatttgcttggcagagatggtgtcgctgtgcagtgaggccagcgaagagggtcagcactgcatgggccaggactgtacagcctgtgacctgacctgcccaatgggccaggtgaatgctgactgtgatgcctgcatgtgccaggacttcatgcttcatggggctgtctcccttcccggaggtgccccagcctcaggggctgctatctacctcctgaccaagacgccgaagctgctgacccagacagacagtgatgggagattccgaatccctggcttgtgccctgatggcaaaagcatcctgaagatcacaaaggtcaagtttgcccccattgtactcacaatgcccaagactagcctgaaggcagccaccatcaaggcagagtttgtgagggcagagactccatacatggtgatgaaccctgagacaaaagcacggagagctgggcagagcgtgtctctgtgctgtaaggccacagggaagcccaggccagacaagtatttttggtatcataatgacacattgctggatccttccctctacaagcatgagagcaagctggtgctgaggaaactgcagcagcaccaggctggggagtacttttgcaaggcccagagtgatgctggggctgtgaagtccaaggttgcccagctgattgtcatagcatctgatgagactccttgcaacccagttcctgagagctatcttatccggctgccccatgattgctttcagaatgccaccaactccttctactatgacgtgggacgctgccctgttaagacttgtgcagggcagcaggataatgggatcaggtgccgtgatgctgtgcagaactgctgtggcatctccaagacagaggaaagggagatccagtgcagtggctacacgctacccaccaaggtggccaaggagtgcagctgccagcggtgtacggaaactcggagcatcgtgcggggccgtgtcagtgctgctgacaatggggagcccatgcgctttggccatgtgtacatggggaacagccgtgtaagcatgactggctacaagggcactttcaccctccatgtcccccaggacactgagaggctggtgctcacatttgtggacaggctgcagaagtttgtcaacaccaccaaagtgctacctttcaacaagaaggggagtgccgtgttccatgaaatcaagatgcttcgtcggaaagagcccatcactttggaagccatggagaccaacatcatccccctgggggaagtggttggtgaagaccccatggctgaactggagattccatccaggagtttctacaggcagaatggggagccctacataggaaaagtgaaggccagtgtgaccttcctggatccccggaatatttccacagccacagctgcccagactgacctgaacttcatcaatgacgaaggagacactttcccccttcggacgtatggcatgttctctgtggacttcagagatgaggtcacctcagagccacttaatgctggcaaagtgaaggtccaccttgactcgacccaggtcaagatgccagagcacatatccacagtgaaactctggtcactcaatccagacacagggctgtgggaggaggaaggtgatttcaaatttgaaaatcaaaggaggaacaaaagagaagacagaaccttcctggtgggcaacctggagattcgtgagaggaggctctttaacctggatgttcctgaaagcaggcggtgctttgttaaggtgagggcctaccggagtgagaggttcttgcctagtgagcagatccagggggttgtgatctccgtgattaacctggagcctagaactggcttcttgtccaaccctagggcctggggccgctttgacagtgtcatcacaggccccaacggggcctgtgtgcctgccttctgtgatgaccagtcccctgatgcctactctgcctatgtcttggcaagcctggctggggaggaactgcaagcagtggagtcttctcctaaattcaacccaaatgcaattggcgtccctcagccctatctcaacaagctcaactaccgtcggacggaccatgaggatccacgggttaaaaagacagctttccagattagcatggccaagccaaggcccaactcagctgaggagagcaatgggcccatctatgcctttgagaacctccgggcatgtgaagaggcaccacccagtgcagcccacttccggttctaccagattgagggggatcgatatgactacaacacagtccccttcaacgaagatgaccctatgagctggactgaagactatctggcatggtggccaaagccgatggaattcagggcctgctatatcaaggtgaagattgtggggccactggaagtgaatgtgcgatcccgcaacatggggggcactcatcggcggacagtggggaagctgtatggaatccgagatgtgaggagcactcgggacagggaccagcccaatgtctcagctgcctgtctggagttcaagtgcagtgggatgctctatgatcaggaccgtgtggaccgcaccctggtgaaggtcatcccccagggcagctgccgtcgagccagtgtgaaccccatgctgcatgagtacctggtcaaccacttgccacttgcagtcaacaacgacaccagtgagtacaccatgctggcacccttggacccactgggccacaactatggcatctacactgtcactgaccaggaccctcgcacggccaaggagatcgcgctcggccggtgctttgatggcacatccgatggctcctccagaatcatgaagagcaatgtgggagtagccctcaccttcaactgtgtagagaggcaagtaggccgccagagtgccttccagtacctccaaagcaccccagcccagtcccctgctgcaggcactgtccaaggaagagtgccctcgaggaggcagcagcgagcgagcaggggtggccagcgccagagtggagtggtggcctctctgagatttcctagagttgctcaacagcccctgatcaac

SEQ ID NO: 3357 - DNA, 1341 bp, Homo Sapiens
gaggagcgcgtcttcctggtgggcaacgtggagatccgggagcggcgcctgttcaatctggacgtgcctgagcgccgccgctgcttcgtgaaggtgcgcgcctacgccaacgacaagttcacccccagcgagcaggtggagggcgtggtggtcacgctggtcaatctggagcccgcccccggcttctccgccaacccccgtgcctggggccgctttgacagcgcggtcaccggccccaatggcgcctgcctccccgccttctgcgacgccgacaggccagacgcctacaccgccctggtcaccgccaccctgggcggcgaggagctggagccggccccttccttgccccgcccactcccggccaccgtgggcgtcacccagccctacctggacaggctggggtaccgtcggacggaccacgacgatcccgccttcaagcgtaacggcttccgcatcaacctcgccaagcccaggccaggtgaccccgccgaggccaatgggcctgtgtacccgtggcgcagcctgcgggaatgccagggggccccggtgactgccagccacttccgcttcgccagggtggaggcggacaagtacgagtacaacgtggtccccttccgagagggcacacctgcctcctggactggcgatctcctggcctggtggcccaacccgcaggagttccgggcctgcttcctcaaggtgaagatccagggtccccaggagtatatggtccgctcccacaacgcagggggcagccacccacgcacccgcggccagctctacggacttcgggatgcccggagtgtgcgagaccccgagcgtccgggcacctcggcagcctgcgtggagttcaagtgcagcgggatgctgttcgaccagcggcaggtggacaggacgctggtgaccattatgccccagggcagctgccggcgcgtggccgtcaacggactccttcgggattacctgacccggcaccccccaccggtgcccgcggaggacccagctgccttctccatgctggcccccctagaccctctgggccacaactatggcgtctacactgtcactgaccagagcccacgcttggccaaggagatcgccattggccgctgctttgatggttcctctgacggcttctccagagagatgaaggctgatgccggcacagccgtcaccttccagtgccgggagccaccggccggacgacccagcctcttccagaggctgctggagtccccggcgacagcacttggtgacatccgcagggagatgagcgaggcggcgcaggcacaggcccgggcctcaggtcccctccgcacccgccggggtagggtccggcag

SEQ ID NO: 3358 - DNA, 2610 bp, Homo Sapiens
ggagtacagcttcaagacaatgggtataatggattgctcattgcaattaatcctcaggtacctgagaatcagaacctcatctcaaacattaaggaaatgataactgaagcttcattttacctatttaatgctaccaagagaagagtatttttcagaaatataaagattttaatacctgccacatggaaagctaataataacagcaaaataaaacaagaatcatatgaaaaggcaaatgtcatagtgactgactggtatggggcacatggagatgatccatacaccctacaatacagagggtgtggaaaagagggaaaatacattcatttcacacctaatttcctactgaatgataacttaacagctggctacggatcacgaggccgagtgtttgtccatgaatgggcccacctccgttggggtgtgttcgatgagtataacaatgacaaacctttctacataaatgggcaaaatcaaattaaagtgacaaggtgttcatctgacatcacaggcatttttgtgtgtgaaaaaggtccttgcccccaagaaaactgtattattagtaagctttttaaagaaggatgcacctttatctacaatagcacccaaaatgcaactgcatcaataatgttcatgcaaagtttatcttctgtggttgaattttgtaatgcaagtacccacaaccaagaagcaccaaacctacagaaccagatgtgcagcctcagaagtgcatgggatgtaatcacagactctgctgactttcaccacagctttcccatgaatgggactgagcttccacctcctcccacattctcgcttgtacaggctggtgacaaagtggtctgtttagtgctggatgtgtccagcaagatggcagaggctgacagactccttcaactacaacaagccgcagaattttatttgatgcagattgttgaaattcataccttcgtgggcattgccagtttcgacagcaaaggagagatcagagcccagctacaccaaattaacagcaatgatgatcgaaagttgctggtttcatatctgcccaccactgtatcagctaaaacagacatcagcatttgttcagggcttaagaaaggatttgaggtggttgaaaaactgaatggaaaagcttatggctctgtgatgatattagtgaccagcggagatgataagcttcttggcaattgcttacccactgtgctcagcagtggttcaacaattcactccattgccctgggttcatctgcagccccaaatctggaggaattatcacgtcttacaggaggtttaaagttctttgttccagatatatcaaactccaatagcatgattgatgctttcagtagaatttcctctggaactggagacattttccagcaacatattcagcttgaaagtacaggtgaaaatgtcaaacctcaccatcaattgaaaaacacagtgactgtggataatactgtgggcaacgacactatgtttctagttacgtggcaggccagtggtcctcctgagattatattatttgatcctgatggacgaaaatactacacaaataattttatcaccaatctaacttttcggacagctagtctttggattccaggaacagctaagcctgggcactggacttacaccctgaacaatacccatcattctctgcaagccctgaaagtgacagtgacctctcgcgcctccaactcagctgtgcccccagccactgtggaagcctttgtggaaagagacagcctccattttcctcatcctgtgatgatttatgccaatgtgaaacagggattttatcccattcttaatgccactgtcactgccacagttgagccagagactggagatcctgttacgctgagactccttgatgatggagcaggtgctgatgttataaaaaatgatggaatttactcgaggtattttttctcctttgctgcaaatggtagatatagcttgaaagtgcatgtcaatcactctcccagcataagcaccccagcccactctattccagggagtcatgctatgtatgtaccaggttacacagcaaacggtaatattcagatgaatgctccaaggaaatcagtaggcagaaatgaggaggagcgaaagtggggctttagccgagtcagctcaggaggctccttttcagtgctgggagttccagctggcccccaccctgatgtgtttccaccatgcaaaattattgacctggaagctgtaaaagtagaagaggaattgaccctatcttggacagcacctggagaagactttgatcagggccaggctacaagctatgaaataagaatgagtaaaagtctacagaatatccaagatgactttaacaatgctattttagtaaatacatcaaagcgaaatcctcagcaagctggcatcagggagatatttacgttctcaccccaaatttccacgaatggacctgaacatcagccaaatggagaaacacatgaaagccacagaatttatgttgcaatacgagcaatggataggaactccttacagtctgctgtatctaacattgcccaggcgcctctgtttattccccccaattctgatcctgtacctgccagagattatctt

SEQ ID NO: 3359 - DNA, 2613 bp, Homo Sapiens
tccttcattaagctgaataataatggctttgaagatattgtcattgttatagatcctagtgtgccagaagatgaaaaaataattgaacaaatagaggatatggtgactacagcttctacgtacctgtttgaagccacagaaaaaagattttttttcaaaaatgtatctatattaattcctgagaattggaaggaaaatcctcagtacaaaaggccaaaacatgaaaaccataaacatgctgatgttatagttgcaccacctacactcccaggtagagatgaaccatacaccaagcagttcacagaatgtggagagaaaggcgaatacattcacttcacccctgaccttctacttggaaaaaaacaaaatgaatatggaccaccaggcaaactgtttgtccatgagtgggctcacctccggtggggagtgtttgatgagtacaatgaagatcagcctttctaccgtgctaagtcaaaaaaaatcgaagcaacaaggtgttccgcaggtatctctggtagaaatagagtttataagtgtcaaggaggcagctgtcttagtagagcatgcagaattgattctacaacaaaactgtatggaaaagattgtcaattctttcctgataaagtacaaacagaaaaagcatccataatgtttatgcaaagtattgattctgttgttgaattttgtaacgaaaaaacccataatcaagaagctccaagcctacaaaacataaagtgcaattttagaagtacatgggaggtgattagcaattctgaggattttaaaaacaccatacccatggtgacaccacctcctccacctgtcttctcattgctgaagatcagtcaaagaattgtgtgcttagttcttgataagtctggaagcatggggggtaaggaccgcctaaatcgaatgaatcaagcagcaaaacatttcctgctgcagactgttgaaaatggatcctgggtggggatggttcactttgatagtactgccactattgtaaataagctaatccaaataaaaagcagtgatgaaagaaacacactcatggcaggattacctacatatcctctgggaggaacttccatctgctctggaattaaatatgcatttcaggtgattggagagctacattcccaactcgatggatccgaagtactgctgctgactgatggggaggataacactgcaagttcttgtattgatgaagtgaaacaaagtggggccattgttcattttattgctttgggaagagctgctgatgaagcagtaatagagatgagcaagataacaggaggaagtcatttttatgtttcagatgaagctcagaacaatggcctcattgatgcttttggggctcttacatcaggaaatactgatctctcccagaagtcccttcagctcgaaagtaagggattaacactgaatagtaatgcctggatgaacgacactgtcataattgatagtacagtgggaaaggacacgttctttctcatcacatggaacagtctgcctcccagtatttctctctgggatcccagtggaacaataatggaaaatttcacagtggatgcaacttccaaaatggcctatctcagtattccaggaactgcaaaggtgggcacttgggcatacaatcttcaagccaaagcgaacccagaaacattaactattacagtaacttctcgagcagcaaattcttctgtgcctccaatcacagtgaatgctaaaatgaataaggacgtaaacagtttccccagcccaatgattgtttacgcagaaattctacaaggatatgtacctgttcttggagccaatgtgactgctttcattgaatcacagaatggacatacagaagttttggaacttttggataatggtgcaggcgctgattctttcaagaatgatggagtctactccaggtattttacagcatatacagaaaatggcagatatagcttaaaagttcgggctcatggaggagcaaacactgccaggctaaaattacggcctccactgaatagagccgcgtacataccaggctgggtagtgaacggggaaattgaagcaaacccgccaagacctgaaattgatgaggatactcagaccaccttggaggatttcagccgaacagcatccggaggtgcatttgtggtatcacaagtcccaagccttcccttgcctgaccaatacccaccaagtcaaatcacagaccttgatgccacagttcatgaggataagattattcttacatggacagcaccaggagataattttgatgttggaaaagttcaacgttatatcataagaataagtgcaagtattcttgatctaagagacagttttgatgatgctcttcaactaaatactactgatctgtcaccaaaggaggccaactccaaggaaagctttgcatttaaaccagaaaatatctcagaagaaaatgcaacccacatatttattgccattaaaagtatagataaaagcaatttgacatcaaaagtatccaacattgcacaagtaactttgtttatccctcaagcaaatcctgatgacattgatcctacacctactcctactcctactcctgataaaagtcataattctgga

SEQ ID NO: 3360 - DNA, 531 bp, Homo Sapiens
tgtttggtgactcatcacaacttttcacgctgtaagagaggcacaggagtgcacaagttagagcaccatgcaaagctcaaatgcatcaaagagaaatcagaactgaaaagtgctgaagggagcacctggaactgttgtcctattgactggagagccttccagtccaactgctattttcctcttactgacaacaagacgtgggctgagagtgaaaggaactgttcagggatgggggcccatctgatgaccatcagcacggaagctgagcagaactttattattcagtttctggatagacggctttcctatttccttggacttagagatgagaatgccaaaggtcagtggcgttgggtggaccagacgccatttaacccacgcagagtattctggcataagaatgaacccgacaactctcagggagaaaactgtgttgttcttgtttataaccaagataaatgggcctggaatgatgttccttgtaactttgaagcaagtaggatttgtaaaatacctggaacaacattgaac

SEQ ID NO: 3361 - DNA, 768 bp, Homo Sapiens
caaaattccaaatttcagagggacctggtgaccctgagaacagattttagcaacttcacctcaaacactgtggcggagatccaggcactgacttcccagggcagcagcttggaagaaacgatagcatctctgaaagctgaggtggagggtttcaagcaggaacggcaggcaggggtatctgagctccaggaacacactacgcagaaggcacacctaggccactgtccccactgcccatctgtgtgtgtcccagttcattctgaaatgctcctgcgagtccagcagctggtgcaagacctgaagaaactgacctgccaggtggctactctcaacaacaatgcctccactgaagggacctgctgccctgtcaactgggtggagcaccaagacagctgctactggttctctcactctgggatgtcctgggccgaggctgagaagtactgccagctgaagaacgcccacctggtggtcatcaactccagggaggagcagaattttgtccagaaatatctgggctccgcatacacctggatgggcctcagtgaccctgaaggagcctggaagtgggtggatggaacagactatgcgaccggcttccagaactggaagccaggccagccagacgactggcaggggcacgggctgggtggaggcgaggactgtgctcacttccatccagacggcaggtggaatgacgacgtctgccagaggccctaccactgggtctgcgaggctggcctgggtcagaccagccaggagagtcac

SEQ ID NO: 3362 - DNA, 906 bp, Homo Sapiens
gctcggggagcagagagggagtgggagggaggctggggaggtgcccaggaggaggagcgggagagggaggccctgatgctgaagcatctgcaggaagccctaggactgcctgctgggaggggggatgagaatcctgccggaactgttgagggaaaagaggactgggagatggaggaggaccagggggaggaagaggaggaggaagcaacgccaaccccatcctccggccccagcccctctcccacccctgaggacatcgtcacttacatcctgggccgcctggccggcctggacgcaggcctgcaccagctgcacgtccgtctgcacgcgttggacacccgcgtggtcgagctgacccaggggctgcggcagctgcggaacgcggcaggcgacacccgcgatgccgtgcaagccctgcaggaggcgcagggtcgcgccgagcgcgagcacggccgcttggagggctgcctgaaggggctgcgcctgggccacaagtgcttcctgctctcgcgcgacttcgaagctcaggcggcggcgcaggcgcggtgcacggcgcggggcgggagcctggcgcagccggcagaccgccagcagatggaggcgctcactcggtacctgcgcgcggcgctcgctccctacaactggcccgtgtggctgggcgtgcacgatcggcgcgccgagggcctctacctcttcgaaaacggccagcgcgtgtccttcttcgcctggcatcgctcaccccgccccgagctcggcgcccagcccagcgcctcgccgcatccgctcagcccggaccagcccaacggtggcacgctcgagaactgcgtggcgcaggcctctgacgacggctcctggtgggaccacgactgccagcggcgtctctactacgtctgcgagttccccttc

SEQ ID NO: 3363 - DNA, 603 bp, Homo Sapiens
cacgtaactttgaagatagaaatgaaaaaaatgaacaaactacaaaacatcagtgaagagctccagagaaatatttctctacaactgatgagtaacatgaatatctccaacaagatcaggaacctctccaccacactgcaaacaatagccaccaaattatgtcgtgagctatatagcaaagaacaagagcacaaatgtaagccttgtccaaggagatggatttggcataaggacagctgttatttcctaagtgatgatgtccaaacatggcaggagagtaaaatggcctgtgctgctcagaatgccagcctgttgaagataaacaacaaaaatgcattggaatttataaaatcccagagtagatcatatgactattggctgggattatctcctgaagaagattccactcgtggtatgagagtggataatataatcaactcctctgcctgggttataagaaacgcacctgacttaaataacatgtattgtggatatataaatagactatatgttcaatattatcactgcacttataaacaaagaatgatatgtgagaagatggccaatccagtgcagcttggttctacatattttagggaggca

SEQ ID NO: 3364 - DNA, 504 bp, Homo Sapiens
ttgcagatatctaatgacattaactcagattcagagaaattgagtcaacttcagaaaaccatccaacagcagcaggataacttatcccagcaactgggcaactccaacaacttgtccatggaggaggaatttctcaagtcacagatctccagtctactgaagaggcaggaacaaatggccatcaaactgtgccaagagctaatcattcatacttcagaccacagatgtaatccatgtcctaagatgtggcaatggtaccaaaatagttgctactattttacaacaaatgaggagaaaacctgggctaacagtagaaaggactgcatagacaagaactccaccctagtgaagatagacagtttggaagaaaaggattttcttatgtcacagccattactcatgttttcgttcttttggctgggattatcatgggactcctctggcagaagttggttctgggaagatggctctgttccctctccatccttgtacgtctctaactat

SEQ ID NO: 3365 - DNA, 1059 bp, Homo Sapiens
atgaagcggcaggcggccgaggaggcctgcatcctgcgaggtggggcgctcagcaccgtgcgtgcgggcgccgagctgcgcgctgtgctcgcgctcctgcgggcaggcccagggcccggagggggctccaaagacctgctgttctgggtcgcactggagcgcaggcgttcccactgcaccctggagaacgagcctttgcggggtttctcctggctgtcctccgaccccggcggtctcgaaagcgacacgctgcagtgggtggaggagccccaacgctcctgcaccgcgcggagatgcgcggtactccaggccaccggtggggtcgagcccgcaggctggaaggagatgcgatgccacctgcgcgccaacggctacctgtgcaagtaccagtttgaggtcttgtgtcctgcgccgcgccccggggccgcctctaacttgagctatcgcgcgcccttccagctgcacagcgccgctctggacttcagtccacctgggaccgaggtgagtgcgctctgccggggacagctcccgatctcagttacttgcatcgcggacgaaatcggcgctcgctgggacaaactctcgggcgatgtgttgtgtccctgccccgggaggtacctccgtgctggcaaatgcgcagagctccctaactgcctagacgacttgggaggctttgcctgcgaatgtgctacgggcttcgagctggggaaggacggccgctcttgtgtgaccagtggggaaggacagccgacccttggggggaccggggtgcccaccaggcgcccgccggccactgcaaccagccccgtgccgcagagaacatggccaatcagggtcgacgagaagctgggagagacaccacttgtccctgaacaagacaattcagtaacatctattcctgagattcctcgatggggatcacagagcacgatgtctacccttcaaatgtcccttcaagccgagtcaaaggccactatcaccccatcagggagcgtgatttccaagtttaattctacgacttcctctgccactcctcaggctttcgactcctcctctgcc

SEQ ID NO: 3366 - DNA, 555 bp, Homo Sapiens
aagtaccaggagttgatggaagaactgagaatgttaagctttcagcagatgacgtggcgaacaaatatgactggcatggcagggctagctggcctgaagcatgacattgcccgtgtaagagctgacaccaaccagtccctggtggaactttggggcttattagactgccgccgaattacctgtcctgaaggctggctgccctttgagggcaagtgttactacttctccccaagcaccaagtcatgggatgaggcccggatgttctgccaggagaattactctcacttggtcatcatcaatagctttgctgagcacaattttgtggccaaggcccatggctctccacgggtgtactggctggggctgaatgacagggcccaggaaggggactggaggtggctggatgggtctcctgtgacattaagcttctgggagccagaggaacccaataacatccacgatgaggactgtgctaccatgaacaaaggtggcacctggaatgatctctcttgctacaaaactacgtattggatttgtgagcggaaatgttcctgt

SEQ ID NO: 3367 - DNA, 1260 bp, Homo Sapiens
gaggtgtggccaccccagctgcaggagcaggctccgatggccggagccctgaacaggaaggagagtttcttgctcctctccctgcacaaccgcctgcgcagctgggtccagccccctgcggctgacatgcggaggctggactggagtgacagcctggcccagctggctcaagccagggcagccctctgtggaaccccaaccccgagcctggcgtccggcctgtggcgcaccctgcaagtgggctggaacatgcagctgctacccgcgggcttggtgtcctttgtcgaagtggtcagcctatggtttgcagaggggcagcggtacagccacgcggcaggagagtgtgctcgcaacgccacctgcacccactacacgcagctcgtgtgggccacctcaagccagctgggctgtgggcggcacctgtgctctgcaggccaggcagcgatagaagcctttgtctgtgcctactcccccagaggcaactgggaggtcaacgggaagacaatcgtcccctataagaagggtgcctggtgttcgctctgcacagccagtgtctcaggctgcttcaaagcctgggaccatgcaggggggctctgtgaggtccccaggaatccttgtcgcatgagctgccagaaccatggacgtctcaacatcagcacctgccactgccactgtccccctggctacacgggcagatactgccaagtgaggtgcagcctgcagtgtgtgcacggccggctccgggaggaggagtgctcgtgcgtctgtgacatcggctacgggggagcccagtgtgccaccaaggtgcattttcccttccacacctgtgacctgaggatcgacggagactgcttcatggtgtcttcagaggcagacacctattacagagccaggatgaaatgtcagaggaaaggcggggtgctggcccagatcaagagccagaaagtgcaggacatcctcgccttctatctgggccgcctggagaccaccaacgaggtgattgacagtgacttcgagaccaggaacttctggatcgggctcacctacaagaccgccaaggactccttccgctgggccacaggggagcaccaggccttcaccagttttgcctttgggcagcctgacaaccacgggtttggcaactgcgtggagctgcaggcttcagctgccttcaactggaacaaccagcgctgcaaaacccgaaaccgttacatctgccagtttgcccaggagcacatctcccggtggggcccagggtcc

SEQ ID NO: 3368 - DNA, 1260 bp, Homo Sapiens
gaggtgtggccaccccagctgcaggagcaggctccgatggccggagccctgaacaggaaggagagtttcttgctcctctccctgcacaaccgcctgcgcagctgggtccagccccctgcggctgacatgcggaggctggactggagtgacagcctggcccagctggctcaagccagggcagccctctgtggaaccccaaccccgagcctggcgtccggcctgtggcgcaccctgcaagtgggctggaacatgcagctgctacccgcgggcttggcgtcctttgtcgaagtggtcagcctatggtttgcagaggggcagcggtacagccacgcggcaggagagtgtgctcgcaacgccacctgcacccactacatgcagctcgtgtgggccacctcaagccagctgggctgtgggcggcacctgtgctctgcaggccaggcagcgatagaagcctttgtctgtgcctactcccccagaggcaactgggaggtcaacgggaagacaatcgtcccctataagaagggtgcctggtgttcgctctgcacagccagtgtctcaggctgcttcaaagcctgggaccatgcaggggggctctgtgaggtccccaggaatccttgtcgcatgagctgccagaaccatggacgtctcaacatcagcacctgccactgccactgtccccctggctacacgggcagatactgccaagtgaggtgcagcctgcagtgtgtgcacggccggttccgggaggaggagtgctcgtgcgtctgtgacatcggctacgggggagcccagtgtgccaccaaggtgcattttcccttccacacctgtgacctgaggatcgacggagactgcttcatggtgtcttcagaggcagacacctattacagagccaggatgaaatgtcagaggaaaggcggggtgctggcccagatcaagagacagaaagtgcaggacatcctcgccttctatctgggccgcctggagaccaccaacgaggtgattgacagtgacttcgagaccaggaacttctggatcgggctcacctacaagaccgccaaggactccttccgctgggccacaggggagcaccaggccttcaccagttttgcctttgggcagcctgacaaccacgggtttggcaactgcgtggagctgcaggcttcagctgccttcaactggaacgaccagcgctgcaaaacccgaaaccgttacatctgccagtttgcccaggagcacatctcccggtggggcccagggtcc

SEQ ID NO: 3369 - DNA, 351 bp, Homo Sapiens
tttccacaaacagacatcagtatcagtccagccctgccagagctgcccctgccttccctgtgccccctgttctggatggagttcaaaggccactgctatcgattcttccctctcaataagacctgggccgaggccgacctctactgttctgagttctctgtgggcaggaagtccgccaagctggcctccatccacagctgggaggagaatgtctttgtatatgacctcgtgaacagctgtgttcccggcatcccagctgacgtctggacaggccttcatgatcacagacaggtgagaaagcagtggccattgggcccccttggaagctccagccaggattctattttgatt

SEQ ID NO: 3370 - DNA, 621 bp, Homo Sapiens
cagtactaccagctctccaatactggtcaagacaccatttctcaaatggaagaaagattaggaaatacgtcccaagagttgcaatctcttcaagtccagaatataaagcttgcaggaagtctgcagcatgtggctgaaaaactctgtcgtgagctgtataacaaagctggagcacacaggtgcagcccttgtacagaacaatggaaatggcatggagacaattgctaccagttctataaagacagcaaaagttgggaggactgtaaatatttctgccttagtgaaaactctaccatgctgaagataaacaaacaagaagacctggaatttgccgcgtctcagagctactctgagtttttctactcttattggacagggcttttgcgccctgacagtggcaaggcctggctgtggatggatggaacccctttcacttctgaactgttccatattataatagatgtcaccagcccaagaagcagagactgtgtggccatccttaatgggatgatcttctcaaaggactgcaaagaattgaagcgttgtgtctgtgagagaagggcaggaatggtgaagccagagagcctccatgtcccccctgaaacattaggcgaaggtgac

SEQ ID NO: 3371 - DNA, 525 bp, Homo Sapiens
gctgtcatgcagcgcaattacctacaagatgagaatgaaaatcgcacaggaactctgcaacaattagcaaagcgcttctgtcaatatgtggtaaaacaatcagaactaaagggcactttcaaaggtcataaatgcagcccctgtgacacaaactggagatattatggagatagctgctatgggttcttcaggcacaacttaacatgggaagagagtaagcagtactgcactgacatgaatgctactctcctgaagattgacaaccggaacattgtggagtacatcaaagccaggactcatttaattcgttgggtcggattatctcgccagaagtcgaatgaggtctggaagtgggaggatggctcggttatctcagaaaatatgtttgagtttttggaagatggaaaaggaaatatgaattgtgcttattttcataatgggaaaatgcaccctaccttctgtgagaacaaacattatttaatgtgtgagaggaaggctggcatgaccaaggtggaccaactacct

SEQ ID NO: 3372 - DNA, 372 bp, Homo Sapiens
aaactaactcgagattctcagagtttatgcccctatgattggattggtttccaaaacaaatgctattatttctctaaagaagaaggagattggaattcaagtaaatacaactgttccactcaacatgccgacctaactataattgacaacatagaagaaacgaattttcttaggcggtataaatgcagttctgatcactggattggactgaagatggcaaaaaatcgaacaggacaatgggtagatggagctacatttaccaaatcgtttggcatgagagggagtgaaggatgtgcctacctcagcgatgatggtgcagcaacagctagatgttacaccgaaagaaaatggatttgcaggaaaagaatacac

SEQ ID NO: 3373 - DNA, 285 bp, Homo Sapiens
agagctaactgccatcaagagccatcagtatgtcttcaagctgcatgcccagaaagctggattggttttcaaagaaagtgtttctatttttctgatgacaccaagaactggacatcaagtcagaggttttgtgactcacaagatgctgatcttgctcaggttgaaagcttccaggaactgaatttcctgttgagatataaaggcccatctgatcactggattgggctgagcagagaacaaggccaaccatggaaatggataaatggtactgaatggacaagacag

SEQ ID NO: 3374 - DNA, 525 bp, Homo Sapiens
cacacatccagattaaaagccaggaagcacagcaaacgtcgagtgagagacaaggatggagatctgaagactcaaattgaaaagctctggacagaagtcaatgccttgaaggaaattcaagccctgcagacagtctgtctccgaggcactaaagttcacaagaaatgctaccttgcttcagaaggtttgaagcatttccatgaggccaatgaagactgcatttccaaaggaggaatcctggttatccccaggaactccgacgaaatcaacgccctccaagactatggtaaaaggagcctgccaggtgtcaatgacttttggctgggcatcaatgacatggtcacggaaggcaagtttgttgacgtcaacggaatcgctatctccttcctcaactgggaccgtgcacagcctaacggtggcaagcgagaaaactgtgtcctgttctcccaatcagctcagggcaagtggagtgatgaggcctgtcgcagcagcaagagatacatatgcgagttcaccatccctcaa

SEQ ID NO: 3375 - DNA, 504 bp, Homo Sapiens
caaaaatattctcagcttcttgaaaaaaagactacaaaagagctggttcatacaacattggagtgtgtgaaaaaaaatatgcccgtggaagagacagcctggagctgttgcccaaagaattggaagtcatttagttccaactgctactttatttctactgaatcagcatcttggcaagacagtgagaaggactgtgctagaatggaggctcacctgctggtgataaacactcaagaagagcaggatttcatcttccagaatctgcaagaagaatctgcttattttgtggggctctcagatccagaaggtcagcgacattggcaatgggttgatcagacaccatacaatgaaagttccacattctggcatccacgtgagcccagtgatcccaatgagcgctgcgttgtgctaaattttcgtaaatcacccaaaagatggggctggaatgatgttaattgtcttggtcctcaaaggtcagtttgtgagatgatgaagatccactta

SEQ ID NO: 3376 - DNA, 507 bp, Homo Sapiens
aattttatgtatagcaaaactgtcaagaggctgtccaagttacgagagtatcaacagtatcatccaagcctgacctgcgtcatggaaggaaaggacatagaagattggagctgctgcccaaccccttggacttcatttcagtctagttgctactttatttctactgggatgcaatcttggactaagagtcaaaagaactgttctgtgatgggggctgatctggtggtgatcaacaccagggaagaacaggatttcatcattcagaatctgaaaagaaattcttcttattttctggggctgtcagatccagggggtcggcgacattggcaatgggttgaccagacaccatacaatgaaaatgtcacattctggcactcaggtgaacccaataaccttgatgagcgttgtgcgataataaatttccgttcttcagaagaatggggctggaatgacattcactgtcatgtacctcagaagtcaatttgcaagatgaagaagatctacata

SEQ ID NO: 3377 - DNA, 537 bp, Homo Sapiens
agatgtgttgtgacatttcgcatctttcaaacctgtgatgagaaaaagtttcagctacctgagaatttcacagagctctcctgctacaattatggatcaggttcagtcaagaattgttgtccattgaactgggaatattttcaatccagctgctacttcttttctactgacaccatttcctgggcgttaagtttaaagaactgctcagccatgggggctcacctggtggttatcaactcacaggaggagcaggaattcctttcctacaagaaacctaaaatgagagagttttttattggactgtcagaccaggttgtcgagggtcagtggcaatgggtggacggcacacctttgacaaagtctctgagcttctgggatgtaggggagcccaacaacatagctaccctggaggactgtgccaccatgagagactcttcaaacccaaggcaaaattggaatgatgtaacctgtttcctcaattattttcggatttgtgaaatggtaggaataaatcctttgaacaaaggaaaatctctt

SEQ ID NO: 3378 - DNA, 1521 bp, Homo Sapiens
caacagcagacaagacctgttccgaagcctgtgcaagccgtaattctgggagacaacattactgggcatttaccttttgaacccaacaatcatcaccactttggcagggaggcagaaatgcgagagcttatccagacatttaaaggccacatggagaattccagtgcctgggtagtagaaatccagatgttgaagtgcagagtggacaatgtcaattcgcagctccaggtgctcggtgatcatctgggaaacaccaatgctgacatccagatggtaaaaggagttctaaaggatgccactacattgagtttgcagacacagatgttaaggagttccctggagggaaccaatgctgagatccagaggctcaaggaagaccttgaaaaggcagatgctttaactttccagacgctgaatttcttaaaaagcagtttagaaaacaccagcattgagctccacgtgctaagcagaggcttagaaaatgcaaactctgaaattcagatgttgaatgccagtttggaaacggcaaatacccaggctcagttagccaatagcagtttaaagaacgctaatgctgagatctatgttttgagaggccatctagatagtgtcaatgacttgaggacccagaaccaggttttaagaaatagtttggaaggagccaatgctgagatccagggactaaaggaaaatttgcagaacacaaatgctttaaactcccagacccaggcctttataaaaagcagttttgacaacactagtgctgagatccagttcttaagaggtcatttggaaagagctggtgatgaaattcacgtgttaaaaagggatttgaaaatggtcacagcccagacccaaaaagcaaatggccgtctggaccagacagatactcagattcaggtattcaagtcagagatggaaaatgtgaataccttaaatgcccagattcaggtcttaaatggtcatatgaaaaatgccagcagagagatacagaccctaaaacaaggaatgaagaatgcttcagccttaacttcccagacccagatgttagacagcaatctgcagaaggccagtgccgagatccagaggttaagaggggatctagagaacaccaaagctctaaccatggaaatccagcaggagcagagtcgcctgaagaccctccatgtggtcattacttcacaggaacagctacaaagaacccaaagtcagcttctccagatggtcctgcaaggctggaagttcaatggtggaagcttatattatttttctagtgtcaagaagtcttggcatgaggctgagcagttctgcgtgtcccagggagcccatctggcatctgtggcctccaaggaggagcaggcatttctggtagagttcacaagtaaagtgtactactggatcggtctcactgacaggggcacagagggctcctggcgctggacagatgggacaccattcaacgccgcccagaacaaagcgagccacagcaccaggaagggatgctgccttcatctaacagta

SEQ ID NO: 3379 - DNA, 723 bp, Homo Sapiens
ttgtccaaggcctccacggagcgcgcggcgctgcttgacggccacgacctgctgaggacaaacgcctcgaagcagacggcggcgctgggtgccctgaaggaggaggtcggagactgccacagctgctgctcggggacgcaggcgcagctgcagaccacgcgcgcggagcttggggaggcgcaggcgaagctgatggagcaggagagcgccctgcgggaactgcgtgagcgcgtgacccagggcttggctgaagccggcaggggccgtgaggacgtccgcactgagctgttccgggcgctggaggccgtgaggctccagaacaactcctgcgagccgtgccccacgtcgtggctgtccttcgagggctcctgctactttttctctgtgccaaagacgacgtgggcggcggcgcaggatcactgcgcagatgccagcgcgcacctggtgatcgttgggggcctggatgagcagggcttcctcactcggaacacgcgtggccgtggttactggctgggcctgagggctgtgcgccatctgggcaaggttcagggctaccagtgggtggacggagtctctctcagcttcagccactggaaccagggagagcccaatgacgcttgggggcgcgagaactgtgtcatgatgctgcacacggggctgtggaacgacgcaccgtgtgacagcgagaaggacggctggatctgtgagaaaaggcacaactgc

SEQ ID NO: 3380 - DNA, 987 bp, Homo Sapiens
caagtgtccaaggtccccagctccctaagtcaggaacaatccgagcaagacgcaatctaccagaacctgacccagcttaaagctgcagtgggtgagctctcagagaaatccaagctgcaggagatctaccaggagctgacccagctgaaggctgcagtgggtgagttgccagagaaatccaagctgcaggagatctaccaggagctgacccggctgaaggctgcagtgggtgagttgccagagaaatccaagctgcaggagatctaccaggagctgacccggctgaaggctgcagtgggtgagttgccagagaaatccaagctgcaggagatctaccaggagctgacccggctgaaggctgcagtgggtgagttgccagagaaatccaagctgcaggagatctaccaggagctgacggagctgaaggctgcagtgggtgagttgccagagaaatccaagctgcaggagatctaccaggagctgacccagctgaaggctgcagtgggtgagttgccagaccagtccaagcagcagcaaatctatcaagaactgaccgatttgaagactgcatttgaacgcctgtgccgccactgtcccaaggactggacattcttccaaggaaactgttacttcatgtctaactcccagcggaactggcacgactccgtcaccgcctgccaggaagtgagggcccagctcgtcgtaatcaaaactgctgaggagcagaacttcctacagctgcagacttccaggagtaaccgcttctcctggatgggactttcagacctaaatcaggaaggcacgtggcaatgggtggacggctcacctctgtcacccagcttccagcggtactggaacagtggagaacccaacaatagcgggaatgaagactgtgcggaatttagtggcagtggctggaacgacaatcgatgtgacgttgacaattactggatctgcaaaaagcccgcagcctgcttcagagacgaa

SEQ ID NO: 3381 - DNA, 483 bp, Homo Sapiens
ccacagatttttaacaaaagtaacgatggtttcaccaccaccaggagctatggaacagtctcacagatttttgggagcagttccccaagtcccaacggcttcattaccacaaggagctatggaacagtctgccccaaagactgggaattttatcaagcaagatgttttttcttatccacttctgaatcatcttggaatgaaagcagggacttttgcaaaggaaaaggatccacattggcaattgtcaacacgccagagaaactgaagtttcttcaggacataactgatgctgagaagtattttattggcttaatttaccatcgtgaagagaaaaggtggcgttggatcaacaactctgtgttcaatggcaatgttaccaatcagaatcagaatttcaactgtgcgaccattggcctaacaaagacatttgatgctgcatcatgtgacatcagctaccgcaggatctgtgagaagaatgccaaa

SEQ ID NO: 3382 - DNA, 504 bp, Homo Sapiens
acttaccattttacatatggtgaaactggcaaaaggctgtctgaactacactcatatcattcaagtctcacctgcttcagtgaagggacaaaggtgccagcctggggatgttgcccagcttcttggaagtcatttggttccagttgctacttcatttccagtgaagagaaggtttggtctaagagtgagcagaactgtgttgagatgggagcacatttggttgtgttcaacacagaagcagagcagaatttcattgtccagcagctgaatgagtcattttcttattttctggggctttcagacccacaaggtaataataattggcaatggattgataagacaccttatgagaaaaatgtcagattttggcacctaggtgagcccaatcattctgcagagcaatgtgcttcaatagtcttctggaaacctacaggatggggctggaatgatgttatctgtgaaactagaaggaattcaatatgtgagatgaataagatttaccta

SEQ ID NO: 3383 - DNA, 201 bp, Homo Sapiens
accatgggggttctttccagcccttgtcctcctaattggattatatatgagaagagctgttatctattcagcatgtcactaaattcctgggatggaagtaaaagacaatgctggcaactgggctctaatctcctaaagatagacagctcaaatgaattggtaagtgtagacttctgttatgattatctgtggtgtgtatcc

SEQ ID NO: 3384 - DNA, 555 bp, Homo Sapiens
aaattattgcaggtttccactatagctatgcaacaacaagaaaaattgatacagcaggagagagcacttcttaatttcaccgagtggaagcgttcatgcgccttacagatgaaatattgtcaagcgtttatgcagaacagcttatcatccgcccataattcaagtccgtgccctaataactggatacagaatagggaatcatgctactatgtttctgagatatggtccatttggcataccagtcaagaaaattgtcttaaagaggggtcaacactacttcagatagagagcaaggaggagatggatttcattacaggatccctaaggaaaatcaaaggtagttacgattattgggtcggcctgtcccaggatgggcactcagggagatggctatggcaagacggaagtagccctagccccggtctattgcccgccgagaggtctcagtctgcgaatcaggtttgcggctatgttaaaagtaattccctactgagttcaaattgctcaacttggaagtacttcatatgtgaaaaatacgctttaagatcatctgtg

SEQ ID NO: 3385 - DNA, 237 bp, Homo Sapiens
aaaactgttcggacttccccgttagaactcgcgtttccacttcagagatctgtttctttcaacttttctactgtccataaatcatgtcctgccaaagactggaaggtgcataagggaaaatgttactggattgctgaaactaagaaatcttggaacaaaagtcaaaatgactgtgccataaacaattcatatctcatggtgattcaagacattactgctatggtgagatttaacatt

SEQ ID NO: 3386 - DNA, 960 bp, Homo Sapiens
cagagacacagtccacaggaggcaccccatgtgcagtacgagcgcctgggctctgacgtgacactgccatgtgggacagcaaactgggatgctgcggtgacgtggcgggtaaatgggacagacctggcccctgacctgctcaacggctctcagctggtgctccatggcctggaactgggccacagtggcctctacgcctgcttccaccgtgactcctggcacctgcgccaccaagtcctgctgcatgtgggcttgccgccgcgggagcctgtgctcagctgccgctccaacacttaccccaagggcttctactgcagctggcatctgcccacccccacctacattcccaacaccttcaatgtgactgtgctgcatggctccaaaattatggtctgtgagaaggacccagccctcaagaaccgctgccacattcgctacatgcacctgttctccaccatcaagtacaaggtctccataagtgtcagcaatgccctgggccacaatgccacagctatcacctttgacgagttcaccattgtgaagcctgatcctccagaaaatgtggtagcccggccagtgcccagcaaccctcgccggctggaggtgacgtggcagaccccctcgacctggcctgaccctgagtcttttcctctcaagttctttctgcgctaccgacccctcatcctggaccagtggcagcatgtggagctgtccgacggcacagcacacaccatcacagatgcctacgccgggaaggagtacattatccaggtggcagccaaggacaatgagattgggacatggagtgactggagcgtagccgcccacgctacgccctggactgaggaaccgcgacacctcaccacggaggcccaggctgcggagaccacgaccagcaccaccagctccctggcacccccacctaccacgaagatctgtgaccctggggagctgggcagc

SEQ ID NO: 3387 - DNA, 1821 bp, Homo Sapiens
gagtttacatggtatagaagatatggtcatggagtttctgaggaagacaaaggatttggaccaatttttgaagagcagccaatcaataccatttatccagaggaatcactggaaggaaaagtctcactcaactgtagggcacgagccagccctttcccggtttacaaatggagaatgaataatggggacgttgatctcacaagtgatcgatacagtatggtaggaggaaaccttgttatcaacaaccctgacaaacagaaagatgctggaatatactactgtttagcatctaataactacgggatggtcagaagcactgaagcaaccctgagctttggatatcttgatcctttcccacctgaggaacgtcctgaggtcagagtaaaagaagggaaaggaatggtgcttctctgtgaccccccataccattttccagatgatcttagctatcgctggcttctaaatgaatttcctgtatttatcacaatggataaacggcgatttgtgtctcagacaaatggcaatctctacattgcaaatgttgaggcttccgacaaaggcaattattcctgctttgtttccagtccttctattacaaagagcgtgttcagcaaattcatcccactcattccaatacctgaacgaacaacaaaaccatatcctgctgatattgtagttcagttcaaggatgtatatgcattgatgggccaaaatgtgaccttagaatgttttgcacttggaaatcctgttccggatatccgatggcggaaggttctagaaccaatgccaagcactgctgagattagcacctctggggctgttcttaagatcttcaatattcagctagaagatgaaggcatctatgaatgtgaggctgagaacattagaggaaaggataaacatcaagcaagaatttatgttcaagcattccctgagtgggtagaacacatcaatgacacagaggtggacataggcagtgatctctactggccttgtgtggccacaggaaagcccatccctacaatccgatggttgaaaaatggatatgcgtatcataaaggggaattaagactgtatgatgtgacttttgaaaatgccggaatgtatcagtgcatagctgaaaacacatatggagccatttatgcaaatgctgagttgaagatcttggcgttggctccaacttttgaaatgaatcctatgaagaaaaagatcctggctgctaaaggtggaagggtgataattgaatgcaaacctaaagctgcaccgaaaccaaagttttcatggagtaaagggacagagtggcttgtcaatagcagcagaatactcatttgggaagatggtagcttggaaatcaacaacattacaaggaatgatggaggtatctatacatgctttgcagaaaataacagagggaaagctaatagcactggaacccttgttatcacagatcctacgcgaattatattggccccaattaatgccgatatcacagttggagaaaacgccaccatgcagtgtgctgcgtcctttgatcctgccttggatctcacatttgtttggtccttcaatggctatgtgatcgattttaacaaagagaatattcactaccagaggaattttatgctggattccaatggggaattactaatccgaaatgcgcagctgaaacatgctggaagatacacatgcactgcccagacaattgtggacaattcttcagcttcagctgaccttgtagtgagaggtaaaaacagaaaaggtggagagaaaaacatggtggattcctttctccccgtctgtgcaagcctgcctccaacctgg

SEQ ID NO: 3388 - DNA, 2946 bp, Homo Sapiens
tcccaaaccaccttcgggcctgtctttgaagaccagcccctcagtgtgctattcccagaggagtccacggaggagcaggtgttgctggcatgccgcgcccgggccagccctccagccacctatcggtggaagatgaatggtaccgagatgaagctggagccaggttcccgtcaccagctggtggggggcaacctggtcatcatgaaccccaccaaggcacaggatgccggggtctaccagtgcctggcctccaacccagtgggcaccgttgtcagcagggaggccatcctccgcttcggctttctgcaggaattctccaaggaggagcgagacccagtgaaagctcatgaaggctggggggtgatgttgccctgtaacccacctgcccactacccaggcttgtcctaccgctggctcctcaacgagttccccaacttcatcccgacggacgggcgtcacttcgtgtcccagaccacagggaacctgtacattgcccgaaccaatgcctcagacctgggcaactactcctgtttggccaccagccacatggacttctccaccaagagcgtcttcagcaagtttgctcagctcaacctggctgctgaagatacccggctctttgcacccagcatcaaggcccggttcccagcagagacctatgcactggtggggcagcaggtcaccctggagtgcttcgcctttgggaaccctgtcccccggatcaagtggcgcaaagtggacggctccctgtccccgcagtggaccacagctgagcccaccctgcagatccccagcgtcagctttgaggatgagggcacctacgagtgtgaggcggagaactccaagggccgagacaccgtgcagggccgcatcatcgtgcaggctcagcctgagtggctaaaagtgatctcggacacagaggctgacattggctccaacctgcgttggggctgtgcagccgccggcaagccccggcctacagtgcgctggctgcggaacggggagcctctggcctcccagaaccgggtggaggtgttggctggggacctgcggttctccaagctgagcctggaagactcgggcatgtaccagtgtgtggcagagaataagcacggtaccatctacgccagcgccgagctagccgtgcaagcactcgcccctgacttcaggctgaatcccgtgaggcgtctgatccccgcggcccgcgggggagagatccttatcccctgccagccccgggcagctccaaaggccgtggtgctctggagcaaaggcacggagattttggtcaacagcagcagagtgactgtaactccagatggcaccttgatcataagaaacatcagccggtcagatgaaggcaaatacacctgctttgctgagaacttcatgggcaaagccaacagcactggaatcctatctgtgcgagatgcaaccaaaatcactctagccccctcaagtgccgacatcaacttgggtgacaacctgaccctacagtgccatgcctcccacgaccccaccatggacctcaccttcacctggaccctggacgacttccccatcgactttgataagcctggagggcactaccggagaactaatgtgaaggagaccattggggatctgaccatcctgaacgcccagctgcgccatggggggaagtacacgtgcatggcccagacggtggtggacagcgcgtccaaggaggccacagtcctggtccgaggtccgccaggtcccccaggaggtgtggtggtgagggacattggcgacaccaccatccagctcagctggagccgtggcttcgacaaccacagccccatcgctaagtacaccctgcaagctcgcactccacctgcagggaagtggaagcaggttcggaccaatcctgcaaacatcgagggcaatgccgagactgcacaggtgctgggcctcaccccctggatggactatgagttccgggtcatagccagcaacattctgggcactggggagcctagtgggccctccagcaaaatccggaccagggaagcagccccctcggtggcaccctcaggactcagcggaggaggtggagcccccggagagctcatcgtcaactggacgcccatgtcacgggagtaccagaacggagacggcttcggctacctgctgtccttccgcaggcagggcagcactcactggcagaccgcccgggtgcctggcgccgatgcccagtactttgtctacagcaacgagagcgtccggccctacacgccctttgaggtcaagatccgcagctacaaccgccgcggggatgggcccgagagcctcactgcactcgtgtactcagctgaggaagagcccagggtggcccctaccaaggtgtgggccaaaggggtctcatcctcagagatgaacgtgacctgggaacccgtgcagcaggacatgaatggtatcctcctggggtatgagatccgctactggaaagctggggacaaagaagcagctgcggaccgagtgaggacagcagggctggacaccagtgcccgagtcagcggcctgcatcccaacaccaagtaccatgtgaccgtgagggcctacaaccgggctggcactgggcctgccagcccttctgccaacgccacgaccatgaagccccctccgcggcgacctcctggcaacatctcctggactttctcaagctctagtcttagcattaagtgggaccctgtggtccctttccgaaatgagtctgcagtcaccggctataagatgctgtaccagaatgacttacacctgactcccacgctccacctcaccggcaagaactggatagaaatcccagtgcctgaagacattggccatgccctggtacaaattcggaccacagggcccggaggggatgggatccctgcagaagtccacatcgtgaggaatggaggcacaagcatgatggtggagaac

SEQ ID NO: 3389 - DNA, 2949 bp, Homo Sapiens
gagcttctcttacaaggccctgtatttatcaaagaacccagcaacagcattttccctgttggttcagaagataaaaaaataactttgcattgtgaagcaagaggcaatccatcacctcattacagatggcagctgaatggaagtgatattgatatgagtatggaacatcgttataagttgaatggaggaaatcttgtggttattaatcccaacagaaattgggatacaggaacttaccaatgttttgcaacaaattcacttggaacaattgtcagcagagaagccaaacttcagtttgcctatcttgaaaattttaaaaccaaaatgaggagtacagtgtctgtgcgtgaaggccagggagttgtgctgctctgcggccccccaccacactctggagaactgtcatatgcttggatcttcaatgaatacccatcgtttgttgaagaagatagtcggagatttgtctcccaggagacagggcacctctacatatctaaggtggagccgtctgatgtgggaaattacacatgtgtggtgacaagtatggtgacaaatgcccgagtgctgggctctccaactcctttggtgctacgttctgatggtgtgatgggtgaatatgaacctaaaatagaagttcagtttccagaaactcttccagcagctaaaggttcgactgtgaaattggaatgttttgcccttggaaatcccatacctcagattaattggagaagaagtgatgggctgccattttccagcaaaattaaattaaggaagttcagtggtgtgcttgaaatccccaacttccaacaggaagatgcaggttcctatgaatgcattgctgagaattcacgaggaaaaaatgttgccagagggcgtctcacttactatgcaaagccccattgggttcaactcataaaggatgtggaaatagccgtggaggacagtctttattgggaatgcagggcaagcggcaagcccaagccttcctaccgatggctgaaaaatggagcagccctggtgctagaggagagaacacagatagaaaatggtgcccttacaatatcaaacctaagtgtgactgattctggcatgttccagtgcatagcagaaaacaaacatggccttgtttattccagtgctgagctcaaagttgttgcttctgctccagatttttcaaagaatccaatgaagaagttggttcaggtgcaggtgggcagcctggtcagcttggattgtaaacccagagcctccccaagggcactctcttcctggaagaagggggatgtgagcgtgcaggagcatgaaagaatttctttgttaaacgatggaggactcaaaatagccaatgtgactaaagctgatgctggaacttacacctgcatggcagaaaaccagtttgggaaagcaaatggcacaacacatttggttgttacggaaccaacaagaataactttggcaccatctaacatggatgtttctgttggtgaaagcgtcatattgccctgccaggtacaacatgacccgctgttagacatcatctttacctggtatttcaatggggcccttgcagattttaagaaagatggatctcactttgagaaagttggtgggagttcatctggtgatttaatgatcagaaacattcagctgaaacacagtgggaaatatgtttgtatggtgcaaacgggggtggacagtgtttcatctgctgctgacctcatagtaagaggttcacctggaccaccagaaaatgtgaaggtagatgaaattacagacacaacagcccaactctcttggaaagaaggtaaagacaaccatagcccagttatatcctattctatccaggctcggacacctttctccgtgggttggcaaaccgtcacaacagtgcctgaggtcatcgatgggaagacgcacacagccactgtagttgagttaaacccatgggtggaatatgaatttcgggttgtagccagtaacaaaattggaggtggagaaccaagtttaccctcagaaaaagtaagaactgaagaggcagttccagaagtgcctccttctgaagtcagtggaggaggcggaagccggtctgaacttgtgataacctgggatccagtccctgaagaactacagaatggtgaaggttttgggtatgttgttgctttccgccctcttggggttaccacctggatccagacagtggtgacatcccctgacaccccaagatatgtctttaggaatgaaagcatcgtgccatattcaccatatgaagttaaagtgggtgtttataataacaaaggtgaaggaccatttagcccagtgacaacagtgttctctgcagaagaagagcctacagtggccccatctcaagtctctgcaaatagcctatcttcctcagaaattgaggtttcatggaacaccattccttggaagttgagcaatggacatttactgggctatgaggtgcggtactggaatgggggtggaaaggaggaatcatccagtaagatgaaagtggcaggaaatgagacatcagccagactacggggcctgaagagcaacctggcctattacacggctgtccgggcttacaacagtgccggcgctgggccttttagcgccacagttaatgtaaccaccaagaaaacgcctcccagtcagccaccaggaaatgttgtttggaatgccacagacactaaagtgttacttaattgggagcaagttaaagccatggagaatgagtcagaagtaacaggatataaagttttctataggactagcagtcaaaataacgtacaagtactgaacacaaataaaacttcagctgaacttgtgctgcccattaaagaggactacattattgaagtcaaggccacaacagatggaggggatgggaccagtagtgaacagatcaggattccacgaataaccagtatggatgcaagaggatcc

SEQ ID NO: 3390 - DNA, 2013 bp, Homo Sapiens
atggaagaaaatgtcttttgggaatgtaaagcaaatggaaggcctaagcctacatacaagtggctaaaaaatggcgaacctctgctaactcgggatagaattcaaattgagcaaggaacactcaacataacaatagtgaacctctcagatgctggcatgtatcagtgtttggcagagaataaacatggagttatcttttccaacgcagagcttagtgttatagctgtaggtccagatttttcaagaacactcttgaaaagagtaactcttgtcaaagtgggaggtgaagttgtcattgagtgtaagccaaaagcgtctccaaaacctgtttacacctggaagaaaggaagggatatattaaaagaaaatgaaagaattaccatttctgaagatggaaacctcagaatcatcaacgttactaaatcagacgctgggagttatacctgtatagccactaaccattttggaactgctagcagtactggaaacttggtagtgaaagatccaacaagggtaatggtacccccttccagtatggatgtcactgttggagagagtattgttttaccgtgccaggtaacgcatgatcactcgctagacatcgtgtttacttggtcatttaatggacacctgatagactttgacagagatggggaccactttgaaagagttggaggggattcagctggtgatttgatgatccgaaacatccaactgaagcatgctgggaaatatgtctgcatggtccaaacaagtgtggacaggctatctgctgctgcagacctgattgtaagaggtcctccaggtcccccagaggctgtgacaatagacgaaatcacagataccactgctcagctctcctggagacccgggcctgacaatcacagccccatcaccatgtatgtcattcaagccaggactccgttctccgtgggctggcaagcagtcagtacagtcccagaactcattgatgggaagacattcacagcgaccgtggtgggtttgaacccttgggttgaatatgaattccgcacagttgcagccaacgtgattgggattggggagcccagccgcccctcagagaaacggagaacagaagaagctctccccgaagtcacaccagcgaatgtcagtggtggcggaggcagcaaatctgaactggttataacctgggagacggtccctgaggaattacagaatggtcgtggctttggttatgtggtggccttccggccctacggtaaaatgatctggatgctgacagtgctggcctcagctgacgcctctagatacgtgttcaggaatgagagcgtgcaccccttctctccctttgaggttaaagtaggtgtcttcaacaacaaaggagaaggccctttcagtcccaccacggtggtgtattctgcagaagaagaacccaccaaaccaccagccagtatctttgccagaagtctttctgccacagatattgaagttttctgggcctccccactggagaagaatagaggacgaatacaaggttatgaggttaaatattggagacatgaagacaaagaagaaaatgctagaaaaatacgaacagttggaaatcagacatcaacaaaaatcacgaacttaaaaggcagtgtgctgtatcacttagctgtcaaggcatataattctgctgggacaggcccctctagtgcaacagtcaatgtgacaacccgaaagccaccaccaagtcaaccccccggaaacatcatatggaattcatcagactccaaaattatcctgaattgggatcaagtgaaggccctggataatgagtcggaagtaaaaggatacaaagtcttgtacagatggaacagacaaagcagcacatctgtcattgaaacaaataaaacatcggtggagctttctttgcctttcgatgaagattatataatagaaattaagccattcagcgacggaggagatggcagcagcagtgaacaaattcgaattccaaagatatcaaatgcctacgcgagaggatct

SEQ ID NO: 3391 - DNA, 3162 bp, Homo Sapiens
gagtattcaaaatctcttcctggtctctccacttcatatgctgctttgttaagaattaagaagagttcatcttcatctctctttggttccaaaaccagaccacgatacagcagcccttcattaggaacactgagtgcttcttcacccagctggctaggggcagctcagaattattattcccccatcaatctttatcattcctcagatgccttcaaacaagatgaaagtgtggactatgggccagtttttgtgcaagaaccagatgatattatttttccaactgattctgatgaaaagaaggtagcattgaattgtgaagttcgtggcaatccagttcccagttacagatggcttcgaaatggaacagaaatagatctggaaagtgattatcgctacagtttgatagatggcaccttcattataagcaatccaagtgaagcaaaggattctggtcattatcagtgtttagcaaccaacactgtggggagtattcttagtagagaagctacactgcagtttgcctatctgggaaattttagtggccggacaagaagtgcagtctctgtgagggaaggccagggtgtcgttctgatgtgctctcctccgccacattcaccagagatcatctatagctgggtatttaatgagttcccttcctttgtggcggaagacagccggcggttcatctcccaggagacaggcaacctttatatttctaaagtccaaacatcagatgttggcagctatatttgtctggtgaaaaacacagtgacgaatgctagagtccttagtcctccaacgccactcactctgcgtaatgatggtgtgatgggagaatatgagccgaaaattgaggtccattttcctttcacggttacagctgctaaaggaacaactgttaagatggaatgctttgcacttggcaaccccgttccaacaatcacatggatgaaggttaatggttatattcctagtaaggcacgtctgcggaaatctcaggcggtgctggaaataccgaatgtacagctggatgatgcaggcatttatgagtgcagagctgaaaactcacgtggaaaaaattcctttcgtggacaattacaagtatacacctacccacactgggtagaaaaactgaatgatactcagttagacagtgggagccctctccgatgggaatgtaaggctactggaaaacccagacccacgtatcgttggctgaagaatggagtacccctctcacctcagagtagggttgagatggttaatggagtattgatgatccacaatgtgaatcaatcagatgctggaatgtatcagtgtttggctgaaaataagtatggagccatttacgctagtgctgagctgaagattctagcttcagctcccacttttgcactgaatcaactgaagaaaacaataattgttaccaaagaccaagaagttgtcatagagtgcaaaccccaaggctctccaaaaccaaccatctcttggaagaaaggagacagagcagttagagaaaacaaaagaatagctgttcttccagacgggagtctacggatcctaaatgcttccaaatcagacgagggaaagtacgtttgccgaggggaaaacgtctttggttctgctgaaattatagcttcgctatctgtaaaagaacctacaaggatagaacttactcctaaaagaacagaattgacagtgggagaaagcattgtccttaattgcaaagcaattcacgatgctagtttggatgtcactttctactggactctgaaaggacagcctattgatttcgaggaagagggtggacattttgaaagcatcagggcccaagcatcctctgcagatttaatgatcaggaacatccttctgatgcatgctgggagatatggctgcagggtacagaccacagcagacagtgtgtcagatgaggcagaacttcttgttaggggacccccaggcccacctgggatagtaattgttgaggaaataaccgaaagtacggccacactgtcctggagcccagcagctgacaaccacagcccaatctcctcctacaaccttcaagctcgcagcccattttccctgggctggcaaacagtaaagacagtcccagaaatcataacaggggacatggagtcagccatggctgtggacctaaatccctgggtggaatatgaatttcgagtggtagccaccaaccctattgggacaggagatccaagcaccccatctcgaatgatccgcacaaatgaagcagttccgaagacagcacccaccaatgtaagcggaagaagtggaagaaggcatgagttagtcattgcctgggagccagtatctgaagagtttcagaatggggaaggcttcggctatattgtggctttcagacccaatggaacacgtggctggaaggaaaaaatggtgacatcctctgaagcttccaaattcatttatcgagatgaaagtgtccctcctcttactccctttgaagtgaaagttggcgtttataacaataaaggagatgggccttttagtcaaattgtggtcatctgttcagctgaaggagaacccagtgctgctcccacagatgtcaaggcgacaagtgtgtctgtgtcagagattcttgttgcatggaaacacattaaagagagtctaggaagaccacagggatttgaggttggttactggaaagacatggaacaggaagatacagcagaaacagtcaaaactagagggaatgagtctttcgtcatcctaacaggactagaaggaaatacgttatatcacttcacagtgagggcttacaatggagctggatatgggccacctagcagtgaagtgagtgcaaccaccaagaaatcccctcctagtcaagcacctagcaacctcaggtgggagcagcaaggctctcaggtttctctgggctgggaacccgtcataccattagccaacgaatctgaagttgtgggttacaaggttttttataggcaagagggtcacagcaacagccaagttattgaaacacagaaacttcaagcagtagtaccactcccagatgctggagtctatattattgaagttcgagcatatagtgaaggaggagatggaacagctagttctcaaattagggtaccatcatattcaggtggaaaaatcacaagt

SEQ ID NO: 3392 - DNA, 2940 bp, Homo Sapiens
gatggtcttttaagccgtcctatttttactcaggagccacatgatgtcatttttcctttggatttatcaaaatctgaggtcatcctgaattgtgctgctaacggttacccttcgcctcattataggtggaagcaaaatggcacagacattgattttactatgagttatcactacaggttggatggaggcagtcttgcaatcaatagcccccacacagatcaagatattggtatgtaccagtgcctggccaccaatcttctggggacaattctgagtcggaaggcaaagctccaatttgcatatattgaagactttgaaactaaaacaagaagcacagtatctgtccgagaaggtcaaggtgtggtgcttctctgtggcccaccgccacattttggagatttatcttatgcatggaccttcaatgataaccccttatacgtccaagaggacaataggcgatttgtatctcaagagacgggaaacttgtacattgccaaagtggaaccatcagatgtgggcaactacacttgctttataactaacaaagaggcccagagaagtgttcaaggtccacccactccattagtgcagcgcactgatggtgtgatgggggaatatgaaccaaagattgaagtgcgttttcctgaaactatacaagctgcaaaggattcatctgtaaaactggaatgttttgcccttggaaatccagtccccgatattagttggagaaggttggacgggagcccgttgccagggaaagtcaagtacagcaaatcccaagctatccttgaaatcccgaacttccaacaagaagatgaaggcttttatgagtgcattgcaagcaaccttcgaggaagaaaccttgcaaagggtcaactcattttttatgctcctccagaatgggaacagaaaatccaaaatacacacctctctatctatgacaacttgctctgggaatgtaaagctagtggaaagccaaacccttggtatacatggttaaaaaatggtgaacgactcaacccagaggagagaattcaaatagaaaatgggacactcatcataacgatgctgaatgtgtcagattctggtgtgtaccaatgtgctgcagaaaacaaatatcagataatttatgcaaatgctgaattgagagttttagcctcagctccagatttctccaaaagtccagttaaaaaaaagtcttttgttcaagttggtggggatattgttatcggatgcaaaccaaatgcttttcccagggcagctatctcttggaaaagaggaacggagacccttagacaaagcaaaagaatatttctcttggaggatggcagcctcaagatatataatattaccaggtcagatgctggatcatatacatgcatagccacaaatcagtttggcactgcaaagaacactggcagcctcattgtaaaagagagaactgtcattaccgtcccaccttccaaaatggatgttacagttggcgagagtatagtgctaccatgccaggtgtcccatgacccctccattgaagtggtatttgtatggtttttcaatggagatgtcatagacttaaaaaaaggagtggctcattttgaaaggattggaggagaatctgttggggatttgatgataaggaatattcagttacatcattcaggaaaatatctctgcacagtacaaacaaccctagaaagtttatctgcagtagccgatatcattgttagaggtccaccaggtcctcctgaggatgtgcaagtggaagacatttccagtactacttctcaactaagttggagagcaggcccagataataacagtcccattcaaatatttactattcagactcggacaccattttctgtgggttggcaggctgttgctacagttccagaaattctcaatggtaagacatacaatgcaacagtggttggtttgagtccttgggtggaatatgaatttcgtgttgttgccggcaacagcattgggattggagaaccaagtgaaccatcagaattgttaagaactaaagcatcagtccctgttgtggcaccagtaaacatccatggaggtggaggaagtcggtctgaactcgtcattacatgggagtcaattccagaagaactgcagaatggggagggatttggatatatcatcatgttccggccagtgggctcgacaacctggtccaaggagaaagtgtcatctgtggaatcatcaaggtttgtctacagaaatgaaagcatcatcccactgtctccctttgaagtcaaagtgggtgtgtataataatgaaggagaaggatccctgagtactgtgaccattgtctactctggggaagatgaacctcaactggccccaaggggaacttctctccagagtttttctgcttctgaaatggaggtttcatggaatgctattgcctggaatagaaacactggaagagtgctgggctatgaggtcttatactggacagatgactccaaagaatccatgataggtaaaattagagtcagtggaaatgtcacaaccaaaaacatcacggggctgaaagctaataccatctactttgcttccgtaagagcttacaacactgctgggacagggccctcaagccccccagtcaatgttaccaccaaaaagtctcctccaagccaaccaccagcaaacattgcctggaagctgacaaactctaaattatgcttgaactgggagcatgtaaaaaccatggaaaatgagtctgaagttttggggtacaagattctgtaccggcaaaacagacagagtaaaactcatattttggaaacaaacaatacatcagctgagcttctggttccatttgaagaagactacttaattgaaataagaacagtcagtgatggtggagatggaagcagcagtgaggaaattaggattccaaaaatgtcaagtttgagttcc

SEQ ID NO: 3393 - DNA, 1674 bp, Homo Sapiens
tggggctactacggctgcgacgaggagctggtgggtcccctgtatgcacgctccctgggcgcctcctcctactacagtctccttactgcgccgagattcgccaggctgcacggcataagcgggtggtcaccacggattggggatccgaatccctggctccagatagacttaatgaagaagcaccggatccgggccgtggccacacagggctcctttaattcttgggactgggtcacacgttacatgctactctacggcgaccgagtggacagctggacaccgttctaccagcgagggcacaactcgaccttctttggtaacgtgaacgagtcggcggtggtgcgccatgacctgcacttccacttcactgcgcgctacatccgcatcgtgcccctggcctggaacccacgcggcaagatcggcctgaggctcggcctctatggctgcccatacaaggccgacatactctatttcgacggcgacgatgccatctcctaccgcttcccgcgaggggtcagccgaagcctgtgggacgtgttcgccttcagcttcaagaccgaggagaaggacggtcttctgctgcacgccgagggcgcccagggcgactacgtgacgctcgagctggagggggcacacctgctgctgcacatgagcctgggcagcagccctatccagccaagaccaggtcacaccaccgtgagcgcaggcggagtcctcaatgaccagcactggcactatgtgcgggtggaccgatttggccgcgatgtaaatttcaccctggacggctatgtgcagcgctttattctcaatggagacttcgagaggctgaacctggacactgagatgttcatcggaggtctggtgggcgccgcgcggaagaacctggcctatcggcataacttccgcggctgcatagaaaacgtaatcttcaaccgcgtcaacatcgcagacctggccgtgcggcgccattcccggatcaccttcgagggtaaggtggcttttcgttgcctggacccggtaccgcaccctatcaacttcggaggccctcacaacttcgttcaagtgcccggtttcccacgccgtggccgcctggcagtctcatttcgcttccgcacctgggacctcaccgggcttctccttttctcccgtctgggggacgggctgggccacgtggagctgacgctcagcgaagggcaggtcaacgtgtccatcgcgcagagcggccgaaagaagcttcagttcgctgctgggtaccgactgaatgacggcttttggcacgaggtgaattttgtggcacaggaaaaccatgcagttatcagcattgatgatgtggaaggggcagaggtcagggtctcatacccgttgctgatccggacagggacctcatatttctttgggggttgtcccaagccagccagtcgatgggactgccactccaaccagacggcattccatggctgcatggagctgctcaaggtggatggtcaactggtcaacctgactctggtggagggccggcggcttggattctatgctgaggtcctctttgatacatgtggcatcactgataggtgcagccctaacatgtgtgagcatgatggacgctgctaccagtcttgggatgacttcatttgctactgcgaactgacgggctacaagggagagacctgccac

SEQ ID NO: 3394 - DNA, 3705 bp, Homo Sapiens
gctccctccacgtcccaaaaatgtgatgagccacttgtctctggactcccccatgtggctttcagcagctcctcctccatctctggtagctattctcccggctatgccaagataaacaagagaggaggtgctgggggatggtctccatcagacagcgaccattatcaatggcttcaggttgactttggcaatcggaagcagatcagtgccattgcaacccaaggaaggtatagcagctcagattgggtgacccaataccggatgctctacagcgacacagggagaaactggaaaccctatcatcaagatgggaatatctgggcatttcccggaaacattaactctgacggtgtggtccggcacgaattacagcatccgattattgcccgctatgtgcgcatagtgcctctggattggaatggagaaggtcgcattggactcagaattgaagtttatggctgttcttactgggctgatgttatcaactttgatggccatgttgtattaccatatagattcagaaacaagaagatgaaaacactgaaagatgtcattgccttgaactttaagacgtctgaaagtgaaggagtaatcctgcacggagaaggacagcaaggagattacattaccttggaactgaaaaaagccaagctggtcctcagtttaaacttaggaagcaaccagcttggccccatatatggccacacatcagtgatgacaggaagtttgctggatgaccaccactggcactctgtggtcattgagcgccaggggcggagcattaacctcactctggacaggagcatgcagcacttccgtaccaatggagagtttgactacctggacttggactatgagataacctttggaggcatccctttctctggcaagcccagctccagcagtagaaagaatttcaaaggctgcatggaaagcatcaactacaatggcgtcaacattactgatcttgccagaaggaagaaattagagccctcaaatgtgggaaatttgagcttttcttgtgtggaaccctatacggtgcctgtctttttcaacgctacaagttacctggaggtgcccggacggcttaaccaggacctgttctcagtcagtttccagtttaggacatggaaccccaatggtctcctggtcttcagtcactttgcggataatttgggcaatgtggagattgacctcactgaaagcaaagtgggtgttcacatcaacatcacacagaccaagatgagccaaatcgatatttcctcaggttctgggttgaatgatggacagtggcacgaggttcgcttcctagccaaggaaaattttgctattctcaccatcgatggagatgaagcatcagcagttcgaactaatagtccccttcaagttaaaactggcgagaagtacttttttggaggttttctgaaccagatgaataactcaagtcactctgtccttcagccttcattccaaggatgcatgcagctcattcaagtggacgatcaacttgtaaatttatacgaagtggcacaaaggaagccgggaagtttcgcgaatgtcagcattgacatgtgtgcaatcatagacagatgtgtgcccaatcactgtgagcatggtggaaagtgctcgcaaacatgggacagcttcaaatgcacttgtgatgagacaggatacagtggggccacctgccacaactctatctacgagccttcctgtgaagcctacaaacacctaggacagacatcaaattattactggatagatcctgatggcagcggacctctggggcctctgaaagtttactgcaacatgacagaggacaaagtgtggaccatagtgtctcatgacttgcagatgcagacgcctgtggtcggctacaacccagaaaaatactcagtgacacagctcgtttacagcgcctccatggaccagataagtgccatcactgacagtgccgagtactgcgagcagtatgtctcctatttctgcaagatgtcaagattgttgaacaccccagatggaagcccttacacttggtgggttggcaaagccaacgagaagcactactactggggaggctctgggcctggaatccagaaatgtgcctgcggcatcgaacgcaactgcacagatcccaagtactactgtaactgcgacgcggactacaagcaatggaggaaggatgctggtttcttatcatacaaagatcacctgccagtgagccaagtggtggttggagatactgaccgtcaaggctcagaagccaaattgagcgtaggtcctctgcgctgccaaggagacaggaattattggaatgccgcctctttcccaaacccatcctcctacctgcacttctctactttccaaggggaaactagcgctgacatttctttctacttcaaaacattaaccccctggggagtgtttcttgaaaatatgggaaaggaagatttcatcaagctggagctgaagtctgccacagaagtgtccttttcatttgatgtgggaaatgggccagtagagattgtagtgaggtcaccaacccctctcaacgatgaccagtggcaccgggtcactgcagagaggaatgtcaagcaggccagcctacaggtggaccggctaccgcagcagatccgcaaggccccaacagaaggccacacccgcctggagctctacagccagttatttgtgggtggtgctgggggccagcagggcttcctgggttgcatccgctccttgaggatgaatggggtgacacttgacctggaggaaagagcaaaggtcacatctgggttcatatccggatgctcgggccattgcaccagctatggaacaaactgtgaaaatggaggcaaatgcctagagagataccacggttactcctgcgattgctctaatactgcatatgatggaacattttgcaacaaagatgttggtgcattttttgaagaagggatgtggctacgatataactttcaggcaccagcaacaaatgccagagactccagcagcagagtagacaacgctcccgaccagcagaactcccacccggacctggcacaggaggagatccgcttcagcttcagcaccaccaaggcgccctgcattctcctctacatcagctccttcaccacagacttcttggcagtcctcgtcaaacccactggaagcttacagattcgatacaacctgggtggcacccgagagccatacaatattgacgtagaccacaggaacatggccaatggacagccccacagtgtcaacatcacccgccacgagaagaccatctttctcaagctcgatcattatccttctgtgagttaccatctgccaagttcatccgacaccctcttcaattctcccaagtcgctctttctgggaaaagttatagaaacagggaaaattgaccaagagattcacaaatacaacaccccaggattcactggttgcctctccagagtccagttcaaccagatcgcccctctcaaggccgccttgaggcagacaaacgcctcggctcacgtccacatccagggcgagctggtggagtccaactgcggggcctcgccgctgaccctctcccccatgtcgtccgccaccgacccctggcacctggatcacctggattcagccagtgcggattttccatataatccaggacaaggccaagctataagaaatggagtcaacagaaactcggct

SEQ ID NO: 3395 - DNA, 2631 bp, Homo Sapiens
ggaaatccacctgactgtgatgccccactggcctctgccttgcctaggtcatccttcagcagctcctcagagctgtccagcagccacggcccggggttttcaaggcttaatcgaagagatggagctggtggctggactccacttgtgtcaaataaataccaatggctgcaaattgaccttggagagagaatggaggtcactgctgtcgccacccaaggaggatatgggagctctgactgggtgaccagctacctcctgatgttcagtgatggtgggagaaactggaagcagtatcgccgagaagaaagcatctggggttttccaggaaacacaaacgcagacagtgtggtgcactacagactccagcctccctttgaagccaggttcctgcgctttctccctttagcctggaaccctaggggcaggattgggatgcggatcgaagtgtacggatgtgcatataaatctgaggtggtttattttgatggacaaagtgctctgctgtatagacttgataaaaaacctttaaaaccaataagagacgttatttctttgaaatttaaagccatgcagagcaatggaattctacttcacagagaaggacaacatggaaatcacattactctggaattaattaaaggaaagcttgtcttttttcttaattcaggcaatgctaagctgccttccactattgctcctgtgaccctcaccctgggcagcctgctggacgaccagcactggcattccgtcctcatcgagctcctcgacacgcaggtcaacttcaccgtggacaaacacactcatcatttccaagcaaagggagattccagttacttggatcttaattttgagatcagctttgggggaattccgacacccggaagatcgcgggcattcagacgtaaaagctttcatgggtgtttagaaaatctttattataatggagtggatgttaccgaattagccaagaaacacaaaccacagatcctcatgatgggaaatgtgtccttctcatgtccacagccacagactgtccctgtgacttttctgagctccaggagttatctggctctgccaggcaactctggggaggacaaagtgtctgtcacttttcaatttcgaacgtggaacagagcaggacatttgcttttcggcgaacttcgacgtggttcagggagtttcgtcctctttcttaaggatggcaagctcaaactgagtctcttccagccgggacagtcaccaaggaatgtcacagcaggtgctggattaaacgatgggcagtggcactctgtgtccttctctgccaagtggagccatatgaatgtggtggtggacgatgacacagctgttcagcccctggtggctgtgctcattgattcaggtgacacctattattttggagctctctacgagcagtcttgtgaagcccacaagcaccgagggaacccgtctgggctttactatattgatgcagatggaagtggccccctgggaccatttcttgtgtactgcaatatgacagacgccgcgtggacggtggtgcagcacggtggccccgacgcggtgaccctccgaggtgcccccagcgggcacccgcgctcggctgtgtccttcgcgtacgcagcgggcgcggggcagctgcggtccgcggtgaacctggcggagcgctgcgagcagcggctggctctgcgctgcgggacggcgcggcgcccggactcacgagatggaaccccactgagctggtgggttggaagaaccaatgaaacacacacctactggggagtttctctgcctgatgctcaaaagtgtacttgtggattagaggggaactgcattgattctcagtattactgcaactgtgatgctggccggaatgaatggactagtgacacaatagtcctttcccaaaaggagcacctgccagtcactcagattgtgatgacagacgcaggccgaccacattccgaagcagcttatacactggggccactgctctgccgcggagatcagtcattctggaattcagcttccttcaacactgagacttcataccttcatttccctgctttccacggagaactcactgctgacgtgtgcttcttttttaagaccacagtttcctccggggtgtttatggagaacctggggatcacagatttcatcaggattgagctgcgtgctcccacagaagtgaccttttccttcgatgtggggaatggaccttgtgaggtcacggtgcagtcacccactccctttaatgacaatcagtggcaccacgtgagggcagagagaaatgttaaaggagcgtctcttcaagttgatcagcttcctcagaagatgcagcctgcccctgctgatgggcacgttcgtttacagctcaacagccagctcttcattggtggaacggccaccagacagagaggctttctaggatgcattcggtctctgcagttgaacggggtggccctggatctggaagaaagagccacagtgacgccaggagtggagccagggtgtgcaggacactgcagcacctatggacacttgtgtcgcaatggagggagatgcagagagaaacgcaggggggtcacctgtgactgtgccttctcagcctatgatgggccgttctgc

SEQ ID NO: 3396 - DNA, 3648 bp, Homo Sapiens
gggaattcctatgactgtgatgatcctcttgtgtctgccttgcctcaggcatccttcagcagttcttccgagctctccagcagtcatggtcctggatttgcaaggctgaatagaagagatggagctggtggctggtctccacttgtgtctaacaaataccagtggttgcagattgaccttggagagagaatggaggtcaccgctgtggccactcaagggggatatggtagctccaactgggtgaccagctacctcctgatgttcagtgatagtggctggaactggaaacaatatcgccaagaggacagcatctggggtttttcaggaaatgcaaatgcagacagtgttgtgtactatagactccagccttctatcaaagccagatttctgcgcttcatccctttggaatggaaccccaagggcagaattggaatgcgaatcgaagtgttcggatgtgcatacagatcagaagtggttgatcttgatggaaaaagttcccttctctacagatttgatcaaaaatccctgagcccaataaaagacattatttctttgaaattcaaaaccatgcagagtgatgggattctactccacagggaagggccaaatggagatcacatcacactgcaattaagaagagcaagactctttttacttattaattcaggtgaagctaaactgccttccacttccaccctggtcaatctcaccctgggcagcctgctagatgatcagcattggcattcagtgctcatccagcgtttgggcaaacaagtcaacttcacagtggacgaacacaggcatcatttccatgcacggggagaattcaatctcatgaatcttgattatgagatcagctttggagggattccagcacctggaaaatcagtgtcattcccacatagaaattttcatggatgtttagaaaatctctattataatggagtggatatcattgatttggccaagcagcaaaaaccacagatcattgctatgggaaatgtgtcattttcttgttcacaaccacaatctatgcccgtgacttttctgagctccaggagttatttagcactgccagacttctctggagaggaggaggtttctgccacttttcaatttcgaacttggaataaggcagggcttctgctgttcagtgaacttcagctgatttcagggggtatcctcctctttctgagtgatggaaaacttaagtcgaatctctaccagccaggaaaattacccagtgacatcacagcaggtgtcgaattaaatgatgggcagtggcattctgtctctttatctgctaaaaagaatcacttgagtgtggcggtggacggccagatggcttctgctgctcctctgctggggcctgagcagatttattcgggtggcacctattattttggaggttgtcctgacaaaagctttggatccaaatgtaaaagtccacttggtggatttcagggatgtatgaggctcatttctatcagcggcaaagtggtagatctgatttcagttcagcaggggtcccttgggaacttcagtgaccttcagatagactcatgtggcatctcagacaggtgtttgcccaactattgtgaacacggtggggagtgttcccagtcctggagcacctttcattgtaactgtaccaacactggttacagaggagctacttgccataactctatctatgagcagtcatgtgaagcctataagcacagaggaaatacttcagggttttactatatagattcagatggaagtggtcccctggaaccatttcttctatattgcaatatgaccgaaactgcatggaccatcatacagcacaacggctctgacttaacaagagtcagaaatactaatccagagaacccatatgctgggtttttcgagtatgtggccagcatggagcaacttcaggccactattaaccgtgcagagcactgtgaacaggagtttacttattactgcaagaagtcacggctggtcaataagcaagatggaacccctctgagttggtgggtaggaagaaccaatgaaacgcaaacctactggggaggttcttcgcctgatcttcaaaaatgtacttgtggattagagggaaactgcattgattctcagtattactgcaattgtgatgctgaccggaatgaatggaccaatgacactggattgcttgcttataaagaacatcttccagtaactaagatcgtgattacagacacaggccgactgcattcagaagcagcttataaactggggcctctgctctgccagggagacagatcattttggaattcagcttcctttgataccgaggcttcatatcttcattttcctaccttccacggagaacttagcgcggatgtatctttcttttttaagacaacagcttcatctggggtatttttagagaacttggggattgctgattttatacggatagagcttcgctctccgacagtagtgactttttcatttgatgtggggaatgggccttttgaaatctcagtgcagtcacccacccacttcaacgacaaccagtggcaccatgtgagggttgaaaggaacatgaaggaggcctcccttcaagtggatcagctgacaccaaagacacagcccgcccccgctgatgggcatgtcctgttacagctcaacagtcagctcttcgtgggtggaacggccaccagacagagaggctttctgggctgcattcggtctctgcagttgaatgggatgaccctggatttggaagaaagagcccaggtgactccagaagtgcagccaggttgtaggggacattgcagcagctatgggaagttatgccgcaatggagggaaatgcagagaaagacccattgggttcttttgtgactgcactttctctgcatacacagggccattctgctcaaatgagatttctgcatattttggatctggctcatccgtgatatacaattttcaagaaaattatcttttaagtaaaaactccagctcccacgctgcttcatttcatggtgatatgaagctgagcagagaaatgatcaaatttagtttccgaacaacacgaacaccaagcttgctgctttttgtgagctccttttacaaagaatacctttctgtgatcattgccaaaaatggaagtttgcagatcaggtacaagttaaataaatatcaagagcctgatgttgttaactttgattttaaaaacatggctgatggacaacttcaccacataatgattaacagagaagaaggagtggtctttatagagattgacgataatagaaggagacaagttcacctgtcatcaggcacagaattcagtgcagtcaaatctctggtattgggcaggattttagaacacagtgatgtggaccaggatactgcactggcaggtgcgcagggcttcacaggctgcctctctgcagtgcagctcagccacgtggcccctctgaaggcagctctgcaccccagccacccagaccctgtcactgttacaggacacgtgactgagtccagctgtatggcccagcctggcactgatgccacatcaagggaaaggacacactcgtttgcagatcattctggaacaatagatgacagagagccccttgctaatgcaatcaaaagtgactctgca

SEQ ID NO: 3397 - DNA, 3639 bp, Homo Sapiens
gcgacaaactacaactgtgatgatccactagcatccctgctctctccaatggctttttccagttcctcagacctcactggcactcacagcccagctcaactcaactggagagttggaactggcggttggtccccagcagattccaatgctcaacagtggctccagatggacctgggaaacagagtagagattacagcagtggccacgcagggaagatacggaagctctgactgggtgacgagttacagcctgatgttcagtgacacaggacgcaactggaaacagtacaaacaagaagacagcatctggacctttgcaggaaacatgaatgctgacagcgtggtgcaccacaagctattgcactcagtgagagcccgatttgttcgctttgtgcccctggaatggaatcccagtgggaagattggcatgagagtcgaggtctacggatgttcctataaatcagatgttgctgactttgatggccgaagctcacttctgtacaggttcaatcagaagttgatgagtactctcaaagatgtgatctccctgaagttcaagagcatgcaaggagatggggtcctgttccatggagaaggtcagcgtggagaccacatcaccttggaactccagaaggggaggctcgccctacacctcaatttgggtgacagcaaagcgcggctcagcagcagcttgccctctgccaccctgggcagcctcctggatgaccagcactggcactcggtcctcattgagcgggtgggcaagcaggtgaacttcacggtggacaagcacacacagcacttccgcaccaagggcgagacggatgccttagacattgactatgagcttagttttggaggaattccagtaccaggaaaacctgggacctttttaaagaaaaacttccatggatgcatcgaaaacctttactacaatggagtaaacataattgacctggctaagagacgaaagcatcagatctatactggcaatgtcactttttcctgctccgaaccacagattgtgcccatcacatttgtcaactccagcggcagctatttgctgctgcccggcaccccccaaattgatgggctctcagtgagtttccagtttcgaacatggaacaaggatggtctgcttctgtccacagagctgtctgagggctcgggaaccctgctgctgagcctggagggtggaatcctgagactcgtgattcagaaaatgacagaacgcgtagctgaaatcctcacaggcagcaacttgaatgatggcctgtggcactcggttagcatcaacgccaggaggaaccgcatcacgctcactctggatgatgaagcagcacccccggctccagacagcacttgggtgcagatttattctggaaatagctactattttggagggtgccccgacaatctcaccgattcccaatgtttaaatcccattaaggctttccaaggctgcatgaggctcatctttattgataaccagcccaaggacctcatttcagttcagcaaggttccctggggaattttagtgatttacacattgatctgtgtagcatcaaagacaggtgtttgccaaactactgtgaacatggaggaagctgctcccagtcctggactaccttctattgtaactgcagtgacacaagttacactggtgccacctgccacaactccatctacgagcaatcctgcgaggtgtacaggcaccaggggaatacagccggcttcttctacatcgactcagatggcagcggcccactgggacctctccaggtgtactgcaatatcactgaggacaagatctggacatcagtgcagcacaacaatacagagctgacccgagtgcggggcgctaaccctgagaagccctatgccatggccttggactacgggggcagcatggaacagctggaggccgtgatcgacggctctgagcactgtgagcaggaggtggcctaccactgcaggaggtcccgcctgctcaacacgccggatggaacaccatttacctggtggattgggcggtccaatgaaaggcacccttactggggaggttcccctcctggggtccagcagtgtgagtgtggcctagacgagagctgcctggacattcagcacttttgcaattgcgacgctgacaaggatgaatggacaaatgatactggctttctttccttcaaagaccacttgcctgtcactcagatagttatcactgataccgacagatcaaactcagaagccgcttggagaattggtcccttgcgttgctatggtgaccgacgcttctggaacgccgtctcattttatacagaagcctcttacctccactttcctaccttccatgcggaattcagtgccgatatttccttcttttttaaaaccacagcattatccggagttttcctagaaaatcttggcattaaagacttcattcgactcgaaataagctctccttcagagatcacctttgccatcgatgttgggaatggtcctgtggagcttgtagtccagtctccttctcttctgaatgacaaccaatggcactatgtccgggctgagaggaacctcaaggagacctccctgcaggtggacaaccttccaaggagcaccagggagacgtcggaggagggccattttcgactgcagctgaacagccagttgtttgtagggggaacgtcatccagacagaaaggcttcctaggatgcattcgctccttacacttgaatggacagaaaatggacctggaagagagggcaaaggtcacatctggagtcaggccaggctgccccggccactgcagcagctacggcagcatctgccacaacgggggcaagtgtgtggagaagcacaatggctacctgtgtgattgcaccaattcaccttatgaagggcccttttgcaaaaaagaggtttctgctgtttttgaggctggcacgtcggttacttacatgtttcaagaaccctatcctgtgaccaagaatataagcctctcatcctcagctatttacacagattcagctccatccaaggaaaacattgcacttagctttgtgacaacccaggcacccagtcttttgctctttatcaattcttcttctcaggacttcgtggttgttctgctctgcaagaatggaagcttacaggttcgctatcacctaaacaaggaagaaacccatgtattcaccattgatgcagataactttgctaacagaaggatgcaccacttgaagattaaccgagagggaagagagcttaccattcagatggaccagcaacttcgactcagttataacttctctccggaagtagagttcagggttataaggtcactcaccttgggcaaagtcacagagaatcttggtttggattctgaagttgctaaagcaaatgccatgggttttgctggatgcatgtcttccgtccagtacaaccacatagcaccactgaaggctgccctgcgccatgccactgtcgcgcctgtgactgtccatgggaccttgacggaatccagctgtggcttcatggtggactcagatgtgaatgcagtgaccacggtgcattcttcatcagatccttttgggaagacagatgagcgggaaccactcacaaatgctgttcgaagtgattcg

SEQ ID NO: 3398 - DNA, 2277 bp, Homo Sapiens
atggatcctggagcattggagatgaaaaatttcaataagatcatcagctttctatacagcactgttggagccctgaacaagattggcacagatggaacccaagttgcaatggttcagttcactgatgatcccagaacagaatttaaactaaatgcttacaaaaccaaagagactcttcttgatgcaattaaacacatttcatacaaaggaggaaatacaaaaacaggaaaagcaattaagtatgttcgagataccttgttcactgcagagtcaggtacaagaaggggcatcccaaaggttatcgtggttataactgatggaagatcacaagatgatgtgaacaaaatctccagggagatgcaattagatggctatagcatttttgcaattggtgtggccgatgcagattactcggagttggttagcattggcagtaagcccagcgcacgccatgtcttctttgtggatgactttgacgcctttaagaaaatcgaagatgagttaattacttttgtctgcgaaacagcatcagcaacctgtccagtggtacacaaggatggcattgatcttgcaggatttaagatgatggaaatgtttggtttggttgaaaaagatttttcatcagtggaaggggtttctatggagcctggtaccttcaatgtgtttccatgttaccaactccataaagatgccctggtttcccagccaaccaggtacttgcacccagaaggattgccctccgactacacaatcagttttctattccggattcttcctgacactccacaggagccatttgctctttgggagattttaaataaaaattctgacccattggttggggttattttagacaatggtgggaaaactctaacatatttcaactatgaccagagtggggattttcaaactcttactttcgaaggacctgaaattaggaaaattttttatggaagctttcacaagctacacattgttgtcagtgagactttggtcaaagtggttattgactgcaagcaagtgggtgagaaggcaatgaacgcatcagctaatatcacgtcagatggtgtagaagtgctagggaaaatggttcgatcaagaggaccaggtggaaactctgcaccgttccagttacagatgtttgatattgtttgctccacatcatgggccaatacagacaaatgctgtgaacttccaggcctgagagatgatgagtcttgcccagaccttccccattcctgctcctgttctgaaaccaatgaagtggctctgggaccagcgggcccaccaggtggtccaggactccgaggaccaaagggccagcaaggtgaaccgggtccaaagggaccagatggccctcggggtgaaattggtctgccaggacctcagggtccacctggacctcaaggaccaagtggtctgtccattcaaggaatgcccggaatgccaggagaaaaaggagagaaaggagatactggccttccaggtccacagggtatcccaggaggcgttggttcaccaggacgtgatggctcaccaggccagaggggccttccgggaaaggatggatcctcgggacctccaggaccaccagggccaataggcattcctggcacccctggagtcccagggatcacaggaagcatgggaccgcaaggcgccctgggaccacctggtgtccctggagcaaagggggaacgaggagagcggggtgacctgcagtctcaagccatggtgagatcagtggcgcgtcaagtatgcgaacagctcatccagagtcacatggccaggtacactgccatcctcaaccagattcccagccactcctcatccatccggactgtccaagggcctcctggggagcctgggaggccaggctcacctggagcccctggtgaacaaggacccccaggcacaccaggcttccccggaaatgcaggcgtgccagggaccccaggagaacgaggtctaactggtatcaaaggagaaaaaggaaatccaggcgttggaacccaaggtccaagaggcccccctggaccagcaggaccttcaggggagagtcggcctggcagccctgggccccctggctctcctggaccaagaggcccaccaggtcatctgggggttcctggaccccaaggtccttctggccagcctggatattgtgacccctcatcatgttctgcctatggtgtgagagctccccatccagatcagccagagttcacccctgtccaagatgagctggaagccatggaactgtggggccctggagtc

SEQ ID NO: 3399 - DNA, 3786 bp, Homo Sapiens
agagagcaagttcaagcaagcggtctcctgaggctggctgtgctgcctgaggaccggctgcagatgaagtggagagagtcggaggggagcggcctcggctacctggtgcaggtgaagcccatggcaggggactcggaacaggaggtgatactgaccaccaagacccataaggccacagtggggggcctgagcccctccaagggctacaccttgcagatcttcgagctcactggctctgggcgcttcctgctagctcggagggagtttgtgattgaggatctgaagagtagctccctggacaggagcagccagaggcccctcggctctggagccccggagcccaccccctcccacacggggagcccagaccctgagcaggcttctgagccccaagttgccttcacaccaagccaggatccgcgcactcctgccggcccccagttccgctgcctgccccccgtgcctgctgacatggtcttcctggtggacgggtcctggagcattggccacagtcacttccagcaggtcaaggacttcctggccagtgtcatcgcaccctttgaaatcgggccggataaggtccaagtaggcctgactcagtacagcggggatgctcagactgagtgggacctgaactccctcagcaccaaggaacaggtgctggcagctgtgcgccgcctccgctacaagggggggaacacgttcacaggccttgccctgacccacgtgctggggcagaacctgcagccggcggctggcctccgtccagaggcagccaaggtggtgattctggtgacggacggcaagtcccaggacgatgtgcacactgctgcccgtgtcctcaaggacctgggcgtgaacgtcttcgctgtgggtgtgaagaacgccgatgaggctgagctgaggctcctggcgtccccgccgagggacatcaccgtccacagcgtgctggacttcctgcagctcggcgcgctggctggcctgctcagccgtctcatctgccagaggctccagggtgggagcccgcggcagggcccagcagcggctccagccctggacaccctccctgcccccaccagcctggtcctgagccaggtgacctcctccagcatccgcctgtcctggactccagccccccggcaccccctcaagtatctgatcgtttggcgagcctctagaggtggcacccccagggaggtggtggtggaggggcccgccgcctccacggagctgcacaacctggcctcccgcacagagtacctggtctccgtgttccccatctatgagggcggggttggcgaaggcctgcggggcctggtgaccacagcacctctgcctccgccccgggcgctgaccctggccgcagtgacgcccagaaccgtccacctcacctggcagccatcggccggggccacccactacctggtgcgatgttctcctgcttcccccaagggtgaagaggaggagcgagaggtgcaggtcgggcggcccgaggtgctgctggatggcctggaacctggcagggactatgaggtctcggtgcagagcctgcgaggccctgagggcagcgaggcccggggcatccgtgccaggacccccaccctggcccccccgagacacctgggcttctcagacgtgagccacgacgcggcacgagtgttctgggagggtgccccgaggcctgtgcgcctggtcagggtcacctatgtgtccagcgagggtggacactcggggcagacagaggctcctgggaacgccacctcggccacgctggggcctctctcttcctccaccacctacactgtccgtgtcacctgcctctaccctgggggtggctcctctacgctgactggccgggtgaccaccaagaaagctcccagcccaagccagctgtccatgacggagctgccaggggatgcagtccagctggcgtgggtggccgcagccccgtctggcgtgcttgtctaccagatcacgtggacgcccctgggagaggggaaggctcacgagatctctgtcccagggaacctcggcacggccgtcctgcctggcctagggaggcacacagagtacgacgtcaccatcttggcctactacagggacggggcccgcagtgaccctgtgtccctccgctataccccctccacggtgagcaggagcccaccctccaacctggccctggcctcggagacccccgacagcctgcaggtcagctggacgcccccgcttggccgcgtgctccattactggctcacctacgcccccgcctctggcttgggacccgagaaatccgtctctgtgccaggagccaggagccacgtgacactgcccgacctgcaggcagccacgaagtacagggtcctggtctcagctatctatgcagcaggcaggagtgaggctgtgtctgccacgggccagacagcctgcccagccctccgccctgacggctccctcccagggtttgacctgatggtggccttcagcctggtggaaaaggcttatgcgtccatccggggcgtggccatggagccctctgccttcggtgggaccccgaccttcacgctcttcaaggacgcccagctgacaagacgggtcagtgacgtctacccagcccccctacctccagagcacaccatcgtcttccttgtgcgcctacttcccgagacaccccgtgaggccttcgcgctgtggcagatgacagccaaggacttccagcccctccttggggttctgctggatgccgggaagaagtccctgacctacttccaccgtgaccccagggctgccttgcaggaggccaccttcgacccgcaggaagtgaggaagattttcttcgggagcttccacaaggtgcacgtggctgtgggccgctccaaggtcaggctctatgtggactgccggaaggtggctgagcggccccttggggagatgggcagcccacccgctgccggcttcgtcacgctggggaggctggccaaggccaggggccccaggagcagttcggccgcgtttcagctccagatgctgcagatcgtgtgcagtgacacctgggccgatgaggaccggtgctgtgagctccctgcctcgagggatggagagacctgccccgccttcgtgtctgcctgttcctgttcctcagagacccctgggcccccaggacctcaaggacccccaggcctccctgggaggaatggcaccccaggagagcagggcttcccagggcccaggggtccaccaggggtcaaaggagagaagggagaccatgggcttccaggcttgcagggccaccccggccaccagggcatccccgggagagttggcctccagggaccaaagggaatgagaggcctggagggaactgctggcctgcctggaccccctggccccagggggttccagggcatggcaggggccaggggcactagtggagagcgaggacctccagggaccgtggggcccacaggactgccagggcccaaaggggaacgaggagagaagggcgagcagcagtcccttgccaccctctaccagcttgtgagccaggcctcacacgtgtcaaagttcgactccttccacgagaacaccaggccccccatgcccatcttggagcagaagctggagccgggcactgagcccctggggtcacctggcacccgcagcaaggccctggttcctggagaatgggggcgtggtggccgccaccttgagggcagaggggagcctggagctgttggtcagatgggcagccctgggcagcagggggctagcacccagggcctctgggag

SEQ ID NO: 3400 - DNA, 750 bp, Homo Sapiens
ctggatattgatagccgtcctaccgctgaagtctgtgccacacacacaatttcaccaggacccaaaggagatgatggtgaaaaaggagatccaggagaagagggaaagcatggcaaagtgggacgcatggggccgaaaggaattaaaggagaactgggtgatatgggagatcagggcaatattggcaagactgggcccattgggaagaagggtgacaaaggggaaaaaggtttgcttggaatacctggagaaaaaggcaaagcaggtactgtctgtgattgtggaagataccggaaatttgttggacaactggatattagtattgctcggctcaagacatctatgaagtttgtcaagaatgtgatagcagggattagggaaactgaagagaaattctactacatcgtgcaggaagagaagaactacagggaatccctaacccactgcaggattcggggtggaatgctagccatgcccaaggatgaagctgccaacacactcatcgctgactatgttgccaagagtggcttctttcgggtgttcattggcgtgaatgaccttgaaagggagggacagtacatgttcacagacaacactccactgcagaactatagcaactggaatgagggggaacccagcgacccctatggtcatgaggactgtgtggagatgctgagctctggcagatggaatgacacagagtgccatcttaccatgtactttgtctgtgagttcatcaagaagaaaaag

SEQ ID NO: 3401 - DNA, 738 bp, Homo Sapiens
cagccggctggcgatgacgcctgctctgtgcagatcctcgtccctggcctcaaaggggatgcgggagagaagggagacaaaggcgcccccggacggcctggaagagtcggccccacgggagaaaaaggagacatgggggacaaaggacagaaaggcagtgtgggtcgtcatggaaaaattggtcccattggctctaaaggtgagaaaggagattccggtgacataggaccccctggtcctaatggagaaccaggcctcccatgtgagtgcagccagctgcgcaaggccatcggggagatggacaaccaggtctctcagctgaccagcgagctcaagttcatcaagaatgctgtcgccggtgtgcgcgagacggagagcaagatctacctgctggtgaaggaggagaagcgctacgcggacgcccagctgtcctgccagggccgcgggggcacgctgagcatgcccaaggacgaggctgccaatggcctgatggccgcatacctggcgcaagccggcctggcccgtgtcttcatcggcatcaacgacctggagaaggagggcgccttcgtgtactctgaccactcccccatgcggaccttcaacaagtggcgcagcggtgagcccaacaatgcctacgacgaggaggactgcgtggagatggtggcctcgggcggctggaacgacgtggcctgccacaccaccatgtacttcatgtgtgagtttgacaaggagaacatg

SEQ ID NO: 3402 - DNA, 2052 bp, Homo Sapiens
tataaagttgtagagaaaatggacaatgtcacaggtggcatggaaacatctcgccaaacctatgatgacaagctcacagcagtggaaagtgacctggaaaaattaggtgaccaaactgggaagaaagctatcagcaccaactcagaactctccaccttcagatcagacattctagatctccgtcagcaacttcgtgagattacagaaaaaaccagcaagaacaaggatacgctggagaagttacaggcgagcggggatgctctggtggacaggcagagtcaattgaaagaaactttggagaataactctttcctcatcaccactgtaaacaaaaccctccaggcgtataatggctatgtcacgaatctgcagcaagataccagcgtgctccagggcaatctgcagaaccaaatgtattctcataatgtggtcatcatgaacctcaacaacctgaacctgacccaggtgcagcagaggaacctcatcacgaatctgcagcggtctgtggatgacacaagccaggctatccagcgaatcaagaacgactttcaaaatctgcagcaggtttttcttcaagccaagaaggacacggattggctgaaggagaaagtgcagagcttgcagacgctggctgccaacaactctgcgttggccaaagccaacaacgacaccctggaggatatgaacagccagctcaactcattcacaggtcagatggagaacatcaccactatctctcaagccaacgagcagaacctgaaagacctgcaggacttacacaaagatgcagagaatagaacagccatcaagttcaaccaactggaggaacgcttccagctctttgagacggatattgtgaacatcattagcaatatcagttacacagcccaccacctgcggacgctgaccagcaatctaaatgaagtcaggaccacttgcacagatacccttaccaaacacacagatgatctgacctccttgaataataccctggccaacatccgtttggattctgtttctctcaggatgcaacaagatttgatgaggtcgaggttagacactgaagtagccaacttatcagtgattatggaagaaatgaagctagtagactccaagcatggtcagctcatcaagaattttacaatactacaaggtccaccgggccccaggggtccaagaggtgacagaggatcccagggaccccctggcccaactggcaacaagggacagaaaggagagaagggggagcctggaccacctggccctgcgggtgagagaggcccaattggaccagctggtccccccggagagcgtggcggcaaaggatctaaaggctcccagggccccaaaggctcccgtggttcccctgggaagcccggccctcagggccccagtggggacccaggccccccgggcccaccaggcaaagagggactccccggccctcagggccctcctggcttccagggacttcagggcaccgttggggagcctggggtgcctggacctcggggactgccaggcttgcctggggtaccaggcatgccaggccccaagggcccccccggccctcctggcccatcaggagcggtggtgcccctggccctgcagaatgagccaaccccggcaccggaggacaatagctgcccgcctcactggaagaacttcacagacaaatgctactatttttcagttgagaaagaaatttttgaggatgcaaagcttttctgtgaagacaagtcttcacatcttgttttcataaacactagagaggaacagcaatggataaaaaaacagatggtagggagagagagccactggatcggcctcacagactcagagcgtgaaaatgaatggaagtggctggatgggacatctccagactacaaaaattggaaagctggacagccggataactggggtcatggccatgggccaggagaagactgtgctgggttgatttatgctgggcagtggaacgatttccaatgtgaagacgtcaataacttcatttgcgaaaaagacagggagacagtactgtcatctgcatta

SEQ ID NO: 3403 - DNA, 2211 bp, Homo Sapiens
cagggccagagcccgttgggctcagacctgggcccgcagatgcttcgggaactgcaggaaaccaacgcggcgctgcaggacgtgcgggagctgctgcggcagcaggtcagggagatcacgttcctgaaaaacacggtgatggagtgtgacgcgtgcgggatgcagcagtcagtacgcaccggcctacccagcgtgcggcccctgctccactgcgcgcccggcttctgcttccccggcgtggcctgcatccagacggagagcggcgcgcgctgcggcccctgccccgcgggcttcacgggcaacggctcgcactgcaccgacgtcaacgagtgcaacgcccacccctgcttcccccgagtccgctgtatcaacaccagcccggggttccgctgcgaggcttgcccgccggggtacagcggccccacccaccagggcgtggggctggctttcgccaaggccaacaagcaggtttgcacggacatcaacgagtgtgagaccgggcaacataactgcgtccccaactccgtgtgcatcaacacccggggctccttccagtgcggcccgtgccagcccggcttcgtgggcgaccaggcgtccggctgccagcggcgcgcacagcgcttctgccccgacggctcgcccagcgagtgccacgagcatgcagactgcgtcctagagcgcgatggctcgcggtcgtgcgtgtgtgccgttggctgggccggcaacgggatcctctgtggtcgcgacactgacctagacggcttcccggacgagaagctgcgctgcccggagcgccagtgccgtaaggacaactgcgtgactgtgcccaactcagggcaggaggatgtggaccgcgatggcatcggagacgcctgcgatccggatgccgacggggacggggtccccaatgaaaaggacaactgcccgctggtgcggaacccagaccagcgcaacacggacgaggacaagtggggcgatgcgtgcgacaactgccggtcccagaagaacgacgaccaaaaggacacagaccaggacggccggggcgatgcgtgcgacgacgacatcgacggcgaccggatccgcaaccaggccgacaactgccctagggtacccaactcagaccagaaggacagtgatggcgatggtataggggatgcctgtgacaactgtccccagaagagcaacccggatcaggcggatgtggaccacgactttgtgggagatgcttgtgacagcgatcaagaccaggatggagacggacatcaggactctcgggacaactgtcccacggtgcctaacagtgcccaggaggactcagaccacgatggccagggtgatgcctgcgacgacgacgacgacaatgacggagtccctgacagtcgggacaactgccgcctggtgcctaaccccggccaggaggacgcggacagggacggcgtgggcgacgtgtgccaggacgactttgatgcagacaaggtggtagacaagatcgacgtgtgtccggagaacgctgaagtcacgctcaccgacttcagggccttccagacagtcgtgctggacccggagggtgacgcgcagattgaccccaactgggtggtgctcaaccagggaagggagatcgtgcagacaatgaacagcgacccaggcctggctgtgggttacactgccttcaatggcgtggacttcgagggcacgttccatgtgaacacggtcacggatgacgactatgcgggcttcatctttggctaccaggacagctccagcttctacgtggtcatgtggaagcagatggagcaaacgtattggcaggcgaaccccttccgtgctgtggccgagcctggcatccaactcaaggctgtgaagtcttccacaggccccggggaacagctgcggaacgctctgtggcatacaggagacacagagtcccaggtgcggctgctgtggaaggacccgcgaaacgtgggttggaaggacaagaagtcctatcgttggttcctgcagcaccggccccaagtgggctacatcagggtgcgattctatgagggccctgagctggtggccgacagcaacgtggtcttggacacaaccatgcggggtggccgcctgggggtcttctgcttctcccaggagaacatcatctgggccaacctgcgttaccgctgcaatgacaccatcccagaggactatgagacccatcagctgcggcaagcc

SEQ ID NO: 3404 - DNA, 1296 bp, Homo Sapiens
gcgcagcctcaggccccgggttacttgattgcagctccctctgtttttcgcgcgggcgtggaggaagtcatcagcgtgaccatctttaactctccaagggaagtcacggtccaggctcagctggtggcccagggtgagccggtggtgcagagccagggagccatcctggataaagggacaatcaaactcaaggtgcccacgggcctccggggccaagcgcttctgaaagtgtggggccgcggctggcaggcggaggaggggcccctctttcacaaccagacctcggtgaccgtggacggccggggcgcttctgtattcatccagacggacaagcctgtgtacagaccccagcaccgagtgctcataagcatcttcaccgtctctccaaatctgaggcctgtcaacgagaagctggaagcctacatcctggacccccgaggctctcggatgatagagtggagacacttaaagccgttctgctgcggcatcaccaacatgagcttccccttgtccgaccagcctgtgttgggagaatggttcatttttgttgaaatgcaaggccacgcgtacaacaagtcttttgaagttcagaagtatgtgttgcccaagtttgagcttctgattgacccgccccggtatatccaagacctggacgcctgtgagacaggcactgtgcgggccaggtatacctttgggaaacctgtggctggtgccttaacgatcaacatgactgttaatggtgtagggtactacagccacgaggtgggacgccctgtcctcagaacaaccaagatcctcggctcccaggacttcgacatctgcgtgagggacatgatcccagcggacgtccctgagcacttccggggcagggtcagcatctgggccatggtgaccagtgtggacgggagccagcaggtcgcgttcgatgactccacccccgtgcagaggcagctggtggacatccggtactccaaggacacgaggaagcagttcaagccgggcctggcctacgtggggaaggtggagctatcctaccccgatggcagcccagctgagggggtgacggtccagattaaggcagagctgacaccaaaggataacatctacaccagtgaagttgtgtcccagcgtggactagtggggtttgaaatcccctccatccccacgtcagcccagcacgtgtggctggaggttttccaggaactggaagattatgatgtttctgattcctttggcgtgtccagggaggatggtcctttttggtgggctgggctgacggcacaacgacgccggcgc

SEQ ID NO: 3405 - DNA, 1572 bp, Homo Sapiens
tgtcccatgggttgtgactgcttcgtccaggaggtgttctgctcagatgaggagcttgccaccgtcccgctggacatcccgccatatacgaaaaacatcatctttgtggagacctcgttcaccacattggaaaccagagcttttggcagtaaccccaacttgaccaaggtggtcttcctcaacactcagctctgccagtttaggccggatgcctttggggggctgcccaggctggaggacctggaggtcacaggcagtagcttcttgaacctcagcaccaacatcttctccaacctgacctcgctgggcaagctcaccctcaacttcaacatgctggaggctctgcccgagggtcttttccagcacctggctgccctggagtccctccacctgcaggggaaccagctccaggccctgcccaggaggctcttccagcctctgacccatctgaagacactcaacctggcccagaacctcctggcccagctcccggaggagctgttccacccactcaccagcctgcagaccctgaagctgagcaacaacgcgctctctggtctcccccagggtgtgtttggcaaactgggcagcctgcaggagctcttcctggacagcaacaacatctcggagctgccccctcaggtgttctcccagctcttctgcctagagaggctgtggctgcaacgcaacgccatcacgcacctgccgctctccatctttgcctccctgggtaatctgacctttctgagcttgcagtggaacatgcttcgggtcctgcctgccggcctctttgcccacaccccatgcctggttggcctgtctctgacccataaccagctggagactgtcgctgagggcacctttgcccacctgtccaacctgcgttccctcatgctctcatacaatgccattacccacctcccagctggcatcttcagagacctggaggagttggtcaaactctacctgggcagcaacaaccttacggcgctgcacccagccctcttccagaacctgtccaagctggagctgctcagcctctccaagaaccagctgaccacacttccggagggcatcttcgacaccaactacaacctgttcaacctggccctgcacggtaacccctggcagtgcgactgccacctggcctacctcttcaactggctgcagcagtacaccgatcggctcctgaacatccagacctactgcgctggccctgcctacctcaaaggccaggtggtgcccgccttgaatgagaagcagctggtgtgtcccgtcacccgggaccacttgggcttccaggtcacgtggccggacgaaagcaaggcagggggcagctgggatctggctgtgcaggaaagggcagcccggagccagtgcacctacagcaaccccgagggcaccgtggtgctcgcctgtgaccaggcccagtgtcgctggctgaacgtccagctctctccttggcagggctccctgggactgcagtacaatgctagtcaggagtgggacctgaggtcgagctgcggttctctgcggctcaccgtgtctatcgaggctcgggcagcagggccc

SEQ ID NO: 3406 - DNA, 3966 bp, Homo Sapiens
ttttgcaataaaaacaacaccaggtgcctctcaaattcttgccaaaacaattctacatgcaaagatttttcaaaagacaatgattgttcttgttcagacacagccaataatttggacaaagactgtgacaacatgaaagacccttgcttctccaatccctgtcaaggaagtgccacttgtgtgaacaccccaggagaaaggagctttctgtgcaaatgtcctcctgggtacagtgggacaatctgtgaaactaccattggttcctgtggcaagaactcctgccaacatggaggtatttgccatcaggaccctatttatcctgtctgcatctgccctgctggatatgctggaagattctgtgagatagatcacgatgagtgtgcttccagcccttgccaaaatggggccgtgtgccaggatggaattgatggttactcctgcttctgtgtcccaggatatcaaggcagacactgcgacttggaagtggatgaatgtgcttcagatccctgcaagaacgaggctacatgcctcaatgaaataggaagatatacttgtatctgtccccacaattattctggtgtaaactgtgaattggaaattgacgaatgttggtcccagccttgtttaaatggtgcaacttgtcaggatgctctgggggcctatttctgcgactgtgcccctggattcctgggggatcactgtgaactcaacactgatgagtgtgccagtcaaccttgtctccatggagggctgtgtgtggatggagaaaacagatatagctgtaactgcacgggtagtggattcacagggacacactgtgagaccttgatgcctctttgttggtcaaaaccttgtcacaataatgctacatgtgaggacagtgttgacaattacacttgtcactgctggcctggatacacaggtgcccagtgtgagatcgacctcaatgaatgcaatagtaacccctgccagtccaatggggaatgtgtggagctgtcctcagagaaacaatatggacgcatcactggactgccttcttctttcagctaccatgaagcctcaggttatgtctgtatctgtcagcctggattcacaggaatccactgcgaagaagacgtcaatgaatgttcttcaaacccttgccaaaatggtggtacttgtgagaacttgcctgggaattatacttgccattgcccatttgataacctttctagaactttttatggaggaagggactgttctgatattctcctgggctgtacccatcagcaatgtctaaataatggaacatgcatccctcacttccaagatggccagcatggattcagctgcctgtgtccatctggctacaccgggtccctgtgtgaaatcgcaaccacactttcatttgagggcgatggcttcctgtgggtcaaaagtggctcagtgacaaccaagggctcagtttgtaacatagccctcaggtttcagactgttcagccaatggctcttctacttttccgaagcaacagggatgtgtttgtgaagctggagctgctaagtggctacattcacttatcaattcaggtcaataatcagtcaaaggtgcttctgttcatttcccacaacaccagcgatggagagtggcatttcgtggaggtaatatttgcagaggctgtgacccttaccttaatcgacgactcctgtaaggagaaatgcatcgcgaaagctcctactccacttgaaagtgatcaatcaatatgtgcttttcagaactcctttttgggtggtttaccagtgggaatgaccagcaatggtgttgctctgcttaacttctataatatgccatccacaccttcgtttgtaggctgtctccaagacattaaaattgattggaatcacattaccctggagaacatctcgtctggctcatcattaaatgtcaaggcaggctgtgtgagaaaggattggtgtgaaagccaaccttgtcaaagcagaggacgctgcatcaacttgtggctgagttaccagtgtgactgccacaggccctatgaaggccccaactgtctgagagagtatgtggcaggcagatttggccaggatgactccactggttatgtcatctttactcttgatgagagctatggagacaccatcagcctctccatgtttgtccgaacgcttcaaccatcaggcttacttctagctttggaaaacagcacttatcaatatatccgtgtctggctagagcgcggcagactagcaatgctgactccaaactctcccaaattagtagtaaaatttgttcttaatgatggaaatgtccacttgatatctttgaaaatcaagccatataaaattgaactgtatcagtcttcacaaaacctaggatttatttctgcttctacgtggaaaatcgaaaagggagatgtcatctacattggtggcctacctgacaagcaagagactgaacttaatggtggattcttcaaaggctgtatccaagatgtaagactaaacaaccaaaatctggaattctttccaaatccaacaaacaatgcatctctcaatccagttcttgtcaatgtaacccaaggctgtgctggagacaacagctgcaagtccaacccctgtcacaatggaggtgtttgccattcccggtgggatgacttctcctgttcctgtcctgccctcacaagtgggaaagcctgtgaggaggttcagtggtgtggattcagcccgtgtcctcacggagcccagtgccagccggtgcttcaaggatttgaatgtattgcaaatgctgtttttaatggacaaagcggtcaaatattattcagaagcaatgggaatattaccagagaactcaccaatatcacatttggtttcagaacaagggatgcaaatgtaataatattgcatgcagaaaaagagcctgaatttcttaatattagcattcaagattccagattattctttcaattgcaaagtggcaacagcttttatatgctaagtctgacaagtttgcagtcagtgaatgatggcacatggcacgaagtgaccctttccatgacagacccactgtcccagacctccaggtggcaaatggaagtggacaacgaaacaccttttgtgaccagcacaattgctactggaagcctcaactttttgaaggataatacagatatttatgtgggagacagagctattgacaatataaagggcctgcaagggtgtctaagtacaatagaaatcggaggcatttatctctcttactttgaaaatgttcatggtttcattaataaacctcaggaagagcaatttctcaaaatctctaccaattcagtggtcactggctgtttgcagttaaatgtctgcaactccaacccctgtttgcatggaggaaactgtgaagacatctatagctcttatcattgctcctgtcccttgggatggtcagggaaacactgtgaactcaacatcgatgaatgcttttcaaacccctgtatccatggcaactgctctgacagagttgcagcctaccactgcacatgtgagcctggatacactggtgtgaactgtgaagtggatatagacaactgccagagtcaccagtgtgcaaatggagccacctgcattagtcatactaatggctattcttgcctctgttttggaaattttacaggaaaattttgcagacagagcagattaccctcaacagtctgtgggaatgagaagacaaatctcacttgctacaatggaggcaactgcacagagttccagactgaattaaaatgtatgtgccggccaggttttactggagaatggtgtgaaaaggacattgatgagtgtgcctctgatccgtgtgtcaatggaggtctgtgccaggacttactcaacaaattccagtgcctctgtgatgttgcctttgctggcgagcgctgcgaggtggacttggcagatgacttgatctccgacattttcaccact

SEQ ID NO: 3407 - DNA, 1179 bp, Homo Sapiens
cagccctctccacctccccagtcttctcccccgcctcagccccatccgtgtcatacctgccggggactggttgacagctttaacaagggcctggagagaaccatccgggacaactttggaggtggaaacactgcctgggaggaagagaatttgtccaaatacaaagacagtgagacccgcctggtagaggtgctggagggtgtgtgcagcaagtcagacttcgagtgccaccgcctgctggagctgagtgaggagctggtggagagctggtggtttcacaagcagcaggaggccccggacctcttccagtggctgtgctcagattccctgaagctctgctgccccgcaggcaccttcgggccctcctgccttccctgtcctgggggaacagagaggccctgcggtggctacgggcagtgtgaaggagaagggacacgagggggcagcgggcactgtgactgccaagccggctacgggggtgaggcctgtggccagtgtggccttggctactttgaggcagaacgcaacgccagccatctggtatgttcggcttgttttggcccctgtgcccgatgctcaggacctgaggaatcaaactgtttgcaatgcaagaagggctgggccctgcatcacctcaagtgtgtagacattgatgagtgtggcacagagggagccaactgtggagctgaccaattctgcgtgaacactgagggctcctatgagtgccgagactgtgccaaggcctgcctaggctgcatgggggcagggccaggtcgctgtaagaagtgtagccctggctatcagcaggtgggctccaagtgtctcgatgtggatgagtgtgagacagaggtgtgtccgggagagaacaagcagtgtgaaaacaccgagggcggttatcgctgcatctgtgccgagggctacaagcagatggaaggcatctgtgtgaaggagcagatcccaggtgcattccccatcttaactgatttaacccctgaaacaacccgacgctggaagttgggttctcatccccactctacatatgtaaaaatgaagatgcagagagatgaagctactttcccagggctatatggcaagcaagtcgcaaagctgggatcccaatccagacagtctgaccgtggaacgagactcatacacagtcagcaggcttcttctcagaga

SEQ ID NO: 3408 - DNA, 987 bp, Homo Sapiens
gccaagaagccgacgccctgccaccggtgccgggggctggtggacaagtttaaccaggggatggtggacaccgcaaagaagaactttggcggcgggaacacggcttgggaggaaaagacgctgtccaagtacgagtccagcgagattcgcctgctggagatcctggaggggctgtgcgagagcagcgacttcgaatgcaaccagatgctagaggcgcaggaggagcacctggaggcctggtggctgcagctgaagagcgaatatcctgacttattcgagtggttttgtgtgaagacactgaaagtgtgctgctctccaggaacctacggtcccgactgtctcgcatgccagggcggatcccagaggccctgcagcgggaatggccactgcagcggagatgggagcagacagggcgacgggtcctgccggtgccacatggggtaccagggcccgctgtgcactgactgcatggacggctacttcagctcgctccggaacgagacccacagcatctgcacagcctgtgacgagtcctgcaagacgtgctcgggcctgaccaacagagactgcggcgagtgtgaagtgggctgggtgctggacgagggcgcctgtgtggatgtggacgagtgtgcggccgagccgcctccctgcagcgctgcgcagttctgtaagaacgccaacggctcctacacgtgcgaagagtgtgactccagctgtgtgggctgcacaggggaaggcccaggaaactgtaaagagtgtatctctggctacgcgagggagcacggacagtgtgcagatgtggacgagtgcgcactagcagaaaaaacctgtgtgaggaaaaacgaaaactgctacaatactccagggagctacgtctgtgtgtgtcctgacggcttcgaaggaacggaagatgcctgtgtgccgccggcagaggctgaagccacagaaggagaaagcccgacacagctgccctcccgcgaagacctg

SEQ ID NO: 3409 - DNA, 1155 bp, Homo Sapiens
gcccacacagctgtgatcagtccccaggatcccacgcttctcatcggctcctccctgctggccacctgctcagtgcacggagacccaccaggagccaccgccgagggcctctactggaccctcaacgggcgccgcctgccccctgagctctcccgtgtactcaacgcctccaccttggctctggccctggccaacctcaatgggtccaggcagcggtcgggggacaacctcgtgtgccacgcccgtgacggcagcatcctggctggctcctgcctctatgttggcctgcccccagagaaacccgtcaacatcagctgctggtccaagaacatgaaggacttgacctgccgctggacgccaggggcccacggggagaccttcctccacaccaactactccctcaagtacaagcttaggtggtatggccaggacaacacatgtgaggagtaccacacagtggggccccactcctgccacatccccaaggacctggctctctttacgccctatgagatctgggtggaggccaccaaccgcctgggctctgcccgctccgatgtactcacgctggatatcctggatgtggtgaccacggaccccccgcccgacgtgcacgtgagccgcgtcgggggcctggaggaccagctgagcgtgcgctgggtgtcgccacccgccctcaaggatttcctctttcaagccaaataccagatccgctaccgagtggaggacagtgtggactggaaggtggtggacgatgtgagcaaccagacctcctgccgcctggccggcctgaaacccggcaccgtgtacttcgtgcaagtgcgctgcaacccctttggcatctatggctccaagaaagccgggatctggagtgagtggagccaccccacagccgcctccactccccgcagtgagcgcccgggcccgggcggcggggcgtgcgaaccgcggggcggagagccgagctcggggccggtgcggcgcgagctcaagcagttcctgggctggctcaagaagcacgcgtactgctccaatctcagcttccgcctctacgaccagtggcgagcctggatgcagaagtcgcacaagacccgcaaccaggacgaggggatcctgccctcgggcagacggggcacggcgagaggtcctgccaga

SEQ ID NO: 3410 - DNA, 627 bp, Homo Sapiens
caggggggcgcagccgaaggagtgcaaatccaaatcatatacttcaaccttgagacggtgcaagtaacctggaacgcctcaaaatactctaggactaacctaacctttcattataggtttaacggggatgaagcctatgaccaatgcacaaattatctattacaagaaggacatacatctgggtgtttgttggacgcagaacaacgtgatgacatactatacttttcaataagaaacgggacccatcctgtattcactgcctcaaggtggatggtgtactacctaaagccgtctagccctaaacacgtcaggttcagttggcaccaagacgccgttacagtaacatgcagcgatttatcctacggcgacttgctttacgaggtgcaatacaggtccccattcgacacggagtggcagtctaaacaggaaaacacttgcaatgttactatagagggacttgacgccgaaaaatgttacagcttctgggtgagggttaaagctatggaggacgtttatggcccagatacctatccgagcgattggagtgaggtcacgtgttggcagcgtggagaaattagagacgcatgtgctgagaccccaacacctccaaagcctaaacttagtaaa

SEQ ID NO: 3411 - DNA, 309 bp, Homo Sapiens
gacaccaatgaatgcatccagttcccattcgtgtgccctcgagacaagcccgtatgtgtcaacacctatggaagctacaggtgccggaccaacaagaagtgcagtcggggctacgagcccaacgaggatggcacagcctgcgtggggactctcggccagtcaccgggcccccgccccaccacccccaccgctgctgctgccactgccgctgctgctgccgctgctggagctgccactgctgcaccggtcctcgtagatggagatctcaatctggggtcggtggttaaggagagctgcgagcccagctgc

SEQ ID NO: 3412 - DNA, 810 bp, Homo Sapiens
tctctgactaaccacacagaaaccatcaccgtggaggaaggccagacgctcactctaaagtgtgtcacttctctgaggaagaactcctccctccagtggctgaccccctcagggttcaccatttttttaaatgagtatcctgttttaaaaaattccaaataccagcttcttcatcactcggccaatcagctctccatcactgtgcctaacgtaaccctgcaagatgaaggcgtgtacaagtgcttacattacagcgactctgtaagcacaaaggaagtgaaagtgattgtgctggcaactcctttcaagccaatcctggaagcttcagttatcagaaagcaaaatggagaagaacatgttgtactcatgtgctccaccatgagaagcaagccccctccgcagataacctggctacttgggaatagcatggaagtgtccggtggaacgctccatgaatttgaaactgatgggaagaaatgtaatactaccagcactctcataatccacacttatggcaaaaattcaacggtggactgcattatccgacacagaggcctgcaagggagaaaactagtagcacccttccggtttgaagatttggttactgatgaagagacagcttcagatgctctggagagaaactctctatcctctcaagacccacagcagcccaccagtactgtctcagtaacggaagattctagtacatcggagattgacaaggaagagaaagaacaaaccactcaagatcctgacttgaccaccgaagcaaatcctcagtatttaggactggcaagaaagaaaagtggc

SEQ ID NO: 3413 - DNA, 1494 bp, Homo Sapiens
atcccagtgatagagcccagtgtccccgagctggtcgtgaagccaggagcaacggtgaccttgcgatgtgtgggcaatggcagcgtggaatgggatggccccccatcacctcactggaccctgtactctgatggctccagcagcatcctcagcaccaacaacgctaccttccaaaacacggggacctatcgctgcactgagcctggagaccccctgggaggcagcgccgccatccacctctatgtcaaagaccctgcccggccctggaacgtgctagcacaggaggtggtcgtgttcgaggaccaggacgcactactgccctgtctgctcacagacccggtgctggaagcaggcgtctcgctggtgcgtgtgcgtggccggcccctcatgcgccacaccaactactccttctcgccctggcatggcttcaccatccacagggccaagttcattcagagccaggactatcaatgcagtgccctgatgggtggcaggaaggtgatgtccatcagcatccggctgaaagtgcagaaagtcatcccagggcccccagccttgacactggtgcctgcagagctggtgcggattcgaggggaggctgcccagatcgtgtgctcagccagcagcgttgatgttaactttgatgtcttcctccaacacaacaacaccaagctcgcaatccatcaacaatctgactttcataataaccgttaccaaaaagtcctgaccctcaacctcgatcaagtagatttccaacatgccggcaactactcctgcgtggccagcaacgtgcagggcaagcactccacctccatgttcttccgggtggtagagagtgcctacttgaacttgagctctgagcagaacctcatccaggaggtgaccgtgggggaggggctcaacctcaaagtcatggtggaggcctacccaggcctgcaaggttttaactggacctacctgggacccttttctgaccaccagcctgagcccaagcttgctaatgttaccaccaaggacacatacaggcacaccttcaccctctctctgccccgcctgaagccctctgaggctggccgctactccttcctggccagaaacccaggaggctggagagctctgacgtttgagctcacccttcgataccccccagaggtaagcgtcatatggacattcatcaacggctctggcacccttttgtgtgctgcctctgggtacccccagcccaacgtgacatggctgcagtgcagtggccacactgataggtgtgatgaggcccaagtgctgcaggtctgggatgacccataccctgaggtcctgagccaggagcccttccacaaggtgacggtgcagagcctgctgactgttgagaccttagagcacaaccaaacctacgagtgcagggcccacaacagcgtggggagtggctcctgggccttcatacccatctctgcaggagcccacacgcatcccccggatgagttcctcttcacacca

SEQ ID NO: 3414 - DNA, 381 bp, Homo Sapiens
gcacccgcccgctcgcccagccccagcacgcagccctgggagcatgtgaatgccatccaggaggcccggcgtctcctgaacctgagtagagacactgctgctgagatgaatgaaacagtagaagtcatctcagaaatgtttgacctccaggagccgacctgcctacagacccgcctggagctgtacaagcagggcctgcggggcagcctcaccaagctcaagggccccttgaccatgatggccagccactacaagcagcactgccctccaaccccggaaacttcctgtgcaacccagattatcacctttgaaagtttcaaagagaacctgaaggactttctgcttgtcatcccctttgactgctgggagccagtccaggag

SEQ ID NO: 3415 - DNA, 894 bp, Homo Sapiens
gagaaatcggatctgcgaacagtggcaccagcctctagtctcaatgtgaggtttgactccaggacgatgaatttaagctgggactgccaagaaaacacaaccttcagcaagtgtttcttaactgacaagaagaacagagtcgtggaacccaggctcagtaacaacgaatgttcgtgcacatttcgtgaaatttgtctgcatgaaggagtcacatttgaggttcacgtgaatactagtcaaagaggatttcaacagaaactgctttatccaaattcaggaagggagggtaccgctgctcagaatttctcctgtttcatctacaatgcggatttaatgaactgtacctgggcgaggggtccgacggccccccgtgacgtccagtattttttgtacatacgaaactcaaagagaaggagggagatccggtgtccttattacatacaagactcaggaacccatgtgggatgtcacctggataacctgtcaggattaacgtctcgcaattactttctggttaacggaaccagccgagaaattggcatccaattctttgattcacttttggacacaaagaaaatagaacgattcaaccctcccagcaatgtcaccgtacgttgcaacacgacgcactgcctcgtacggtggaaacagcccaggacctatcagaagctgtcgtacctggactttcagtaccagctggacgtccacagaaagaatacccagcctggcacggaaaacctactgattaatgtttctggtgatttggaaaatagatacaactttccaagctctgagcccagagcaaaacacagtgtgaagatcagagctgcagacgtccgcatcttgaattggagctcctggagtgaagccattgaatttggttctgacgacggg

SEQ ID NO: 3416 - DNA, 1275 bp, Homo Sapiens
gaagaaaccatcccgctgcagaccctgcgctgctacaacgactacaccagccacatcacctgcaggtgggcagacacccaggatgcccagcggctcgtcaacgtgaccctcattcgccgggtgaatgaggacctcctggagccagtgtcctgtgacctcagtgatgacatgccctggtcagcctgcccccatccccgctgcgtgcccaggagatgtgtcattccctgccagagttttgtcgtcactgacgttgactacttctcattccaaccagacaggcctctgggcacccggctcaccgtcactctgacccagcatgtccagcctcctgagcccagggacctgcagatcagcaccgaccaggaccacttcctgctgacctggagtgtggcccttgggagtccccagagccactggttgtccccaggggatctggagtttgaggtggtctacaagcggcttcaggactcttgggaggacgcagccatcctcctctccaacacctcccaggccaccctggggccagagcacctcatgcccagcagcacctacgtggcccgagtacggacccgcctggccccaggttctcggctctcaggacgtcccagcaagtggagcccagaggtttgctgggactcccagccaggggatgaggcccagccccagaacctggagtgcttctttgacggggccgccgtgctcagctgctcctgggaggtgaggaaggaggtggccagctcggtctcctttggcctattctacaagcccagcccagatgcaggctctgctgtgctcctcagggaggaagagtgctccccagtgctgagggaggggctcggcagcctccacaccaggcaccactgccagattcccgtgcccgaccccgcgacccacggccaatacatcgtctctgttcagccaaggagggcagagaaacacataaagagctcagtgaacatccagatggcccctccatccctcaacgtgaccaaggatggagacagctacagcctgcgctgggaaacaatgaaaatgcgatacgaacacatagaccacacatttgagatccagtacaggaaagacacggccacgtggaaggacagcaagaccgagaccctccagaacgcccacagcatggccctgccagccctggagccctccaccaggtactgggccagggtgagggtcaggacctcccgcaccggctacaacgggatctggagcgagtggagtgaggcgcgctcctgggacaccgagtcggtgctgcctatgtgg

SEQ ID NO: 3417 - DNA, 525 bp, Homo Sapiens
gccacccccctgggccctgccagctccctgccccagagcttcctgctcaagtgcttagagcaagtgaggaagatccagggcgatggcgcagcgctccaggagaagctgtgtgccacctacaagctgtgccaccccgaggagctggtgctgctcggacactctctgggcatcccctgggctcccctgagcagctgccccagccaggccctgcagctggcaggctgcttgagccaactccatagcggccttttcctctaccaggggctcctgcaggccctggaagggatctcccccgagttgggtcccaccttggacacactgcagctggacgtcgccgactttgccaccaccatctggcagcagatggaagaactgggaatggcccctgccctgcagcccacccagggtgccatgccggccttcgcctctgctttccagcgccgggcaggaggggtcctagttgcctcccatctgcagagcttcctggaggtgtcgtaccgcgttctacgccaccttgcccagccc

SEQ ID NO: 3418 - DNA, 1809 bp, Homo Sapiens
gagtgcgggcacatcagtgtctcagcccccatcgtccacctgggggatcccatcacagcctcctgcatcatcaagcagaactgcagccatctggacccggagccacagattctgtggagactgggagcagagcttcagcccgggggcaggcagcagcgtctgtctgatgggacccaggaatctatcatcaccctgccccacctcaaccacactcaggcctttctctcctgctgcctgaactggggcaacagcctgcagatcctggaccaggttgagctgcgcgcaggctaccctccagccataccccacaacctctcctgcctcatgaacctcacaaccagcagcctcatctgccagtgggagccaggacctgagacccacctacccaccagcttcactctgaagagtttcaagagccggggcaactgtcagacccaaggggactccatcctggactgcgtgcccaaggacgggcagagccactgctgcatcccacgcaaacacctgctgttgtaccagaatatgggcatctgggtgcaggcagagaatgcgctggggaccagcatgtccccacaactgtgtcttgatcccatggatgttgtgaaactggagccccccatgctgcggaccatggaccccagccctgaagcggcccctccccaggcaggctgcctacagctgtgctgggagccatggcagccaggcctgcacataaatcagaagtgtgagctgcgccacaagccgcagcgtggagaagccagctgggcactggtgggccccctccccttggaggcccttcagtatgagctctgcgggctcctcccagccacggcctacaccctgcagatacgctgcatccgctggcccctgcctggccactggagcgactggagccccagcctggagctgagaactaccgaacgggcccccactgtcagactggacacatggtggcggcagaggcagctggaccccaggacagtgcagctgttctggaagccagtgcccctggaggaagacagcggacggatccaaggttatgtggtttcttggagaccctcaggccaggctggggccatcctgcccctctgcaacaccacagagctcagctgcaccttccacctgccttcagaagcccaggaggtggcccttgtggcctataactcagccgggacctctcgtcccactccggtggtcttctcagaaagcagaggcccagctctgaccagactccatgccatggcccgagaccctcacagcctctgggtaggctgggagccccccaatccatggcctcagggctatgtgattgagtggggcctgggcccccccagcgcgagcaatagcaacaagacctggaggatggaacagaatgggagagccacggggtttctgctgaaggagaacatcaggccctttcagctctatgagatcatcgtgactcccttgtaccaggacaccatgggaccctcccagcatgtctatgcctactctcaagaaatggctccctcccatgccccagagctgcatctaaagcacattggcaagacctgggcacagctggagtgggtgcctgagccccctgagctggggaagagcccccttacccactacaccatcttctggaccaacgctcagaaccagtccttctccgccatcctgaatgcctcctcccgtggctttgtcctccatggcctggagcccgccagtctgtatcacatccacctcatggctgccagccaggctggggccaccaacagtacagtcctcaccctgatgaccttgaccccagaggggtcggagctacac

SEQ ID NO: 3419 - DNA, 1179 bp, Homo Sapiens
gtgccggcgcgtgaggcgggcagcgcggttgaggccgaagagctggtgaagggcagcccggcgtgggagccgcctgccaacgacacgcgggaagaagccggcccaccagcggctggggaagatgaggcgtcgtggacggcgcccggtggcgagctggccgggccagaagaggtgctgcaggagtcggctgcggtgaccggcaccgcctggctggaagctgacagcccaggcctgggaggagtgaccgcagaggcgggcagcggcgatgcccaggcccttccagctacgctccaggctccccacgaggtcctcgggcagtcaatcatgccccctgccattcctgaggctacagaggccagcgggccaccctcccccacccccggcgacaagctgagcccagcttctgaactccccaaggagagccccttggaggtttggctgaacctggggggcagcacacccgaccctcaagggccagagctgacttacccatttcagggcaccctggagccccaaccggcatcagatatcattgacatcgactacttcgaaggactggatggtgagggtcgtggcgcagatctggggagcttcccagggtcaccaggaacctcagagaaccaccctgatactgagggagagaccccttcctggagcctgcttgacttatacgatgatttcacccccttcgatgaatctgatttctaccccaccacatccttttatgatgacttggatgaagaggaggaggaagaggaggatgacaaagatgcagtaggaggtggagacctagaagatgaaaatgagcttctagtgcccactgggaagcctggtctggggcccgggacaggccagcccaccagtcggtggcatgctgtccctccacagcacactctggggtcggtccccggcagcagcatcgccctcaggccccgcccaggagagccaggcagggacttggcctccagtgaaaatggcactgagtgccgcagtggctttgtgcggcataacggctcctgccggtcagtgtgcgacctcttcccaagttactgtcacaatggcggccagtgctacctggtggagaacataggggccttctgcaggtgcaacacgcaggactacatctggcacaaggggatgcgctgcgagtccatcatcaccgacttccaggtgatgtgc

SEQ ID NO: 3420 - DNA, 378 bp, Homo Sapiens
aaagcaatgcacgtggcccagcctgctgtggtactggccagcagccgaggcatcgccagctttgtgtgtgagtatgcatctccaggcaaagccactgaggtccgggtgacagtgcttcggcaggctgacagccaggtgactgaagtctgtgcggcaacctacatgatggggaatgagttgaccttcctagatgattccatctgcacgggcacctccagtggaaatcaagtgaacctcactatccaaggactgagggccatggacacgggactctacatctgcaaggtggagctcatgtacccaccgccatactacctgggcataggcaacggaacccagatttatgtaattgatccagaaccgtgcccagattctgac

SEQ ID NO: 3421 - DNA, 945 bp, Homo Sapiens
cagcaccacggtgtgacgaaatgcaacatcacgtgcagcaagatgacatcaaagatacctgtagctttgctcatccactatcaacagaaccaggcatcatgcggcaaacgcgcaatcatcttggagacgagacagcacaggctgttctgtgccgacccgaaggagcaatgggtcaaggacgcgatgcagcatctggaccgccaggctgctgccctaactcgaaatggcggcaccttcgagaagcagatcggcgaggtgaagcccaggaccacccctgccgccgggggaatggacgagtctgtggtcctggagcccgaagccacaggcgaaagcagtagcctggagccgactccttcttcccaggaagcacagagggccctggggacctccccagagctgccgacgggcgtgactggttcctcagggaccaggctccccccgacgccaaaggctcaggatggagggcctgtgggcacggagcttttccgagtgcctcccgtctccactgccgccacgtggcagagttctgctccccaccaacctgggcccagcctctgggctgaggcaaagacctctgaggccccgtccacccaggacccctccacccaggcctccactgcgtcctccccagccccagaggagaatgctccgtctgaaggccagcgtgtgtggggtcagggacagagccccaggccagagaactctctggagcgggaggagatgggtcccgtgccagcgcacacggatgccttccaggactgggggcctggcagcatggcccacgtctctgtggtccctgtctcctcagaagggacccccagcagggagccagtggcttcaggcagctggacccctaaggctgaggaacccatccatgccaccatggacccccagaggctgggcgtccttatcactcctgtccctgacgcccaggctgccacccgg

SEQ ID NO: 3422 - DNA, 654 bp, Homo Sapiens
ttgagtatcactactcctgaagagatgattgaaaaagccaaaggggaaactgcctatctgccgtgcaaatttacgcttagtcccgaagaccagggaccgctggacatcgagtggctgatatcaccagctgataatcagaaggtggatcaagtgattattttatattctggagacaaaatttatgatgactactatccagatctgaaaggccgagtacattttacgagtaatgatctcaaatctggtgatgcatcaataaatgtaacgaatttacaactgtcagatattggcacatatcagtgcaaagtgaaaaaagctcctggtgttgcaaataagaagattcatctggtagttcttgttaagccttcaggtgcgagatgttacgttgatggatctgaagaaattggaagtgactttaagataaaatgtgaaccaaaagaaggttcacttccattacagtatgagtggcaaaaattgtctgactcacagaaaatgcccacttcatggttagcagaaatgacttcatctgttatatctgtaaaaaatgcctcttctgagtactctgggacatacagctgtacagtcagaaacagagtgggctctgatcagtgcctgttgcgtctaaacgttgtccctccttcaaataaagctgga

SEQ ID NO: 3423 - DNA, 219 bp, Homo Sapiens
gcgtccgtggccactgaactgcgctgccagtgcttgcagaccctgcagggaattcaccccaagaacatccaaagtgtgaacgtgaagtcccccggaccccactgcgcccaaaccgaagtcatagccacactcaagaatgggcggaaagcttgcctcaatcctgcatcccccatagttaagaaaatcatcgaaaagatgctgaacagtgacaaatccaac

SEQ ID NO: 3424 - DNA, 231 bp, Homo Sapiens
gtacctctctctagaactgtacgctgtacctgcatcagcattagtaatcaacctgttaatccaaggtctttagaaaaacttgaaattattcctgcaagccaattttgtccacgtgttgagatcattgctacaatgaaaaagaagggtgagaagagatgtctgaatccagaatcgaaggccatcaagaatttactgaaagcagttagcaaggaaaggtctaaaagatctcct

SEQ ID NO: 3425 - DNA, 219 bp, Homo Sapiens
ttccccatgttcaaaagaggacgctgtctttgcataggccctggggtaaaagcagtgaaagtggcagatattgagaaagcctccataatgtacccaagtaacaactgtgacaaaatagaagtgattattaccctgaaagaaaataaaggacaacgatgcctaaatcccaaatcgaagcaagcaaggcttataatcaaaaaagttgaaagaaagaatttt

SEQ ID NO: 3426 - DNA, 204 bp, Homo Sapiens
aagcccgtcagcctgagctacagatgcccatgccgattcttcgaaagccatgttgccagagccaacgtcaagcatctcaaaattctcaacactccaaactgtgcccttcagattgtagcccggctgaagaacaacaacagacaagtgtgcattgacccgaagctaaagtggattcaggagtacctggagaaagctttaaacaag

SEQ ID NO: 3427 - DNA, 261 bp, Homo Sapiens
gttctggaggtctattacacaagcttgaggtgtagatgtgtccaagagagctcagtctttatccctagacgcttcattgatcgaattcaaatcttgccccgtgggaatggttgtccaagaaaagaaatcatagtctggaagaagaacaagtcaattgtgtgtgtggaccctcaagctgaatggatacaaagaatgatggaagtattgagaaaaagaagttcttcaactctaccagttccagtgtttaagagaaagattccc

SEQ ID NO: 3428 - DNA, 231 bp, Homo Sapiens
tccaaatgcaagtgctcccggaagggacccaagatccgctacagcgacgtgaagaagctggaaatgaagccaaagtacccgcactgcgaggagaagatggttatcatcaccaccaagagcgtgtccaggtaccgaggtcaggagcactgcctgcaccccaagctgcagagcaccaagcgcttcatcaagtggtacaacgcctggaacgagaagcgcagggtctacgaagaa

SEQ ID NO: 3429 - DNA, 528 bp, Homo Sapiens
aacgagggcagcgtcactggaagttgttattgtggtaaaagaatttcttccgactccccgccatcggttcagttcatgaatcgtctccggaaacacctgagagcttaccatcggtgtctatactacacgaggttccagctcctttcctggagcgtgtgtggaggcaacaaggacccatgggttcaggaattgatgagctgtcttgatctcaaagaatgtggacatgcttactcggggattgtggcccaccagaagcatttacttcctaccagccccccaatttctcaggcctcagagggggcatcttcagatatccacacccctgcccagatgctcctgtccaccttgcagtccactcagcgccccaccctcccagtaggatcactgtcctcggacaaagagctcactcgtcccaatgaaaccaccattcacactgcgggccacagtctggcagctgggcctgaggctggggagaaccagaagcagccggaaaaaaatgctggtcccacagccaggacatcagccaca

SEQ ID NO: 3430 - DNA, 168 bp, Homo Sapiens
ttcatgacagtgtctgggctgccaaagaagcagtgcccctgtgatcatttcaagggcaatgtgaagaaaacaagacaccaaaggcaccacagaaagccaaacaagcattccagagcctgccagcaatttctcaaacaatgtcagctaagaagctttgctctgcctttg

SEQ ID NO: 3431 - DNA, 207 bp, Homo Sapiens
actgaactgcgctgccagtgcttgcagaccctgcagggaattcacctcaagaacatccaaagtgtgaaggtgaagtcccccggaccccactgcgcccaaaccgaagtcatagccacactcaagaatgggcagaaagcttgtctcaaccccgcatcgcccatggttaagaaaatcatcgaaaagatgctgaaaaatggcaaatccaac

SEQ ID NO: 3432 - DNA, 219 bp, Homo Sapiens
gcgtccgtggtcactgaactgcgctgccagtgcttgcagacactgcagggaattcacctcaagaacatccaaagtgtgaatgtaaggtcccccggaccccactgcgcccaaaccgaagtcatagccacactcaagaatgggaagaaagcttgtctcaaccccgcatcccccatggttcagaaaatcatcgaaaagatactgaacaaggggagcaccaac

SEQ ID NO: 3433 - DNA, 213 bp, Homo Sapiens
ttgagagagctgcgttgcgtttgtttacagaccacgcaaggagttcatcccaaaatgatcagtaatctgcaagtgttcgccataggcccacagtgctccaaggtggaagtggtagcctccctgaagaacgggaaggaaatttgtcttgatccagaagccccttttctaaagaaagtcatccagaaaattttggacggtggaaacaaggaaaac

SEQ ID NO: 3434 - DNA, 231 bp, Homo Sapiens
ggtcctgtctctgctgtgctgacagagctgcgttgcacttgtttacgcgttacgctgagagtaaaccccaaaacgattggtaaactgcaggtgttccccgcaggcccgcagtgctccaaggtggaagtggtagcctccctgaagaacgggaagcaagtttgtctggacccggaagccccttttctaaagaaagtcatccagaaaattttggacagtggaaacaaaaaaaac

SEQ ID NO: 3435 - DNA, 309 bp, Homo Sapiens
accccagtagtgagaaagggtcgctgttcctgcatcagcaccaaccaagggactatccacctacaatccttgaaagaccttaaacaatttgccccaagcccttcctgcgagaaaattgaaatcattgctacactgaagaatggagttcaaacatgtctaaacccagattcagcagatgtgaaggaactgattaaaaagtgggagaaacaggtcagccaaaagaaaaagcaaaagaatgggaaaaaacatcaaaaaaagaaagttctgaaagttcgaaaatctcaacgttctcgtcaaaagaagactaca

SEQ ID NO: 3436 - DNA, 1872 bp, Homo Sapiens
cactggcccagtgaaccctcagaggctgtcagggactgggaaaaccagcttgaggcatccatgcactcagtgctctcagacctccacgaggctgttcccacagtggttggcattcctgatggcacggctgtcgtcgggcgctcatttcgagtgaccattccaacagatttgattgcctccagtggagatatcatcaaggtatcagcggcagggaaggaggctttgccatcttggctgcactgggactcacagagccacaccctggagggcctcccccttgacactgataagggtgtgcattacatttcagtgagcgctacacggctgggggccaacgggagccacatcccccagacctccagtgtgttctccatcgaggtctaccctgaagaccacagtgagctgcagtcggtgaggacagcctccccagaccctggtgaggtggtatcatctgcctgtgctgcggatgaacctgtgactgttttgacggtgattttggatgccgacctcaccaagatgaccccaaagcaaaggattgacctcctgcacaggatgcggagcttctcagaagtagagcttcacaacatgaaattagtgccggtggtgaataacagactatttgacatgtcggccttcatggctggcccgggaaatgcaaaaaaggtggtggagaatggggcccttctctcctggaagctgggctgctccctgaaccagaacagtgtgcctgacattcatggtgtagaggcccctgccagggagggcgcaatgtctgctcagcttggctaccctgtggtgggttggcacatcgccaataagaagccccctcttcccaaacgcgtccggaggcagatccatgctacacccacacctgtcactgccattgggcccccaaccacggctatccaggagcccccatccaggatcgtgccaacccccacatctccagccattgctcctccaacagagaccatggctcctccagtcagggatcctgttcctgggaaacccacggtcaccatccggactcgaggcgccattattcaaaccccaaccctaggccccatccagcctactcgggtgtcagaagctggcaccacagttcctggccagattcgcccaacgatgaccattcctggctatgtggagcctactgcagttgctacccctcccacaaccaccaccaagaagccacgagtatccacaccaaaaccagcaacgccttcaactgactccaccaccaccacgactcgcaggccaaccaagaaaccacggacaccccggccagtgccccgggtcaccaccaaagtttccatcaccagattggaaactgcctcaccgcctactcgtattcgcaccaccaccagtggagtgccccgtggcggagaacccaaccagcgcccagagctcaagaaccatattgacagggtagatgcctgggttggcacctactttgaggtgaagatcccgtcagacactttctatgaccatgaggacaccaccactgacaagctgaagctgaccctgaaactgcgggagcagcagctggtgggcgagaagtcctgggtacagttcaacagcaacagccagctcatgtatggccttcccgacagcagccacgtgggcaaacacgagtatttcatgcatgccacagacaaggggggcctgtcggctgtggatgccttcgagatccacgtccacaggcgcccccaaggggatagggctcctgcaaggttcaaggccaagtttgtgggtgacccggcactggtgttgaatgacatccacaagaagattgccttggtaaagaaactggccttcgcctttggagaccgaaactgtagcaccatcaccctgcagaatatcacccggggc

SEQ ID NO: 3437 - DNA, 501 bp, Homo Sapiens
aggcctgaaccccagtctcctcgacctcagtcctgggctgcagccaatcagacctgggctctgggcccaggggccctgcccccactggtgccagcttctgcccttgggagctggaaggccttcttgggcctgcagaaagccaggcagctggggatgggcaggctgcagcgtgggcaagacgaggtggctgctgtgactctgccgctgaaccctcaggaagtgatccaggggatgtgtaaggctgtgcccttcgttcaggtgttctcccggcccggctgctcagccatacgcctccgaaatcatctgtgctttggtcattgctcctctctctacatccctggctcggaccccaccccactagtcctgtgcaacagctgtatgcctgctcgcaagcgttgggcacccgtggtcctgtggtgtctcactggcagctcagcctcccgtcgacgggtgaagatatccaccatgctgatcgaggggtgtcactgcagcccaaaagca

SEQ ID NO: 3438 - DNA, 987 bp, Homo Sapiens
gatgaggcttctgggataggcccagaagttcctgatgaccgcgacttcgagccctccctaggcccagtgtgccccttccgctgtcaatgccatcttcgagtggtccagtgttctgatttgggtctggacaaagtgccaaaggatcttccccctgacacaactctgctagacctgcaaaacaacaaaataaccgaaatcaaagatggagactttaagaacctgaagaaccttcacgcattgattcttgtcaacaataaaattagcaaagttagtcctggagcatttacacctttggtgaagttggaacgactttatctgtccaagaatcagctgaaggaattgccagaaaaaatgcccaaaactcttcaggagctgcgtgcccatgagaatgagatcaccaaagtgcgaaaagttactttcaatggactgaaccagatgattgtcatagaactgggcaccaatccgctgaagagctcaggaattgaaaatggggctttccagggaatgaagaagctctcctacatccgcattgctgataccaatatcaccagcattcctcaaggtcttcctccttcccttacggaattacatcttgatggcaacaaaatcagcagagttgatgcagctagcctgaaaggactgaataatttggctaagttgggattgagtttcaacagcatctctgctgttgacaatggctctctggccaacacgcctcatctgagggagcttcacttggacaacaacaagcttaccagagtacctggtgggctggcagagcataagtacatccaggttgtctaccttcataacaacaatatctctgtagttggatcaagtgacttctgcccacctggacacaacaccaaaaaggcttcttattcgggtgtgagtcttttcagcaacccggtccagtactgggagatacagccatccaccttcagatgtgtctacgtgcgctctgccattcaactcggaaactataag

SEQ ID NO: 3439 - DNA, 708 bp, Homo Sapiens
cgacacaatctcaacaacgtgatcgcatcgctgggctgcaccgtggagctgcagatcaacaacacccgcgcagcttggcgcatctccacagcccccttacgggccatgttcaaggacctgctgagtagcaaagaattgctgagagcagagactcggaacatctccgccacttttgaggacctggatgcccaggtgaatagtgagacgggctacacgcctgaggataccatggactcaggggagacagcccagggcagggaggcccgccaagccccagcctccagactccacctgtcgacacagaagatgtatgagctgaagaccaagctgcgttgctcctatgtggtgaaccaggccatactcagctgccgtcgttggtttgaccgcaagcatgaacagtgcatgaagcacatctgggtcccactcctcacccacctgctctgcctgcctatgaagttcaagttcttctgtggcattgccaaggtgatggaggtttggtgccgcaatcgcatcccagtggaaggcaactttgggcagacctacgactccctcaaccagtctattcgtggcctggatggggaattttcagccaatattgacttcaaggaagagaagcaggctggggtgctggggctcaacacaagctgggagcgcgtgagcaccgaggtgcgggactacgtgtaccgccaggaggcccggctggagtgg

SEQ ID NO: 3440 - DNA, 273 bp, Homo Sapiens
aaaggtctcctagatggtatgacttgcaacctaagggcaaagagcttttccatacattttccacttttgaaaaaatatattgaggcaattcagtggatttatggccttgccactccactaagtgtatttgatgaccttgtttcttggaaccagaccctggcagtctctcttttcagtcccagccatgtcctggaggcacagctaaatgacagcaaaggggaagtcctgagcgtcttgtaccagatggcaacaaccacagaggtgttgtcctcc

SEQ ID NO: 3441 - DNA, 168 bp, Homo Sapiens
gacatcccagaagtggttgtttcccttgcatgggacgaaagcttggctccaaagcatccaggctcaaggaaaaacatggcctgctattgcagaataccagcgtgcattgcaggagaacgtcgctatggaacctgcatctaccagggaagactctgggcattctgctgc

SEQ ID NO: 3442 - DNA, 1500 bp, Homo Sapiens
tccggggtatttcaattgcagcttcaggagtttatcaacgaacgtggcgtgttagcatcaggcaggccttgtgaacccggctgccgtacctttttcagggtgtgtctgaaacactttcaggccgtagtgtcacctgggccatgtacctttggcacggtatccacgccagtcctaggtaccaattccttcgcagtacgtgacgactctagcggcgggggtcgtaacccgcttcaacttccattcaacttcacatggcctgggacgttctctctaataatcgaggcatggcacgcacccggcgatgatttgcgtccggaggccctgccgccggatgcactgatcagcaagatagccatacaaggtagtctggctgtcggtcaaaactggttattagatgaacaaacgtcaacattgacaaggctgcgttacagctacagagtaatctgctccgacaattactacggcgacaattgctcacgtttatgtaagaagaggaatgaccactttggccattacgtttgtcaaccagacggtaatttatcatgtcttccgggctggacaggggagtattgtcagcagcccatctgcttatcaggatgccatgagcagaatggttattgtagtaaacctgcggaatgcttgtgtcgtcctggctggcagggcagattatgcaacgagtgcataccacataacggctgccgtcacggaacgtgcagtaccccatggcagtgtacatgcgacgagggttggggagggttattctgtgatcaggaccttaattattgcacccaccactcaccctgcaaaaacggtgcgacgtgttccaactccggtcaacgtagctatacttgtacgtgtagaccgggctacacgggtgtggattgtgaattagagctatcagaatgcgactcaaatccctgccgtaatggtgggtcctgtaaggatcaggaggatgggtaccactgcttatgtccaccggggtattacggtcttcactgcgaacatagcaccctgagctgtgctgatagtccctgctttaacggggggagttgccgtgagcgtaatcagggcgctaattatgcgtgtgagtgtcctccaaactttaccggctctaactgtgagaaaaaggtggacaggtgcacttctaacccttgcgcgaacggggggcagtgtctaaaccgtggaccctccaggatgtgcaggtgcaggcctggatttacaggtacatactgcgaactgcatgtgagtgactgcgccaggaatccctgtgcccatggcggcacctgtcacgatttagaaaacggactaatgtgtacgtgtcccgccggcttttctggtaggcgttgcgaggtacgtactagtatagacgcctgcgctagttccccctgctttaacagggccacatgctatacggacctttctacggatactttcgtatgtaattgcccgtatggttttgttggcagcaggtgcgaatttccagtgggtcttccaccctcc

SEQ ID NO: 3443 - DNA, 987 bp, Homo Sapiens
accgagccgctgcggccagagctgcggtgcaaccctgggcagtttgcgtgtcgcagcggcaccatccagtgcatccccctcccctggcagtgtgacggctgggcgacttgcgaggatgagagcgacgaagccaactgtccagaagtgaccggggaggtgcgtcctcatcatgggaaggaggctgtggatccgcggcaggggcgggccagaggaggcgacccttcgcacttccacgcggtgaacgtggcgcagcccgttcgcttcagcagtttcctagggaagtgcccgacagggtggcaccactacgaaggcacggccagctgctaccgggtctacctgagcggggagaactactgggatgccgcgcagacctgccagcgcctgaatggctctctcgccaccttctccactgaccaggagctgcgctttgtcctggcccaggaatgggaccagcccgagcggagctttggttggaaggaccagcgcaagttgtgggttggctatcagtatgttatcactggccggaaccgctccttggaaggtcgctgggaggtggcattcaaaggctcttcagaggtgttcctgcccccagaccccatctttgcctcggccatgtctgagaacgacaacgtgttctgtgcccagcttcagtgcttccatttccccaccctgcggcaccacgacctccacagctggcacgccgagagctgctacgagaagtcttcatttctgtgtaaaagaagtcaaacatgtgttgacatcaaggacaacgtggtggatgaagggttctacttcacccctaagggggacgacccatgcctgagctgcacctgccatggaggggagcctgagatgtgtgtggctgctctctgtgagaggccccagggctgccaacagtaccgcaaggaccccaaagagtgctgcaagttcatgtgtctggacccagatggcaacagtctgtttgactccatggccagcgggatgcgc

SEQ ID NO: 3444 - DNA, 714 bp, Homo Sapiens
gatctgaaagtagagatgatggcaggggggactcagatcacacccctgaatgacaatgtcaccatattctgcaatatcttttattcccaacccctcaacatcacgtctatgggtatcacctggttttggaagagtctgacgtttgacaaagaagtcaaagtctttgaattttttggagatcaccaagaggcattccgacctggagccattgtgtctccatggaggctgaagagtggggacgcctcactgcggctgcctggaatccagctggaggaagcaggagagtaccgatgtgaggtggtggtcacccctctgaaggcacagggaacagtccagcttgaagttgtggcttccccagccagcagattgttgctggatcaagtgggcatgaaagagaatgaagacaaatatatgtgtgagtcaagtgggttctacccagaggctattaatataacatgggagaagcagacccagaagtttccccatcccatagagatttctgaggatgtcatcactggtcccaccatcaagaatatggatggcacatttaatgtcactagctgcttgaagctgaactcctctcaggaagaccctgggactgtctaccagtgtgtggtacggcatgcgtccttgcatacccccttgaggagcaactttaccctgactgctgctcggcacagtctttctgaaactgagaagacagataatttttcc

SEQ ID NO: 3445 - DNA, 840 bp, Homo Sapiens
gctgaatgcttcccggcctgcaacccccaaaatggattctgcgaggatgacaatgtttgcaggtgccagcctggctggcagggtcccctttgtgaccagtgcgtgacctctcccggctgccttcacggactctgtggagaacccgggcagtgcatttgcaccgacggctgggacggggagctctgtgatagagatgttcgggcctgctcctcggccccctgtgccaacaacgggacctgcgtgagcctggacgatggcctctatgaatgctcctgtgcccccgggtactcgggaaaggactgccagaaaaaggacgggccctgtgtgatcaacggctccccctgccagcacggaggcacctgcgtggatgatgagggccgggcctcccatgcctcctgcctgtgcccccctggcttctcaggcaatttctgcgagatcgtggccaacagctgcacccccaacccatgcgagaacgacggcgtctgcactgacatcgggggcgacttccgctgccggtgcccagccggcttcatcgacaagacctgcagccgcccggtgaccaactgcgccagcagcccgtgccagaacgggggcacctgcctgcagcacacccaggtgagctacgagtgtctgtgcaagcccgagttcacaggtctcacctgtgtcaagaagcgcgcgctgagcccccagcaggtcacccgtctgcccaacggctatgggctggcctaccgcctgacccctggggtgcacgagctgccggtgcagcagccggagcaccgcatcctgaaggtgtccatgaaagagctcaacaagaaaacccctctcctcaccgagggccag

SEQ ID NO: 3446 - DNA, 840 bp, Homo Sapiens
gatgactgcagctcccactgtgacctggcccacggctgctgtgcacctgacggctcctgcaggtgtgacccgggctgggaggggctgcactgtgagcgctgtgtgaggatgcctggctgccagcacggtacctgccaccagccatggcagtgcatctgccacagtggctgggcaggcaagttctgtgacaaagatgaacatatctgtaccacgcagtccccctgccagaatggaggccagtgcatgtatgacgggggcggtgagtaccattgtgtgtgcttaccaggcttccatgggcgtgactgcgagcgcaaggctggaccctgtgaacaggcaggctccccatgccgcaatggcgggcagtgccaggacgaccagggctttgctctcaacttcacgtgccgctgcttggtgggctttgtgggtgcccgctgtgaggtaaatgtggatgactgcctgatgcggccttgtgctaacggtgccacctgccttgacggcataaaccgcttctcctgcctctgtcctgagggctttgctggacgcttctgcaccatcaacctggatgactgtgccagccgcccatgccagagaggggcccgctgtcgggaccgtgtccacgacttcgactgcctctgccccagtggctatggtggcaagacctgtgagcttgtcttacctgtcccagaccccccaaccacagtggacacccctctagggcccacctcagctgtagtggtacctgccacggggccagccccccacagcgcaggggctggtctgctgcggatctcagtgaaggaggtggtgcggaggcaagaggctgggctaggtgagcctagc

SEQ ID NO: 3447 - DNA, 1584 bp, Homo Sapiens
caggtctggagctctggggtgttcgaactgaagctgcaggagttcgtcaacaagaaggggctgctggggaaccgcaactgctgccgcgggggcgcggggccaccgccgtgcgcctgccggaccttcttccgcgtgtgcctcaagcactaccaggccagcgtgtcccccgagccgccctgcacctacggcagcgccgtcacccccgtgctgggcgtcgactccttcagtctgcccgacggcgggggcgccgactccgcgttcagcaaccccatccgcttccccttcggcttcacctggccgggcaccttctctctgattattgaagctctccacacagattctcctgatgacctcgcaacagaaaacccagaaagactcatcagccgcctggccacccagaggcacctgacggtgggcgaggagtggtcccaggacctgcacagcagcggccgcacggacctcaagtactcctaccgcttcgtgtgtgacgaacactactacggagagggctgctccgttttctgccgtccccgggacgatgccttcggccacttcacctgtggggagcgtggggagaaagtgtgcaaccctggctggaaagggccctactgcacagagccgatctgcctgcctggatgtgatgagcagcatggattttgtgacaaaccaggggaatgcaagtgcagagtgggctggcagggccggtactgtgacgagtgtatccgctatccaggctgtctccatggcacctgccagcagccctggcagtgcaactgccaggaaggctgggggggccttttctgcaaccaggacctgaactactgcacacaccataagccctgcaagaatggagccacctgcaccaacacgggccaggggagctacacttgctcttgccggcctgggtacacaggtgccacctgcgagctggggattgacgagtgtgaccccagcccttgtaagaacggagggagctgcacggatctcgagaacagctactcctgtacctgcccacccggcttctacggcaaaatctgtgaattgagtgccatgacctgtgcggacggcccttgctttaacgggggtcggtgctcagacagccccgatggagggtacagctgccgctgccccgtgggctactccggcttcaactgtgagaagaaaattgactactgcagctcttcaccctgttctaatggtgccaagtgtgtggacctcggtgatgcctacctgtgccgctgccaggccggcttctcggggaggcactgtgacgacaacgtggacgactgcgcctcctccccgtgcgccaacgggggcacctgccgggatggcgtgaacgacttctcctgcacctgcccgcctggctacacgggcaggaactgcagtgcccccgtcagcaggtgcgagcacgcaccctgccacaatggggccacctgccacgagaggggccaccgctatgtgtgcgagtgtgcccgaggctacgggggtcccaactgccagttcctgctccccgagctgcccccgggcccagcggtggtggacctcactgagaagctagagggccagggcgggccattcccctgg

SEQ ID NO: 3448 - DNA, 1398 bp, Homo Sapiens
gctggcgtcttcgagctgcagatccactctttcgggccgggtccaggccctggggccccgcggtccccctgcagcgcccggctcccctgccgcctcttcttcagagtctgcctgaagcctgggctctcagaggaggccgccgagtccccgtgcgccctgggcgcggcgctgagtgcgcgcggaccggtctacaccgagcagcccggagcgcccgcgcctgatctcccactgcccgacggcctcttgcaggtgcccttccgggacgcctggcctggcaccttctctttcatcatcgaaacctggagagaggagttaggagaccagattggagggcccgcctggagcctgctggcgcgcgtggctggcaggcggcgcttggcagccggaggcccgtgggcccgggacattcagcgcgcaggcgcctgggagctgcgcttctcgtaccgcgcgcgctgcgagccgcctgccgtcgggaccgcgtgcacgcgcctctgccgtccgcgcagcgccccctcgcggtgcggtccgggactgcgcccctgcgcaccgctcgaggacgaatgtgaggcgccgctggtgtgccgagcaggctgcagccctgagcatggcttctgtgaacagcccggtgaatgccgatgcctagagggctggactggacccctctgcacggtccctgtctccaccagcagctgcctcagccccaggggcccgtcctctgctaccaccggatgccttgtccctgggcctgggccctgtgacgggaacccgtgtgccaatggaggcagctgtagtgagacacccaggtcctttgaatgcacctgcccgcgtgggttctacgggctgcggtgtgaggtgagcggggtgacatgtgcagatggaccctgcttcaacggcggcttgtgtgtcgggggtgcagaccctgactctgcctacatctgccactgcccacccggtttccaaggctccaactgtgagaagagggtggaccggtgcagcctgcagccatgccgcaatggcggactctgcctggacctgggccacgccctgcgctgccgctgccgcgccggcttcgcgggtcctcgctgcgagcacgacctggacgactgcgcgggccgcgcctgcgctaacggcggcacgtgtgtggagggcggcggcgcgcaccgctgctcctgcgcgctgggcttcggcggccgcgactgccgcgagcgcgcggacccgtgcgccgcgcgcccctgtgctcacggcggccgctgctacgcccacttctccggcctcgtctgcgcttgcgctcccggctacatgggagcgcggtgtgagttcccagtgcaccccgacggcgcaagcgccttgcccgcggccccgccgggcctcaggcccggggaccctcagcgctacctt

SEQ ID NO: 3449 - DNA, 1509 bp, Homo Sapiens
tccggcgtcttccagctgcagctgcaggagttcatcaacgagcgcggcgtactggccagtgggcggccttgcgagcccggctgccggactttcttccgcgtctgccttaagcacttccaggcggtcgtctcgcccggaccctgcaccttcgggaccgtctccacgccggtattgggcaccaactccttcgctgtccgggacgacagtagcggcggggggcgcaaccctctccaactgcccttcaatttcacctggccgggtaccttctcgctcatcatcgaagcttggcacgcgccaggagacgacctgcggccagaggccttgccaccagatgcactcatcagcaagatcgccatccagggctccctagctgtgggtcagaactggttattggatgagcaaaccagcaccctcacaaggctgcgctactcttaccgggtcatctgcagtgacaactactatggagacaactgctcccgcctgtgcaagaagcgcaatgaccacttcggccactatgtgtgccagccagatggcaacttgtcctgcctgcccggttggactggggaatattgccaacagcctatctgtctttcgggctgtcatgaacagaatggctactgcagcaagccagcagagtgcctctgccgcccaggctggcagggccggctgtgtaacgaatgcatcccccacaatggctgtcgccacggcacctgcagcactccctggcaatgtacttgtgatgagggctggggaggcctgttttgtgaccaagatctcaactactgcacccaccactccccatgcaagaatggggcaacgtgctccaacagtgggcagcgaagctacacctgcacctgtcgcccaggctacactggtgtggactgtgagctggagctcagcgagtgtgacagcaacccctgtcgcaatggaggcagctgtaaggaccaggaggatggctaccactgcctgtgtcctccgggctactatggcctgcattgtgaacacagcaccttgagctgcgccgactccccctgcttcaatgggggctcctgccgggagcgcaaccagggggccaactatgcttgtgaatgtccccccaacttcaccggctccaactgcgagaagaaagtggacaggtgcaccagcaacccctgtgccaacgggggacagtgcctgaaccgaggtccaagccgcatgtgccgctgccgtcctggattcacgggcacctactgtgaactccacgtcagcgactgtgcccgtaacccttgcgcccacggtggcacttgccatgacctggagaatgggctcatgtgcacctgccctgccggcttctctggccgacgctgtgaggtgcggacatccatcgatgcctgtgcctcgagtccctgcttcaacagggccacctgctacaccgacctctccacagacacctttgtgtgcaactgcccttatggctttgtgggcagccgctgcgagttccccgtgggcttgccgcccagcttcccctgg

SEQ ID NO: 3450 - DNA, 1818 bp, Homo Sapiens
aacccggtgcccgccgcgcccttgtctgcgcccgggccgtgcgccgcgcagccctgccggaatgggggtgtgtgcacctcgcgccctgagccggacccgcagcacccggcccccgccggcgagcctggctacagctgcacctgccccgccgggatctccggcgccaactgccagcttgttgcagatccttgtgccagcaacccttgtcaccatggcaactgcagcagcagcagcagcagcagcagcgatggctacctctgcatttgcaatgaaggctatgaaggtcccaactgtgaacaggcacttcccagtctcccagccactggctggaccgaatccatggcaccccgacagcttcagcctgttcctgctactcaggagcctgacaaaatcctgcctcgctctcaggcaacggtgacactgcctacctggcagccgaaaacagggcagaaagttgtagaaatgaaatgggatcaagtggaggtgatcccagatattgcctgtgggaatgccagttctaacagctctgcgggtggccgcctggtatcctttgaagtgccacagaacacctcagtcaagattcggcaagatgccactgcctcactgattttgctctggaaggtcacggccacaggattccaacagtgctccctcatagatggacgaagtgtgaccccccttcaggcttcagggggactggtcctcctggaggagatgctcgccttggggaataatcactttattggttttgtgaatgattctgtgactaagtctattgtggctttgcgcttaactctggtggtgaaggtcagcacctgtgtgccgggggagagtcacgcaaatgacttggagtgttcaggaaaaggaaaatgcaccacgaagccgtcagaggcaactttttcctgtacctgtgaggagcagtacgtgggtactttctgtgaagaatacgatgcttgccagaggaaaccttgccaaaacaacgcgagctgtattgatgcaaatgaaaagcaagatgggagcaatttcacctgtgtttgccttcctggttatactggagagctttgccagtccaagattgattactgcatcctagacccatgcagaaatggagcaacatgcatttccagtctcagtggattcacctgccagtgtccagaaggatacttcggatctgcttgtgaagaaaaggtggacctctgcgcctcgtctccgtgccagaacaacggcacctgctatgtggacggggtacactttacctgcaactgcagcccgggcttcacagggccgacctgtgcccagcttattgacttctgtgccctcagcccctgtgctcatggcacgtgccgcagcgtgggcaccagctacaaatgcctctgtgatccaggttaccatggcctctactgtgaggaggaatataatgagtgcctctccgctccatgcctgaatgcagccacctgcagggacctcgttaatggctatgagtgtgtgtgcctggcagaatacaaaggaacacactgtgaattgtacaaggatccctgcgctaacgtcagctgtctgaacggagccacctgtgacagcgacggcctgaatggcacgtgcatctgtgcacccgggtttacaggtgaagagtgcgacattgacataaatgaatgtgacagtaacccctgccaccatggtgggagctgcctggaccagcccaatggttataactgccactgcccgcatggttgggtgggagcaaactgtgagatccacctccaatggaagtccgggcacatggcggagagcctcaccaacatgccacggcactccctctac

SEQ ID NO: 3451 - DNA, 1677 bp, Homo Sapiens
agatgggctccaattccttgttcgatgctagaaaactccttgggtccttttccacttttccttcaacaggttcaatctgacacggcccaaaactataccatatactattccataagaggtcctggagttgaccaagaacctcggaatttattttatgtggagagagacactggaaacttgtattgtactcgtcctgtagatcgtgagcagtatgaatcttttgagataattgcctttgcaacaactccagatgggtatactccagaacttccactgcccctaataatcaaaatagaggatgaaaatgataactacccaatttttacagaagaaacttatacttttacaatttttgaaaattgcagagtgggcactactgtgggacaagtgtgtgctactgacaaagatgagcctgacacgatgcacacacgcctgaagtactccatcattgggcaggtgccaccatcacccaccctattttctatgcatccaactacaggcgtgatcaccacaacatcatctcagctagacagagagttaattgacaagtaccagttgaaaataaaagtacaagacatggatggtcagtattttggtctacagacaacttcaacttgtatcattaacattgatgatgtaaatgaccacttgccaacatttactcgtacttcttatgtgacatcagtggaagaaaatacagttgatgtggaaatcttacgagttactgttgaggataaggacttagtgaatactgctaactggagagctaattataccattttaaagggcaatgaaaatggcaattttaaaattgtaacagatgccaaaaccaatgaaggagttctttgtgtagttaagcctttgaattatgaagaaaagcaacagatgatcttgcaaattggtgtagttaatgaagctccattttccagagaggctagtccaagatcagccatgagcacagcaacagttactgttaatgtagaagatcaggatgagggccctgagtgtaaccctccaatacagactgttcgcatgaaagaaaatgcagaagtgggaacaacaagcaatggatataaagcatatgacccagaaacaagaagtagcagtggcataaggtataagaaattaactgatccaacagggtgggtcaccattgatgaaaatacaggatcaatcaaagttttcagaagcctggatagagaggcagagaccatcaaaaatggcatatataatattacagtccttgcatcagaccaaggagggagaacatgtacggggacactgggcattatacttcaagacgtgaatgataacagcccattcatacctaaaaagacagtgatcatctgcaaacccaccatgtcatctgcggagattgttgcggttgatcctgatgagcctatccatggcccaccctttgactttagtctggagagttctacttcagaagtacagagaatgtggagactgaaagcaattaatgatacagcagcacgtctttcctatcagaatgatcctccatttggctcatatgtagtacctataacagtgagagatagacttggcatgtctagtgtcacttcattggatgttacactgtgtgactgcattaccgaaaatgactgcacacatcgtgtagatccaaggattggcggtggaggagtacaacttggaaag

SEQ ID NO: 3452 - DNA, 1665 bp, Homo Sapiens
agatgggcacctataccgtgttctatgcaggagaattctttgggccccttcccgttatttctacagcaagtggagagcgacgcagctcaaaactatactgtcttctactctatatctggtagaggagtcgacaaggagccgcttaatttgttctatattgagagagacactggcaacctattctgcactcgtccagtagatcgtgaagagtatgatgtatttgacttgatagcatacgcttctactgctgacggatattctgcagatttacccctaccgctaccaataagggtcgaggatgagaatgataatcacccagtattcactgaagctatctacaactttgaggtcttggaaagttcccgtcccggtacaacggtaggtgtggtttgcgcgacagacagggatgagccggatacaatgcatactcgtttgaagtactcaatcttacaacaaacgccacgtagccctggtctgttctccgtccacccatccactggagtgattacaacggtctctcattacttagaccgtgaagtagtggataaatacagcctaattatgaaggtccaggacatggatggccagttttttggtctgataggtacttccacatgcattatcactgtaacagattctaatgacaatgctcctacttttagacagaacgcctacgaagcattcgtcgaagagaatgcctttaatgtggaaatcttgcgtatacctattgaagataaagacctaataaacacagcgaactggcgtgtcaattttacgattttaaaaggtaacgagaacgggcactttaagatctcaacagataaggagacgaacgagggcgtattgtcagtggtgaaacctctaaactacgaggagaaccgtcaggtgaatttagagattggagtgaataatgaggctcccttcgcccgtgacataccgagagtaacagctttaaacagggcattagtcaccgttcatgtaagggaccttgacgagggccctgaatgcacgccggcagcgcagtacgtgaggattaaagaaaacttggcagtggggtcaaaaatcaatggctataaagcctacgatccagagaatcgtaacggcaacgggttaaggtacaaaaagctacatgaccccaagggttggattacaatcgacgaaatttccggttctataattacgtcaaaaatcttggatagagaggtcgagactccgaaaaacgaactttataacatcaccgtgctagccatcgacaaggatgacaggtcttgcacgggcactttggcggtcaacattgaagatgtgaacgataaccctcctgagattcttcaagaatatgtggtcatatgcaagccaaaaatgggctatacagacatattggcagtggatcctgatgaaccggtccacggggccccgttttatttttcacttccgaataccagccccgagattagccgtttgtggagtctaacaaaagtaaatgatactgcggcacgtctgtcctaccaaaagaacgccggcttccaggaatacacaatcccgataaccgtcaaagatagggcagggcaagcagccaccaaattattaagagtaaatttatgtgaatgtactcatcctacacaatgtagagccacgtctaggtccacgggagtgatattgggtaag

SEQ ID NO: 3453 - DNA, 1680 bp, Homo Sapiens
gcctggatcaccgcccccgtggctcttcgggagggagaggatctgtccaagaagaatccaattgccaagatacattctgatcttgcagaagaaagaggactcaaaattacttacaaatacactggaaaagggattacagagccaccttttggtatatttgtctttaacaaagatactggagaactgaatgttaccagcattcttgatcgagaagaaacaccattttttctgctaacaggttacgctttggatgcaagaggaaacaatgtagagaaacccttagagctacgcattaaggttcttgatatcaatgacaacgaaccagtgttcacacaggatgtctttgttgggtctgttgaagagttgagtgcagcacatactcttgtgatgaaaatcaatgcaacagatgcagatgagcccaataccctgaattcgaaaatttcctatagaatcgtatctctggagcctgcttatcctccagtgttctacctaaataaagatacaggagagatttatacaaccagtgttaccttggacagagaggaacacagcagctacactttgacagtagaagcaagagatggcaatggagaagttacagacaaacctgtaaaacaagctcaagttcagattcgtattttggatgtcaatgacaatatacctgtagtagaaaataaagtgcttgaagggatggttgaagaaaatcaagtcaatgtagaagttacgcgcataaaagtgttcgatgcagatgaaataggttctgataattggctggcaaattttacatttgcatcaggaaatgaaggaggttatttccacatagaaacagatgctcaaactaacgaaggaattgtgacccttattaaggaagtagattatgaagaaatgaagaatcttgacttcagtgttattgtcgctaataaagcagcttttcacaagtcgattaggagtaaatacaagcctacacccattcccatcaaggtcaaagtgaaaaatgtgaaagaaggcattcattttaaaagcagcgtcatctcaatttatgttagcgagagcatggatagatcaagcaaaggccaaataattggaaattttcaagcttttgatgaggacactggactaccagcccatgcaagatatgtaaaattagaagatagagataattggatctctgtggattctgtcacatctgaaattaaacttgcaaaacttcctgattttgaatctagatatgttcaaaatggcacatacactgtaaagattgtggccatatcagaagattatcctagaaaaaccatcactggcacagtccttatcaatgttgaagacatcaacgacaactgtcccacactgatagagcctgtgcagacaatctgtcacgatgcagagtatgtgaatgttactgcagaggacctggatggacacccaaacagtggccctttcagtttctccgtcattgacaaaccacctggcatggcagaaaaatggaaaatagcacgccaagaaagtaccagtgtgctgctgcaacaaagtgagaaaaagcttgggagaagtgaaattcagttcctgatttcagacaatcagggttttagttgtcctgaaaagcaggtccttacactcacagtttgtgagtgtctgcatggcagcggctgcagggaagcacagcatgactcctatgtgggc

SEQ ID NO: 3454 - DNA, 1698 bp, Homo Sapiens
gagtgggttaagtttgctaagccgtgcagagagggtgaggacaatagcaagcgtaaccccatcgcgaagatcaccagcgattaccaagctactcaaaaaatcacgtacagaatttctggcgtaggcattgaccaacctccctttggaatctttgttgtcgataaaaacaccggtgatattaacatcaccgcgattgtagatcgtgaggaaacgcccagttttctgattacgtgtcgtgcattaaacgcccaagggctggacgtagagaaaccattgattctgacggtgaagattctagacattaacgataatccgcccgtcttttcccaacagatatttatgggtgagattgaagagaatagcgcctcaaacagccttgtcatgattttgaatgccaccgatgctgatgaacctaatcatcttaactctaaaattgccttcaaaatcgtgtcccaagaacctgcgggcacccccatgtttttactaagcaggaacacaggggaagtacgtaccctgacgaactccttagatcgtgagcaagcgtcatcttataggctggtcgtttccggcgcggacaaagatggggaaggccttagtacgcagtgcgagtgtaatataaaggtaaaagacgttaacgacaatttcccaatgttccgtgactctcagtactctgcgcgtatcgaggagaatatactttcttctgaactgcttagattccaggtcaccgatctggacgaggaatacaccgacaactggctggctgtgtactttttcactagtggcaacgaggggaattggttcgagatacagacagatccccgtactaatgagggcatattgaaggttgttaaggcattagactacgaacagctacaaagcgtcaaacttagtattgcggttaaaaacaaagctgagttccaccaaagcgtcattagtagatatagagtacaatctacaccggtaacgatacaagttattaatgttcgtgaagggatagcgtttcgtccagcctctaaaaccttcacggttcagaaagggattagttcaaaaaaactagtggactacattttgggtacgtatcaagcaattgatgaggacacgaacaaagcggcgtcaaacgtgaaatacgtgatggggagaaatgacgggggatatttaatgatcgacagtaagaccgctgagattaaattcgtaaaaaacatgaatagggattccacgttcattgtgaacaaaaccataacggctgaggtactggctatagatgaatataccgggaaaacttctaccggtactgtctatgtcagggttccagatttcaatgacaactgtcccacagcagttctagagaaagacgccgtctgttcaagtagcccgtccgttgtggtatccgcccgtactcttaataatcgttacactggtccgtacacctttgcgttggaggatcagccagttaaactaccggctgtgtggtcaattacgacgttaaatgctacaagtgcacttttgagagcgcaagaacaaatacctcccggcgtttaccacatctcattagtcttaactgattcccaaaacaaccgttgtgaaatgcctaggagcttgacgttggaagtatgtcagtgtgataaccgtggaatttgtggtacttcttatccgacgacttcccctggtacgagatatggcagaccacacagcggtagg

SEQ ID NO: 3455 - DNA, 1746 bp, Homo Sapiens
gagtggatcaagtttgccgcagcctgtcgagaaggagaggacaactcgaagaggaaccccattgccaaaattcgatcagactgcgaatcgaaccagaagataacataccggatttctggagtagggattgatcgaccaccatatggggtattcaccattaatcctcgcactggggaaattaacatcacttcagtggtagacagagaaataactccacttttcttgatctattgccgggctctgaattcacggggtgaagatttagaaaggcctcttgagcttagagtcaaagttatggacataaatgataacgctccagtcttttcgcaaagtgtatacacagccagcattgaagaaaatagtgatgccaatacattggtagtaaagttatgtgccacagatgcagatgaagaaaatcatctgaattctaaaattgcctacaagatcgtctctcaggagccatcaggtgcacccatgttcattctgaataggtacactggagaagtctgcaccatgtccagtttcttggacagagagcaacacagtatgtacaacctggttgtgagaggctcagatcgggatggagctgcagatggactgtcttctgagtgtgactgtagaatcaaggttttagacgtcaacgataatttccccaccttagagaaaacttcatactcagccagtattgaagagaattgtttaagttcggaactgatacgattacaagcaattgatcttgatgaagaaggcactgataactggttggctcaatatttaattctctctggaaatgatgggaattggttcgatattcaaacagatccacaaaccaatgaaggcattttgaaagttgtcaagatgctggattatgaacaagcacctaacattcagcttagtatcggagttaaaaaccaagctgattttcactactccgttgcttctcaattccaaatgcacccaacccctgtgagaattcaagttgttgatgtgagagaaggacctgcatttcatccaagtactatggcttttagtgtgcgggaaggaataaaaggaagttccttattgaattatgtgcttggcacatatacagccatagatttggacacaggaaaccctgcaacagatgtcagatatatcatagggcatgatgcaggcagctggttaaaaattgattcaagaactggtgagatacaattttctagagaatttgataagaagtcaaaatatattatcaatgggatatacacagcagagatcctggctatagatgatggctctggaaaaacagctacaggaaccatatgtattgaggttcctgatatcaatgattattgtccaaacatttttcctgaaagaagaaccatctgcattgactctccatcagtccttatctctgttaatgaacattcttatgggtctccgtttactttctgtgttgttgatgagccaccaggaatagctgacatgtgggatgtcagatcaacaaatgctacctcggcaatccttacggctaagcaggttttatctccaggattttatgaaatcccaatcctggtgaaggacagctataacagagcatgtgaattggcacaaatggtgcagttatatgcctgtgattgcgatgacaaccacatgtgcctggactctggtgccgcgggcatctacacagaggacataactggtgacacgtatgggcctgtcactgaagaccaagctggagtttcaaatgttggtcttggaccagca

SEQ ID NO: 3456 - DNA, 627 bp, Homo Sapiens
aggaaagggcccccagcagctctgacactgccccgggtgcaatgccgagcctctcggtacccgatcgccgtggattgctcctggaccctgccgcctgctccaaactccaccagccccgtgtccttcattgccacgtacaggctcggcatggctgcccggggccacagctggccctgcctgcagcagacgccaacgtccaccagctgcaccatcacggatgtccagctgttctccatggctccctacgtgctcaatgtcaccgccgtccacccctggggctccagcagcagcttcgtgcctttcataacagagcacatcatcaagcccgaccctccagaaggcgtgcgcctaagccccctcgctgagcgccagctacaggtgcagtgggagcctcccgggtcctggcccttcccagagatcttctcactgaagtactggatccgttacaagcgtcagggagctgcgcgcttccaccgggtggggcccattgaagccacgtccttcatcctcagggctgtgcggccccgagccaggtactacgtccaagtggcggctcaggacctcacagactacggggaactgagtgactggagtctccccgccactgccacaatgagcctgggcaag

SEQ ID NO: 3457 - DNA, 1869 bp, Homo Sapiens
aaaaatgaagaaattcctaggaagcaaaggaggaagatctaccacagaaggttgaggaaaagttcaacctcacacaagcacagatcaaacagacagcttggaattccgcaaacaacagtttttacaccagtagcaagacttcctattgttaactttgattatagcatggaggaaaagtttgaatccttttcaagttttcctggagtagaatcaagttataatgtgttaccaggaaagaagggacactgtttggtaaagggcataaccatgtacaacaaagctgtgtggtcgcctgagccctgcactacctgcctctgctcagatggaagagttctttgtgatgaaaccatgtgccatccccagaggtgcccccaaacagttatacctgaaggggaatgctgcccggtctgctccgctactgaacaaagagaacctaccaatttacttcataagcaactgccacctcctcaggtgggaatggaccgaatagtaagaaaagaagcacttcaatctgaggaggatgaagaagtgaaagaagaagatcccgagcaaaagagagagacccctgaatctagaaatcaggggcaactttacagtgagggggacagcagaggaggagacagaaagcagaggcctggagaggagaggaggctggcacaccagcaacaacgccaaggaagggaggaggaggaggatgaggaggaggagggtgaggagggtgaggaggatgaggaggacgaggaggacccggtaagaggagatatgttccgaatgccctctcgatccccgcttcctgctcctcccagaggcacactgcgcctgccaagcgggtgctctctgtcctacaggaccatcagctgcatcaacgccatgcttacccagataccaccgctgacagcaccacagataacaagtctggagctcactggcaattccatcgcctccatcccagatgaagcatttaatggattaccaaatttggaaaggcttgatctgagtaaaaataatatcacttcttcaggcataggtccaaaagcattcaagcttctgaagaagttaatgcgtttgaatatggatggaaataatttgatacagattccttcacaattgccatctacattagaagaacttaaagtcaatgagaacaatcttcaggctatcgatgaagaaagtttatcggacttaaatcagttggtcaccttagaattggaaggaaacaatctcagtgaagccaatgtcaatcctttagctttcaaacctttgaagagcctagcctacttgcgtctgggaaaaaataaatttagaattataccgcagggtcttcctggttctattgaggaattatacctagaaaataaccaaattgaagaaataactgaaatttgtttcaatcataccagaaagatcaatgtcattgtactacgttataacaaaattgaagaaaataggattgctcctttagcctggataaatcaagaaaatctagaatccattgatctctcctacaacaagctctatcacgtcccgtcctatctacccaagtccttgctgcacctagtactccttgggaaccagattgaacggatccctggctatgtgtttggccacatggaaccaggcctggaatacttgtacctgtcatttaacaaacttgctgatgatggcatggaccgtgtctccttctatggggcatatcattctctgagagaattatttctggatcacaatgacttaaaatctataccacctgggatacaagaaatgaaagcactacattttctgaggctgaacaacaacaagatacgctgtgtttcagatgctgttctagagacagtgacaaacagatcagatgtggcctttcctctctgg

SEQ ID NO: 3458 - DNA, 696 bp, Homo Sapiens
agcaaaagcaatgaaggagcagatggcccagttaaaaacaagaaaaagggaaagaaagcaggacctcctggacccaatggccctccaggacccccaggacctccaggaccccagggacccccaggaattccagggattcctggaattccaggaacaactgttatgggaccacctggtcctccaggtcctcctggtcctcaaggaccccctggcctccagggaccttctggtgctgctgataaagctggaactcgagaaaaccagccagctgtggtgcatctacagggccaagggtcagcaattcaagtcaagaatgatctttcaggtggagtgctcaatgactggtctcgcatcactatgaaccccaaggtgtttaagctacatccccgcagcggggagctggaggtactggtggacggcacctacttcatctatagtcaggtagaagtatactacatcaacttcactgactttgccagctatgaggtggtggtggatgagaagcccttcctgcagtgcacacgcagcatcgagacgggcaagaccaactacaacacttgctataccgcaggcgtctgcctcctcaaggcccggcagaagatcgccgtcaagatggtgcacgctgacatctccatcaacatgagcaagcacaccacgttctttggggccatcaggctgggtgaagcccctgcatcc

SEQ ID NO: 3459 - DNA, 414 bp, Homo Sapiens
atggattgccaagaaaatgagtactgggaccaatggggacggtgtgtcacctgccaacggtgtggtcctggacaggagctatccaaggattgtggttatggagagggtggagatgcctactgcacagcctgccctcctcgcaggtacaaaagcagctggggccaccacagatgtcagagttgcatcacctgtgctgtcatcaatcgtgttcagaaggtcaactgcacagctacctctaatgctgtctgtggggactgtttgcccaggttctaccgaaagacacgcattggaggcctgcaggaccaagagtgcatcccgtgcacgaagcagacccccacctctgaggttcaatgtgccttccagttgagcttagtggaggcagatgcacccacagtgccccctcaggaggccaca

SEQ ID NO: 3460 - DNA, 483 bp, Homo Sapiens
gaatactcaaactgcggtgagaacgagtactacaaccagactacggggctgtgccaggagtgccccccgtgtgggccgggagaggagccctacctgtcctgtggctacggcaccaaagacgaggactacggctgcgtcccctgcccggcggagaagttttccaaaggaggctaccagatatgcaggcgtcacaaagactgtgagggcttcttccgggccaccgtgctgacaccaggggacgtggagaatgacgctgagtgtggcccttgcctccctggctactacatgctggagaacagaccgaggaacatctatggcatggtctgctactcctgcctcctggcaccccccaacaccaaggaatgtgtgggagccacttcaggagcttctgccaacttccctggcacctcgggcagcagcaccctgtctcccttccagcacgcccacaaagaactctcaggccaaggacacctggccactgcc

SEQ ID NO: 3461 - DNA, 1371 bp, Homo Sapiens
gatatttgtgatcccaatccatgtgaaaatggaggtatctgtttgccaggattggctgatggttccttttcctgtgagtgtccagatggcttcacagaccccaactgttctagtgttgtggaggttgcatcagatgaagaagaaccaacttcagcaggtccctgcactcctaatccatgccataatggaggaacctgtgaaataagtgaagcataccgaggggatacattcataggctatgtttgtaaatgtccccgaggatttaatgggattcactgtcagcacaacataaatgaatgcgaagttgagccttgcaaaaatggtggaatatgtacagatcttgttgctaactattcctgtgagtgcccaggcgaatttatgggaagaaattgtcaatacaaatgctcaggcccactgggaattgaaggtggaattatatcaaaccagcaaatcacagcttcctctactcaccgagctctttttggactccaaaaatggtatccctactatgcacgtcttaataagaaggggcttataaatgcgtggacagctgcagaaaatgacagatggccgtggattcagataaatttgcaaaggaaaatgagagttactggtgtgattacccaaggagccaagaggattggaagcccagagtatataaaatcctacaaaattgcctacagtaatgatggaaagacttgggcaatgtacaaagtgaaaggcaccaatgaagacatggtgtttcgtggaaacattgataacaacactccatatgctaactctttcacaccccccataaaagctcagtatgtaagactctatccccaagtttgtcgaagacattgcactttgcgaatggaacttcttggctgtgaactgtcgggttgttctgagcctctgggtatgaaatcaggacatatacaagactatcagatcactgcctccagcatcttcagaacgctcaacatggacatgttcacttgggaaccaaggaaagctcggctggacaagcaaggcaaagtgaatgcctggacctctggccacaatgaccagtcacaatggttacaggtggatcttcttgttccaaccaaagtgactggcatcattacacaaggagctaaagattttggtcatgtacagtttgttggctcctacaaactggcttacagcaatgatggagaacactggactgtataccaggatgaaaagcaaagaaaagataaggttttccagggaaattttgacaatgacactcacagaaaaaatgtcatcgaccctcccatctatgcacgacacataagaatccttccttggtcctggtacgggaggatcacattgcggtcagagctgctgggctgcacagaggaggaa

SEQ ID NO: 3462 - DNA, 1428 bp, Homo Sapiens
caggacaccgaagaaaccatcacgtacacgcaatgcactgacggatatgagtgggatcctgtgagacagcaatgcaaagatattgatgaatgtgacattgtcccagacgcttgtaaaggtggaatgaagtgtgtcaaccactatggaggatacctctgccttccgaaaacagcccagattattgtcaataatgaacagcctcagcaggaaacacaaccagcagaaggaacctcaggggcaaccaccggggttgtagctgccagcagcatggcaaccagtggagtgttgcccgggggtggttttgtggccagtgctgctgcagtcgcaggccctgaaatgcagactggccgaaataactttgtcatccggcggaacccagctgaccctcagcgcattccctccaacccttcccaccgtatccagtgtgcagcaggctacgagcaaagtgaacacaacgtgtgccaagacatagacgagtgcactgcagggacgcacaactgtagagcagaccaagtgtgcatcaatttacggggatcctttgcatgtcagtgccctcctggatatcagaagcgaggggagcagtgcgtagacatagatgaatgtaccatccctccatattgccaccaaagatgcgtgaatacaccaggctcattttattgccagtgcagtcctgggtttcaattggcagcaaacaactatacctgcgtagatataaatgaatgtgatgccagcaatcaatgtgctcagcagtgctacaacattcttggttcattcatctgtcagtgcaatcaaggatatgagctaagcagtgacaggctcaactgtgaagacattgatgaatgcagaacctcaagctacctgtgtcaatatcaatgtgtcaatgaacctgggaaattctcatgtatgtgcccccagggataccaagtggtgagaagtagaacatgtcaagatataaatgagtgtgagaccacaaatgaatgccgggaggatgaaatgtgttggaattatcatggcggcttccgttgttatccacgaaatccttgtcaagatccctacattctaacaccagagaaccgatgtgtttgcccagtctcaaatgccatgtgccgagaactgccccagtcaatagtctacaaatacatgagcatccgatctgataggtctgtgccatcagacatcttccagatacaggccacaactatttatgccaacaccatcaatacttttcggattaaatctggaaatgaaaatggagagttctacctacgacaaacaagtcctgtaagtgcaatgcttgtgctcgtgaagtcattatcaggaccaagagaacatatcgtggacctggagatgctgacagtcagcagtatagggaccttccgcacaagctctgtgttaagattgacaataatagtggggccattttcattt

SEQ ID NO: 3463 - DNA, 1254 bp, Homo Sapiens
tctcctcaggattctgaagagcccgacagctacacggaatgcacagatggctatgagtgggacccagacagccagcactgccgggatgtcaacgagtgtctgaccatccctgaggcctgcaagggggaaatgaagtgcatcaaccactacgggggctacttgtgcctgccccgctccgctgccgtcatcaacgacctacacggcgagggacccccgccaccagtgcctcccgctcaacaccccaacccctgcccaccaggctatgagcccgacgatcaggacagctgtgtggatgtggacgagtgtgcccaggccctgcacgactgtcgccccagccaggactgccataacttgcctggctcctatcagtgcacctgccctgatggttaccgcaagatcgggcccgagtgtgtggacatagacgagtgccgctaccgctactgccagcaccgctgcgtgaacctgcctggctccttccgctgccagtgcgagccgggcttccagctggggcctaacaaccgctcctgtgttgatgtgaacgagtgtgacatgggggccccatgcgagcagcgctgcttcaactcctatgggaccttcctgtgtcgctgccaccagggctatgagctgcatcgggatggcttctcctgcagtgatattgatgagtgtagctactccagctacctctgtcagtaccgctgcgtcaacgagccaggccgtttctcctgccactgcccacagggttaccagctgctggccacacgcctctgccaagacattgatgagtgtgagtctggtgcgcaccagtgctccgaggcccaaacctgtgtcaacttccatgggggctaccgctgcgtggacaccaaccgctgcgtggagccctacatccaggtctctgagaaccgctgtctctgcccggcctccaaccctctatgtcgagagcagccttcatccattgtgcaccgctacatgaccatcacctcggagcggagcgtgcccgctgacgtgttccagatccaggcgacctccgtctaccccggtgcctacaatgcctttcagatccgtgctggaaactcgcagggggacttttacattaggcaaatcaacaacgtcagcgccatgctggtcctcgcccggccggtgacgggcccccgggagtacgtgctggacctggagatggtcaccatgaattccctcatgagctaccgggccagctctgtactgaggctcaccgtctttgtaggggcctacaccttc

SEQ ID NO: 3464 - DNA, 492 bp, Homo Sapiens
gatcgccacaccgtcttctggaacagttcaaatcccaagttccggaatgaggactacaccatacatgtgcagctgaatgactacgtggacatcatctgtccgcactatgaagatcactctgtggcagacgctgccatggagcagtacatactgtacctggtggagcatgaggagtaccagctgtgccagccccagtccaaggaccaagtccgctggcagtgcaaccggcccagtgccaagcatggcccggagaagctgtctgagaagttccagcgcttcacacctttcaccctgggcaaggagttcaaagaaggacacagctactactacatctccaaacccatccaccagcatgaagaccgctgcttgaggttgaaggtgactgtcagtggcaaaatcactcacagtcctcaggcccatgtcaatccacaggagaagagacttgcagcagatgacccagaggtgcgggttctacatagcatcgctcacagt

SEQ ID NO: 3465 - DNA, 492 bp, Homo Sapiens
cgcgccgaggacgccgcccgcgccaactcggaccgctacgccgtctactggaaccgcagcaaccccaggttccacgcaggcgcgggggacgacggcgggggctacacggtggaggtgagcatcaatgactacctggacatctactgcccgcactatggggcgccgctgccgccggccgagcgcatggagcactacgtgctgtacatggtcaacggcgagggccacgcctcctgcgaccaccgccagcgcggcttcaagcgctgggagtgcaaccggcccgcggcgcccggggggccgctcaagttctcggagaagttccagctcttcacgcccttctccctgggcttcgagttccggcccggccacgagtattactacatctctgccacgcctcccaatgctgtggaccggccctgcctgcgactgaaggtgtacgtgcggccgaccaacgagaccctgtacgaggctcctgagcccatcttcaccagcaat

SEQ ID NO: 3466 - DNA, 576 bp, Homo Sapiens
caagggcccggaggggcgctgggaaaccggcatgcggtgtactggaacagctccaaccagcacctgcggcgagagggctacaccgtgcaggtgaacgtgaacgactatctggatatttactgcccgcactacaacagctcgggggtgggccccggggcgggaccggggcccggaggcggggcagagcagtacgtgctgtacatggtgagccgcaacggctaccgcacctgcaacgccagccagggcttcaagcgctgggagtgcaaccggccgcacgccccgcacagccccatcaagttctcggagaagttccagcgctacagcgccttctctctgggctacgagttccacgccggccacgagtactactacatctccacgcccactcacaacctgcactggaagtgtctgaggatgaaggtgttcgtctgctgcgcctccacatcgcactccggggagaagccggtccccactctcccccagttcaccatgggccccaatgtgaagatcaacgtgctggaagactttgagggagagaaccctcaggtgcccaagcttgagaagagcatcagcggg

SEQ ID NO: 3467 - DNA, 549 bp, Homo Sapiens
caggacccgggctccaaggccgtcgccgaccgctacgctgtctactggaacagcagcaaccccagattccagaggggtgactaccatattgatgtctgtatcaatgactacctggatgttttctgccctcactatgaggactccgtcccagaagataagactgagcgctatgtcctctacatggtgaactttgatggctacagtgcctgcgaccacacttccaaagggttcaagagatgggaatgtaaccggcctcactctccaaatggaccgctgaagttctctgaaaaattccagctcttcactcccttttctctaggatttgaattcaggccaggccgagaatatttctacatctcctctgcaatcccagataatggaagaaggtcctgtctaaagctcaaagtctttgtgagaccaacaaatagctgtatgaaaactataggtgttcatgatcgtgttttcgatgttaacgacaaagtagaaaattcattagaaccagcagatgacaccgtacatgagtcagccgagccatcccgcggcgagaac

SEQ ID NO: 3468 - DNA, 630 bp, Homo Sapiens
ctggccaagaacctggagcccgtatcctggagctccctcaaccccaagttcctgagtgggaagggcttggtgatctatccgaaaattggagacaagctggacatcatctgcccccgagcagaagcagggcggccctatgagtactacaagctgtacctggtgcggcctgagcaggcagctgcctgtagcacagttctcgaccccaacgtgttggtcacctgcaataggccagagcaggaaatacgctttaccatcaagttccaggagttcagccccaactacatgggcctggagttcaagaagcaccatgattactacattacctcaacatccaatggaagcctggaggggctggaaaaccgggagggcggtgtgtgccgcacacgcaccatgaagatcatcatgaaggttgggcaagatcccaatgctgtgacgcctgagcagctgactaccagcaggcccagcaaggaggcagacaacactgtcaagatggccacacaggcccctggtagtcggggctccctgggtgactctgatggcaagcatgagactgtgaaccaggaagagaagagtggcccaggtgcaagtgggggcagcagcggggaccctgatggcttcttcaactccaag

SEQ ID NO: 3469 - DNA, 606 bp, Homo Sapiens
atagttttagagcctatctattggaattcctcgaactccaaatttctacctggacaaggactggtactatacccacagataggagacaaattggatattatttgccccaaagtggactctaaaactgttggccagtatgaatattataaagtttatatggttgataaagaccaagcagacagatgcactattaagaaggaaaatacccctctcctcaactgtgccaaaccagaccaagatatcaaattcaccatcaagtttcaagaattcagccctaacctctggggtctagaatttcagaagaacaaagattattacattatatctacatcaaatgggtctttggagggcctggataaccaggagggaggggtgtgccagacaagagccatgaagatcctcatgaaagttggacaagatgcaagttctgctggatcaaccaggaataaagatccaacaagacgtccagaactagaagctggtacaaatggaagaagttcgacaacaagtccctttgtaaaaccaaatccaggttctagcacagacggcaacagcgccggacattcggggaacaacatcctcggttccgaagtggccttatttgca

SEQ ID NO: 3470 - DNA, 597 bp, Homo Sapiens
ctcagcctggagcctgtctactggaactcggcgaataagaggttccaggcagagggtggttatgtgctgtaccctcagatcggggaccggctagacctgctctgccccagggcccggcctcctggccctcactcctctcctaattatgagttctacaagctgtacctggtagggggtgctcagggccggcgctgtgaggcaccccctgccccaaacctccttctcacttgtgatcgcccagacctggatctccgcttcaccatcaagttccaggagtatagccctaatctctggggccacgagttccgctcgcaccacgattactacatcattgccacatcggatgggacccgggagggcctggagagcctgcagggaggtgtgtgcctaaccagaggcatgaaggtgcttctccgagtgggacaaagtccccgaggaggggctgtcccccgaaaacctgtgtctgaaatgcccatggaaagagaccgaggggcagcccacagcctggagcctgggaaggagaacctgccaggtgaccccaccagcaatgcaacctcccggggtgctgaaggccccctgccccctcccagcatgcct

SEQ ID NO: 3471 - DNA, 159 bp, Homo Sapiens
aatagtgactctgaatgtcccctgtcccacgatgggtactgcctccatgatggtgtgtgcatgtatattgaagcattggacaagtatgcatgcaactgtgttgttggctacatcggggagcgatgtcagtaccgagacctgaagtggtgggaactgcgc

SEQ ID NO: 3472 - DNA, 591 bp, Homo Sapiens
catctggagtgctcctgccacaacaacagcacgtgtgagcctgccacgggcacctgccgctgcggccccggcttctatggccaggcctgcgagcacccctgtccccctggcttccacggggctggctgccaggggttgtgctggtgtcaacatggagccccctgcgaccccatcagtggccgatgcctctgccctgccggcttccacggccacttctgtgagagggggtgtgagccaggttcatttggagagggctgccaccagcgctgtgactgtgacgggggggcaccctgtgaccctgtcaccggtctctgcctttgcccaccagggcgctcaggagccacctgtaacctggattgcagaaggggccagtttgggcccagctgcaccctgcactgtgactgcgggggtggggctgactgcgaccctgtcagtgggcagtgtcactgtgtggatggctacatggggcccacgtgccgggaaggtgggcccctccggctccccgagaacccgtccttagcccagggctcagcgggcacactgcccgcctccagcagacccacatcccggagcggtggaccagcgaggcac

SEQ ID NO: 3473 - DNA, 1596 bp, Homo Sapiens
aacgcggccagtgcaaggcatcacgggttgttagcatcggcacgtcagcctggggtctgtcactatggaactaaactggcctgctgctacggctggagaagaaacagcaagggagtctgtgaagctacatgcgaacctggatgtaagtttggtgagtgcgtgggaccaaacaaatgcagatgctttccaggatacaccgggaaaacctgcagtcaagatgtgaatgagtgtggaatgaaaccccggccatgccaacacagatgtgtgaatacacacggaagctacaagtgcttttgcctcagtggccacatgctcatgccagatgctacgtgtgtgaactctaggacatgtgccatgataaactgtcagtacagctgtgaagacacagaagaagggccacagtgcctgtgtccatcctcaggactccgcctggccccaaatggaagagactgtctagatattgatgaatgtgcctctggtaaagtcatctgtccctacaatcgaagatgtgtgaacacatttggaagctactactgcaaatgtcacattggtttcgaactgcaatatatcagtggacgatatgactgtatagatataaatgaatgtactatggatagccatacgtgcagccaccatgccaattgcttcaatacccaagggtccttcaagtgtaaatgcaagcagggatataaaggcaatggacttcggtgttctgctatccctgaaaattctgtgaaggaagtcctcagagcacctggtaccatcaaagacagaatcaagaagttgcttgctcacaaaaacagcatgaaaaagaaggcaaaaattaaaaatgttaccccagaacccaccaggactcctacccctaaggtgaacttgcagcccttcaactatgaagagatagtttccagaggcgggaactctcatggaggtaaaaaagggaatgaagagaaaatgaaagaggggcttgaggatgagaaaagagaagagaaagccctgaagaatgacatagaggagcgaagcctgcgaggagatgtgtttttccctaaggtgaatgaagcaggtgaattcggcctgattctggtccaaaggaaagcgctaacttccaaactggaacataaagatttaaatatctcggttgactgcagcttcaatcatgggatctgtgactggaaacaggatagagaagatgattttgactggaatcctgctgatcgagataatgctattggcttctatatggcagttccggccttggcaggtcacaagaaagacattggccgattgaaacttctcctacctgacctgcaaccccaaagcaacttctgtttgctctttgattaccggctggccggagacaaagtcgggaaacttcgagtgtttgtgaaaaacagtaacaatgccctggcatgggagaagaccacgagtgaggatgaaaagtggaagacagggaaaattcagttgtatcaaggaactgatgctaccaaaagcatcatttttgaagcagaacgtggcaagggcaaaaccggcgaaatcgcagtggatggcgtcttgcttgtttcaggcttatgtccagatagccttttatctgtggatgac

SEQ ID NO: 3474 - DNA, 750 bp, Homo Sapiens
taccggcccggccgtagggtgtgtgctgtccgggctcacggggaccctgtctccgagtcgttcgtgcagcgtgtgtaccagcccttcctcaccacctgcgacgggcaccgggcctgcagcacctaccgaaccatctataggaccgcctaccgccgcagccctgggctggcccctgccaggcctcgctacgcgtgctgccccggctggaagaggaccagcgggcttcctggggcctgtggagcagcaatatgccagccgccatgccggaacggagggagctgtgtccagcctggccgctgccgctgccctgcaggatggcggggtgacacttgccagtcagatgtggatgaatgcagtgctaggaggggcggctgtccccagcgctgcatcaacaccgccggcagttactggtgccagtgttgggaggggcacagcctgtctgcagacggtacactctgtgtgcccaagggagggccccccagggtggcccccaacccgacaggagtggacagtgcaatgaaggaagaagtgcagaggctgcagtccagggtggacctgctggaggagaagctgcagctggtgctggccccactgcacagcctggcctcgcaggcactggagcatgggctcccggaccccggcagcctcctggtgcactccttccagcagctcggccgcatcgactccctgagcgagcagatttccttcctggaggagcagctggggtcctgctcctgcaagaaagactcg

SEQ ID NO: 3475 - DNA, 2955 bp, Homo Sapiens
ctccgagcggccatccgaaaaccaggcaaggtagggcctcctcttgacatcaagctgggcgcattgaactgtacggctttcagcatccagtggaaaatgccaaggcatcctggaagtcccatccttgggtacactgtcttttactctgaggttggcgcagataaatccctgcaggagcagttgcacagcgtgcctctcagccgggacatcccgaccacggaggaagtgattggagatttgaaaccaggcactgaatatcgtgtgagcatagcagcttacagccaggctggcaaagggcggctgagctctcctcggcatgtcaccactttgtcccaagattcctgcctgcctcctgcagctccccagcagccacatgtcattgtggtttcggattctgaggtggccctgtcttggaaacctggagcgagtgaaggaagcgcccctattcagtactattctgtggaattcatcaggccagatttcgacaagaagtggacctcaatccatgagcggatccagatggactccatggttatcaagggcctcgatccagataccaactaccagtttgccgtgagggcaatgaattcccatggccccagcccccgcagctggcccagtgacatcatccggaccctctgccctgaggaggcgggaagtggccgctatggaccccgttatatcaccgacatgggagctggtgaggatgatgaaggatttgaagacgacttagatttggatatttcctttgaggaggttaaaccacttcctgctaccaaaggagggaataagaaatttttggtggaaagcaagaagatgtctatatctaacccaaagaccatttctaggctcatcccccctacctcagcatctctccctgtgaccacggtggctccccagcccattcccatacagagaaaggggaagaatggtgtggccataatgtcaaggctctttgacatgccttgtgatgaaactctctgctctgctgacagcttctgtgtcaatgactacacctgggggggctcgcgatgccagtgcaccctgggcaaaggtggtgagagctgctcagaagatattgttatccagtatcctcagttctttggccactcctatgtaacgtttgaacctctgaagaattcttatcaggcatttcaaattactcttgaatttagggcggaggcagaggatggcttactgctctactgtggggagaacgaacacgggaggggggatttcatgtccctggctatcatccgacgctccctgcagttcaggtttaattgtggaactggggttgccatcatcgtaagtgagaccaaaatcaaactagggggttggcacatggttatgctctacagagatgggctgaacgggctgctgcagctgaacaatggcaccccagtgacaggccagtctcagggccaatacagtaaaattactttccggacacctctctatcttggtggcgctcccagcgcttactggttggttagagcaacagggacaaaccgaggctttcaaggctgtgtgcagtcgctcgctgtgaatgggaggagaattgacatgaggccctggcccctgggaaaagcactcagtggggctgatgtgggggaatgcagcagtggaatctgtgatgaggcctcgtgcatccatggtggcacctgcacagcaatcaaagccgactcctacatttgcctctgtccccttgggtttaaaggtcgacactgtgaagatgctttcaccttgaccattcctcagttcagagagtctctgagatcttacgctgcaactccctggccactggagccccagcattacctttccttcatggaatttgagatcacatttcggccagactcaggagatggtgtcctcctgtacagctatgacacaggcagcaaagacttcctgtccatcaacttggcagggggccacgtggagttccgctttgactgtggctctgggaccggtgtcctcaggagtgaagatcccctcaccctgggcaactggcacgagcttcgtgtatctcgcacagcaaagaatggaatcttacaggtggataagcagaagatagtggagggaatggcagagggaggcttcacacagattaagtgcaacacagacattttcattggcggagtccccaattatgatgatgtgaagaagaactcgggtgtcctgaagcctttcagcgggagcatccagaagatcatcctgaatgaccgaaccatccatgtgaagcatgacttcacctccggagtgaatgtggagaatgcggcccacccctgtgtgagagccccttgtgcccatgggggcagctgccggcccaggaaggagggctatgactgtgactgccccttgggctttgaggggcttcactgccagaaagcgatcatagaagccattgagatcccgcagtttatcggccgcagttacctgacgtatgacaacccagatatcttgaagagggtgtcaggatcaagatcaaatgtgttcatgaggtttaaaacaactgccaaggatggccttttgctgtggaggggagacagccccatgagacccaacagcgacttcatttccttgggccttcgggatggagccctcgtgttcagctataacctgggcagtggtgtggcatccatcatggtgaatggctccttcaacgatggtcggtggcaccgagttaaggccgttagggatggccagtcaggaaagataaccgtggatgactatggagccagaacaggcaaatccccaggcatgatgcggcagcttaacatcaatggagctctgtatgtgggtggaatgaaggaaattgctctgcacactaacaggcaatatatgagagggctcgtgggctgtatctctcacttcaccctgtccaccgattaccacatttccctcgtggaagatgccgtggatggaaaaaacatcaacacttgtggagccaag

SEQ ID NO: 3476 - DNA, 1863 bp, Homo Sapiens
ctggaggaaaagaaagtttgccaaggcacgagtaacaagctcacgcagttgggcacttttgaagatcattttctcagcctccagaggatgttcaataactgtgaggtggtccttgggaatttggaaattacctatgtgcagaggaattatgatctttccttcttaaagaccatccaggaggtggctggttatgtcctcattgccctcaacacagtggagcgaattcctttggaaaacctgcagatcatcagaggaaatatgtactacgaaaattcctatgccttagcagtcttatctaactatgatgcaaataaaaccggactgaaggagctgcccatgagaaatttacaggaaatcctgcatggcgccgtgcggttcagcaacaaccctgccctgtgcaacgtggagagcatccagtggcgggacatagtcagcagtgactttctcagcaacatgtcgatggacttccagaaccacctgggcagctgccaaaagtgtgatccaagctgtcccaatgggagctgctggggtgcaggagaggagaactgccagaaactgaccaaaatcatctgtgcccagcagtgctccgggcgctgccgtggcaagtcccccagtgactgctgccacaaccagtgtgctgcaggctgcacaggcccccgggagagcgactgcctggtctgccgcaaattccgagacgaagccacgtgcaaggacacctgccccccactcatgctctacaaccccaccacgtaccagatggatgtgaaccccgagggcaaatacagctttggtgccacctgcgtgaagaagtgtccccgtaattatgtggtgacagatcacggctcgtgcgtccgagcctgtggggccgacagctatgagatggaggaagacggcgtccgcaagtgtaagaagtgcgaagggccttgccgcaaagtgtgtaacggaataggtattggtgaatttaaagactcactctccataaatgctacgaatattaaacacttcaaaaactgcacctccatcagtggcgatctccacatcctgccggtggcatttaggggtgactccttcacacatactcctcctctggatccacaggaactggatattctgaaaaccgtaaaggaaatcacagggtttttgctgattcaggcttggcctgaaaacaggacggacctccatgcctttgagaacctagaaatcatacgcggcaggaccaagcaacatggtcagttttctcttgcagtcgtcagcctgaacataacatccttgggattacgctccctcaaggagataagtgatggagatgtgataatttcaggaaacaaaaatttgtgctatgcaaatacaataaactggaaaaaactgtttgggacctccggtcagaaaaccaaaattataagcaacagaggtgaaaacagctgcaaggccacaggccaggtctgccatgccttgtgctcccccgagggctgctggggcccggagcccagggactgcgtctcttgccggaatgtcagccgaggcagggaatgcgtggacaagtgcaaccttctggagggtgagccaagggagtttgtggagaactctgagtgcatacagtgccacccagagtgcctgcctcaggccatgaacatcacctgcacaggacggggaccagacaactgtatccagtgtgcccactacattgacggcccccactgcgtcaagacctgcccggcaggagtcatgggagaaaacaacaccctggtctggaagtacgcagacgccggccatgtgtgccacctgtgccatccaaactgcacctacggatgcactgggccaggtcttgaaggctgtccaacgaatgggcctaagatcccgtcc

SEQ ID NO: 3477 - DNA, 1173 bp, Homo Sapiens
gattgctggctgatagagggcgacaaaggttttgtctggcttgcgatatgctcacaaaatcaacctccctacgaggctataccgcagcagatcaactcaacaattgtcgatcttaggttaaacgaaaataggatcagatcagtgcaatacgcatctctttccagatttggtaacttgacttatcttaatctaacaaagaacgaaataggctatatcgaggacggagcgttctctggtcagttcaaccttcaagttcttcagcttggatacaataggcttaggaatttaactgagggtatgttgagaggacttggaaagttagagtatttatatctgcaggctaatctaattgaagttgtaatggcttctagtttttgggagtgtcccaacatagtgaatattgacctttcaatgaacaggattcagcaattgaactcaggcaccttcgcgggattggccaaactatctgtttgcgaattatacagcaatcctttctattgcagttgcgagttgttgggattcttacgttggctggcggcgtttacaaatgcgacccagacatacgacaggatgcagtgtgagagccctcccgtttactccggctactatttacttggtcagggtcgtcgtggacataggagtatcttatcaaaacttcagagcgtgtgtacggaggacagttacgccgcggaggtagtcggcccacctagaccagctagtgggagaagccagccaggccgtagtccccccccacctcctccccccgagccgtctgatatgccttgtgcagacgacgagtgcttttcaggcgacggtactactccacttgttgcacttccaaccctggctactcaggccgaagcgagacccctaattaaggttaaacagttgacgcagaattctgcgacaatcaccgtgcaactacctagccccttccatagaatgtacacgttggaacatttcaacaatagcaaagcctccactgtgtcaaggttgacaaaagctcaggaagaaatacgtctaaccaacttgttcacgttgacaaactacacttactgcgtggtgtcaacgagtgcggggttaagacacaaccatacctgtctgactatatgtctacccagacttccatcaccgccgggtcccgttccatctcctagtacagccacccactat

SEQ ID NO: 3478 - DNA, 1125 bp, Homo Sapiens
gattgttggttaattgaaggcgacaaagggtacgtctggctagccatctgctcccagaatcagcccccctatgaaaccatcccccaacacatcaatagtaccgtccacgaccttagattaaatgagaataaattgaaggcggtactttacagcagcctgaacagatttggaaacctgacagatcttaatcttacgaaaaacgagattagttatatcgaagacggggcgtttctaggtcagagctcattgcaagtactgcagttgggctacaataagctgagtaatctaacagaaggtatgctgagaggcatgagtagacttcaattcttgttcgtgcagcataatctgatcgaggttgtgacgcccactgcattttcagagtgtccttcacttatttccatagaccttagttctaacaggttatctagattagacggcgctacgtttgcaagtcttgcttctctgatggtttgtgagttagcaggtaaccccttcaactgtgaatgtgacttgttcgggttccttgcctggcttgtcgtatttaataatgttaccaagaactatgaccgtctacagtgtgaatctccaagagagttcgctggttaccccctattagttccgaggccttatcactccctgaatgctattactgtgttgcaggcgaaatgcaggaatggaagtcttccggccaggccggtgtcacatcctacaccctactccactgacgcgcaacgtgaacccgacgaaaactctggattcaatcctgatgaaattttaagtgtcgaacccccggccagcagtaccactgacgcctcagcgggccccgcaattaaactacatcacgtgacattcacctctgcaaccctggttgtgattataccacatccgtactctaagatgtatattcttgtccaatacaataacagttatttctctgacgttatgacacttaagaataagaaggagatagtgacgctagacaagctaagggcacataccgagtacaccttttgtgtgacgagtttaagaaactcccgtcgttttaatcacacttgtctgacgtttacaacccgtgatcccgtgcccggcgaccttgcccctagcacatcaactaccacgcattac

SEQ ID NO: 3479 - DNA, 597 bp, Homo Sapiens
atgcatgaggaatgtgtctttcctttcacctacaagggatctgtttacttcacttgcacccatattcatagcttatccccttggtgtgccaccagagccgtgtacaacggccagtggaagtactgccagagtgaagattacccacgctgtatcttccctttcatctatcgaggaaaggcttataacagctgcatctcccagggcagcttcttaggcagtctgtggtgctcagtcacctctgtcttcgatgagaaacagcagtggaaattctgtgaaacgaatgagtatgggggaaattctctcaggaagccctgcatcttcccctccatctacagaaataatgtggtctctgattgcatggaggatgaaagcaacaagctctggtgcccaaccacagagaacatggataaggatggaaagtggagtttctgtgccgacaccagaatttccgcgttggtccctggctttccttgtcactttccgttcaactataaaaacaagaattattttaactgcactaacaaaggatcaaaggagaaccttgtgtggtgtgcaacttcttacaactacgaccaagaccacacctgggtgtattgc

SEQ ID NO: 3480 - DNA, 1239 bp, Homo Sapiens
caaaattgcaccaagacaccttgtctcccaaatgcaaaatgtgaaatacgcaatggaattgaagcctgctattgcaacatgggattttcaggaaatggtgtcacaatttgtgaagatgataatgaatgtggaaatttaactcagtcctgtggcgaaaatgctaattgcactaacacagaaggaagttattattgtatgtgtgtacctggcttcagatccagcagtaaccaagacaggtttatcactaatgatggaaccgtctgtatagaaaatgtgaatgcaaactgccatttagataatgtctgtatagctgcaaatattaataaaactttaacaaaaatcagatccataaaagaacctgtggctttgctacaagaagtctatagaaattctgtgacagatctttcaccaacagatataattacatatatagaaatattagctgaatcatcttcattactaggttacaagaacaacactatctcagccaaggacaccctttctaactcaactcttactgaatttgtaaaaaccgtgaataattttgttcaaagggatacatttgtagtttgggacaagttatctgtgaatcataggagaacacatcttacaaaactcatgcacactgttgaacaagctactttaaggatatcccagagcttccaaaagaccacagagtttgatacaaattcaacggatatagctctcaaagttttcttttttgattcatataacatgaaacatattcatcctcatatgaatatggatggagactacataaatatatttccaaagagaaaagctgcatatgattcaaatggcaatgttgcagttgcatttgtatattataagagtattggtcctttgctttcatcatctgacaacttcttattgaaacctcaaaattatgataattctgaagaggaggaaagagtcatatcttcagtaatttcagtctcaatgagctcaaacccacccacattatatgaacttgaaaaaataacatttacattaagtcatcgaaaggtcacagataggtataggagtctatgtgcattttggaattactcacctgataccatgaatggcagctggtcttcagagggctgtgagctgacatactcaaatgagacccacacctcatgccgctgtaatcacctgacacattttgcaattttgatgtcctctggtccttccattggtattaaagattataatattcttacaaggatcactcaa

SEQ ID NO: 3481 - DNA, 684 bp, Homo Sapiens
gacggcagtgccccagattcgccttttacaagtccacctctcagagaagaaataatggcaaataacttttccttggagagtcataacatatcactgactgaacattctagtatgccagtagaaaaaaatatcactttagaaaggccttctaatgtaaatctcacatgccagttcacaacatctggggatttgaatgcagtaaatgtgacttggaaaaaagatggtgaacaacttgagaataattatcttgtcagtgcaacaggaagcaccttgtatacccaatacaggttcaccatcattaatagcaaacaaatgggaagttattcttgtttctttcgagaggaaaaggaacaaaggggaacatttaatttcaaagtccctgaacttcatgggaaaaacaagccattgatctcttacgtaggggattctactgtcttgacatgtaaatgtcaaaattgttttcctttaaattggacctggtacagtagtaatgggagtgtaaaggttcctgttggtgttcaaatgaataaatatgtgatcaatggaacatatgctaacgaaacaaagctgaagataacacaacttttggaggaagatggggaatcttactggtgccgtgcactattccaattaggcgagagtgaagaacacattgagcttgtggtgctgagctatttggtgccc

SEQ ID NO: 3482 - DNA, 480 bp, Homo Sapiens
aacagcacaggtgttttagaggcagctaataattcacttgttgttactacaacaaaaccatctataacaacaccaaacacagaatcattacagaaaaatgttgtcacaccaacaactggaacaactcctaaaggaacaatcaccaatgaattacttaaaatgtctctgatgtcaacagctacttttttaacaagtaaagatgaaggattgaaagccacaaccactgatgtcaggaagaatgactccatcatttcaaacgtaacagtaacaagtgttacacttccaaatgctgtttcaacattacaaagttccaaacccaagactgaaactcagagttcaattaaaacaacagaaataccaggcacaccagaaaatggaaatgatcaacctcagtctgataaagagagcgtgaagcttcttaccgttaagacaatttctcatgagtctggtgagcactctgcacaaggaaaaaccaagaac

SEQ ID NO: 3483 - DNA, 1737 bp, Homo Sapiens
cacataagacccacacggaaaccaaacacaaagggtaataactgtagagacagtaccttgtgcccagcttatgccacctgcaccaatacagtggacagttactattgcgcttgcaaacaaggcttcctgtccagcaatgggcaaaatcacttcaaggatccaggagtgcgatgcaaagatattgatgaatgttctcaaagcccccagccctgtggtcctaactcatcctgcaaaaacctgtcagggaggtacaagtgcagctgtttagatggtttctcttctcccactggaaatgactgggtcccaggaaagccgggcaatttctcctgtactgatatcaatgagtgcctcaccagcagcgtctgccctgagcattctgactgtgtcaactccatgggaagctacagttgcagctgtcaagttggattcatctctagaaactccacctgtgaagacgtggatgaatgtgcagatccaagagcttgcccagagcatgcaacttgtaataacactgttggaaactactcttgtttctgcaacccaggatttgaatccagcagtggccacttgagtttccagggtctcaaagcatcgtgtgaagatattgatgaatgcactgaaatgtgccccatcaattcaacatgcaccaacactcctgggagctacttttgcacctgccaccctggctttgcaccaagcaatggacagttgaatttcacagaccaaggagtggaatgtagagatattgatgagtgccgccaagatccatcaacctgtggtcctaattctatctgcaccaatgccctgggctcctacagctgtggctgcattgcaggctttcatcccaatccagaaggctcccagaaagatggcaacttcagctgccaaagggttctcttcaaatgtaaggaagatgtgatacccgataataagcagatccagcaatgccaagagggaaccgcagtgaaacctgcatatgtctccttttgtgcacaaataaataacatcttcagcgttctggacaaagtgtgtgaaaataaaacgaccgtagtttctctgaagaatacaactgagagctttgtccctgtgcttaaacaaatatccacgtggactaaattcaccaaggaagagacgtcctccctggccacagtcttcctggagagtgtggaaagcatgacactggcatctttttggaaaccctcagcaaatatcactccggctgttcggacggaatacttagacattgagagcaaagttatcaacaaagaatgcagtgaagagaatgtgacgttggacttggtagccaagggggataagatgaagatcgggtgttccacaattgaggaatctgaatccacagagaccactggtgtggcttttgtctcctttgtgggcatggaatcggttttaaatgagcgcttcttcaaagaccaccaggctcccttgaccacctctgagatcaagctgaagatgaattctcgagtcgttgggggcataatgactggagagaagaaagacggcttctcagatccaatcatctacactctggagaacattcagccaaagcagaagtttgagaggcccatctgtgtttcctggagcactgatgtgaagggtggaagatggacatcctttggctgtgtgatcctggaagcttctgagacatataccatctgcagctgtaatcagatggcaaatcttgccgttatcatggcgtctggggagctcacgatggac

SEQ ID NO: 3484 - DNA, 2484 bp, Homo Sapiens
aaaccaagctgtgccaaagaagttaaaagttgcaaaggtcgctgtttcgagagaacatttgggaactgtcgctgtgatgctgcctgtgttgagcttggaaactgctgtttagattaccaggagacgtgcatagaaccagaacatatatggacttgcaacaaattcaggtgtggtgagaaaaggttgaccagaagcctctgtgcctgttcagatgactgcaaggacaagggcgactgctgcatcaactacagttctgtgtgtcaaggtgagaaaagttgggtagaagaaccatgtgagagcattaatgagccacagtgcccagcagggtttgaaacgcctcctaccctcttattttctttggatggattcagggcagaatatttacacacttggggtggacttcttcctgttattagcaaactaaaaaaatgtggaacatatactaaaaacatgagaccggtatatccaacaaaaactttccccaatcactacagcattgtcaccggattgtatccagaatctcatggcataatcgacaataaaatgtatgatcccaaaatgaatgcttccttttcacttaaaagtaaagagaaatttaatcctgagtggtacaaaggagaaccaatttgggtcacagctaagtatcaaggcctcaagtctggcacatttttctggccaggatcagatgtggaaattaacggaattttcccagacatctataaaatgtataatggttcagtaccatttgaagaaaggattttagctgttcttcagtggctacagcttcctaaagatgaaagaccacacttttacactctgtatttagaagaaccagattcttcaggtcattcatatggaccagtcagcagtgaagtcatcaaagccttgcagagggttgatggtatggttggtatgctgatggatggtctgaaagagctgaacttgcacagatgcctgaacctcatccttatttcagatcatggcatggaacaaggcagttgtaagaaatacatatatctgaataaatatttgggggatgttaaaaatattaaagttatctatggacctgcagctcgattgagaccctctgatgtcccagataaatactattcatttaactatgaaggcattgcccgaaatctttcttgccgggaaccaaaccagcacttcaaaccttacctgaaacatttcttacctaagcgtttgcactttgctaagagtgatagaattgagcccttgacattctatttggaccctcagtggcaacttgcattgaatccctcagaaaggaaatattgtggaagtggatttcatggctctgacaatgtattttcaaatatgcaagccctctttgttggctatggacctggattcaagcatggcattgaggctgacacctttgaaaacattgaagtctataacttaatgtgtgatttactgaatttgacaccggctcctaataacggaactcatggaagtcttaaccaccttctaaagaatcctgtttatacgccaaagcatcccaaagaagtgcaccccctggtacagtgccccttcacaagaaaccccagagataaccttggctgctcatgtaacccttcgattttgccgattgaggattttcaaacacagttcaatctgactgtggcagaagagaagattattaagcatgaaactttaccctatggaagacctagagttctccagaaggaaaacaccatctgtcttctttcccagcaccagtttatgagtggatacagccaagacatcttaatgcccctttggacatcctataccgtggacagaaatgacagtttctctacggaagacttctccaactgtctgtaccaggactttagaattcctcttagtcctgtccataaatgttcattttataaaaataacaccaaagtgagttacgggttcctctccccaccacaactaaataaaaattcaagtggaatatattctgaagctttgcttactacaaatatagtgccaatgtaccagagttttcaagttatatggcgctactttcatgacaccctactgcgaaagtatgctgaagaaagaaatggtgtcaatgtcgtcagtggtcctgtgtttgactttgattatgatggacgttgtgattccttagagaatctgaggcaaaaaagaagagtcatccgtaaccaagaaattttgattccaactcacttctttattgtgctaacaagctgtaaagatacatctcagacgcctttgcactgtgaaaacctagacaccttagctttcattttgcctcacaggactgataacagcgagagctgtgtgcatgggaagcatgactcctcatgggttgaagaattgttaatgttacacagagcacggatcacagatgttgagcacatcactggactcagcttctatcaacaaagaaaagagccagtttcagacattttaaagttgaaaacacatttgccaacctttagccaagaagac

SEQ ID NO: 3485 - DNA, 1020 bp, Homo Sapiens
atggaaagtgaagagttggcagacagggttctggatgtggtggagaggagcctcagcaactacccctttgacttccagggtgccaggatcattactggccaagaggaaggtgcctatggctggattactatcaactatctgctgggcaaattcagtcagaaaacaaggtggttcagcatagtcccatatgaaaccaataatcaggaaacctttggagctttggaccttgggggagcctctacacaagtcacttttgtaccccaaaaccagactatcgagtccccagataatgctctgcaatttcgcctctatggcaaggactacaatgtctacacacatagcttcttgtgctatgggaaggatcaggcactctggcagaaactggccaaggacattcaggttgcaagtaatgaaattctcagggacccatgctttcatcctggatataagaaggtagtgaacgtaagtgacctttacaagaccccctgcaccaagagatttgagatgactcttccattccagcagtttgaaatccagggtattggaaactatcaacaatgccatcaaagcatcctggagctcttcaacaccagttactgcccttactcccagtgtgccttcaatgggattttcttgccaccactccagggggattttggggcattttcagctttttactttgtgatgaagtttttaaacttgacatcagagaaagtctctcaggaaaaggtgactgagatgatgaaaaagttctgtgctcagccttgggaggagataaaaacatcttacgctggagtaaaggagaagtacctgagtgaatactgcttttctggtacctacattctctccctccttctgcaaggctatcatttcacagctgattcctgggagcacatccatttcattggcaagatccagggcagcgacgccggctggactttgggctacatgctgaacctgaccaacatgatcccagctgagcaaccattgtccacacctctctcccactccacctatgtc

SEQ ID NO: 3486 - DNA, 1227 bp, Homo Sapiens
cagatccacaagcaagaggtcctccctccaggactgaagtatggtattgtgctggatgccgggtcttcaagaaccacagtctacgtgtatcaatggccagcagaaaaagagaataataccggagtggtcagtcaaaccttcaaatgtagtgtgaaaggctctggaatctccagctatggaaataacccccaagatgtccccagagcctttgaggagtgtatgcaaaaagtcaaggggcaggttccatcccacctccacggatccacccccattcacctgggagccacggctgggatgcgcttgctgaggttgcaaaatgaaacagcagctaatgaagtccttgaaagcatccaaagctacttcaagtcccagccctttgactttaggggtgctcaaatcatttctgggcaagaagaaggggtatatggatggattacagccaactatttaatgggaaatttcctggagaagaacctgtggcacatgtgggtgcacccgcatggagtggaaaccacgggtgccctggacttaggtggtgcctccacccaaatatccttcgtggcaggagagaagatggatctgaacaccagcgacatcatgcaggtgtccctgtatggctacgtatacacgctctacacacacagcttccagtgctatggccggaatgaggctgagaagaagtttctggcaatgctcctgcagaattctcctaccaaaaaccatctcaccaatccctgttaccctcgggattatagcatcagcttcaccatgggccatgtatttgatagcctgtgcactgtggaccagaggccagaaagttataaccccaatgatgtcatcacttttgaaggaactggggacccatctctgtgtaaggagaaggtggcttccatatttgacttcaaagcttgccatgatcaagaaacctgttcttttgatggggtttatcagccaaagattaaagggccatttgtggcttttgcaggattctactacacagccagtgctttaaatctttcaggtagcttttccctggacaccttcaactccagcacctggaatttctgctcacagaattggagtcagctcccactgctgctccccaaatttgatgaggtatatgcccgctcttactgcttctcagccaactacatctaccacttgtttgtgaacggttacaaattcacagaggagacttggccccaaatacactttgaaaaagaagaa

SEQ ID NO: 3487 - DNA, 237 bp, Homo Sapiens
gcagccgtgactgtaacacctccaatcacagcccagcaagctgacaacatagaaggacccatagccttgaagttctcacacctttgcctggaagatcataacagttactgcatcaacggtgcttgtgcattccaccatgagctagagaaagccatctgcaggtgttttactggttatactggagaaaggtgtgagcacttgactttaacttcatatgctgtggattcttatgaaaaa

SEQ ID NO: 3488 - DNA, 1566 bp, Homo Sapiens
aaggaagttactctgatggacacaagcaaggcacagggagagctgggctggctgctggatcccccaaaagatgggtggagtgaacagcaacagatactgaatgggacacccctgtacatgtaccaggactgcccaatgcaaggacgcagagacactgaccactggcttcgctccaattggatctaccgcggggaggaggcttcccgcgtccacgtggagctgcagttcaccgtgcgggactgcaagagtttccctgggggagccgggcctctgggctgcaaggagaccttcaaccttctgtacatggagagtgaccaggatgtgggcattcagctccgacggcccttgttccagaaggtaaccacggtggctgcagaccagagcttcaccattcgagaccttgcgtctggctccgtgaagctgaatgtggagcgctgctctctgggccgcctgacccgccgtggcctctacctcgctttccacaacccgggtgcctgtgtggccctggtgtctgtccgggtcttctaccagcgctgtcctgagaccctgaatggcttggcccaattcccagacactctgcctggccccgctgggttggtggaagtggcggggacctgcttgccccacgcgcgggccagccccaggccctcaggtgcaccccgcatgcactgcagccctgatggcgagtggctggtgcctgtaggacggtgccactgtgagcctggctatgaggaaggtggcagtggcgaagcatgtgttgcctgccctagcggctcctaccggatggacatggacacaccccattgtctcacgtgcccccagcagagcactgctgagtctgagggggccaccatctgtacctgtgagagcggccattacagagctcccggggagggcccccaggtggcatgcacaggtcccccctcggccccccgaaacctgagcttctctgcctcagggactcagctctccctgcgttgggaacccccagcagatacggggggacgccaggatgtcagatacagtgtgaggtgttcccagtgtcagggcacagcacaggacggggggccctgccagccctgtggggtgggcgtgcacttctcgccgggggcccgggggctcaccacacctgcagtgcatgtcaatggccttgaaccttatgccaactacacctttaatgtggaagcccaaaatggagtgtcagggctgggcagctctggccatgccagcacctcagtcagcatcagcatggggcatgcagagtcactgtcaggcctgtctctgagactggtgaagaaagaaccgaggcaactagagctgacctgggcggggtcccggccccgaagccctggggcgaacctgacctatgagctgcacgtgctgaaccaggatgaagaacggtaccagatggttctagaacccagggtcttgctgacagagctgcagcctgacaccacatacatcgtcagagtccgaatgctgaccccactgggtcctggccctttctcccctgatcatgagtttcggaccagcccaccagtgtccaggggcctgactggaggagag

SEQ ID NO: 3489 - DNA, 1596 bp, Homo Sapiens
gaggaagttatattattagattccaaagcctctcaggcagagttagggtggacggcactgcctagtaatggttgggaagagatttctggggttgacgagcacgacaggccaattcgtacctatcaggtctgcaacgtcttagagcctaaccaggacaactggcttcagactgggtggatcagtcgtggaagaggacaaagaatatttgtggagctgcagttcacactaagggattgcagcagcattccaggagctgcaggtacttgtaaggaaactttcaacgtgtactatttggaaactgaagcggatttaggtagagggcgtccaagactaggcggatctcgtccccgtaagattgatactatcgctgccgacgaatcttttacgcagggtgatttaggcgagagaaagatgaaattgaatacagaagttagagagatcggcccgttatctaggcgtggtttccatcttgccttccaggatgtgggggcatgcgttgcacttgtcagcgtgagagtgtattacaagcagtgtagggcgacagtcagaggccttgcgacatttcccgccacagctgcggaaagcgccttcagtactctggttgaagtcgcgggaacttgcgtggcacattcagagggtgagcctggcagtccaccgagaatgcattgtggcgccgacggtgaatggttggttccagttggccgttgtagctgttctgccggattccaggaaagaggcgatttttgtgaagcgtgtccgccggggttctataaggtcagtccgagaaggccattgtgttccccctgcccagagcatagcagagcgttagagaacgcaagtaccttctgtgtgtgtcaggattcttacgctcgttctcccacagacccaccgagtgcatcttgtacaagaccgccttcagcaccgagagacttacagtacagtttgagccgtagtccgctagtgctacgtcttagatggcttccccctgcggatagcggtggtaggtctgacgtcacatactctctactgtgcctgagatgcggtagagagggtcctgcgggggcttgcgagccttgcggcccccgtgtcgcatttttacccaggcaagcgggtctaagagagagagcagccacgctgttgcatcttagacccggggctcgttatacggtgagggtcgcggcgttaaatggtgtatccggccccgctgcggcagccggcactacttacgcgcaagtaaccgtatcaacgggcccgggagcaccttgggaagaagatgagataagaagggacagggtggagcctcaatctgtgagcctgtcatggcgtgaaccaatcccggcgggagcccccggggcaaatgatactgaatacgagattcgttactacgagaagggacaatctgaacaaacttacagtatggttaaaaccggtgctcctacagtgacagtaacgaatttgaagcccgcaactaggtatgtgtttcaaattagagccgcgtccccgggcccaagttgggaagcccagtcctttaatccctccatcgaggtacaaacccttggagaggccgcgtctgggagccgtgaccagtcacctgcc

SEQ ID NO: 3490 - DNA, 1542 bp, Homo Sapiens
gcgcagggcaaggaagtggtactgctggactttgctgcagctggaggggagctcggctggctcacacacccgtatggcaaagggtgggacctgatgcagaacatcatgaatgacatgccgatctacatgtactccgtgtgcaacgtgatgtctggcgaccaggacaactggctccgcaccaactgggtgtaccgaggagaggctgagcgtatcttcattgagctcaagtttactgtacgtgactgcaacagcttccctggtggcgccagctcctgcaaggagactttcaacctctactatgccgagtcggacctggactacggcaccaacttccagaagcgcctgttcaccaagattgacaccattgcgcccgatgagatcaccgtcagcagcgacttcgaggcacgccacgtgaagctgaacgtggaggagcgctccgtggggccgctcacccgcaaaggcttctacctggccttccaggatatcggtgcctgtgtggcgctgctctccgtccgtgtctactacaagaagtgccccgagctgctgcagggcctggcccacttccctgagaccatcgccggctctgatgcaccttccctggccactgtggccggcacctgtgtggaccatgccgtggtgccaccggggggtgaagagccccgtatgcactgtgcagtggatggcgagtggctggtgcccattgggcagtgcctgtgccaggcaggctacgagaaggtggaggatgcctgccaggcctgctcgcctggattttttaagtttgaggcatctgagagcccctgcttggagtgccctgagcacacgctgccatcccctgagggtgccacctcctgcgagtgtgaggaaggcttcttccgggcacctcaggacccagcgtcgatgccttgcacacgacccccctccgccccacactacctcacagccgtgggcatgggtgccaaggtggagctgcgctggacgccccctcaggacagcgggggccgcgaggacattgtctacagcgtcacctgcgaacagtgctggcccgagtctggggaatgcgggccgtgtgaggccagtgtgcgctactcggagcctcctcacggactgacccgcaccagtgtgacagtgagcgacctggagccccacatgaactacaccttcaccgtggaggcccgcaatggcgtctcaggcctggtaaccagccgcagcttccgtactgccagtgtcagcatcaaccagacagagccccccaaggtgaggctggagggccgcagcaccacctcgcttagcgtctcctggagcatccccccgccgcagcagagccgagtgtggaagtacgaggtcacttaccgcaagaagggagactccaacagctacaatgtgcgccgcaccgagggtttctccgtgaccctggacgacctggccccagacaccacctacctggtccaggtgcaggcactgacgcaggagggccagggggccggcagcaaggtgcacgaattccagacgctgtccccggagggatctggcaacttggcggtg

SEQ ID NO: 3491 - DNA, 1563 bp, Homo Sapiens
gaactgattccgcagccttccaatgaagtcaatctactggattcaaaaacaattcaaggggagctgggctggatctcttatccatcacatgggtgggaagagatcagtggtgtggatgaacattacacacccatcaggacttaccaggtgtgcaatgtcatggaccacagtcaaaacaattggctgagaacaaactgggtccccaggaactcagctcagaagatttatgtggagctcaagttcactctacgagactgcaatagcattccattggttttaggaacttgcaaggagacattcaacctgtactacatggagtctgatgatgatcatggggtgaaatttcgagagcatcagtttacaaagattgacaccattgcagctgatgaaagtttcactcaaatggatcttggggaccgtattctgaagctcaacactgagattagagaagtaggtcctgtcaacaagaagggattttatttggcatttcaagatgttggtgcttgtgttgccttggtgtctgtgagagtatacttcaaaaagtgcccatttacagtgaagaatctggctatgtttccagacacggtacccatggactcccagtccctggtggaggttagagggtcttgtgtcaacaattctaaggaggaagatcctccaaggatgtactgcagtacagaaggcgaatggcttgtacccattggcaagtgttcctgcaatgctggctatgaagaaagaggttttatgtgccaagcttgtcgaccaggtttctacaaggcattggatggtaatatgaagtgtgctaagtgcccgcctcacagttctactcaggaagatggttcaatgaactgcaggtgtgagaataattacttccgggcagacaaagaccctccatccatggcttgtacccgacctccatcttcaccaagaaatgttatctctaatataaacgagacctcagttatcctggactggagttggcccctggacacaggaggccggaaagatgttaccttcaacatcatatgtaaaaaatgtgggtggaatataaaacagtgtgagccatgcagcccaaatgtccgcttcctccctcgacagtttggactcaccaacaccacggtgacagtgacagaccttctggcacatactaactacacctttgagattgatgccgttaatggggtgtcagagctgagctccccaccaagacagtttgctgcggtcagcatcacaactaatcaggctgctccatcacctgtcctgacgattaagaaagatcggacctccagaaatagcatctctttgtcctggcaagaacctgaacatcctaatgggatcatattggactacgaggtcaaatactatgaaaagcaggaacaagaaacaagttataccattctgagggcaagaggcacaaatgttaccatcagtagcctcaagcctgacactatatacgtattccaaatccgagcccgaacagccgctggatatgggacgaacagccgcaagtttgagtttgaaactagtccagactctttctccatctctggtgaaagtagccaa

SEQ ID NO: 3492 - DNA, 1584 bp, Homo Sapiens
gtcacaggttccagggtataccccgcgaatgaagttaccttattggattccagatctgttcagggagaacttgggtggatagcaagccctctggaaggagggtgggaggaagtgagtatcatggatgaaaaaaatacaccaatccgaacctaccaagtgtgcaatgtgatggaacccagccagaataactggctacgaactgattggatcacccgagaaggggctcagagggtgtatattgagattaaattcaccttgagggactgcaatagtcttccgggcgtcatggggacttgcaaggagacgtttaacctgtactactatgaatcagacaacgacaaagagcgtttcatcagagagaaccagtttgtcaaaattgacaccattgctgctgatgagagcttcacccaagtggacattggtgacagaatcatgaagctgaacaccgagatccgggatgtagggccattaagcaaaaaggggttttacctggcttttcaggatgtgggggcctgcatcgccctggtatcagtccgtgtgttctataaaaagtgtccactcacagtccgcaatctggcccagtttcctgacaccatcacaggggctgatacgtcttccctggtggaagttcgaggctcctgtgtcaacaactcagaagagaaagatgtgccaaaaatgtactgtggggcagatggtgaatggctggtacccattggcaactgcctatgcaacgctgggcatgaggagcggagcggagaatgccaagcttgcaaaattggatattacaaggctctctccacggatgccacctgtgccaagtgcccaccccacagctactctgtctgggaaggagccacctcgtgcacctgtgaccgaggctttttcagagctgacaacgatgctgcctctatgccctgcacccgtccaccatctgctcccctgaacttgatttcaaatgtcaacgagacatctgtgaacttggaatggagtagccctcagaatacaggtggccgccaggacatttcctataatgtggtatgcaagaaatgtggagctggtgaccccagcaagtgccgaccatgtggaagtggggtccactacaccccacagcagaatggcttgaagaccaccaaagtctccatcactgacctcctagctcataccaattacacctttgaaatctgggctgtgaatggagtgtccaaatataaccctaacccagaccaatcagtttctgtcactgtgaccaccaaccaagcagcaccatcatccattgctttggtccaggctaaagaagtcacaagatacagtgtggcactggcttggctggaaccagatcggcccaatggggtaatcctggaatatgaagtcaagtattatgagaaggatcagaatgagcgaagctatcgtatagttcggacagctgccaggaacacagatatcaaaggcctgaaccctctcacttcctatgttttccacgtgcgagccaggacagcagctggctatggagacttcagtgagcccttggaggttacaaccaacacagtgccttcccggatcattggagatggggctaactccaca

SEQ ID NO: 3493 - DNA, 1650 bp, Homo Sapiens
ccagcgtccctggccggctgctactctgcacctcgacgggctcccctctggacgtgccttctcctgtgcgccgcactccggaccctcctggccagccccagcaatgaagtgaatttattggattcacgcactgtcatgggggacctgggatggattgcttttccaaaaaatgggtgggaagagattggtgaagtggatgaaaattatgcccctatccacacataccaagtatgcaaagtgatggaacagaatcagaataactggcttttgaccagttggatctccaatgaaggtgcttccagaatcttcatagaactcaaatttaccctgcgggactgcaacagccttcctggaggactggggacctgtaaggaaacctttaatatgtattactttgagtcagatgatcagaatgggagaaacatcaaggaaaaccaatacatcaaaattgataccattgctgccgatgaaagctttacagaacttgatcttggtgaccgtgttatgaaactgaatacagaggtcagagatgtaggacctctaagcaaaaagggattttatcttgcttttcaagatgttggtgcttgcattgctctggtttctgtgcgtgtatactataaaaaatgcccttctgtggtacgacacttggctgtcttccctgacaccatcactggagctgattcttcccaattgctcgaagtgtcaggctcctgtgtcaaccattctgtgaccgatgaacctcccaaaatgcactgcagcgccgaaggggagtggctggtgcccatcgggaaatgcatgtgcaaggcaggatatgaagagaaaaatggcacctgtcaagtgtgcagacctgggttcttcaaagcctcacctcacatccagagctgcggcaaatgtccacctcacagttatacccatgaggaagcttcaacctcttgtgtctgtgaaaaggattatttcaggagagagtctgatccacccacaatggcatgcacaagacccccctctgctcctcggaatgccatctcaaatgttaatgaaactagtgtctttctggaatggattccgcctgctgacactggtggaaggaaagacgtgtcatattatattgcatgcaagaagtgcaactcccatgcaggtgtgtgtgaggagtgtggcggtcatgtcaggtaccttccccggcaaagcggcctgaaaaacacctctgtcatgatggtggatctactcgctcacacaaactatacctttgagattgaggcagtgaatggagtgtccgacttgagcccaggagcccggcagtatgtgtctgtaaatgtaaccacaaatcaagcagctccatctccagtcaccaatgtgaaaaaagggaaaattgcaaaaaacagcatctctttgtcttggcaagaaccagatcgtcccaatggaatcatcctagagtatgaaatcaagtattttgaaaaggaccaagagaccagctacacgattatcaaatctaaagagacaactattactgcagagggcttgaaaccagcttcagtttatgtcttccaaattcgagcacgtacagcagcaggctatggtgtcttcagtcgaagatttgagtttgaaaccaccccagtgtcagttgcagcatccagcgatcaaagccagattcct

SEQ ID NO: 3494 - DNA, 108 bp, Homo Sapiens
atgaaagactctccatttcaagtgacaaaactgtactggcttaatgaaaagtgggactttattgcctcagcttctgacatggcagcagaacaaggacagattctcgtg

SEQ ID NO: 3495 - DNA, 1584 bp, Homo Sapiens
caggctgcgaaggaagtactactgctggattctaaagcacaacaaacagagttggagtggatttcctctccacccaatgggtgggaagaaattagtggtttggatgagaactataccccgatacgaacataccaggtgtgccaagtcatggagcccaaccaaaacaactggctgcggactaactggatttccaaaggcaatgcacaaaggatttttgtagaattgaaattcaccctgagggattgtaacagtcttcctggagtactgggaacttgcaaggaaacatttaatttgtactattatgaaacagactatgacactggcaggaatataagagaaaacctctatgtaaaaatagacaccattgctgcagatgaaagttttacccaaggtgaccttggtgaaagaaagatgaagcttaacactgaggtgagagagattggacctttgtccaaaaagggattctatcttgcctttcaggatgtaggggcttgcatagctttggtttctgtcaaagtgtactacaagaagtgctggtccattattgagaacttagctatctttccagatacagtgactggttcagaattttcctctttagtcgaggttcgagggacatgtgtcagcagtgcagaggaagaagcggaaaacgcccccaggatgcactgcagtgcagaaggagaatggttagtgcccattggaaaatgtatctgcaaagcaggctaccagcaaaaaggagacacttgtgaaccctgtggccgtgggttctacaagtcttcctctcaagatcttcagtgctctcgttgtccaactcacagtttttctgataaagaaggctcctccagatgtgaatgtgaagatgggtattacagggctccatctgacccaccatacgttgcatgcacaaggcctccatctgcaccacagaacctcattttcaacatcaaccaaaccacagtaagtttggaatggagtcctcctgcagacaatgggggaagaaacgatgtgacctacagaatattgtgtaagcggtgcagttgggagcagggcgaatgtgttccctgtgggagtaacattggatacatgccccagcagactggattagaggataactatgtcactgtcatggacctgctagcccacgctaattatacttttgaagttgaagctgtaaatggagtttctgacttaagccgatcccagaggctctttgctgctgtcagtatcaccactggtcaagcagctccctcgcaagtgagcggagtaatgaaggagagagtactgcagcggagtgtcgagctttcctggcaggaaccagagcatcccaatggagtcatcacagaatatgaaatcaagtattacgagaaagatcaaagggaacggacctactcaacagtaaaaaccaagtctacttcagcctccattaataatctgaaaccaggaacagtgtatgttttccagattcgggcttttactgctgctggttatggaaattacagtcccagacttgatgttgctacactagaggaagctacaggtaaaatgtttgaagctacagctgtctccagtgaacagaatcctgtt

SEQ ID NO: 3496 - DNA, 1545 bp, Homo Sapiens
gcgcgcggcgaagtgaatttgctggacacgtcgaccatccacggggactggggctggctcacgtatccggctcatgggtgggactccatcaacgaggtggacgagtccttccagcccatccacacgtaccaggtttgcaacgtcatgagccccaaccagaacaactggctgcgcacgagctgggtcccccgagacggcgcccggcgcgtctatgctgagatcaagtttaccctgcgcgactgcaacagcatgcctggtgtgctgggcacctgcaaggagaccttcaacctctactacctggagtcggaccgcgacctgggggccagcacacaagaaagccagttcctcaaaatcgacaccattgcggccgacgagagcttcacaggtgccgaccttggtgtgcggcgtctcaagctcaacacggaggtgcgcagtgtgggtcccctcagcaagcgcggcttctacctggccttccaggacataggtgcctgcctggccatcctctctctccgcatctactataagaagtgccctgccatggtgcgcaatctggctgccttctcggaggcagtgacgggggccgactcgtcctcactggtggaggtgaggggccagtgcgtgcggcactcagaggagcgggacacacccaagatgtactgcagcgcggagggcgagtggctcgtgcccatcggcaaatgcgtgtgcagtgccggctacgaggagcggcgggatgcctgtgtggcctgtgagctgggcttctacaagtcagcccctggggaccagctgtgtgcccgctgccctccccacagccactccgcagctccagccgcccaagcctgccactgtgacctcagctactaccgtgcagccctggacccgccgtcctcagcctgcacccggccaccctcggcaccagtgaacctgatctccagtgtgaatgggacatcagtgactctggagtgggcccctcccctggacccaggtggccgcagtgacatcacctacaatgccgtgtgccgccgctgcccctgggcactgagccgctgcgaggcatgtgggagcggcacccgctttgtgccccagcagacaagcctggtgcaggccagcctgctggtggccaacctgctggcccacatgaactactccttctggatcgaggccgtcaatggcgtgtccgacctgagccccgagccccgccgggccgctgtggtcaacatcaccacgaaccaggcagccccgtcccaggtggtggtgatccgtcaagagcgggcggggcagaccagcgtctcgctgctgtggcaggagcccgagcagccgaacggcatcatcctggagtatgagatcaagtactacgagaaggacaaggagatgcagagctactccaccctcaaggccgtcaccaccagagccaccgtctccggcctcaagccgggcacccgctacgtgttccaggtccgagcccgcacctcagcaggctgtggccgcttcagccaggccatggaggtggagaccgggaaaccccggccccgctatgacaccaggacc

SEQ ID NO: 3497 - DNA, 1569 bp, Homo Sapiens
atggaagaaacgttaatggacaccagaacggctactgcagagctgggctggacggccaatcctgcgtccgggtgggaagaagtcagtggctacgatgaaaacctgaacaccatccgcacctaccaggtgtgcaatgtcttcgagcccaaccagaacaattggctgctcaccaccttcatcaaccggcggggggcccatcgcatctacacagagatgcgcttcactgtgagagactgcagcagcctccctaatgtcccaggatcctgcaaggagaccttcaacttgtattactatgagactgactctgtcattgccaccaagaagtcagccttctggtctgaggccccctacctcaaagtagacaccattgctgcagatgagagcttctcccaggtggactttgggggaaggctgatgaaggtaaacacagaagtcaggagctttgggcctcttactcggaatggtttttacctcgcttttcaggattatggagcctgtatgtctcttctttctgtccgtgtcttcttcaaaaagtgtcccagcattgtgcaaaattttgcagtgtttccagagactatgacaggggcagagagcacatctctggtgattgctcggggcacatgcatccccaacgcagaggaagtggacgtgcccatcaaactctactgcaacggggatggggaatggatggtgcctattgggcgatgcacctgcaagcctggctatgagcctgagaacagcgtggcatgcaaggcttgccctgcagggacattcaaggccagccaggaagctgaaggctgctcccactgcccctccaacagccgctcccctgcagaggcgtctcccatctgcacctgtcggaccggttattaccgagcggactttgaccctccagaagtggcatgcactagcgtcccatcaggtccccgcaatgttatctccatcgtcaatgagacgtccatcattctggagtggcaccctccaagggagacaggtgggcgggatgatgtgacctacaacatcatctgcaaaaagtgccgggcagaccgccggagctgctcccgctgtgacgacaatgtggagtttgtgcccaggcagctgggcctgacggagtgccgcgtctccatcagcagcctgtgggcccacaccccctacacctttgacatccaggccatcaatggagtctccagcaagagtcccttccccccacagcacgtctctgtcaacatcaccacaaaccaagccgccccctccaccgttcccatcatgcaccaagtcagtgccactatgaggagcatcaccttgtcatggccacagccggagcagcccaatggcatcatcctggactatgagatccggtactatgagaaggaacacaatgagttcaactcctccatggccaggagtcagaccaacacagcaaggattgatgggctgcggcctggcatggtatatgtggtacaggtgcgtgcccgcactgttgctggctacggcaagttcagtggcaagatgtgcttccagactctgactgacgatgattacaagtcagagctgagggagcagctgccc

SEQ ID NO: 3498 - DNA, 1575 bp, Homo Sapiens
gtggaagaaacgctaatggactccactacagcgactgctgagctgggctggatggtgcatcctccatcagggtgggaagaggtgagtggctacgatgagaacatgaacacgatccgcacgtaccaggtgtgcaacgtgtttgagtcaagccagaacaactggctacggaccaagtttatccggcgccgtggcgcccaccgcatccacgtggagatgaagttttcggtgcgtgactgcagcagcatccccagcgtgcctggctcctgcaaggagaccttcaacctctattactatgaggctgactttgactcggccaccaagaccttccccaactggatggagaatccatgggtgaaggtggataccattgcagccgacgagagcttctcccaggtggacctgggtggccgcgtcatgaaaatcaacaccgaggtgcggagcttcggacctgtgtcccgcagcggcttctacctggccttccaggactatggcggctgcatgtccctcatcgccgtgcgtgtcttctaccgcaagtgcccccgcatcatccagaatggcgccatcttccaggaaaccctgtcgggggctgagagcacatcgctggtggctgcccggggcagctgcatcgccaatgcggaagaggtggatgtacccatcaagctctactgtaacggggacggcgagtggctggtgcccatcgggcgctgcatgtgcaaagcaggcttcgaggccgttgagaatggcaccgtctgccgaggttgtccatctgggactttcaaggccaaccaaggggatgaggcctgtacccactgtcccatcaacagccggaccacttctgaaggggccaccaactgtgtctgccgcaatggctactacagagcagacctggaccccctggacatgccctgcacaaccatcccctccgcgccccaggctgtgatttccagtgtcaatgagacctccctcatgctggagtggacccctccccgcgactccggaggccgagaggacctcgtctacaacatcatctgcaagagctgtggctcgggccggggtgcctgcacccgctgcggggacaatgtacagtacgcaccacgccagctaggcctgaccgagccacgcatttacatcagtgacctgctggcccacacccagtacaccttcgagatccaggctgtgaacggcgttactgaccagagccccttctcgcctcagttcgcctctgtgaacatcaccaccaaccaggcagctccatcggcagtgtccatcatgcatcaggtgagccgcaccgtggacagcattaccctgtcgtggtcccagccggaccagcccaatggcgtgatcctggactatgagctgcagtactatgagaaggagctcagtgagtacaacgccacagccataaaaagccccaccaacacggtcaccgtgcagggcctcaaagccggcgccatctatgtcttccaggtgcgggcacgcaccgtggcaggctacgggcgctacagcggcaagatgtacttccagaccatgacagaagccgagtaccagacaagcatccaggagaagttgccactc

SEQ ID NO: 3499 - DNA, 1578 bp, Homo Sapiens
ggctgccgggcgctggaagagaccctcatggacacaaaatgggtaacatctgagttggcgtggacatctcatccagaaagtgggtgggaagaggtgagtggctacgatgaggccatgaatcccatccgcacataccaggtgtgtaatgtgcgcgagtcaagccagaacaactggcttcgcacggggttcatctggcggcgggatgtgcagcgggtctacgtggagctcaagttcactgtgcgtgactgcaacagcatccccaacatccccggctcctgcaaggagaccttcaacctcttctactacgaggctgacagcgatgtggcctcagcctcctcccccttctggatggagaacccctacgtgaaagtggacaccattgcacccgatgagagcttctcgcggctggatgccggccgtgtcaacaccaaggtgcgcagctttgggccactttccaaggctggcttctacctggccttccaggaccagggcgcctgcatgtcgctcatctccgtgcgcgccttctacaagaagtgtgcatccaccaccgcaggcttcgcactcttccccgagaccctcactggggcggagcccacctcgctggtcattgctcctggcacctgcatccctaacgccgtggaggtgtcggtgccactcaagctctactgcaacggcgatggggagtggatggtgcctgtgggtgcctgcacctgtgccaccggccatgagccagctgccaaggagtcccagtgccgcccctgtccccctgggagctacaaggcgaagcagggagaggggccctgcctcccatgtccccccaacagccgtaccacctccccagccgccagcatctgcacctgccacaataacttctaccgtgcagactcggactctgcggacagtgcctgtaccaccgtgccatctccaccccgaggtgtgatctccaatgtgaatgaaacctcactgatcctcgagtggagtgagccccgggacctgggtggccgggatgacctcctgtacaatgtcatctgcaagaagtgccatggggctggaggggcctcagcctgctcacgctgtgatgacaacgtggagtttgtgcctcggcagctgggcctgacggagcgccgggtccacatcagccatctgctggcccacacgcgctacacctttgaggtgcaggcggtcaacggtgtctcgggcaagagccctctgccgcctcgttatgcggccgtgaatatcaccacaaaccaggctgccccgtctgaagtgcccacactacgcctgcacagcagctcaggcagcagcctcaccctatcctgggcacccccagagcggcccaacggagtcatcctggactacgagatgaagtactttgagaagagcgagggcatcgcctccacagtgaccagccagatgaactccgtgcagctggacgggcttcggcctgacgcccgctatgtggtccaggtccgtgcccgcacagtagctggctatgggcagtacagccgccctgccgagtttgagaccacaagtgagagaggctctggggcccagcagctccaggagcagcttcccctc

SEQ ID NO: 3500 - DNA, 1572 bp, Homo Sapiens
ttggaagagaccctgctgaacacaaaattggaaactgctgatctgaagtgggtgacattccctcaggtggacgggcagtgggaggaactgagcggcctggatgaggaacagcacagcgtgcgcacctacgaagtgtgtgacgtgcagcgtgccccgggccaggcccactggcttcgcacaggttgggtcccacggcggggcgccgtccacgtgtacgccacgctgcgcttcaccatgctcgagtgcctgtccctgcctcgggctgggcgctcctgcaaggagaccttcaccgtcttctactatgagagcgatgcggacacggccacggccctcacgccagcctggatggagaacccctacatcaaggtggacacggtggccgcggagcatctcacccggaagcgccctggggccgaggccaccgggaaggtgaatgtcaggacgctgcgtctgggaccgctcagcaaggctggcttctacctggccttccaggaccagggtgcctgcatggccctgctatccctgcacctcttctacaaaaagtgcgcccagctgactgtgaacctgactcgattcccggagactgtgcctcgggagctggttgtgcccgtggccggtagctgcgtggtggatgccgtccccgcccctggccccagccccagcctctactgccgtgaggatggccagtgggccgaacagccggtcacgggctgcagctgtgctccggggttcgaggcagctgaggggaacaccaagtgccgagcctgtgcccagggcaccttcaagcccctgtcaggagaagggtcctgccagccatgcccagccaatagccactctaacaccattggatcagccgtctgccagtgccgcgtcgggtacttccgggcacgcacagacccccggggtgcaccctgcaccacccctccttcggctccgcggagcgtggtttcccgcctgaacggctcctccctgcacctggaatggagtgcccccctggagtctggtggccgagaggacctcacctacgccctccgctgccgggagtgccgacccggaggctcctgtgcgccctgcgggggagacctgacttttgaccccggcccccgggacctggtggagccctgggtggtggttcgagggctacgtcctgacttcacctatacctttgaggtcactgcattgaacggggtatcctccttagccacggggcccgtcccatttgagcctgtcaatgtcaccactgaccgagaggtacctcctgcagtgtccgacatccgggtgacgcggtcctcacccagcagcttgagcctggcctgggctgttccccgggcacccagtggggctgtgctggactacgaggtcaaataccatgagaagggcgccgagggtcccagcagcgtgcggttcctgaagacgtcagaaaaccgggcagagctgcgggggctgaagcggggagccagctacctggtgcaggtacgggcgcgctctgaggccggctacgggcccttcggccaggaacatcacagccagacccaactggatgagagcgagggctggcgggagcagctggcc

SEQ ID NO: 3501 - DNA, 678 bp, Homo Sapiens
cctccatcggctccccaggagctttggtttgaggtgcaaggctcagcactcatgctacactggcgcctgcctcgggagctggggggtcgaggggacctgctcttcaatgtcgtgtgcaaggagtgtgaaggccgccaggaacctgccagcggtggtgggggcacttgtcaccgctgcagggatgaggtccacttcgaccctcgccagagaggcctgactgagagccgagtgttagtggggggactccgggcacacgtaccctacatcttagaggtgcaggctgttaatggggtgtctgagctcagccctgaccctcctcaggctgcagccatcaatgtcagcaccagccatgaagtgccctctgctgtccctgtggtgcaccaggtgagccgggcatccaacagcatcacggtgtcctggccgcagcccgaccagaccaatgggaacatcctggactatcagctccgctactatgaccaggcagaagacgaatcccactccttcaccctgaccagcgagaccaacactgccaccgtgacacagctgagccctggccacatctatggtttccaggtgcgggcccggactgctgccggccacggcccctacgggggcaaagtctatttccagacacttcctcaaggggagctgtcttcccagcttccggaaagactctcc

SEQ ID NO: 3502 - DNA, 498 bp, Homo Sapiens
gccccaccacgcctcatctgtgacagccgagtcctggagaggtacctcttggaggccaaggaggccgagaatatcacgacgggctgtgctgaacactgcagcttgaatgagaatatcactgtcccagacaccaaagttaatttctatgcctggaagaggatggaggtcgggcagcaggccgtagaagtctggcagggcctggccctgctgtcggaagctgtcctgcggggccaggccctgttggtcaactcttcccagccgtgggagcccctgcagctgcatgtggataaagccgtcagtggccttcgcagcctcaccactctgcttcgggctctgggagcccagaaggaagccatctcccctccagatgcggcctcagctgctccactccgaacaatcactgctgacactttccgcaaactcttccgagtctactccaatttcctccggggaaagctgaagctgtacacaggggaggcctgcaggacaggggacaga

SEQ ID NO: 3503 - DNA, 678 bp, Homo Sapiens
gctccgccgccaaatttgccagaccccaagttcgagtcaaaagcggccttactagccgcccgtggccccgaagagttattatgtttcactgagcgtctggaggatctggtttgcttttgggaggaggcagcctccgctggtgtaggaccaggaaactactccttcagttatcagttggaggacgaaccgtggaaactgtgcaggctgcatcaagctccaacggctagaggtgcggtacgtttttggtgcagtcttccgacggctgatacgagttcattcgtcccgcttgaacttagggtaactgccgcctcaggggctccccgttatcacagggtcattcatatcaacgaagttgttttgttggacgcaccagtcggtttagtagctaggttggcagatgaaagtggccatgtcgtgctaaggtggcttcctcctcctgaaacccccatgacaagccacataaggtatgaagtagacgtgagcgcggggaatggggcggggtctgtccaaagggttgaaatacttgaaggtagaaccgaatgcgtattgtctaatttgcgtgggaggacaagatacacatttgccgtacgtgccaggatggcagagccttcctttggtggcttttggtcagcatggagcgagccggtcagtctgctgaccccatctgacctggacccg

SEQ ID NO: 3504 - DNA, 909 bp, Homo Sapiens
gccccaactctagagtccatcaactatgactcagaaacctatgatgccaccttagaagacctggataatttgtacaactatgaaaacatacctgttggtaaagttgagattgaaatagccacagtgatgccttcagggaacagagagctcctcactccacccccacagcctgagaaggcccaggaagaggaagaggaggaggaatctactcccaggctgattgatggctcttctccccaggagcctgaattcacaggggttctggggccacacacaaatgaagactttccaacctgtcttttgtgtacttgtataagtaccaccgtgtactgtgatgaccatgaacttgatgctattcctccgctgccaaagaacaccgcttatttctattcccgctttaacagaattaaaaagatcaacaaaaatgactttgcaagcctaagtgatttaaaaaggattgatctgacatcaaatttaatatctgagattgatgaagatgcattccgaaaactgcctcaacttcgagagcttgtcctgcgtgacaacaaaataaggcagctcccagaattgccaaccactttgacatttattgatattagcaacaatagacttggaaggaaagggataaagcaagaagcatttaaagacatgtatgatctccatcatctgtacctcactgataacaacttggaccacatccctctgccactcccagaaaatctacgagcccttcacctccagaataacaacattctggaaatgcacgaagatacgttctgcaatgttaaaaatttgacttatattcgtaaggcactagaggacattcgattggatggaaaccctattaatctcagcaaaactcctcaagcatacatgtgtctacctcgtctgcctgttgggagccttgtc

SEQ ID NO: 3505 - DNA, 1890 bp, Homo Sapiens
acccaagtgtgcaccggcacagacatgaagctgcggctccctgccagtcccgagacccacctggacatgctccgccacctctaccagggctgccaggtggtgcagggaaacctggaactcacctacctgcccaccaatgccagcctgtccttcctgcaggatatccaggaggtgcagggctacgtgctcatcgctcacaaccaagtgaggcaggtcccactgcagaggctgcggattgtgcgaggcacccagctctttgaggacaactatgccctggccgtgctagacaatggagacccgctgaacaataccacccctgtcacaggggcctccccaggaggcctgcgggagctgcagcttcgaagcctcacagagatcttgaaaggaggggtcttgatccagcggaacccccagctctgctaccaggacacgattttgtggaaggacatcttccacaagaacaaccagctggctctcacactgatagacaccaaccgctctcgggcctgccacccctgttctccgatgtgtaagggctcccgctgctggggagagagttctgaggattgtcagagcctgacgcgcactgtctgtgccggtggctgtgcccgctgcaaggggccactgcccactgactgctgccatgagcagtgtgctgccggctgcacgggccccaagcactctgactgcctggcctgcctccacttcaaccacagtggcatctgtgagctgcactgcccagccctggtcacctacaacacagacacgtttgagtccatgcccaatcccgagggccggtatacattcggcgccagctgtgtgactgcctgtccctacaactacctttctacggacgtgggatcctgcaccctcgtctgccccctgcacaaccaagaggtgacagcagaggatggaacacagcggtgtgagaagtgcagcaagccctgtgcccgagtgtgctatggtctgggcatggagcacttgcgagaggtgagggcagttaccagtgccaatatccaggagtttgctggctgcaagaagatctttgggagcctggcatttctgccggagagctttgatggggacccagcctccaacactgccccgctccagccagagcagctccaagtgtttgagactctggaagagatcacaggttacctatacatctcagcatggccggacagcctgcctgacctcagcgtcttccagaacctgcaagtaatccggggacgaattctgcacaatggcgcctactcgctgaccctgcaagggctgggcatcagctggctggggctgcgctcactgagggaactgggcagtggactggccctcatccaccataacacccacctctgcttcgtgcacacggtgccctgggaccagctctttcggaacccgcaccaagctctgctccacactgccaaccggccagaggacgagtgtgtgggcgagggcctggcctgccaccagctgtgcgcccgagggcactgctggggtccagggcccacccagtgtgtcaactgcagccagttccttcggggccaggagtgcgtggaggaatgccgagtactgcaggggctccccagggagtatgtgaatgccaggcactgtttgccgtgccaccctgagtgtcagccccagaatggctcagtgacctgttttggaccggaggctgaccagtgtgtggcctgtgcccactataaggaccctcccttctgcgtggcccgctgccccagcggtgtgaaacctgacctctcctacatgcccatctggaagtttccagatgaggagggcgcatgccagccttgccccatcaactgcacccactcctgtgtggacctggatgacaagggctgccccgccgagcagagagccagccctctgacg

SEQ ID NO: 3506 - DNA, 1872 bp, Homo Sapiens
tccgaggtgggcaactctcaggcagtgtgtcctgggactctgaatggcctgagtgtgaccggcgatgctgagaaccaataccagacactgtacaagctctacgagaggtgtgaggtggtgatggggaaccttgagattgtgctcacgggacacaatgccgacctctccttcctgcagtggattcgagaagtgacaggctatgtcctcgtggccatgaatgaattctctactctaccattgcccaacctccgcgtggtgcgagggacccaggtctacgatgggaagtttgccatcttcgtcatgttgaactataacaccaactccagccacgctctgcgccagctccgcttgactcagctcaccgagattctgtcagggggtgtttatattgagaagaacgataagctttgtcacatggacacaattgactggagggacatcgtgagggaccgagatgctgagatagtggtgaaggacaatggcagaagctgtcccccctgtcatgaggtttgcaaggggcgatgctggggtcctggatcagaagactgccagacattgaccaagaccatctgtgctcctcagtgtaatggtcactgctttgggcccaaccccaaccagtgctgccatgatgagtgtgccgggggctgctcaggccctcaggacacagactgctttgcctgccggcacttcaatgacagtggagcctgtgtacctcgctgtccacagcctcttgtctacaacaagctaactttccagctggaacccaatccccacaccaagtatcagtatggaggagtttgtgtagccagctgtccccataactttgtggtggatcaaacatcctgtgtcagggcctgtcctcctgacaagatggaagtagataaaaatgggctcaagatgtgtgagccttgtgggggactatgtcccaaagcctgtgagggaacaggctctgggagccgcttccagactgtggactcgagcaacattgatggatttgtgaactgcaccaagatcctgggcaacctggactttctgatcaccggcctcaatggagacccctggcacaagatccctgccctggacccagagaagctcaatgtcttccggacagtacgggagatcacaggttacctgaacatccagtcctggccgccccacatgcacaacttcagtgttttttccaatttgacaaccattggaggcagaagcctctacaaccggggcttctcattgttgatcatgaagaacttgaatgtcacatctctgggcttccgatccctgaaggaaattagtgctgggcgtatctatataagtgccaataggcagctctgctaccaccactctttgaactggaccaaggtgcttcgggggcctacggaagagcgactagacatcaagcataatcggccgcgcagagactgcgtggcagagggcaaagtgtgtgacccactgtgctcctctgggggatgctggggcccaggccctggtcagtgcttgtcctgtcgaaattatagccgaggaggtgtctgtgtgacccactgcaactttctgaatggggagcctcgagaatttgcccatgaggccgaatgcttctcctgccacccggaatgccaacccatggagggcactgccacatgcaatggctcgggctctgatacttgtgctcaatgtgcccattttcgagatgggccccactgtgtgagcagctgcccccatggagtcctaggtgccaagggcccaatctacaagtacccagatgttcagaatgaatgtcggccctgccatgagaactgcacccaggggtgtaaaggaccagagcttcaagactgtttaggacaaacactggtgctgatcggcaaaacccatctgaca

SEQ ID NO: 3507 - DNA, 1878 bp, Homo Sapiens
cagtcagtgtgtgcaggaacggagaataaactgagctctctctctgacctggaacagcagtaccgagccttgcgcaagtactatgaaaactgtgaggttgtcatgggcaacctggagataaccagcattgagcacaaccgggacctctccttcctgcggtctgttcgagaagtcacaggctacgtgttagtggctcttaatcagtttcgttacctgcctctggagaatttacgcattattcgtgggacaaaactttatgaggatcgatatgccttggcaatatttttaaactacagaaaagatggaaactttggacttcaagaacttggattaaagaacttgacagaaatcctaaatggtggagtctatgtagaccagaacaaattcctttgttatgcagacaccattcattggcaagatattgttcggaacccatggccttccaacttgactcttgtgtcaacaaatggtagttcaggatgtggacgttgccataagtcctgtactggccgttgctggggacccacagaaaatcattgccagactttgacaaggacggtgtgtgcagaacaatgtgacggcagatgctacggaccttacgtcagtgactgctgccatcgagaatgtgctggaggctgctcaggacctaaggacacagactgctttgcctgcatgaatttcaatgacagtggagcatgtgttactcagtgtccccaaacctttgtctacaatccaaccacctttcaactggagcacaatttcaatgcaaagtacacatatggagcattctgtgtcaagaaatgtccacataactttgtggtagattccagttcttgtgtgcgtgcctgccctagttccaagatggaagtagaagaaaatgggattaaaatgtgtaaaccttgcactgacatttgcccaaaagcttgtgatggcattggcacaggatcattgatgtcagctcagactgtggattccagtaacattgacaaattcataaactgtaccaagatcaatgggaatttgatctttctagtcactggtattcatggggacccttacaatgcaattgaagccatagacccagagaaactgaacgtctttcggacagtcagagagataacaggtttcctgaacatacagtcatggccaccaaacatgactgacttcagtgttttttctaacctggtgaccattggtggaagagtactctatagtggcctgtccttgcttatcctcaagcaacagggcatcacctctctacagttccagtccctgaaggaaatcagcgcaggaaacatctatattactgacaacagcaacctgtgttattatcataccattaactggacaacactcttcagcacaatcaaccagagaatagtaatccgggacaacagaaaagctgaaaattgtactgctgaaggaatggtgtgcaaccatctgtgttccagtgatggctgttggggacctgggccagaccaatgtctgtcgtgtcgccgcttcagtagaggaaggatctgcatagagtcttgtaacctctatgatggtgaatttcgggagtttgagaatggctccatctgtgtggagtgtgacccccagtgtgagaagatggaagatggcctcctcacatgccatggaccgggtcctgacaactgtacaaagtgctctcattttaaagatggcccaaactgtgtggaaaaatgtccagatggcttacagggggcaaacagtttcattttcaagtatgctgatccagatcgggagtgccacccatgccatccaaactgcacccaagggtgtaacggtcccactagtcatgactgcatttactacccatggacgggccattccactttaccacaacatgctagaactccc

SEQ ID NO: 3508 - DNA, 138 bp, Homo Sapiens
gtgtcaataacaaagtgtagctctgacatgaatggctattgtttgcatggacagtgcatctatctggtggacatgagtcaaaactactgcaggtgtgaagtgggttatactggtgtccgatgtgaacacttcttttta

SEQ ID NO: 3509 - DNA, 378 bp, Homo Sapiens
cacgcaggggatgccggcaagttccacgtggccctactagggggcacagccgagctgctctgccctctctccctctggcccgggacggtacccaaggaggtgaggtggctgcggtccccattcccgcagcgctcccaggctgttcacatattccgggatgggaaggaccaggatgaagatctgatgccggaatataaggggaggacggtgctagtgagagatgcccaagagggaagtgtcactctgcagatccttgacgtgcgccttgaggaccaagggtcttaccgatgtctgatccaagttggaaatctgagtaaagaggacaccgtgatcctgcaggttgcagccccatctgtggggagtctctccccctcagca

SEQ ID NO: 3510 - DNA, 657 bp, Homo Sapiens
cagctgcaactgcacttgcccgccaaccggttgcaggcggtggagggaggggaagtggtgcttccagcgtggtacaccttgcacggggaggtgtcttcatcccagccatgggaggtgccctttgtgatgtggttcttcaaacagaaagaaaaggaggatcaggtgttgtcctacatcaatggggtcacaacaagcaaacctggagtatccttggtctactccatgccctcccggaacctgtccctgcggctggagggtctccaggagaaagactctggcccctacagctgctccgtgaatgtgcaagacaaacaaggcaaatctaggggccacagcatcaaaaccttagaactcaatgtactggttcctccagctcctccatcctgccgtctccagggtgtgccccatgtgggggcaaacgtgaccctgagctgccagtctccaaggagtaagcccgctgtccaataccagtgggatcggcagcttccatccttccagactttctttgcaccagcattagatgtcatccgtgggtctttaagcctcaccaacctttcgtcttccatggctggagtctatgtctgcaaggcccacaatgaggtgggcactgcccaatgtaatgtgacgctggaagtgagcacagggcctggagctgca

SEQ ID NO: 3511 - DNA, 1719 bp, Homo Sapiens
aaaacatgtagacggcaattggtggaagaatggcatccacaaccctcatcatatgtggtaaattggacactaacagaaaacatctgcttggacttctacagagattgctggtttttgggtgtaaacactaaaatagatacttcaggcaatcaagctgttccccagatttgccctttgcaaattcaattaggagatatccttgtaatttcttctgaaccatctcttcaatttccagaaataaatttgatgaatgtttctgaaacatctttcgttggctgtgtgcaaaataccacaatggaagatcagttactttttggctgcagactaaaaggaatgcacactgttaattctaagtggctgagtgttgggacacattattttatcacagttatggcaagtggtccatcaccttgtccactgggacttcgactaaatgtgacagtgaaacagcagttctgccaggaatctctgagttcagaattttgctctggtcatggtaaatgtcttagtgaagcttggagcaagacatatagctgccattgccagcctccattttctggaaaatactgccaggaacttgatgcatgttcttttaaaccatgtaaaaataatggcagttgcattaataaaagagaaaattgggatgagcaagcatatgaatgtgtctgtcacccaccatttacaggaaagaattgctcagaaataattggccagtgtcaaccacatgtctgtttccatggaaactgcagcaatattacttcaaatagtttcatttgtgaatgtgatgagcaattttcaggtccattctgtgaggtgtcagcaaaaccttgtgtttctctgcttttttggaaaagaggaatttgcccaaatagcagttctgcttatacttatgaatgcccaaaaggatcttccagccaaaatggtgaaactgatgtcagtgagttttcattagtaccatgtcagaatggtactgactgcatcaaaatatcaaatgatgttatgtgcatctgttcaccaatatttacagatttgctttgtaagagcattcaaacatcatgtgagtcatttcctttgaggaataacgctacatgtaagaaatgtgagaaagattatccttgcagctgtatatcaggatttactgaaaaaaactgtgagaaagcaattgaccactgtaaactgctcagcatcaactgtctgaatgaagaatggtgtttcaatataattggaagattcaaatatgtatgcattccagggtgcacaaaaaatccatgttggtttttgaagaatgtttacctaattcatcaacacctctgctactgtggagtcaccttccatggtatttgccaagataaaggtcctgctcaatttgaatatgtgtggcaattgggatttgcaggatctgaaggcgaaaagtgccaaggggttattgatgcctatttctttctggctgcaaactgcactgaagatgcaacctatgtgaacgatcctgaagataataattcttcatgttggttcccacatgaaggcacaaaagagatttgtgcaaatggatgcagttgtttgagtgaagaagacagtcaggaatatcggtatctatgttttctcagatgggctggcaacatgtatctggaaaatacaactgatgatcaagaaaatgagtgtcaacatgaagctgtttgtaaagatgaaattaatagacccaggtatttatgtatcatt

SEQ ID NO: 3512 - DNA, 1464 bp, Homo Sapiens
atggggcgcccactgcacctcgtcctgctcagtgcctccctggctggcctcctgctgctcggggaaagtctgttcatccgcagggagcaggccaacaacatcctggcgagggtcacgagggccaattcctttcttgaagagatgaagaaaggacacctcgaaagagagtgcatggaagagacctgctcatacgaagaggcccgcgaggtctttgaggacagcgacaagacgaatgaattctggaataaatacaaagatggcgaccagtgtgagaccagtccttgccagaaccagggcaaatgtaaagacggcctcggggaatacacctgcacctgtttagaaggattcgaaggcaaaaactgtgaattattcacacggaagctctgcagcctggacaacggggactgtgaccagttctgccacgaggaacagaactctgtggtgtgctcctgcgcccgcgggtacaccctggctgacaacggcaaggcctgcattcccacagggccctacccctgtgggaaacagaccctggaacgcaggaagaggtcagtggcccaggccaccagcagcagcggggaggcccctgacagcatcacatggaagccatatgatgcagccgacctggaccccaccgagaaccccttcgacctgcttgacttcaaccagacgcagcctgagaggggcgacaacaacctcaccaggatcgtgggaggccaggaatgcaaggacggggagtgtccctggcaggccctgctcatcaatgaggaaaacgagggtttctgtggtggaactattctgagcgagttctacatcctaacggcagcccactgtctctaccaagccaagagattcaaggtgagggtaggggaccggaacacggagcaggaggagggcggtgaggcggtgcacgaggtggaggtggtcatcaagcacaaccggttcacaaaggagacctatgacttcgacatcgccgtgctccggctcaagacccccatcaccttccgcatgaacgtggcgcctgcctgcctccccgagcgtgactgggccgagtccacgctgatgacgcagaagacggggattgtgagcggcttcgggcgcacccacgagaagggccggcagtccaccaggctcaagatgctggaggtgccctacgtggaccgcaacagctgcaagctgtccagcagcttcatcatcacccagaacatgttctgtgccggctacgacaccaagcaggaggatgcctgccagggggacagcgggggcccgcacgtcacccgcttcaaggacacctacttcgtgacaggcatcgtcagctggggagagggctgtgcccgtaaggggaagtacgggatctacaccaaggtcaccgccttcctcaagtggatcgacaggtccatgaaaaccaggggcttgcccaaggccaagagccatgccccggaggtcataacgtcctctccattaaag

SEQ ID NO: 3513 - DNA, 633 bp, Homo Sapiens
agtgttacagtgcactcttctgaacctgaagtcagaattcctgagaataatcctgtgaagttgtcctgtgcctactcgggcttttcttctccccgtgtggagtggaagtttgaccaaggagacaccaccagactcgtttgctataataacaagatcacagcttcctatgaggaccgggtgaccttcttgccaactggtatcaccttcaagtccgtgacacgggaagacactgggacatacacttgtatggtctctgaggaaggcggcaacagctatggggaggtcaaggtcaagctcatcgtgcttgtgcctccatccaagcctacagttaacatcccctcctctgccaccattgggaaccgggcagtgctgacatgctcagaacaagatggttccccaccttctgaatacacctggttcaaagatgggatagtgatgcctacgaatcccaaaagcacccgtgccttcagcaactcttcctatgtcctgaatcccacaacaggagagctggtctttgatcccctgtcagcctctgatactggagaatacagctgtgaggcacggaatgggtatgggacacccatgacttcaaatgctgtgcgcatggaagctgtggagcggaatgtgggggtc

SEQ ID NO: 3514 - DNA, 729 bp, Homo Sapiens
gtcgttggcgggctggtggcgctacgcggggcgcacccctacatcgccgcgctgtactggggccacagtttctgcgccggcagcctcatcgccccctgctgggtgctgacggccgctcactgcctgcaggaccggcccgcacccgaggatctgacggtggtgctcggccaggaacgccgtaaccacagctgtgagccgtgccagacgttggccgtgcgctcctaccgcttgcacgaggccttctcgcccgtcagctaccagcacgacctggctctgttgcgccttcaggaggatgcggacggcagctgcgcgctcctgtcgccttacgttcagccggtgtgcctgccaagcggcgccgcgcgaccctccgagaccacgctctgccaggtggccggctggggccaccagttcgagggggcggaggaatatgccagcttcctgcaggaggcgcaggtaccgttcctctccctggagcgctgctcagccccggacgtgcacggatcctccatcctccccggcatgctctgcgcagggttcctcgagggcggcaccgatgcgtgccagggtgattccggaggcccgctggtgtgtgaggaccaagctgcagagcgccggctcaccctgcaaggcatcatcagctggggatcgggctgtggtgaccgcaacaagccaggcgtctacaccgatgtggcctactacctggcctggatccgggagcacaccgtttcc

SEQ ID NO: 3515 - DNA, 2082 bp, Homo Sapiens
ggcgtcaacctgcaagagtttcttaatgtcacgagcgttcacctgttcaaggagagatgggacactaacaaggtggaccaccacactgacaagtatgaaaacaacaagctgattgtccgcagagggcagtctttctatgtgcagattgacttcagtcgtccatatgaccccagaagggatctcttcagggtggaatacgtcattggtcgctacccacaggagaacaagggaacctacatcccagtgcctatagtctcagagttacaaagtggaaagtggggggccaagattgtcatgagagaggacaggtctgtgcggctgtccatccagtcttcccccaaatgtattgtggggaaattccgcatgtatgttgctgtctggactccctatggcgtacttcgaaccagtcgaaacccagaaacagacacgtacattctcttcaatccttggtgtgaagatgatgctgtgtatctggacaatgagaaagaaagagaagagtatgtcctgaatgacatcggggtaattttttatggagaggtcaatgacatcaagaccagaagctggagctatggtcagtttgaagatggcatcctggacacttgcctgtatgtgatggacagagcacaaatggacctctctggaagagggaatcccatcaaagtcagccgtgtggggtctgcaatggtgaatgccaaagatgacgaaggtgtcctcgttggatcctgggacaatatctatgcctatggcgtccccccatcggcctggactggaagcgttgacattctattggaataccggagctctgagaatccagtccggtatggccaatgctgggtttttgctggtgtctttaacacatttttacgatgccttggaataccagcaagaattgttaccaattatttctctgcccatgataatgatgccaatttgcaaatggacatcttcctggaagaagatgggaacgtgaattccaaactcaccaaggattcagtgtggaactaccactgctggaatgaagcatggatgacaaggcctgaccttcctgttggatttggaggctggcaagctgtggacagcaccccccaggaaaatagcgatggcatgtatcggtgtggccccgcctcggttcaagccatcaagcacggccatgtctgcttccaatttgatgcaccttttgtttttgcagaggtcaacagcgacctcatttacattacagctaagaaagatggcactcatgtggtggaaaatgtggatgccacccacattgggaaattaattgtgaccaaacaaattggaggagatggcatgatggatattactgatacttacaaattccaagaaggtcaagaagaagagagattggccctagaaactgccctgatgtacggagctaaaaagcccctcaacacagaaggtgtcatgaaatcaaggtccaacgttgacatggactttgaagtggaaaatgctgtgctgggaaaagacttcaagctctccatcaccttccggaacaacagccacaaccgttacaccatcacagcttatctctcagccaacatcaccttctacaccggggtcccgaaggcagaattcaagaaggagacgttcgacgtgacgctggagcccttgtccttcaagaaagaggcggtgctgatccaagccggcgagtacatgggtcagctgctggaacaagcgtccctgcacttctttgtcacagctcgcatcaatgagaccagggatgttctggccaagcaaaagtccaccgtgctaaccatccctgagatcatcatcaaggtccgtggcactcaggtagttggttctgacatgactgtgatagttgagtttaccaatcctttaaaagaaaccctgcgaaatgtctgggtacacctggatggtcctggagtaacaagaccaatgaagaagatgttccgtgaaatccggcccaactccaccgtgcagtgggaagaagtgtgccggccctgggtctctgggcatcggaagctgatagccagcatgagcagtgactccctgagacatgtgtatggcgagctggacgtgcagattcaaagacgaccttccatg

SEQ ID NO: 3516 - DNA, 657 bp, Homo Sapiens
tcaggcactacaaatactgtggcagcatataatttaacttggaaatcaactaatttcaagacaattttggagtgggaacccaaacccgtcaatcaagtctacactgttcaaataagcactaagtcaggagattggaaaagcaaatgcttttacacaacagacacagagtgtgacctcaccgacgagattgtgaaggatgtgaagcagacgtacttggcacgggtcttctcctacccggcagggaatgtggagagcaccggttctgctggggagcctctgtatgagaactccccagagttcacaccttacctggagacaaacctcggacagccaacaattcagagttttgaacaggtgggaacaaaagtgaatgtgaccgtagaagatgaacggactttagtcagaaggaacaacactttcctaagcctccgggatgtttttggcaaggacttaatttatacactttattattggaaatcttcaagttcaggaaagaaaacagccaaaacaaacactaatgagtttttgattgatgtggataaaggagaaaactactgtttcagtgttcaagcagtgattccctcccgaacagttaaccggaagagtacagacagcccggtagagtgtatgggccaggagaaaggggaattcagagaa

SEQ ID NO: 3517 - DNA, 1218 bp, Homo Sapiens
gccaacgcgttcctggaggagctgcggccgggctccctggagagggagtgcaaggaggagcagtgctccttcgaggaggcccgggagatcttcaaggacgcggagaggacgaagctgttctggatttcttacagtgatggggaccagtgtgcctcaagtccatgccagaatgggggctcctgcaaggaccagctccagtcctatatctgcttctgcctccctgccttcgagggccggaactgtgagacgcacaaggatgaccagctgatctgtgtgaacgagaacggcggctgtgagcagtactgcagtgaccacacgggcaccaagcgctcctgtcggtgccacgaggggtactctctgctggcagacggggtgtcctgcacacccacagttgaatatccatgtggaaaaatacctattctagaaaaaagaaatgccagcaaaccccaaggccgaattgtggggggcaaggtgtgccccaaaggggagtgtccatggcaggtcctgttgttggtgaatggagctcagttgtgtggggggaccctgatcaacaccatctgggtggtctccgcggcccactgtttcgacaaaatcaagaactggaggaacctgatcgcggtgctgggcgagcacgacctcagcgagcacgacggggatgagcagagccggcgggtggcgcaggtcatcatccccagcacgtacgtcccgggcaccaccaaccacgacatcgcgctgctccgcctgcaccagcccgtggtcctcactgaccatgtggtgcccctctgcctgcccgaacggacgttctctgagaggacgctggccttcgtgcgcttctcattggtcagcggctggggccagctgctggaccgtggcgccacggccctggagctcatggtcctcaacgtgccccggctgatgacccaggactgcctgcagcagtcacggaaggtgggagactccccaaatatcacggagtacatgttctgtgccggctactcggatggcagcaaggactcctgcaagggggacagtggaggcccacatgccacccactaccggggcacgtggtacctgacgggcatcgtcagctggggccagggctgcgcaaccgtgggccactttggggtgtacaccagggtctcccagtacatcgagtggctgcaaaagctcatgcgctcagagccacgcccaggagtcctcctgcgagccccatttccc

SEQ ID NO: 3518 - DNA, 1245 bp, Homo Sapiens
tataattcaggtaaattggaagagtttgttcaagggaaccttgagagagaatgtatggaagaaaagtgtagttttgaagaagcacgagaagtttttgaaaacactgaaagaacaactgaattttggaagcagtatgttgatggagatcagtgtgagtccaatccatgtttaaatggcggcagttgcaaggatgacattaattcctatgaatgttggtgtccctttggatttgaaggaaagaactgtgaattagatgtaacatgtaacattaagaatggcagatgcgagcagttttgtaaaaatagtgctgataacaaggtggtttgctcctgtactgagggatatcgacttgcagaaaaccagaagtcctgtgaaccagcagtgccatttccatgtggaagagtttctgtttcacaaacttctaagctcacccgtgctgagactgtttttcctgatgtggactatgtaaattctactgaagctgaaaccattttggataacatcactcaaagcacccaatcatttaatgacttcactcgggttgttggtggagaagatgccaaaccaggtcaattcccttggcaggttgttttgaatggtaaagttgatgcattctgtggaggctctatcgttaatgaaaaatggattgtaactgctgcccactgtgttgaaactggtgttaaaattacagttgtcgcaggtgaacataatattgaggagacagaacatacagagcaaaagcgaaatgtgattcgaattattcctcaccacaactacaatgcagctattaataagtacaaccatgacattgcccttctggaactggacgaacccttagtgctaaacagctacgttacacctatttgcattgctgacaaggaatacacgaacatcttcctcaaatttggatctggctatgtaagtggctggggaagagtcttccacaaagggagatcagctttagttcttcagtaccttagagttccacttgttgaccgagccacatgtcttcgatctacaaagttcaccatctataacaacatgttctgtgctggcttccatgaaggaggtagagattcatgtcaaggagatagtgggggaccccatgttactgaagtggaagggaccagtttcttaactggaattattagctggggtgaagagtgtgcaatgaaaggcaaatatggaatatataccaaggtatcccggtatgtcaactggattaaggaaaaaacaaagctcact

SEQ ID NO: 3519 - DNA, 978 bp, Homo Sapiens
agtcctgaaccgggggcaccgtctcgtagtagggcaaggagagagccgccacctggaaatgaattacctagaggtccaggtgagagtagggcaggccctgcggcaagaccccctgagccgaccgcagagagagctcactcagtcgatcctagagacgcctggatgctattcgttaggcagtctgataaaggtgtcaatggtaagaagcgttctcgtggaaaggcgaagaagttaaaatttgggctgcccggacctcctgggccgcctggtcctcagggccctcccggaccaataatcccacccgaggccttattaaaagagtttcagctgcttctaaaaggtgccgtcaggcaacgtgaaagagctgaacccgaaccttgtacttgcggccccgcaggcccggtggcagcttcattggcgccggtatcagccacagcgggcgaagacgatgacgatgtagtaggggatgtattggcgctgttagccgctccattagcaccgggtcctagggctcctcgtgttgaagcagcgtttttgtgccgtctgaggagggacgcccttgtggaaagacgtgcgttacatgagttaggcgtttattatcttcccgacgctgaaggagctttcaggaggggcccaggtttaaatttaacttccggtcagtacagagcgccagtagcagggttctatgctctggccgctactcttcatgtggcactaggagagccacctcgtaggggcccgccgagaccaagagatcatcttagacttcttatctgcatccaatctagatgtcagagaaacgcgtccctggaagcgatcatgggtcttgagtcttccagcgaattgttcactatcagtgtaaatggggttctttatcttcagatgggacagtggacaagtgtgttcttagataacgcttcaggatgtagtttaaccgttcgttcaggatcacacttcagcgcagtattgctaggagtt

SEQ ID NO: 3520 - DNA, 846 bp, Homo Sapiens
aagacgctgcgggagcccggcgccggagcccaagaggtgacgttaaaggtgcacatcagcgacgccagcacccaccagcccgtagcagatgcgctcatcgagatcttcaccaaccaggcctccatagcctctggcacctcggggactgatggcgtcgcctttatcaagttccagtataagctgggcagtcagttgattgtcaccgcctcgaagcatgcctacgtgccaaactctgccccatggaagccaatccggttacctgtattttcctctctgagccttggcctgcttccagaacgctctgccactctaatggtatatgaagatgtcgtccaaatagtatcaggattccaaggtgcccggccacagcctcgcgttcatttccagagaagggctctgaggttgcctgagaacaccagctacagtgacctgaccgcgtttctcacggccgccagctccccttcggaggtggacagttttccttatttgcgaggattagacggaaatggaacaggaaacagcaccaggcatgacctgaccccagtcacagccgtcagcgtccacttgctgagcagtaatggaacgccggtgctggtggatggtcccatctatgtcactgtgcccctggccacgcagagcagcctgaggcacaatgcctatgtcgcggcgtggcggtttgaccagaagctgggaacgtggctgaagagcggtctgggtcttgtgcaccaggaaggcagccagctgacgtggacatacattgccccccagttggggtactgggtggccgccatgtcccctcccatcccaggtcccgttgtaacacaggacattaccacgtatcacacg

SEQ ID NO: 3521 - DNA, 1077 bp, Homo Sapiens
tttgaaattgtagagaaggaaaatatatttcaaaggacgccctgccctgcgtttcttatgtttgagaacgccgcctatctggccgacatgagctttgaattaccatgtcactgtaagccagaagaagttcccgctgtcgtgtggttctaccagaaacatctaggcagttcccacactaaggtgctaaccgacttcgacggtagggtactaaccgaggccgcccaagtgagggtgggatcagatatgttgacgagattcagcatccgtatgttcagcttgttagttttcagggctcaatcagaagattccggtctttacttctgcggaacgagaaagggagactatttttatgcctacgacgtggatatccaaaacagcgaaggaatggtcgctacattccaggataagggacaagaacctttcgcggacgagtattatggacatttgcatgtattcaccactttttgggagtggaccccgtgtgataggtgtggcgtgcgtggagagcaatggagaataggtctgtgctacctgcaatctcctgatttatcaccgagataccttaaggctgttccagacgtcgtgtcctgtggatcaagagccgttccgcgtaaattaaggaccaaagcaagggaccacacacctgaagttttagtcagatcttgtctggtaccatgcgagaaaactaaaaccattagggaaggcgtcttggcaattataaactatgtctctaaggttggctcacgtccctgggttccacaggtgcccattcaattccatcagcaaagattggggcatggattaatcatctcatgcccaggggccagacccgagcacgcggtggcatgggacaaggatcgtcagcatctgtatcgtacccagtacttaaagggagttaatcgttccatgagagtcttcattgatcatgggaaccaactacacataagatttacccaattagatgaccgtgggatctattattgttggaggcaaggagtactagttgccgggtttagattaggagtaacttcccacgggcattacccagcgagcttttcagacccagagaccaggtca

SEQ ID NO: 3522 - DNA, 954 bp, Homo Sapiens
ttctacttttccatcagctgccccagtggtaagcagtgccaacaggccctactctcaggcaatgatattctcctgtattgcaactcctcgggggcgcactggtactatttattcacacaaggcaagaagggcaggctcaccagcctcaccaatatttccaatatggaaataatgcccgagggcagccttctcattaaagatccattgccctcccagacgggcctctaccactgctggaacaagaatggccgccaagtggtgcagtatgaaattgattttcaggatgtcaccaccctgcatataacacacaaggacctgggtcagaggcccctgcagaacgagaccctgcatttgggcagcaaacagctcatttttacctggtgggagccctggcaggactgcaaccgctgtgaggagccgggcgagcgtaaacgcctggggtaccgctacattgaggagcctctggaggaagccatgccctgctggctctatctgggagaggtgctggtgtggtctagccgcttgcggcctgagctgcaggtggaagcctgccacgtccagtgcaccaataacacacagttaagggtggattacgtcatttttgacaacttcaggctcgatgagaagacagaatttgtgtggctcgactgtcccttaggatccatgtacaggcccgtcaactggcgtgccaacgacacccccctgacgtgggagagccagctctccggccaggacttcaccacctttctggacccctccaccggcggcaggcagctgcaggttttccagccggccgtctacaagtgcttcgtgcagcaggagctcgtggcccagttcaaacccgccgccagtctggagacgctggaggctcagtggagagagaacgatgcccagtggcgggaggcaaggaaggccctgcggggcagggcggactccgtgctcaaggggctgaag

SEQ ID NO: 3523 - DNA, 1476 bp, Homo Sapiens
gacttcagctccgacccctcctccaacctctcgtcccactcgctggagaaactgccgcccgcggccgagccggccgagcgcgccttgcgggggcgggatcccggcgccctaagaccccacgaccccgcgcaccggccgctgctgcgagaccccggcccgcgtcggtccgagtcgccccccggccccggcggagacgcctccctcctggccaggctgttcgagcacccgctttaccgggtggcggttccgccgctcacggaggaggacgtcctgttcaatgtgaacagcgacaccaggctcagccccaaagcggcggagaacccggactggccgcatgcgggtgctgaaggtgcagaattcctctcccccggggaggcggccgtggactcctatcccaactggctcaagttccacattggtatcaaccggtacgagctgtactccagacacaacccggccatcgaggccctgctgcacgacctcagctcccagaggatcaccagcgtggccatgaagtcggggggcacgcagctgaagctcatcatgaccttccagaattacgggcaagcgctgttcaaacccatgaaacaaacgagggagcaggagacaccccctgactttttttatttctctgactacgagaggcacaatgcggagattgctgccttccacctggacaggatcctggacttccgccgggtccctcccgtggccggcaggatggtcaacatgaccaaggagatccgggacgtcacacgggacaagaagctctggaggaccttcttcatctctccagccaacaacatctgcttctacggcgagtgttcctactactgctccacggagcacgccctgtgcgggaagccagaccagatcgagggctcgctggcggccttcctgcccgacctgtccctggccaagaggaagacctggcggaacccttggcggcgttcctaccacaagcgcaagaaggccgagtgggaggtggaccctgactactgcgaggaggtgaagcagacaccgccctacgacagcagccaccgcatcctggacgtcatggacatgacgatcttcgacttcctcatgggaaacatggaccgtcaccactacgagacttttgagaagtttgggaatgaaacgttcatcatccacttagacaatggaagagggtttgggaagtattcgcacgacgagctctccatcctggtgccgctacagcagtgctgcaggatccggaagtccacctacctgcgtctgcagctcctggccaaggaggagtacaagctgagcctgctgatggccgagtctctgcggggggaccaggtggcacccgtgctgtaccagccgcacctggaggccctggaccggcggctccgcgtcgtgctaaaggccgtccgggactgcgtggagaggaacgggctccacagcgtggtggatgacgacctggacactgagcacagagccgcctcggcgagg

SEQ ID NO: 3524 - DNA, 828 bp, Homo Sapiens
ggtactgctacaaggttcagtggtcagagctatgtgcggtacagggccccagcggctcggaactggcacatccatttctatctgaaaacactccagccacaggccattcttctattcaccaatgaaacagcgtccgtctccctgaagctggccagtggagtgccccagctggaataccactgtctgggtggtttctatggaaacctttcctcccagcgccatgtgaatgaccacgagtggcactccatcctggtggaggagatggacgcttccattcgcctgatggttgacagcatgggcaacacctcccttgtggtcccagagaactgccgtggtctgaggcccgaaaggcacctcttgctgggcggcctcattctgttgcattcttcctcgaatgtctcccagggctttgaaggctgcctggatgctgtcgtggtcaacgaagaggctctagatctgctggcccctggcaagacggtggcaggcttgctggagacacaagccctcacccagtgctgcctccacagtgactactgcagccagaacacatgcctcaatggtgggaagtgctcatggacccacggggcaggctatgtctgcaaatgtcccccacagttctctgggaagcactgtgaacaaggaagggagaactgtacttttgcaccctgcctggaaggtggaacttgcatcctctcccccaaaggagcttcctgtaactgccctcatccttacacaggagacaggtgtgaaatggaggcgaggggttgttcagaaggacactgcctagtcactcccgagatccaaaggggggactgggggcagcaggag

SEQ ID NO: 3525 - DNA, 1962 bp, Homo Sapiens
gatgtcctcctggaggcctgctgtgcggacggacaccggatggccactcatcagaaggactgctcgctgccatatgctacggaatccaaagaatgcaggatggtgcaggagcagtgctgccacagccagctggaggagctgcactgtgccacgggcatcagcctggccaacgagcaggaccgctgtgccacgccccacggtgacaacgccagcctggaggccacatttgtgaagaggtgctgccattgctgtctgctggggagggcggcccaggcccagggccagagctgcgagtacagcctcatggttggctaccagtgtggacaggtcttccgggcatgctgtgtcaagagccaggagaccggagatttggatgtcgggggcctccaagaaacggataagatcattgaggttgaggaggaacaagaggacccatatctgaatgaccgctgccgaggaggcgggccctgcaagcagcagtgccgagacacgggtgacgaggtggtctgctcctgcttcgtgggctaccagctgctgtctgatggtgtctcctgtgaagatgtcaatgaatgcatcacgggcagccacagctgccggcttggagaatcctgcatcaacacagtgggctctttccgctgccagcgggacagcagctgcgggactggctatgagctcacagaggacaatagctgcaaagatattgacgagtgtgagagtggtattcataactgcctccccgattttatctgtcagaatactctgggatccttccgctgccgacccaagctacagtgcaagagtggctttatacaagatgctctaggcaactgtattgatatcaatgagtgtttgagtatcagtgccccgtgccctatcgggcatacatgcatcaacacagagggctcctacacgtgccagaagaacgtgcccaactgtggccgtggctaccatctcaacgaggagggaacgcgctgtgttgatgtggacgagtgcgcgccacctgctgagccctgtgggaagggacatcgctgcgtgaactctcccggcagtttccgctgcgaatgcaagacgggttactattttgacggcatcagcaggatgtgtgtcgatgtcaacgagtgccagcgctaccccgggcgcctgtgtggccacaagtgcgagaacacgctgggctcctacctctgcagctgttccgtgggcttccggctctctgtggatggcaggtcatgtgaagacatcaatgagtgcagcagcagcccctgtagccaggagtgtgccaacgtctacggctcctaccagtgttactgccggcgaggctaccagctcagcgatgtggatggagtcacctgtgaagacatcgacgagtgcgccctgcccaccgggggccacatctgctcctaccgctgcatcaacatccctggaagcttccagtgcagctgcccctcgtctggctacaggctggcccccaatggcagcaactgccaagacattgatgagtgtgtgactggcatccacaactgctccatcaacgagacctgcttcaacatccagggcggcttccgctgcctggccttcgagtgccctgagaactaccgccgctccgcagccacccgctgtgagcgcttgccttgccatgagaatcgggagtgctccaagctgcctctgagaataacctactaccacctctctttccccaccaacatccaagcgcccgcggtggttttccgcatgggcccctccagtgctgtccccggggacagcatgcagctggccatcaccggcggcaatgaggagggctttttcaccacccggaaggtgagcccccacagtggggtggtggccctcaccaagcctgtccccgagcccagggacttgctcctgaccgtcaagatggatctctctcgccacggcaccgtcagctcctttgtggccaagcttttcatctttgtgtctgcagagctc

SEQ ID NO: 3526 - DNA, 3471 bp, Homo Sapiens
gcccctcggcaggactgcacgggcgtggagtgcccgccgctggagaactgcattgaggaggcgctggagccgggtgcctgctgtgccacgtgtgtgcagcagggctgcgcctgcgagggctaccagtactatgactgcctacagggtggcttcgtgcgcggccgcgtgcccgccggtcagtcctattttgtggacttcgggagcactgagtgctcctgcccaccaggcggcggcaagatcagctgccagttcatgctgtgcccggagctgccgcccaactgcatcgaggctgtagtggtggctgacagctgcccacagtgcggccaggtgggctgcgtccacgcgggccacaagtacgccgctggccacactgttcacctgccgccctgccgggcctgccactgccctgacgccggtggagagctcatctgctaccagctccccggttgccacgggaacttctcagatgccgaggagggtgaccccgagcgacactacgaagacccctacagctatgaccaggaggtggccgaggtggaagcagcaacagccctggggggtgaggtccaggcgggtgcagtccaggcaggcgcagggggccccccagctgctctgggaggtgggagtcagccactgtccaccatccaggcacccccctggccagctgtcctccccaggcccacagcggctgctgccctgggtcccccagccccagtgcaggccaaagctaggagagtgaccgaggacagtgaggaggaagaagaggaggaggaggagagagaggaaatggctgtcactgagcagctggcagcaggtggccacagggggctggatgggctgcccactacagccccagctggacccagtcttcctatccaggaggagagggcagaagctggggcaagggcagaagctggggcaaggcctgaagagaacctcatcctggatgcccaagccacgtcccgcagcactgggccggagggcgtgacgcatgcaccgagcctgggcaaggctgctctcgtcccaactcaggccgtgcctggctctcccagggacccagtcaagcccagcccccacaacatcctgtccacatcactgcctgatgcagcctggatcccacccacccgagaagtgcccaggaagccgcaagttctgccccattcccacgtggaggaggacacagaccccaactctgtccattctatccccagaagtagccctgaaggctccaccaaggacctgatcgagacttgctgcgcagccggacagcagtgggccattgacaatgacgagtgcctggagatccctgagagtggcactgaggacaacgtctgcaggacagcccagaggcactgctgtgtctcctacttgcaggagaagagctgcatggccggcgtcctgggagccaaggagggtgagacctgtggggctgaggacaacgacagctgcggcatctccctgtacaagcaatgctgtgactgctgtggcctgggcctccgcgtgcgggccgagggccagtcgtgtgagtccaatcctaacctgggctatccctgcaatcatgtcatgctctcctgctgtgagggtgaagagcctctcatagtacctgaggttcgccgacctccagagcccgcagctgcaccacggagagtttcagaggcagagatggcgggccgagaggccctgtcactgggcacagaggccgagctgccgaacagcctgccgggcgatgaccaggatgagtgccttctcctcccgggagagctgtgccagcacctttgcatcaatactgtgggttcttaccactgtgcctgctttcctggcttctcactgcaggacgatggccgcacttgccgcccagagggtcaccctccacagccggaagccccacaggagcctgcactgaagtcagaattttcccaggtggcctctaacaccatcccgctgccactgccgcagcccaatacctgcaaagacaatggaccctgcaagcaggtgtgcagcactgttgggggctcagccatatgctcctgttttcccggctatgccatcatggcggatggcgtgtcctgtgaagacatcaacgagtgtgtgacggacctgcacacgtgcagccggggcgagcactgtgtgaacacactgggctccttccactgctacaaggcactcacctgtgagccaggctatgccctcaaggatggcgagtgcgaagacgtggatgagtgtgcgatgggcacgcacacctgccagccgggcttcttgtgccagaacaccaagggctccttctactgccaggccaggcagcgctgcatggatggcttcctgcaggatcctgaaggcaactgtgtggacatcaacgagtgcacgtcactgtccgagccatgtcggccaggcttcagctgcatcaacacggtgggctcctacacgtgccagaggaacccgctgatctgcgcgcgcggctaccacgccagcgatgatggggccaagtgtgtggacgtgaatgagtgtgagacaggtgtgcaccgctgcggtgagggccaagtgtgccacaacctccctggctcctaccgctgtgactgcaaagccggctttcagcgggatgccttcggccggggctgcatcgacgtgaatgagtgctgggcctcgccaggccgcctgtgccagcacacgtgtgagaacacactcggctcctaccgctgttcctgcgcctccgggttcctgctagcagcggacggcaagcgctgtgaagacgtgaatgagtgtgaggcccagcgctgcagccaggagtgtgccaacatctatggctcctaccagtgctactgccgccagggctaccagctggctgaggatgggcacacctgcacagacatcgacgagtgtgctcaaggcgccggcatcctctgcaccttccgctgtctcaacgtgccagggagctaccagtgtgcatgccctgagcagggctacaccatgacggccaacgggaggtcctgcaaggacgtggatgagtgtgcactgggtacccacaactgttccgaggctgagacctgccacaacatccagggtagcttccgctgcctgcgcttagagtgtcctcccaactatgtccaagtctccaaaacgaagtgcgagcgcaccacgtgccatgacttcctggagtgccagaactcgccagcgcgcatcacgcactaccagctcaacttccagacgggcctcctggtgcctgcgcatatcttccgcattggccccgcgccagccttcacgggggacaccatcgccctgaacatcatcaagggcaatgaggagggctactttggcacgcgcaggctcaatgcctacacgggtgtggtctacctgcagcgggccgtgctggagccccgggactttgccctggacgtggagatgaagctctggaggcagggctccgtcaccaccttcctggccaagatgcacatcttcttcaccacctttgccctg

SEQ ID NO: 3527 - DNA, 1275 bp, Homo Sapiens
caggcacagtgcacgaatggctttgacctggatcgccagtcaggacagtgtttagatattgatgaatgccgaaccatccccgaggcctgccgaggagacatgatgtgtgttaaccaaaatggcgggtatttatgcattccccggacaaaccctgtgtatcgagggccctactcgaacccctactcgaccccctactcaggtccgtacccagcagctgccccaccactctcagctccaaactatcccacgatctccaggcctcttatatgccgctttggataccagatggatgaaagcaaccaatgtgtggatgtggacgagtgtgcaacagattcccaccagtgcaaccccacccagatctgcatcaatactgaaggcgggtacacctgctcctgcaccgacggatattggcttctggaaggccagtgcttagacattgatgaatgtcgctatggttactgccagcagctctgtgcgaatgttcctggatcctattcttgtacatgcaaccctggttttaccctcaatgaggatggaaggtcttgccaagatgtgaacgagtgtgccaccgagaacccctgcgtgcaaacctgcgtcaacacctacggctctttcatctgccgctgtgacccaggatatgaacttgaggaagatggcgttcattgcagtgatatggacgagtgcagcttctctgagttcctctgccaacatgagtgtgtgaaccagcccggcacatacttctgctcctgccctccaggctacatcctgctggatgacaaccgaagctgccaagacatcaacgaatgtgagcacaggaaccacacgtgcaacctgcagcagacgtgctacaatttacaagggggcttcaaatgcatcgaccccatccgctgtgaggagccttatctgaggatcagtgataaccgctgtatgtgtcctgctgagaaccctggctgcagagaccagccctttaccatcttgtaccgggacatggacgtggtgtcaggacgctccgttcccgctgacatcttccaaatgcaagccacgacccgctaccctggggcctattacattttccagatcaaatctgggaatgagggcagagaattttacatgcggcaaacgggccccatcagtgccaccctggtgatgacacgccccatcaaagggccccgggaaatccagctggacttggaaatgatcactgtcaacactgtcatcaacttcagaggcagctccgtgatccgactgcggatatatgtgtcgcagtacccattc

SEQ ID NO: 3528 - DNA, 1245 bp, Homo Sapiens
cagaactgtctcagcaaacagcagctcctctcggccatccgccagctgcagcagctgctgaagggccaggagacacgcttcgccgagggcatccgccacatgaagagccggctggccgcgctgcagaactctgtgggcagggtgggcccagatgcccttccagtttcctgcccggctctgaacacccccgcagacggcagaaagtttggaagcaagtacttagtggatcacgaagtccattttacctgcaaccctgggttccggctggtcgggcccagcagcgtggtgtgtcttcccaatggcacctggacaggggagcagccccactgtagaggtatcagtgaatgctccagccagccttgtcaaaatggtggtacatgtgtagaaggagtcaaccagtacagatgcatttgtcctccaggaaggactgggaaccgctgtcagcatcaggcccagactgccgcccccgagggcagcgtggccggcgactccgccttcagccgcgcgccgcgctgtgcgcaggtggagcgggctcagcactgcagctgcgaggccggattccacctgagcggcgccgccggcgacagcgtctgccaggacgtgaacgagtgtgagctctacgggcaggaggggcgcccccggctctgcatgcacgcctgcgtgaacaccccgggctcttaccgttgcacctgccccggtggataccgaactctggctgacgggaagagctgtgaggatgtggatgaatgtgtgggcctgcagccggtgtgcccccaggggaccacatgcatcaacaccggtggaagcttccagtgtgtcagccctgagtgccccgagggcagcggcaatgtgagctacgtgaagacgtctccattccagtgtgagcggaacccctgccccatggacagcaggccctgccgccatctgcccaagaccatctccttccattacctctctctgccttccaacctgaagacgcccatcacgctcttccgcatggccacagcctctgcccccggccgagctgggcccaacagcctgcggtttgggatcgtgggtgggaacagccgcggccactttgtgatgcagcgttcagaccggcagactggggatctgatccttgtgcagaacctggaggggcctcagacgctggaggtggacgtcgacatgtcggaatacctggaccgctccttccaggccaaccacgtgtccaaggtcaccatctttgtatccccctatgacttc

SEQ ID NO: 3529 - DNA, 846 bp, Homo Sapiens
ggacagcaggacgtgctccgagggcccaacgtgtgcggctccagattccactcctactgctgccctggatggaagacgctccctggaggaaaccagtgcattgtcccgatttgtagaaatagttgtggagatggattttgttcccgtcctaacatgtgtacttgttccagtgggcaaatatcatcaacctgtggatcaaaatcaattcagcagtgcagtgtgagatgcatgaatggtgggacctgtgcagatgaccactgccagtgccagaaaggatatattggaacttattgtggacaacctgtctgtgaaaatggatgtcagaatggtggacgttgcatcggacccaaccgctgtgcttgtgtttatgggttcactggtccacagtgtgaaagagattacaggacaggcccgtgtttcactcaggtcaacaaccagatgtgccaagggcagctgacaggcattgtctgcacgaagactctgtgctgtgccaccattggacgggcgtggggccatccctgtgagatgtgtccagcccagcctcagccctgccgacggggtttcatccccaacatccgcactggagcttgccaagatgttgatgaatgccaggctatcccagggatatgccaaggaggaaactgtatcaatacagtgggctcttttgaatgcagatgccctgctggtcacaaacagagtgaaactactcagaaatgtgaagacattgatgagtgcagcatcattcctgggatatgtgaaactggtgaatgttccaacaccgtgggaagctatttttgtgtttgtccacgtggatatgtaacctcaacagatggctctcgatgcatc

SEQ ID NO: 3530 - DNA, 360 bp, Homo Sapiens
agcgcacacagagaccatcaagtaaacttagctacccttgacagcgaagctctacttaccttgggactaaatctttcacacttggggagggcggagagaatcttggagttaagacctgcgctggagggattagaaggccgtattagatacgttatagttcgtggtaacgagcaaggatttttcagaatgcatcacttacgtggggtctctagcttgcaactgggcagaagaagaccggggcctggaacgtacagattagaggttgtgtcccacatggccgggccgtggggtgttcagccagaggggcagccagggccatggggacaagcgctaaggctaaaagttcagttgcaattgtta

SEQ ID NO: 3531 - DNA, 1302 bp, Homo Sapiens
ctacctcaaaaaagaccacatccccgttggctttgggaagggtcactaccatcccgtacccatcttagggccatgggtacacttcgtccgtctagccccctttgttggcgtgaagagagttcatttgcagcaccgaacagcctgaaaggttctagattagtatctggcgagcctggtggtgcggtaacgatccaatgccactacgcgccgagtagcgtgaatagacaccaaaggaagtactggtgtaggcttgggccgcccagatggatatgccaaactatagtgagtacaaatcaatatactcatcatagatatagagatagagtcgcattgacagacttcccacaaagaggtttgtttgtcgtcagactatctcaactgtcacctgatgatattggatgctacctttgtggaattggcagtgaaaacaatatgttattcctatcaatgaacctaacaatcagtgccggacccgcatcaactctgcccacggcgactccagctgctggagaacttaccatgaggagctacggtacagcctcccccgtggcgaaccgttggacaccagggacaacccagactctaggccaggggactgcttgggacacagttgcatctaccccaggtaccagcaaaactaccgccagtgcggagggtagaaggaccccaggtgcgacccgtcccgccgcgccagggacgggaagttgggctgagggcagtgttaaggcacctgctccaatacctgaaagccccccaagtaagagtaggagtatgtctaacacaactgaaggtgtatgggaagggacgcgttccagcgttaccaaccgtgcacgtgcgagtaaagatagacgtgaaatgacaacgaccaaagcagaccgtccgagggaagatattgagggtgtgaggatagccctagacgcggctaaaaaggttctgggcacaatagggccgcccgcgctagtatcagaaaccctagcctgggaaattcttccccaagctaccccggtaagcaagcaacaatctcaagggagcattggagaaaccacacccgcagccggtatgtggaccttgggcactccggccgccgatgtctggatcctggggacaccggcggctgatgtctggacctccatggaagctgcctccggggagggaagcgcggcgggtgatctagatgccgcaacgggcgataggggccctcaagcaactctaagtcaaactcccgcggttggtccctgggggccaccagggaaagagtctagcgttaagagaacattccctgaggacgagtcctctagtaga

SEQ ID NO: 3532 - DNA, 618 bp, Homo Sapiens
caggaaggggactttcccatgcctttcatatctgccaaatcgagtcctgtgattcccttggatggatctgtgaaaatccagtgccaggccattcgtgaagcttacctgacccagctgatgatcataaaaaactccacgtaccgagagataggcagaagactgaagttttggaatgagactgatcctgagttcgtcattgaccacatggacgcaaacaaggcagggcgctatcagtgccaatataggatagggcactacagattccggtacagtgacaccctggagctggtagtgacaggcttgtatggcaaacccttcctctctgcagatcggggtctggtgttgatgccaggagagaatatttccctcacgtgcagctcagcacacatcccatttgatagattttcactggccaaggagggagaactttctctgccacagcaccaaagtggggaacacccggccaacttctctttgggtcctgtggacctcaatgtctcagggatctacaggtgctacggttggtacaacaggagcccctacctgtggtccttccccagtaatgccttggagcttgtggtcacagactccatccaccaagattacacgacgcagaac

SEQ ID NO: 3533 - DNA, 540 bp, Homo Sapiens
gtccctcagaaacctaaggtctccttgaaccctccatggaatagaatatttaaaggagagaatgtgactcttacatgtaatgggaacaatttctttgaagtcagttccaccaaatggttccacaatggcagcctttcagaagagacaaattcaagtttgaatattgtgaatgccaaatttgaagacagtggagaatacaaatgtcagcaccaacaagttaatgagagtgaacctgtgtacctggaagtcttcagtgactggctgctccttcaggcctctgctgaggtggtgatggagggccagcccctcttcctcaggtgccatggttggaggaactgggatgtgtacaaggtgatctattataaggatggtgaagctctcaagtactggtatgagaaccacaacatctccattacaaatgccacagttgaagacagtggaacctactactgtacgggcaaagtgtggcagctggactatgagtctgagcccctcaacattactgtaataaaagctccgcgtgagaagtactggctacaa

SEQ ID NO: 3534 - DNA, 516 bp, Homo Sapiens
atggagttgcaggtgtccagcggctttgtgtgcaacacgtgccctgaaaagtggatcaatttccaacggaagtgctactacttcggcaagggcaccaagcagtgggtccacgcccggtatgcctgtgacgacatggaagggcagctggtcagcatccacagcccggaggagcaggacttcctgaccaagcatgccagccacaccggctcctggattggccttcggaacttggacctgaagggggagtttatctgggtggatgggagccacgtggactacagcaactgggctccaggggagcccaccagccggagccagggcgaggactgcgtgatgatgcggggctccggtcgctggaacgacgccttctgcgaccgtaagctgggcgcctgggtgtgcgaccggctggccacatgcacgccgccagccagcgaaggttccgcggagtccatgggacctgattcaagaccagaccctgacggccgcctgcccaccccctctgcccctctccactct

SEQ ID NO: 3535 - DNA, 831 bp, Homo Sapiens
caagtggacaccacaaaggcagtgatcactttgcagcctccatgggtcagcgtgttccaagaggaaaccgtaaccttgcattgtgaggtgctccatctgcctgggagcagctctacacagtggtttctcaatggcacagccactcagacctcgacccccagctacagaatcacctctgccagtgtcaatgacagtggtgaatacaggtgccagagaggtctctcagggcgaagtgaccccatacagctggaaatccacagaggctggctactactgcaggtctccagcagagtcttcacggaaggagaacctctggccttgaggtgtcatgcgtggaaggataagctggtgtacaatgtgctttactatcgaaatggcaaagcctttaagtttttccactggaattctaacctcaccattctgaaaaccaacataagtcacaatggcacctaccattgctcaggcatgggaaagcatcgctacacatcagcaggaatatctgtcactgtgaaagagctatttccagctccagtgctgaatgcatctgtgacatccccactcctggaggggaatctggtcaccctgagctgtgaaacaaagttgctcttgcagaggcctggtttgcagctttacttctccttctacatgggcagcaagaccctgcgaggcaggaacacatcctctgaataccaaatactaactgctagaagagaagactctgggttatactggtgcgaggctgccacagaggatggaaatgtccttaagcgcagccctgagttggagcttcaagtgcttggcctccagttaccaactcctgtctggtttcat

SEQ ID NO: 3536 - DNA, 549 bp, Homo Sapiens
caagtggacaccacaaaggcagtgatcactttgcagcctccatgggtcagcgtgttccaagaggaaaccgtaaccttgcactgtgaggtgctccatctgcctgggagcagctccacacagtggtttctcaatggcacagccactcagacctcgacccccagctacagaatcacctctgccagtgtcaatgacagtggtgaatacaggtgccagagaggtctctcagggcgaagtgaccccatacagctggaaatccacagaggctggctactactgcaggtctccagcagagtcttcatggaaggagaacctctggccttgaggtgtcatgcgtggaaggataagctggtgtacaatgtgctttactatcgaaatggcaaagcctttaagtttttccactggaattctaacctcaccattctgaaaaccaacataagtcacaatggcacctaccattgctcaggcatgggaaagcatcgctacacatcagcaggaatatcacaatacactgtgaaaggcctccagttaccaactcctgtctggtttcat

SEQ ID NO: 3537 - DNA, 549 bp, Homo Sapiens
caagctgctcccccaaaggctgtgctgaaacttgagcccccgtggatcaacgtgctccaggaggactctgtgactctgacatgccagggggctcgcagccctgagagcgactccattcagtggttccacaatgggaatctcattcccacccacacgcagcccagctacaggttcaaggccaacaacaatgacagcggggagtacacgtgccagactggccagaccagcctcagcgaccctgtgcatctgactgtgctttccgaatggctggtgctccagacccctcacctggagttccaggagggagaaaccatcatgctgaggtgccacagctggaaggacaagcctctggtcaaggtcacattcttccagaatggaaaatcccagaaattctcccatttggatcccaccttctccatcccacaagcaaaccacagtcacagtggtgattaccactgcacaggaaacataggctacacgctgttctcatccaagcctgtgaccatcactgtccaagtgcccagcatgggcagctcttcaccaatgggg

SEQ ID NO: 3538 - DNA, 525 bp, Homo Sapiens
acacctgcagctcccccaaaggctgtgctgaaactcgagccccagtggatcaacgtgctccaggaggactctgtgactctgacatgccgggggactcacagccctgagagcgactccattcagtggttccacaatgggaatctcattcccacccacacgcagcccagctacaggttcaaggccaacaacaatgacagcggggagtacacgtgccagactggccagaccagcctcagcgaccctgtgcatctgactgtgctttctgagtggctggtgctccagacccctcacctggagttccaggagggagaaaccatcgtgctgaggtgccacagctggaaggacaagcctctggtcaaggtcacattcttccagaatggaaaatccaagaaattttcccgttcggatcccaacttctccatcccacaagcaaaccacagtcacagtggtgattaccactgcacaggaaacataggctacacgctgtactcatccaagcctgtgaccatcactgtccaagctccc

SEQ ID NO: 3539 - DNA, 525 bp, Homo Sapiens; identical to SEQ ID NO: 3538

SEQ ID NO: 3540 - DNA, 543 bp, Homo Sapiens
acccccgccgctcccccgaaagcggttttaaagctggaaccgcagtggatcaatgtcttacaggaagactccgtgaccttgacttgccgtgggactcactcacccgaaagtgactccattcagtggttccataatggcaacttaatcccgacacatactcagcctagttacagatttaaggcgaacaataatgatagtggagaatatacctgtcaaacaggtcagacatcactatcagatccagtacatcttacagtgttgtctgagtggttggtactacagacaccgcacctagagttccaagaaggtgagacgatagtactgagatgtcattcatggaaagacaaacctctagtgaaggtgactttttttcagaatggcaagagtaagaaattcagcaggagtgaccccaacttctctattccacaagcgaaccacagccatagtggtgattaccactgcacgggaaatataggatacaccctttattcaagtaagcctgttacaattaccgtgcaggcccctagttcttccccgatggga

SEQ ID NO: 3541 - DNA, 576 bp, Homo Sapiens
ggcatgcggactgaagatctcccaaaggctgtggtgttcctggagcctcaatggtacagggtgctcgagaaggacagtgtgactctgaagtgccagggagcctactcccctgaggacaattccacacagtggtttcacaatgagagcctcatctcaagccaggcctcgagctacttcattgacgctgccacagtcgacgacagtggagagtacaggtgccagacaaacctctccaccctcagtgacccggtgcagctagaagtccatatcggctggctgttgctccaggcccctcggtgggtgttcaaggaggaagaccctattcacctgaggtgtcacagctggaagaacactgctctgcataaggtcacatatttacagaatggcaaaggcaggaagtattttcatcataattctgacttctacattccaaaagccacactcaaagacagcggctcctacttctgcagggggcttgttgggagtaaaaatgtgtcttcagagactgtgaacatcaccatcactcaaggtttggcagtgtcaaccatctcatcattctttccacctgggtaccaa

SEQ ID NO: 3542 - DNA, 576 bp, Homo Sapiens
ggcatgcggactgaagatctcccaaaggctgtggtgttcctggagcctcaatggtacagggtgctcgagaaggacagtgtgactctgaagtgccagggagcctactcccctgaggacaattccacacagtggtttcacaatgagagcctcatctcaagccaggcctcgagctacttcattgacgctgccacagttgacgacagtggagagtacaggtgccagacaaacctctccaccctcagtgacccggtgcagctagaagtccatatcggctggctgttgctccaggcccctcggtgggtgttcaaggaggaagaccctattcacctgaggtgtcacagctggaagaacactgctctgcataaggtcacatatttacagaatggcaaaggcaggaagtattttcatcataattctgacttctacattccaaaagccacactcaaagacagcggctcctacttctgcagggggcttgttgggagtaaaaatgtgtcttcagagactgtgaacatcaccatcactcaaggtttgtcagtgtcaaccatctcatcattctttccacctgggtaccaa

SEQ ID NO: 3543 - DNA, 822 bp, Homo Sapiens
gcagaaagccacctctccctcctgtaccaccttaccgcggtgtcctcgcctgccccggggactcctgccttctgggtgtccggctggctgggcccgcagcagtacctgagctacaatagcctgcggggcgaggcggagccctgtggagcttgggtctgggaaaaccaggtgtcctggtattgggagaaagagaccacagatctgaggatcaaggagaagctctttctggaagctttcaaagctttggggggaaaaggtccctacactctgcagggcctgctgggctgtgaactgggccctgacaacacctcggtgcccaccgccaagttcgccctgaacggcgaggagttcatgaatttcgacctcaagcagggcacctggggtggggactggcccgaggccctggctatcagtcagcggtggcagcagcaggacaaggcggccaacaaggagctcaccttcctgctattctcctgcccgcaccgcctgcgggagcacctggagaggggccgcggaaacctggagtggaaggagcccccctccatgcgcctgaaggcccgacccagcagccctggcttttccgtgcttacctgcagcgccttctccttctaccctccggagctgcaacttcggttcctgcggaatgggctggccgctggcaccggccagggtgacttcggccccaacagtgacggatccttccacgcctcgtcgtcactaacagtcaaaagtggcgatgagcaccactactgctgcattgtgcagcacgcggggctggcgcagcccctcagggtggagctggaatctccagccaagtcctcc

SEQ ID NO: 3544 - DNA, 702 bp, Homo Sapiens
aggatcctcccagaagtaaaggtagagggggagctgggcggatcagttaccatcaagtgcccacttcctgaaatgcatgtgaggatatatctgtgccgggagatggctggatctggaacatgtggtaccgtggtatccaccaccaacttcatcaaggcagaatacaagggccgagttactctgaagcaatacccacgcaagaatctgttcctagtggaggtaacacagctgacagaaagtgacagcggagtctatgcctgcggagcgggcatgaacacagaccggggaaagacccagaaagtcaccctgaatgtccacagtgaatacgagccatcatgggaagagcagccaatgcctgagactccaaaatggtttcatctgccctatttgttccagatgcctgcatatgccagttcttccaaattcgtaaccagagttaccacaccagctcaaaggggcaaggtccctccagttcaccactcctcccccaccacccaaatcacccaccgccctcgagtgtccagagcatcttcagtagcaggtgacaagccccgaaccttcctgccatccactacagcctcaaaaatctcagctctggaggggctgctcaagccccagacgcccagctacaaccaccacaccaggctgcacaggcagagagcactggactatggctcacagtctgggagggaaggccaagga

SEQ ID NO: 3545 - DNA, 873 bp, Homo Sapiens
gccgagctgtttttgatagccagcccctcccatcccacagaggggagcccagtgaccctgacgtgtaagatgccctttctacagagttcagatgcccagttccagttctgctttttcagagacacccgggccttgggcccaggctggagcagctcccccaagctccagatcgctgccatgtggaaagaagacacagggtcatactggtgcgaggcacagacaatggcgtccaaagtcttgaggagcaggagatcccagataaatgtgcacagggtccctgtcgctgatgtgagcttggagactcagcccccaggaggacaggtgatggagggagacaggctggtcctcatctgctcagttgctatgggcacaggagacatcaccttcctttggtacaaaggggctgtaggtttaaaccttcagtcaaagacccagcgttcactgacagcagagtatgagattccttcagtgagggagagtgatgctgagcaatattactgtgtagctgaaaatggctatggtcccagccccagtgggctggtgagcatcactgtcagaatcccggtgtctcgcccaatcctcatgctcagggctcccagggcccaggctgcagtggaggatgtgctggagcttcactgtgaggccctgagaggctctcctccgatcctgtactggttttatcacgaggatatcaccctggggagcaggtcggccccctctggaggaggagcctccttcaacctttccctgactgaagaacattctggaaactactcctgtgaggccaacaatggcctgggggcccagcgcagtgaggcggtgacactcaacttcacagtgcctactggggccagaagcaatcatcttacctca

SEQ ID NO: 3546 - DNA, 294 bp, Homo Sapiens
ctgacccttgtggcgccctcttctgtcttcgaaggagacagcatcgttctgaaatgccagggagaacagaactggaaaattcagaagatggcttaccataaggataacaaagagttatctgttttcaaaaaattctcagatttccttatccaaagtgcagttttaagtgacagtggtaactatttctgtagtaccaaaggacaactctttctctgggataaaacttcaaatatagtaaagataaaagtccaaggacctgatggctatagaagagacctcatgacagctggagtt

SEQ ID NO: 3547 - DNA, 1668 bp, Homo Sapiens
ggggtggccccaaaagctgtacttctcctcaatcctccatggtccacagccttcaaaggagaaaaagtggctctcatatgcagcagcatatcacattccctagcccagggagacacatattggtatcacgatgagaagttgttgaaaataaaacatgacaagatccaaattacagagcctggaaattaccaatgtaagacccgaggatcctccctcagtgatgccgtgcatgtggaattttcacctgactggctgatcctgcaggctttacatcctgtctttgaaggagacaatgtcattctgagatgtcaggggaaagacaacaaaaacactcatcaaaaggtttactacaaggatggaaaacagcttcctaatagttataatttagagaagatcacagtgaattcagtctccagggataatagcaaatatcattgtactgcttataggaagttttacatacttgacattgaagtaacttcaaaacccctaaatatccaagttcaagagctgtttctacatcctgtgctgagagccagctcttccacgcccatagaggggagtcccatgaccctgacctgtgagacccagctctctccacagaggccagatgtccagctgcaattctccctcttcagagatagccagaccctcggattgggctggagcaggtcccccagactccagatccctgccatgtggactgaagactcagggtcttactggtgtgaggtggagacagtgactcacagcatcaaaaaaaggagcctgagatctcagatacgtgtacagagagtccctgtgtctaatgtgaatctagagatccggcccaccggagggcagctgattgaaggagaaaatatggtccttatttgctcagtagcccagggttcagggactgtcacattctcctggcacaaagaaggaagagtaagaagcctgggtagaaagacccagcgttccctgttggcagagctgcatgttctcaccgtgaaggagagtgatgcagggagatactactgtgcagctgataacgttcacagccccatcctcagcacgtggattcgagtcaccgtgagaattccggtatctcaccctgtcctcaccttcagggctcccagggcccacactgtggtgggggacctgctggagcttcactgtgagtccctgagaggctctcccccgatcctgtaccgattttatcatgaggatgtcaccctggggaacagctcagccccctctggaggaggagcctccttcaacctctctctgactgcagaacattctggaaactactcctgtgatgcagacaatggcctgggggcccagcacagtcatggagtgagtctcagggtcacagttccggtgtctcgccccgtcctcaccctcagggctcccggggcccaggctgtggtgggggacctgctggagcttcactgtgagtccctgagaggctccttcccgatcctgtactggttttatcacgaggatgacaccttggggaacatctcggcccactctggaggaggggcatccttcaacctctctctgactacagaacattctggaaactactcatgtgaggctgacaatggcctgggggcccagcacagtaaagtggtgacactcaatgttacaggaacttccaggaacagaacaggccttacc

SEQ ID NO: 3548 - DNA, 1104 bp, Homo Sapiens
gcacacaaacctgtgatttccgtccatcctccatggaccacattcttcaaaggagagagagtgactctgacttgcaatggatttcagttctatgcaacagagaaaacaacatggtatcatcggcactactggggagaaaagttgaccctgaccccaggaaacaccctcgaggttcgggaatctggactgtacagatgccaggcccggggctccccacgaagtaaccctgtgcgcttgctcttttcttcagactccttaatcctgcaggcaccatattctgtgtttgaaggtgacacattggttctgagatgccacagaagaaggaaagagaaattgactgctgtgaaatatacttggaatggaaacattctttccatttctaataaaagctgggatcttcttatcccacaagcaagttcaaataacaatggcaattatcgatgcattggatatggagatgagaatgatgtatttagatcaaatttcaaaataattaaaattcaagaactatttccacatccagagctgaaagctacagactctcagcctacagaggggaattctgtaaacctgagctgtgaaacacagcttcctccagagcggtcagacaccccacttcacttcaacttcttcagagatggcgaggtcatcctgtcagactggagcacgtacccggaactccagctcccaaccgtctggagagaaaactcaggatcctattggtgtggtgctgaaacagtgaggggtaacatccacaagcacagtccctcgctacagatccatgtgcagcggatccctgtgtctggggtgctcctggagacccagccctcagggggccaggctgttgaaggggagatgctggtccttgtctgctccgtggctgaaggcacaggggataccacattctcctggcaccgagaggacatgcaggagagtctggggaggaaaactcagcgttccctgagagcagagctggagctccctgccatcagacagagccatgcagggggatactactgtacagcagacaacagctacggccctgtccagagcatggtgctgaatgtcactgtgagagagaccccaggcaacagagatggcctt

SEQ ID NO: 3549 - DNA, 2508 bp, Homo Sapiens
cagtttgcaaggacacccaggcccattattttcctccagcctccatggaccacagtcttccaaggagagagagtgaccctcacttgcaagggatttcgcttctactcaccacagaaaacaaaatggtaccatcggtaccttgggaaagaaatactaagagaaaccccagacaatatccttgaggttcaggaatctggagagtacagatgccaggcccagggctcccctctcagtagccctgtgcacttggatttttcttcagcttcgctgatcctgcaagctccactttctgtgtttgaaggagactctgtggttctgaggtgccgggcaaaggcggaagtaacactgaataatactatttacaagaatgataatgtcctggcattccttaataaaagaactgacttccatattcctcatgcatgtctcaaggacaatggtgcatatcgctgtactggatataaggaaagttgttgccctgtttcttccaatacagtcaaaatccaagtccaagagccatttacacgtccagtgctgagagccagctccttccagcccatcagcgggaacccagtgaccctgacctgtgagacccagctctctctagagaggtcagatgtcccgctccggttccgcttcttcagagatgaccagaccctgggattaggctggagtctctccccgaatttccagattactgccatgtggagtaaagattcagggttctactggtgtaaggcagcaacaatgcctcacagcatcatatctgacagcccgagatcctggatacaggtgcagatccctgcatctcatcctgtcctcactctcagccctgaaaaggctctgaattttgagggaaccaaggtgacacttcactgtgaaacccaggaagattctctgcgcactttgtacaggttttatcatgagggtgtccccctgaggcacaagtcagtccgctgtgaaaggggagcatccatcagcttctcactgactacagagaattcagggaactactactgcacagctgacaatggccttggcgccaagcccagtaaggctgtgagcctctcagtcactgttcccgtgtctcatcctgtcctcaacctcagctctcctgaggacctgatttttgagggagccaaggtgacacttcactgtgaagcccagagaggttcactccccatcctgtaccagtttcatcatgaggatgctgccctggagcgtaggtcggccaactctgcaggaggagtggccatcagcttctctctgactgcagagcattcagggaactactactgcacagctgacaatggctttggcccccagcgcagtaaggcggtgagcctctccatcactgtccctgtgtctcatcctgtcctcaccctcagctctgctgaggccctgacttttgaaggagccactgtgacacttcactgtgaagtccagagaggttccccacaaatcctataccagttttatcatgaggacatgcccctgtggagcagctcaacaccctctgtgggaagagtgtccttcagcttctctctgactgaaggacattcagggaattactactgcacagctgacaatggctttggtccccagcgcagtgaagtggtgagcctttttgtcactgttccagtgtctcgccccatcctcaccctcagggttcccagggcccaggctgtggtgggggacctgctggagcttcactgtgaggccccgagaggctctcccccaatcctgtactggttttatcatgaggatgtcaccctggggagcagctcagccccctctggaggagaagcttctttcaacctctctctgactgcagaacattctggaaactactcatgtgaggccaacaatggcctagtggcccagcacagtgacacaatatcactcagtgttatagttccagtatctcgtcccatcctcaccttcagggctcccagggcccaggctgtggtgggggacctgctggagcttcactgtgaggccctgagaggctcctccccaatcctgtactggttttatcatgaagatgtcaccctgggtaagatctcagccccctctggaggaggggcctccttcaacctctctctgactacagaacattctggaatctactcctgtgaggcagacaatggtctggaggcccagcgcagtgagatggtgacactgaaagttgcagttccggtgtctcgcccggtcctcaccctcagggctcccgggacccatgctgcggtgggggacctgctggagcttcactgtgaggccctgagaggctctcccctgatcctgtaccggttttttcatgaggatgtcaccctaggaaataggtcgtccccctctggaggagcgtccttaaacctctctctgactgcagagcactctggaaactactcctgtgaggccgacaatggcctcggggcccagcgcagtgagacagtgacactttatatcacagggctgaccgcgaacagaagtggcccttttgccacagga

SEQ ID NO: 3550 - DNA, 864 bp, Homo Sapiens
ctgtacctacaagcatggccaaaccctgtgtttgaaggagacgcactgacactacgttgtcaggggtggaagaacactcccctttctcaggttaaattttatagggacggcaaattcctacacttttccaaggagaaccagacattgagtatgggggcagctacagttcagagtaggggtcaatacagttgcagcgggcaggtgatgtacattccgcagacctttacccaaacgtctgaaacagctatggtccaggttcaggaattgtttcctccaccagtattatcagcaatccccagcccggagccaagggaagggtctctggtgacccttcgttgccaaacgaaattgcatccacttcgttcagcgctgagattgctgttctcatttcataaagatggtcatacattgcaggaccgtgggccacaccccgagctatgtatcccgggtgctaaagagggggactccggtttgtattggtgtgaagtagccccagaaggcggacaggtccagaaacaatccccgcagcttgaagttcgtgtacaggctccagtgtcacgtccagtcctgactttgcaccacggccccgcagaccctgcagtaggtgatatggtccaacttttgtgtgaggcccagcgtggcagtccaccaatactgtactccttctatctggatgagaaaatcgtgggtaatcactctgcgccatgcgggggcacgaccagtcttctgtttccagtaaaatctgagcaagatgctgggaattactcttgtgaagctgagaacagtgtctctagggagaggtctgaaccaaaaaagctatcattaaaggggtcccaggtgctttttacgcccgcctcaaactgg

SEQ ID NO: 3551 - DNA, 1227 bp, Homo Sapiens
gcgacgttggaaaaaccgattttgtcacttcacccaccgtggacgaccattttcaagggagaaagagttacgctaaagtgtgatggctaccatcctttgcttctagagttacagcccattagtacgctatggtatctaggccaccttctgttaccctcccacaaaaagagcattgaggtgcagacgcccggagtatatcgttgtcagactaggggagcgccggtatctgatccaatacatctgtccgtaagtaacgattggttaatactacaggttccttacgcaccggtctttgagggtgaacctcttgtattacgttgcaggggttggtatgacaaggtcgtgtataaactgcactattatcacgacggacaagcagttagatatttccactcttccgcaaactataccgttttacaggccagagctagtgatagcggacgttaccaatgctccggcacaatgcgtatccctgtcgagagtgccccaatgttttcagcaaaagtagcagtcactgtacaggagttattccgtgcaccagttttaagggttatgggacccagagaggcgaggggagccgcattagggggtgtagtacttaggtgcgatacacgtctacacccgcagaaaagagatactccactgcaatttgctttttacaagtatagtcgtgcggttaggagattcgactggggggcagagtacactgttccggaacccgaggtggaagaactggaatcatattggtgcgaggctgccacggctactagatcagtccgtaaaaggtctccgtggttgcagctacccggccctggaagtcctttggacccggcatctacaaccgcgccggccccatgggctgccgccctagctcccggaaacaggccactttcctttcgtaagccgccggtgtccagatccgtccccttggttacgtcagttagaaataccacaagtactgggttgcagtttcccgccagcggtgccccgactgcaggtcctcccgcgtgcgcgcctccgaccccgctggaacaatctgcaggagccttaaaaccagacgtggaccttttgctgagagagatgcaacttcttaaggggcttttgtccagagttgtattggagcttaaagaacctcaggcattaagggaattaagggggacccctgagacgcccactagtcatttcgctgtttctcccggaacacctgagacaactccggttgaatca

SEQ ID NO: 3552 - DNA, 996 bp, Homo Sapiens
gccagttttgagacgctgcagtgtgagggacctgtctgcactgaggagagcagctgccacacggaggatgacttgactgatgcaagggaagctggcttccaggtcaaggcctacactttcagtgaacccttccacctgattgtgtcctatgactggctgatcctccaaggtccagccaagccagtttttgaaggggacctgctggttctgcgctgccaggcctggcaagactggccactgactcaggtgaccttctaccgagatggctcagctctgggtccccccgggcctaacagggaattctccatcaccgtggtacaaaaggcagacagcgggcactaccactgcagtggcatcttccagagccctggtcctgggatcccagaaacagcatctgttgtggctatcacagtccaagaactgtttccagcgccaattctcagagctgtaccctcagctgaaccccaagcaggaagccccatgaccctgagttgtcagacaaagttgcccctgcagaggtcagctgcccgcctcctcttctccttctacaaggatggaaggatagtgcaaagcagggggctctcctcagaattccagatccccacagcttcagaagatcactccgggtcatactggtgtgaggcagccactgaggacaaccaagtttggaaacagagcccccagctagagatcagagtgcagggtgcttccagctctgctgcacctcccacattgaatccagctcctcagaaatcagctgctccaggaactgctcctgaggaggcccctgggcctctgcctccgccgccaaccccatcttctgaggatccaggcttttcttctcctctggggatgccagatcctcatctgtatcaccagatgggccttcttctcaaacacatgcaggatgtgagagtcctcctcggtcacctgctcatggagttgagggaattatctggccaccagaagcctgggaccacaaaggctactgctgaa

SEQ ID NO: 3553 - DNA, 420 bp, Homo Sapiens
tttaatctgcctccagggaattacaagaagcccaaactcctctactgtagcaacgggggccacttcctgaggatccttccggatggcacagtggatgggacaagggacaggagcgaccagcacattcagctgcagctcagtgcggaaagcgtgggggaggtgtatataaagagtaccgagactggccagtacttggccatggacaccgacgggcttttatacggctcacagacaccaaatgaggaatgtttgttcctggaaaggctggaggagaaccattacaacacctatatatccaagaagcatgcagagaagaattggtttgttggcctcaagaagaatgggagctgcaaacgcggtcctcggactcactatggccagaaagcaatcttgtttctccccctgccagtctcttctgat

SEQ ID NO: 3554 - DNA, 513 bp, Homo Sapiens
caagcccttggtcaggacatggtgtcaccagaggccaccaactcttcttcctcctccttctcctctccttccagcgcgggaaggcatgtgcggagctacaatcaccttcaaggagatgtccgctggagaaagctattctctttcaccaagtactttctcaagattgagaagaacgggaaggtcagcgggaccaagaaggagaactgcccgtacagcatcctggagataacatcagtagaaatcggagttgttgccgtcaaagccattaacagcaactattacttagccatgaacaagaaggggaaactctatggctcaaaagaatttaacaatgactgtaagctgaaggagaggatagaggaaaatggatacaatacctatgcatcatttaactggcagcataatgggaggcaaatgtatgtggcattgaatggaaaaggagctccaaggagaggacagaaaacacgaaggaaaaacacctctgctcactttcttccaatggtggtacactca

SEQ ID NO: 3555 - DNA, 621 bp, Homo Sapiens
atggcagaggtggggggcgtcttcgcctccttggactgggatctacacggcttctcctcgtctctggggaacgtgcccttagctgactccccaggtttcctgaacgagcgcctgggccaaatcgaggggaagctgcagcgtggctcacccacagacttcgcccacctgaaggggatcctgcggcgccgccagctctactgccgcaccggcttccacctggagatcttccccaacggcacggtgcacgggacccgccacgaccacagccgcttcggaatcctggagtttatcagcctggctgtggggctgatcagcatccggggagtggactctggcctgtacctaggaatgaatgagcgaggagaactctatgggtcgaagaaactcacacgtgaatgtgttttccgggaacagtttgaagaaaactggtacaacacctatgcctcaaccttgtacaaacattcggactcagagagacagtattacgtggccctgaacaaagatggctcaccccgggagggatacaggactaaacgacaccagaaattcactcactttttacccaggcctgtagatccttctaagttgccctccatgtccagagacctctttcactatagg

SEQ ID NO: 3556 - DNA, 582 bp, Homo Sapiens
actcagggggagaatcacccgtctcctaattttaaccagtacgtgagggaccagggcgccatgaccgaccagctgagcaggcggcagatccgcgagtaccaactctacagcaggaccagtggcaagcacgtgcaggtcaccgggcgtcgcatctccgccaccgccgaggacggcaacaagtttgccaagctcatagtggagacggacacgtttggcagccgggttcgcatcaaaggggctgagagtgagaagtacatctgtatgaacaagaggggcaagctcatcgggaagcccagcgggaagagcaaagactgcgtgttcacggagatcgtgctggagaacaactatacggccttccagaacgcccggcacgagggctggttcatggccttcacgcggcaggggcggccccgccaggcttcccgcagccgccagaaccagcgcgaggcccacttcatcaagcgcctctaccaaggccagctgcccttccccaaccacgccgagaagcagaagcagttcgagtttgtgggctccgcccccacccgccggaccaagcgcacacggcggccccagcccctcacg

SEQ ID NO: 3557 - DNA, 540 bp, Homo Sapiens
gaggagaacgtggacttccgcatccacgtggagaaccagacgcgggctcgggacgatgtgagccgtaagcagctgcggctgtaccagctctacagccggaccagtgggaaacacatccaggtcctgggccgcaggatcagtgcccgcggcgaggatggggacaagtatgcccagctcctagtggagacagacaccttcggtagtcaagtccggatcaagggcaaggagacggaattctacctgtgcatgaaccgcaaaggcaagctcgtggggaagcccgatggcaccagcaaggagtgtgtgttcatcgagaaggttctggagaacaactacacggccctgatgtcggctaagtactccggctggtacgtgggcttcaccaagaaggggcggccgcggaagggccccaagacccgggagaaccagcaggacgtgcatttcatgaagcgctaccccaaggggcagccggagcttcagaagcccttcaagtacacgacggtgaccaagaggtcccgtcggatccggcccacacaccctgcc

SEQ ID NO: 3558 - DNA, 576 bp, Homo Sapiens
ctcgccttctcggacgcggggccccacgtgcactacggctggggcgaccccatccgcctgcggcacctgtacacctccggcccccacgggctctccagctgcttcctgcgcatccgtgccgacggcgtcgtggactgcgcgcggggccagagcgcgcacagtttgctggagatcaaggcagtcgctctgcggaccgtggccatcaagggcgtgcacagcgtgcggtacctctgcatgggcgccgacggcaagatgcaggggctgcttcagtactcggaggaagactgtgctttcgaggaggagatccgcccagatggctacaatgtgtaccgatccgagaagcaccgcctcccggtctccctgagcagtgccaaacagcggcagctgtacaagaacagaggctttcttccactctctcatttcctgcccatgctgcccatggtcccagaggagcctgaggacctcaggggccacttggaatctgacatgttctcttcgcccctggagaccgacagcatggacccatttgggcttgtcaccggactggaggccgtgaggagtcccagctttgagaag

SEQ ID NO: 3559 - DNA, 633 bp, Homo Sapiens
atggctcccttagccgaagtcgggggctttctgggcggcctggagggcttgggccagcaggtgggttcgcatttcctgttgcctcctgccggggagcggccgccgctgctgggcgagcgcaggagcgcggcggagcggagcgcccgcggcgggccgggggctgcgcagctggcgcacctgcacggcatcctgcgccgccggcagctctattgccgcaccggcttccacctgcagatcctgcccgacggcagcgtgcagggcacccggcaggaccacagcctcttcggtatcttggaattcatcagtgtggcagtgggactggtcagtattagaggtgtggacagtggtctctatcttggaatgaatgacaaaggagaactctatggatcagagaaacttacttccgaatgcatctttagggagcagtttgaagagaactggtataacacctattcatctaacatatataaacatggagacactggccgcaggtattttgtggcacttaacaaagacggaactccaagagatggcgccaggtccaagaggcatcagaaatttacacatttcttacctagaccagtggatccagaaagagttccagaattgtacaaggacctactgatgtacact

SEQ ID NO: 3560 - DNA, 543 bp, Homo Sapiens
caccccatccctgactccagtcctctcctgcaattcgggggccaagtccggcagcggtacctctacacagatgatgcccagcagacagaagcccacctggagatcagggaggatgggacggtggggggcgctgctgaccagagccccgaaagtctcctgcagctgaaagccttgaagccgggagttattcaaatcttgggagtcaagacatccaggttcctgtgccagcggccagatggggccctgtatggatcgctccactttgaccctgaggcctgcagcttccgggagctgcttcttgaggacggatacaatgtttaccagtccgaagcccacggcctcccgctgcacctgccagggaacaagtccccacaccgggaccctgcaccccgaggaccagctcgcttcctgccactaccaggcctgccccccgcacccccggagccacccggaatcctggccccccagccccccgatgtgggctcctcggaccctctgagcatggtgggaccttcccagggccgaagccccagctacgcttcc

SEQ ID NO: 3561 - DNA, 681 bp, Homo Sapiens
tatcccaatgcctccccactgctcggctccagctggggtggcctgatccacctgtacacagccacagccaggaacagctaccacctgcagatccacaagaatggccatgtggatggcgcaccccatcagaccatctacagtgccctgatgatcagatcagaggatgctggctttgtggtgattacaggtgtgatgagcagaagatacctctgcatggatttcagaggcaacatttttggatcacactatttcgacccggagaactgcaggttccaacaccagacgctggaaaacgggtacgacgtctaccactctcctcagtatcacttcctggtcagtctgggccgggcgaagagagccttcctgccaggcatgaacccacccccgtactcccagttcctgtcccggaggaacgagatccccctaattcacttcaacacccccataccacggcggcacacccggagcgccgaggacgactcggagcgggaccccctgaacgtgctgaagccccgggcccggatgaccccggccccggcctcctgttcacaggagctcccgagcgccgaggacaacagcccgatggccagtgacccattaggggtggtcaggggcggtcgagtgaacacgcacgctgggggaacgggcccggaaggctgccgccccttcgccaagttcatc

SEQ ID NO: 3562 - DNA, 666 bp, Homo Sapiens
gcagcgggccctggggcgcggttgcggcgcgatgcgggcggccgtggcggcgtctacgagcaccttggcggggcgccccggcgccgcaagctctactgcgccacgaagtaccacctccagctgcacccgagcggccgcgtcaacggcagcctggagaacagcgcctacagtattttggagataacggcagtggaggtgggcattgtggccatcaggggtctcttctccgggcggtacctggccatgaacaagaggggacgactctatgcttcggagcactacagcgccgagtgcgagtttgtggagcggatccacgagctgggctataatacgtatgcctcccggctgtaccggacggtgtctagtacgcctggggcccgccggcagcccagcgccgagagactgtggtacgtgtctgtgaacggcaagggccggccccgcaggggcttcaagacccgccgcacacagaagtcctccctgttcctgccccgcgtgctggaccacagggaccacgagatggtgcggcagctacagagtgggctgcccagaccccctggtaagggggtccagccccgacggcggcggcagaagcagagcccggataacctggagccctctcacgttcaggcttcgagactgggctcccagctggaggccagtgcgcac

SEQ ID NO: 3563 - DNA, 744 bp, Homo Sapiens
cacggggagaagcgtctcgcccccaaagggcaacccggacccgctgccactgataggaaccctagaggctccagcagcagacagagcagcagtagcgctatgtcttcctcttctgcctcctcctcccccgcagcttctctgggcagccaaggaagtggcttggagcagagcagtttccagtggagcccctcggggcgccggaccggcagcctctactgcagagtgggcatcggtttccatctgcagatctacccggatggcaaagtcaatggatcccacgaagccaatatgttaagtgttttggaaatatttgctgtgtctcaggggattgtaggaatacgaggagttttcagcaacaaatttttagcgatgtcaaaaaaaggaaaactccatgcaagtgccaagttcacagatgactgcaagttcagggagcgttttcaagaaaatagctataatacctatgcctcagcaatacatagaactgaaaaaacagggcgggagtggtatgtggccctgaataaaagaggaaaagccaaacgagggtgcagcccccgggttaaaccccagcatatctctacccattttctgccaagattcaagcagtcggagcagccagaactttctttcacggttactgttcctgaaaagaaaaagccacctagccctatcaagccaaagattcccctttctgcacctcggaaaaataccaactcagtgaaatacagactcaagtttcgctttgga

SEQ ID NO: 3564 - DNA, 513 bp, Homo Sapiens
tcgcctgcaggcacccgtgccaacaacacgctgctggactcgaggggctggggcaccctgctgtccaggtctcgcgcggggctagctggagagattgccggggtgaactgggaaagtggctatttggtggggatcaagcggcagcggaggctctactgcaacgtgggcatcggctttcacctccaggtgctccccgacggccggatcagcgggacccacgaggagaacccctacagcctgctggaaatttccaccgtggagcgaggcgtggtgagtctctttggagtgagaagtgccctcttcgtcgccatgaacagtaaaggaagattgtacgcaacgcccagcttccaagaagaatgcaagttcagagaaaccctcctgcccaacaattacaatgcctacgagtcagacttgtaccaagggacctacattgccctgagcaaatacggacgggtaaagcggggcagcaaggtgtccccgatcatgactgtcactcatttccttcccaggatc

SEQ ID NO: 3565 - DNA, 489 bp, Homo Sapiens
tgcaatgacatgactccagagcaaatggctacaaatgtgaactgttccagccctgagcgacacacaagaagttatgattacatggaaggaggggatataagagtgagaagactcttctgtcgaacacagtggtacctgaggatcgataaaagaggcaaagtaaaagggacccaagagatgaagaataattacaatatcatggaaatcaggacagtggcagttggaattgtggcaatcaaaggggtggaaagtgaattctatcttgcaatgaacaaggaaggaaaactctatgcaaagaaagaatgcaatgaagattgtaacttcaaagaactaattctggaaaaccattacaacacatatgcatcagctaaatggacacacaacggaggggaaatgtttgttgccttaaatcaaaaggggattcctgtaagaggaaaaaaaacgaagaaagaacaaaaaacagcccactttcttcctatggcaataact

SEQ ID NO: 3566 - DNA, 615 bp, Homo Sapiens
ttaggtgaagttgggaactatttcggtgtgcaggatgcggtaccgtttgggaatgtgcccgtgttgccggtggacagcccggttttgttaagtgaccacctgggtcagtccgaagcaggggggctccccaggggacccgcagtcacggacttggatcatttaaaggggattctcaggcggaggcagctatactgcaggactggatttcacttagaaatcttccccaatggtactatccagggaaccaggaaagaccacagccgatttggcattctggaatttatcagtatagcagtgggcctggtcagcattcgaggcgtggacagtggactctacctcgggatgaatgagaagggggagctgtatggatcagaaaaactaacccaagagtgtgtattcagagaacagttcgaagaaaactggtataatacgtactcgtcaaacctatataagcacgtggacactggaaggcgatactatgttgcattaaataaagatgggaccccgagagaagggactaggactaaacggcaccagaaattcacacattttttacctagaccagtggaccccgacaaagtacctgaactgtataaggatattctaagccaaagt

SEQ ID NO: 3567 - DNA, 633 bp, Homo Sapiens
aaaaaaaaagtgaagaatggacttcacagcaaagtggtctcagaacaaaaggacactctgggcaacacccagattaagcagaaaagcaggcccgggaacaaaggcaagtttgtcaccaaagaccaagccaactgcagatgggctgctactgagcaggaggagggcatctctctcaaggttgagtgcactcaattggaccatgaattttcctgtgtctttgctggcaatccaacctcatgcctaaagctcaaggatgagagagtctattggaaacaagttgcccggaatctgcgctcacagaaagacatctgtagatattccaagacagctgtgaaaaccagagtgtgcagaaaggattttccagaatccagtcttaagctagtcagctccactctatttgggaacacaaagcccaggaaggagaaaacagagatgtcccccagggagcacatcaagggcaaagagaccaccccctctagcctagcagtgacccagaccatggccaccaaagctcccgagtgtgtggaggacccagatatggcaaaccagaggaagactgccctggagttctgtggagagacttggagctctctctgcacattcttcctcagcatagtgcaggacacgtcatgc

SEQ ID NO: 3568 - DNA, 696 bp, Homo Sapiens
cggagggagaaaggggcggctagcaacgtggcggagccggtccccgggcccactggcggctcctcgggtcgcttcctcagccccgagcagcacgcgtgcagctggcagctcctgctgcccgccccggaggccgcagcgggcagcgagctggcgctgcgctgccagagcccggacggggcgcgccaccagtgcgcctaccgcgggcatccggagcgctgcgcagcctacgccgctcgccgcgcgcacttctggaagcaggtgctgggagggctgcgcaagaagcggaggccctgtcacgaccccgcgccgctccaggcccgcttgtgcgcgggcaagaagggccacggcgccgagctgcggctagtgccccgcgcgtccccgcccgcacgccccaccgtcgcgggattcgcgggggagtccaagccccgggcccggaaccgggggcggacccgggagcgtgcgtccggcccagccgctgggaccccgcctccccaaagcgcaccgcccaaagaaaacccctcagagaggaagaccaacgagggcaagaggaaggcggccttggtccccaacgaggagcgacccatggggaccgggcccgaccccgacgggctggacgggaacgcggagctcacggagacctactgcgctgagaagtggcactccctctgcaacttctttgtcaatttctggaacggc

SEQ ID NO: 3569 - DNA, 1059 bp, Homo Sapiens
aggccgtccccgaccttgcctgaacaagcccagccctggggagcccctgtggaagtggagtccttcctggtccaccccggtgacctgctgcagcttcgctgtcggctgcgggacgatgtgcagagcatcaactggctgcgggacggggtgcagctggcggaaagcaaccgcacccgcatcacaggggaggaggtggaggtgcaggactccgtgcccgcagactccggcctctatgcttgcgtaaccagcagcccctcgggcagtgacaccacctacttctccgtcaatgtttcagatgctctcccctcctcggaggatgatgatgatgatgatgactcctcttcagaggagaaagaaacagataacaccaaaccaaaccccgtagctccatattggacatccccagaaaagatggaaaagaaattgcatgcagtgccggctgccaagacagtgaagttcaaatgcccttccagtgggaccccaaaccccacactgcgctggttgaaaaatggcaaagaattcaaacctgaccacagaattggaggctacaaggtccgttatgccaccgggagcatcataatggactctgtggtgccctctgacaagggcaactacacctgcattgtggagaatgagtacggcagcatcaaccacacataccagctggatgtcgtggagcggtcccctcaccggcccatcctgcaagcagggttgcccgccaacaaaacagtggccctgggtagcaacgtggagttcatgtgtaaggtgtacagtgacccgcagccgcacatccagtggctaaagcacatcgaggtgaatgggagcaagattggcccagacaacctgccttatgtccagatcttgaagactgctggagttaataccaccgacaaagagatggaggtgcttcacttaagaaatgtctcctttgaggacgcaggggagtatacgtgcttggcgggtaactctatcggactctcccatcactctgcatggttgaccgttctggaagccctggaagagaggccggcagtgatgacctcgcccctgtacctggag

SEQ ID NO: 3570 - DNA, 723 bp, Homo Sapiens
cggccctccttcagtttagttgaggataccacattagagccagaaggagcaccatactggaccaacacagaaaagatggaaaagcggctccatgctgtgcctgcggccaacactgtcaagtttcgctgcccagccggggggaacccaatgccaaccatgcggtggctgaaaaacgggaaggagtttaagcaggagcatcgcattggaggctacaaggtacgaaaccagcactggagcctcattatggaaagtgtggtcccatctgacaagggaaattatacctgtgtggtggagaatgaatacgggtccatcaatcacacgtaccacctggatgttgtggagcgatcgcctcaccggcccatcctccaagccggactgccggcaaatgcctccacagtggtcggaggagacgtagagtttgtctgcaaggtttacagtgatgcccagccccacatccagtggatcaagcacgtggaaaagaacggcagtaaatacgggcccgacgggctgccctacctcaaggttctcaaggccgccggtgttaacaccacggacaaagagattgaggttctctatattcggaatgtaacttttgaggacgctggggaatatacgtgcttggcgggtaattctattgggatatcctttcactctgcatggttgacagttctgccagcgcctggaagagaaaaggagattacagcttccccagactacctggag

SEQ ID NO: 3571 - DNA, 1059 bp, Homo Sapiens
gaatccttgggcactgagcaaagagtcgtaggacgtgccgctgaagttccaggccccgaaccgggccaacaggaacaactggtattcgggtcaggagatgcagtggaactttcttgccctcctcccggcggggggcctatgggaccgacagtatgggttaaagacggcactggccttgtgccgagcgaaagggtcttggtcggtcctcaaaggttgcaggttttgaatgcttcacacgaggatagtggcgcatattcatgtagacagagactgactcaacgtgtactatgtcatttcagcgttagagtgaccgacgcaccgagctctggagatgacgaggatggggaagatgaggctgaagacactggagtggatacaggcgctccctactggacgcgtccggagcgtatggataagaagctattagctgtcccggcggcaaatactgtcagatttagatgtccagcggcgggtaatcctaccccgtccatatcatggttaaaaaatgggagggagtttagaggcgaacatagaattggaggtataaaattgaggcaccagcaatggagtttggtaatggaatctgtagtgcccagcgataggggtaactatacgtgtgtggtggagaacaagttcgggagtattagacagacatataccttggatgtccttgagcgtagcccacatcgtcccatattacaagcggggctaccagctaatcagaccgcagtgctgggcagcgatgtggagtttcactgcaaagtttatagtgatgcacaacctcacatccagtggctaaaacacgtggaagtgaacggtagcaaggtcggccccgacggaacgccctatgtcacggtgcttaagacggcaggagcaaacactacggataaggagcttgaggttctgtccctacataatgtcaccttcgaggacgctggagaatatacctgcctagcgggtaactccatcggattttcacaccattctgcatggttggtggtcttgccagctgaggaagaactagttgaagctgacgaagctggcagcgtctacgcaggc

SEQ ID NO: 3572 - DNA, 1044 bp, Homo Sapiens
ctggaggcctctgaggaagtggagcttgagccctgcctggctcccagcctggagcagcaagagcaggagctgacagtagcccttgggcagcctgtgcgtctgtgctgtgggcgggctgagcgtggtggccactggtacaaggagggcagtcgcctggcacctgctggccgtgtacggggctggaggggccgcctagagattgccagcttcctacctgaggatgctggccgctacctctgcctggcacgaggctccatgatcgtcctgcagaatctcaccttgattacaggtgactccttgacctccagcaacgatgatgaggaccccaagtcccatagggacccctcgaataggcacagttacccccagcaagcaccctactggacacacccccagcgcatggagaagaaactgcatgcagtacctgcggggaacaccgtcaagttccgctgtccagctgcaggcaaccccacgcccaccatccgctggcttaaggatggacaggcctttcatggggagaaccgcattggaggcattcggctgcgccatcagcactggagtctcgtgatggagagcgtggtgccctcggaccgcggcacatacacctgcctggtagagaacgctgtgggcagcatccgctataactacctgctagatgtgctggagcggtccccgcaccggcccatcctgcaggccgggctcccggccaacaccacagccgtggtgggcagcgacgtggagctgctgtgcaaggtgtacagcgatgcccagccccacatccagtggctgaagcacatcgtcatcaacggcagcagcttcggagccgacggtttcccctatgtgcaagtcctaaagactgcagacatcaatagctcagaggtggaggtcctgtacctgcggaacgtgtcagccgaggacgcaggcgagtacacctgcctcgcaggcaattccatcggcctctcctaccagtctgcctggctcacggtgctgccagaggaggaccccacatggaccgcagcagcgcccgaggccaggtatacggac

SEQ ID NO: 3573 - DNA, 1062 bp, Homo Sapiens
gcccgaggccccccaaagatggcggacaaggtggtcccacggcaggtggcccggctgggccgcactgtgcggctgcagtgcccagtggagggggacccgccgccgctgaccatgtggaccaaggatggccgcaccatccacagcggctggagccgcttccgcgtgctgccgcaggggctgaaggtgaagcaggtggagcgggaggatgccggcgtgtacgtgtgcaaggccaccaacggcttcggcagcctgagcgtcaactacaccctcgtcgtgctggatgacattagcccagggaaggagagcctggggcccgacagctcctctgggggtcaagaggaccccgccagccagcagtgggcacgaccgcgcttcacacagccctccaagatgaggcgccgggtgatcgcacggcccgtgggtagctccgtgcggctcaagtgcgtggccagcgggcaccctcggcccgacatcacgtggatgaaggacgaccaggccttgacgcgcccagaggccgctgagcccaggaagaagaagtggacactgagcctgaagaacctgcggccggaggacagcggcaaatacacctgccgcgtgtcgaaccgcgcgggcgccatcaacgccacctacaaggtggatgtgatccagcggacccgttccaagcccgtgctcacaggcacgcaccccgtgaacacgacggtggacttcggggggaccacgtccttccagtgcaaggtgcgcagcgacgtgaagccggtgatccagtggctgaagcgcgtggagtacggcgccgagggccgccacaactccaccatcgatgtgggcggccagaagtttgtggtgctgcccacgggtgacgtgtggtcgcggcccgacggctcctacctcaataagctgctcatcacccgtgcccgccaggacgatgcgggcatgtacatctgccttggcgccaacaccatgggctacagcttccgcagcgccttcctcaccgtgctgccagacccaaaaccgccagggccacctgtggcctcctcgtcctcggccactagcctgccgtggccc

SEQ ID NO: 3574 - DNA, 351 bp, Homo Sapiens
tttgcggcaactttctatgacattgaaacactaaaagttatagatgaagaatggcaaagaactcagtgcagccctagagaaacgtgcgtggaggtggccagtgagctggggaagagtaccaacacattcttcaagcccccttgtgtgaacgtgttccgatgtggtggctgttgcaatgaagagagccttatctgtatgaacaccagcacctcgtacatttccaaacagctctttgagatatcagtgcctttgacatcagtacctgaattagtgcctgttaaagttgccaatcatacaggttgtaagtgcttgccaacagccccccgccatccatactcaattatcagaaga

SEQ ID NO: 3575 - DNA, 219 bp, Homo Sapiens
accctccaggtgacacaggacaagatcatctgtctacccaatcatgagctccaggagaacttatcagaggccccgtgccagcaattgctgcctcgggggatccctgagcagattggggccctgcaggaggttaaaggccttaagaacaatttggacctgcagcaatacagctttattaaccagctgtgttatgagacggccctgcactggtatgccaag

SEQ ID NO: 3576 - DNA, 1512 bp, Homo Sapiens
atcgacagcaccacctgcccctcggtgtgccgctgcgacaacggcttcatctactgcaacgaccggggactcacatccatccccgcagatatccctgatgatgccaccaccctctacctgcagaacaaccagatcaacaacgccggcatcccccaggacctcaagaccaaggtcaacgtgcaggtcatctacctatacgagaatgacctggatgagttccccatcaacctgccccgctccctccgggagctgcacctgcaggacaacaatgtgcgcaccattgccagggactcgctggcccgcatcccgctgctggagaagctgcacctggatgacaactccgtgtccaccgtcagcattgaggaggacgccttcgccgacagcaaacagctcaagctgctcttcctgagccggaaccacctgagcagcatcccctcggggctgccgcacacgctggaggagctgcggctggatgacaaccgcatctccaccatcccgctgcatgccttcaagggcctcaacagcctgcggcgcctggtgctggacggtaacctgctggccaaccagcgtatcgccgacgacaccttcagccgcctacagaacctcacagagctctcgctggtgcgcaattcgctggccgcgccacccctcaacctgcccagcgcccacctgcagaagctctacctgcaggacaatgccatcagccacatcccctacaacacgctggccaagatgcgtgagctggagcggctggacctgtccaacaacaacctgaccacgctgccccgcggcctgttcgacgacctggggaacctggcccagctgctgctcaggaacaacccttggttttgtggctgcaacctcatgtggctgcgggactgggtgaaggcacgggcggccgtggtcaacgtgcggggcctcatgtgccagggccctgagaaggtccggggcatggccatcaaggacattaccagcgagatggacgagtgttttgagacggggccgcagggcggcgtggccaatgcggctgccaagaccacggccagcaaccacgcctctgccaccacgccccagggttccctgtttaccctcaaggccaaaaggccagggctgcgcctccccgactccaacattgactaccccatggccacgggtgatggcgccaagaccctggccatccacgtgaaggccctgacggcagactccatccgcatcacgtggaaggccacgctccccgcctcctctttccggctcagttggctgcgcctgggccacagcccagccgtgggctccatcacggagaccttggtgcagggggacaagacagagtacctgctgacagccctggagcccaagtccacctacatcatctgcatggtcaccatggagaccagcaatgcctacgtagctgatgagacacccgtgtgtgccaaggcagagacagccgacagctatggccctaccaccacactcaaccaggagcagaacgctggccccatggcgagcctgccc

SEQ ID NO: 3577 - DNA, 1518 bp, Homo Sapiens
tgccctagtgtgtgccgctgcgacaggaactttgtctactgtaatgagcgaagcttgacctcagtgcctcttgggatcccggagggcgtaaccgtactctacctccacaacaaccaaattaataatgctggatttcctgcagaactgcacaatgtacagtcggtgcacacggtctacctgtatggcaaccaactggacgaattccccatgaaccttcccaagaatgtcagagttctccatttgcaggaaaacaatattcagaccatttcacgggctgctcttgcccagctcttgaagcttgaagagctgcacctggatgacaactccatatccacagtgggggtggaagacggggccttccgggaggctattagcctcaaattgttgtttttgtctaagaatcacctgagcagtgtgcctgttgggcttcctgtggacttgcaagagctgagagtggatgaaaatcgaattgctgtcatatccgacatggccttccagaatctcacgagcttggagcgtcttattgtggacgggaacctcctgaccaacaagggtatcgccgagggcaccttcagccatctcaccaagctcaaggaattttcaattgtacgtaattcgctgtcccaccctcctcccgatctcccaggtacgcatctgatcaggctctatttgcaggacaaccagataaaccacattcctttgacagccttctcaaatctgcgtaagctggaacggctggatatatccaacaaccaactgcggatgctgactcaaggggtttttgataatctctccaacctgaagcagctcactgctcggaataacccttggttttgtgactgcagtattaaatgggtcacagaatggctcaaatatatcccttcatctctcaacgtgcggggtttcatgtgccaaggtcctgaacaagtccgggggatggccgtcagggaattaaatatgaatcttttgtcctgtcccaccacgacccccggcctgcctctcttcaccccagccccaagtacagcttctccgaccactcagcctcccaccctctctattccaaaccctagcagaagctacacgcctccaactcctaccacatcgaaacttcccacgattcctgactgggatggcagagaaagagtgaccccacctatttctgaacggatccagctctctatccattttgtgaatgatacttccattcaagtcagctggctctctctcttcaccgtgatggcatacaaactcacatgggtgaaaatgggccacagtttagtagggggcatcgttcaggagcgcatagtcagcggtgagaagcaacacctgagcctggttaacttagagccccgatccacctatcggatttgtttagtgccactggatgcttttaactaccgcgcggtagaagacaccatttgttcagaggccaccacccatgcctcctatctgaacaacggcagcaacacagcgtccagccatgagcagacgacgtcccacagcatgggctcccccttt

SEQ ID NO: 3578 - DNA, 1500 bp, Homo Sapiens
aaatcctgtccatctgtgtgtcgctgcgatgcgggtttcatttactgtaatgatcgctttctgacatccattccaacaggaataccagaggatgctacaactctctaccttcagaacaaccaaataaataatgctgggattccttcagatttgaaaaacttgctgaaagtagaaagaatatacctataccacaacagtttagatgaatttcctaccaacctcccaaagtatgtaaaagagttacatttgcaagaaaataacataaggactatcacttatgattcactttcaaaaattccctatctggaagaattacatttagatgacaactctgtctctgcagttagcatagaagagggagcattccgagacagcaactatctccgactgcttttcctgtcccgtaatcaccttagcacaattccctggggtttgcccaggactatagaagaactacgcttggatgataatcgcatatccactatttcatcaccatctcttcaaggtctcactagtctaaaacgcctggttctagatggaaacctgttgaacaatcatggtttaggtgacaaagttttcttcaacctagttaatttgacagagctgtccctggtgcggaattccctgactgctgcaccagtaaaccttccaggcacaaacctgaggaagctttatcttcaagataaccacatcaatcgggtgcccccaaatgctttttcttatctaaggcagctctatcgactggatatgtccaataataacctaagtaatttacctcagggtatctttgatgatttggacaatataacacaactgattcttcgcaacaatccctggtattgcgggtgcaagatgaaatgggtacgtgactggttacaatcactacctgtgaaggtcaacgtgcgtgggctcatgtgccaagccccagaaaaggttcgtgggatggctattaaggatctcaatgcagaactgtttgattgtaaggacagtgggattgtaagcaccattcagataaccactgcaatacccaacacagtgtatcctgcccaaggacagtggccagctccagtgaccaaacagccagatattaagaaccccaagctcactaaggatcaccaaaccacagggagtccctcaagaaaaacaattacaattactgtgaagtctgtcacctctgataccattcatatctcttggaaacttgctctacctatgactgctttgagactcagctggcttaaactgggccatagcccggcatttggatctataacagaaacaattgtaacaggggaacgcagtgagtacttggtcacagccctggagcctgattcaccctataaagtatgcatggttcccatggaaaccagcaacctctacctatttgatgaaactcctgtttgtattgagactgaaactgcaccccttcgaatgtacaaccctacaaccaccctcaatcgagagcaagagaaagaaccttacaaaaaccccaatttacct

SEQ ID NO: 3579 - DNA, 1983 bp, Homo Sapiens
tcaaaattaaaagatcctgaactgagtttaaaaggcacccagcacatcatgcaagcaggccagacactgcatctccaatgcaggggggaagcagcccataaatggtctttgcctgaaatggtgagtaaggaaagcgaaaggctgagcataactaaatctgcctgtggaagaaatggcaaacaattctgcagtactttaaccttgaacacagctcaagcaaaccacactggcttctacagctgcaaatatctagctgtacctacttcaaagaagaaggaaacagaatctgcaatctatatatttattagtgatacaggtagacctttcgtagagatgtacagtgaaatccccgaaattatacacatgactgaaggaagggagctcgtcattccctgccgggttacgtcacctaacatcactgttactttaaaaaagtttccacttgacactttgatccctgatggaaaacgcataatctgggacagtagaaagggcttcatcatatcaaatgcaacgtacaaagaaatagggcttctgacctgtgaagcaacagtcaatgggcatttgtataagacaaactatctcacacatcgacaaaccaatacaatcatagatgtccaaataagcacaccacgcccagtcaaattacttagaggccatactcttgtcctcaattgtactgctaccactcccttgaacacgagagttcaaatgacctggagttaccctgatgaaaaaaataagagagcttccgtaaggcgacgaattgaccaaagcaattcccatgccaacatattctacagtgttcttactattgacaaaatgcagaacaaagacaaaggactttatacttgtcgtgtaaggagtggaccatcattcaaatctgttaacacctcagtgcatatatatgataaagcattcatcactgtgaaacatcgaaaacagcaggtgcttgaaaccgtagctggcaagcggtcttaccggctctctatgaaagtgaaggcatttccctcgccggaagttgtatggttaaaagatgggttacctgcgactgagaaatctgctcgctatttgactcgtggctactcgttaattatcaaggacgtaactgaagaggatgcagggaattatacaatcttgctgagcataaaacagtcaaatgtgtttaaaaacctcactgccactctaattgtcaatgtgaaaccccagatttacgaaaaggccgtgtcatcgtttccagacccggctctctacccactgggcagcagacaaatcctgacttgtaccgcatatggtatccctcaacctacaatcaagtggttctggcacccctgtaaccataatcattccgaagcaaggtgtgacttttgttccaataatgaagagtcctttatcctggatgctgacagcaacatgggaaacagaattgagagcatcactcagcgcatggcaataatagaaggaaagaataagatggctagcaccttggttgtggctgactctagaatttctggaatctacatttgcatagcttccaataaagttgggactgtgggaagaaacataagcttttatatcacagatgtgccaaatgggtttcatgttaacttggaaaaaatgccgacggaaggagaggacctgaaactgtcttgcacagttaacaagttcttatacagagacgttacttggattttactgcggacagttaataacagaacaatgcactacagtattagcaagcaaaaaatggccatcactaaggagcactccatcactcttaatcttaccatcatgaatgtttccctgcaagattcaggcacctatgcctgcagagccaggaatgtatacacaggggaagaaatcctccagaagaaagaaattacaatcagaggtgagcactgcaacaaaaaggctgttttctctcggatctccaaatttaaaagcacaaggaatgattgtaccacacaaagtaatgtaaaacat

SEQ ID NO: 3580 - DNA, 1551 bp, Homo Sapiens
aatcaagatctgcctgtgatcaagtgtgttttaatcaatcataagaacaatgattcatcagtggggaagtcatcatcatatcccatggtatcagaatccccggaagacctcgggtgtgcgttgagaccccagagctcagggacagtgtacgaagctgccgctgtggaagtggatgtatctgcttccatcacactgcaagtgctggtcgatgccccagggaacatttcctgtctctgggtctttaagcacagctccctgaattgccagccacattttgatttacaaaacagaggagttgtttccatggtcattttgaaaatgacagaaacccaagctggagaatacctactttttattcagagtgaagctaccaattacacaatattgtttacagtgagtataagaaataccctgctttacacattaagaagaccttactttagaaaaatggaaaaccaggacgccctggtctgcatatctgagagcgttccagagccgatcgtggaatgggtgctttgcgattcacagggggaaagctgtaaagaagaaagtccagctgttgttaaaaaggaggaaaaagtgcttcatgaattatttgggatggacataaggtgctgtgccagaaatgaactgggcagggaatgcaccaggctgttcacaatagatctaaatcaaactcctcagaccacattgccacaattatttcttaaagtaggggaacccttatggataaggtgcaaagctgttcatgtgaaccatggattcgggctcacctgggaattagaaaacaaagcactcgaggagggcaactactttgagatgagtacctattcaacaaacagaactatgatacggattctgtttgcttttgtatcatcagtggcaagaaacgacaccggatactacacttgttcctcttcaaagcatcccagtcaatcagctttggttaccatcgtagaaaagggatttataaatgctaccaattcaagtgaagattatgaaattgaccaatatgaagagttttgtttttctgtcaggtttaaagcctacccacaaatcagatgtacgtggaccttctctcgaaaatcatttccttgtgagcaaaagggtcttgataacggatacagcatatccaagttttgcaatcataagcaccagccaggagaatatatattccatgcagaaaatgatgatgcccaatttaccaaaatgttcacgctgaatataagaaggaaacctcaagtgctcgcagaagcatcggcaagtcaggcgtcctgtttctcggatggatacccattaccatcttggacctggaagaagtgttcagacaagtctcccaactgcacagaagagatcacagaaggagtctggaatagaaaggctaacagaaaagtgtttggacagtgggtgtcgagcagtactctaaacatgagtgaagccataaaagggttcctggtcaagtgctgtgcatacaattcccttggcacatcttgtgagacgatccttttaaactctccaggccccttccctttcatccaagacaacatctca

SEQ ID NO: 3581 - DNA, 1074 bp, Homo Sapiens
cagtatgaagatgaccctcattggtggttccactacctccgcagccagcagtccacctactacgatccctatgacccttacccgtatgagacctacgagccttacccctatggggtggatgaagggccagcctacacctacggctctccatcccctccagatccccgcgactgcccccaggagtgcgactgcccacccaacttccccacggccatgtactgtgacaatcgcaacctcaagtacctgcccttcgttccctcccgcatgaagtatgtgtacttccagaacaaccagatcacctccatccaggaaggcgtctttgacaatgccacagggctgctctggattgctctccacggcaaccagatcaccagtgataaggtgggcaggaaggtcttctccaagctgaggcacctggagaggctgtacctggaccacaacaacctgacccggatgcccggtcccctgcctcgatccctgagagagctccatctcgaccacaaccagatctcacgggtccccaacaatgctctggaggggctggagaacctcacggccttgtacctccaacacaatgagatccaggaagtgggcagttccatgaggggcctccggtcactgatcttgctggacctgagttataaccaccttcggaaggtgcctgatgggctgccctcagctcttgagcagctgtacatggagcacaacaatgtctacaccgtccccgatagctacttccggggggcgcccaagctgctgtatgtgcggctgtcccacaacagtctaaccaacaatggcctggcctccaacaccttcaattccagcagcctccttgagctagacctctcctacaaccagctgcagaagatccccccagtcaacaccaacctggagaacctctacctccaaggcaataggatcaatgagttctccatcagcagcttctgcaccgtggtggacgtcgtgaacttctccaagctgcaggtgctgcgcctggacgggaacgagatcaagcgcagcgccatgcctgccgacgcgcccctctgcctgcgccttgccagcctcatcgagatc

SEQ ID NO: 3582 - DNA, 6435 bp, Homo Sapiens
caggctcagcaaatggttcagccccagtccccggtggctgtcagtcaaagcaagcccggttgttatgacaatggaaaacactatcagataaatcaacagtgggagcggacctacctaggcaatgcgttggtttgtacttgttatggaggaagccgaggttttaactgcgagagtaaacctgaagctgaagagacttgctttgacaagtacactgggaacacttaccgagtgggtgacacttatgagcgtcctaaagactccatgatctgggactgtacctgcatcggggctgggcgagggagaataagctgtaccatcgcaaaccgctgccatgaagggggtcagtcctacaagattggtgacacctggaggagaccacatgagactggtggttacatgttagagtgtgtgtgtcttggtaatggaaaaggagaatggacctgcaagcccatagctgagaagtgttttgatcatgctgctgggacttcctatgtggtcggagaaacgtgggagaagccctaccaaggctggatgatggtagattgtacttgcctgggagaaggcagcggacgcatcacttgcacttctagaaatagatgcaacgatcaggacacaaggacatcctatagaattggagacacctggagcaagaaggataatcgaggaaacctgctccagtgcatctgcacaggcaacggccgaggagagtggaagtgtgagaggcacacctctgtgcagaccacatcgagcggatctggccccttcaccgatgttcgtgcagctgtttaccaaccgcagcctcacccccagcctcctccctatggccactgtgtcacagacagtggtgtggtctactctgtggggatgcagtggctgaagacacaaggaaataagcaaatgctttgcacgtgcctgggcaacggagtcagctgccaagagacagctgtaacccagacttacggtggcaactcaaatggagagccatgtgtcttaccattcacctacaatggcaggacgttctactcctgcaccacagaagggcgacaggacggacatctttggtgcagcacaacttcgaattatgagcaggaccagaaatactctttctgcacagaccacactgttttggttcagactcgaggaggaaattccaatggtgccttgtgccacttccccttcctatacaacaaccacaattacactgattgcacttctgagggcagaagagacaacatgaagtggtgtgggaccacacagaactatgatgccgaccagaagtttgggttctgccccatggctgcccacgaggaaatctgcacaaccaatgaaggggtcatgtaccgcattggagatcagtgggataagcagcatgacatgggtcacatgatgaggtgcacgtgtgttgggaatggtcgtggggaatggacatgcattgcctactcgcagcttcgagatcagtgcattgttgatgacatcacttacaatgtgaacgacacattccacaagcgtcatgaagaggggcacatgctgaactgtacatgcttcggtcagggtcggggcaggtggaagtgtgatcccgtcgaccaatgccaggattcagagactgggacgttttatcaaattggagattcatgggagaagtatgtgcatggtgtcagataccagtgctactgctatggccgtggcattggggagtggcattgccaacctttacagacctatccaagctcaagtggtcctgtcgaagtatttatcactgagactccgagtcagcccaactcccaccccatccagtggaatgcaccacagccatctcacatttccaagtacattctcaggtggagacctaaaaattctgtaggccgttggaaggaagctaccataccaggccacttaaactcctacaccatcaaaggcctgaagcctggtgtggtatacgagggccagctcatcagcatccagcagtacggccaccaagaagtgactcgctttgacttcaccaccaccagcaccagcacacctgtgaccagcaacaccgtgacaggagagacgactcccttttctcctcttgtggccacttctgaatctgtgaccgaaatcacagccagtagctttgtggtctcctgggtctcagcttccgacaccgtgtcgggattccgggtggaatatgagctgagtgaggagggagatgagccacagtacctggatcttccaagcacagccacttctgtgaacatccctgacctgcttcctggccgaaaatacattgtaaatgtctatcagatatctgaggatggggagcagagtttgatcctgtctacttcacaaacaacagcgcctgatgcccctcctgacccgactgtggaccaagttgatgacacctcaattgttgttcgctggagcagaccccaggctcccatcacagggtacagaatagtctattcgccatcagtagaaggtagcagcacagaactcaaccttcctgaaactgcaaactccgtcaccctcagtgacttgcaacctggtgttcagtataacatcactatctatgctgtggaagaaaatcaagaaagtacacctgttgtcattcaacaagaaaccactggcaccccacgctcagatacagtgccctctcccagggacctgcagtttgtggaagtgacagacgtgaaggtcaccatcatgtggacaccgcctgagagtgcagtgaccggctaccgtgtggatgtgatccccgtcaacctgcctggcgagcacgggcagaggctgcccatcagcaggaacacctttgcagaagtcaccgggctgtcccctggggtcacctattacttcaaagtctttgcagtgagccatgggagggagagcaagcctctgactgctcaacagacaaccaaactggatgctcccactaacctccagtttgtcaatgaaactgattctactgtcctggtgagatggactccacctcgggcccagataacaggataccgactgaccgtgggccttacccgaagaggccagcccaggcagtacaatgtgggtccctctgtctccaagtaccccctgaggaatctgcagcctgcatctgagtacaccgtatccctcgtggccataaagggcaaccaagagagccccaaagccactggagtctttaccacactgcagcctgggagctctattccaccttacaacaccgaggtgactgagaccaccattgtgatcacatggacgcctgctccaagaattggttttaagctgggtgtacgaccaagccagggaggagaggcaccacgagaagtgacttcagactcaggaagcatcgttgtgtccggcttgactccaggagtagaatacgtctacaccatccaagtcctgagagatggacaggaaagagatgcgccaattgtaaacaaagtggtgacaccattgtctccaccaacaaacttgcatctggaggcaaaccctgacactggagtgctcacagtctcctgggagaggagcaccaccccagacattactggttatagaattaccacaacccctacaaacggccagcagggaaattctttggaagaagtggtccatgctgatcagagctcctgcacttttgataacctgagtcccggcctggagtacaatgtcagtgtttacactgtcaaggatgacaaggaaagtgtccctatctctgataccatcatcccagctgttcctcctcccactgacctgcgattcaccaacattggtccagacaccatgcgtgtcacctgggctccacccccatccattgatttaaccaacttcctggtgcgttactcacctgtgaaaaatgaggaagatgttgcagagttgtcaatttctccttcagacaatgcagtggtcttaacaaatctcctgcctggtacagaatatgtagtgagtgtctccagtgtctacgaacaacatgagagcacacctcttagaggaagacagaaaacaggtcttgattccccaactggcattgacttttctgatattactgccaactcttttactgtgcactggattgctcctcgagccaccatcactggctacaggatccgccatcatcccgagcacttcagtgggagacctcgagaagatcgggtgccccactctcggaattccatcaccctcaccaacctcactccaggcacagagtatgtggtcagcatcgttgctcttaatggcagagaggaaagtcccttattgattggccaacaatcaacagtttctgatgttccgagggacctggaagttgttgctgcgacccccaccagcctactgatcagctgggatgctcctgctgtcacagtgagatattacaggatcacttacggagaaacaggaggaaatagccctgtccaggagttcactgtgcctgggagcaagtctacagctaccatcagcggccttaaacctggagttgattataccatcactgtgtatgctgtcactggccgtggagacagccccgcaagcagcaagccaatttccattaattaccgaacagaaattgacaaaccatcccagatgcaagtgaccgatgttcaggacaacagcattagtgtcaagtggctgccttcaagttcccctgttactggttacagagtaaccaccactcccaaaaatggaccaggaccaacaaaaactaaaactgcaggtccagatcaaacagaaatgactattgaaggcttgcagcccacagtggagtatgtggttagtgtctatgctcagaatccaagcggagagagtcagcctctggttcagactgcagtaaccactattcctgcaccaactgacctgaagttcactcaggtcacacccacaagcctgagcgcccagtggacaccacccaatgttcagctcactggatatcgagtgcgggtgacccccaaggagaagaccggaccaatgaaagaaatcaaccttgctcctgacagctcatccgtggttgtatcaggacttatggtggccaccaaatatgaagtgagtgtctatgctcttaaggacactttgacaagcagaccagctcagggtgttgtcaccactctggagaatgtcagcccaccaagaagggctcgtgtgacagatgctactgagaccaccatcaccattagctggagaaccaagactgagacgatcactggcttccaagttgatgccgttccagccaatggccagactccaatccagagaaccatcaagccagatgtcagaagctacaccatcacaggtttacaaccaggcactgactacaagatctacctgtacaccttgaatgacaatgctcggagctcccctgtggtcatcgacgcctccactgccattgatgcaccatccaacctgcgtttcctggccaccacacccaattccttgctggtatcatggcagccgccacgtgccaggattaccggctacatcatcaagtatgagaagcctgggtctcctcccagagaagtggtccctcggccccgccctggtgtcacagaggctactattactggcctggaaccgggaaccgaatatacaatttatgtcattgccctgaagaataatcagaagagcgagcccctgattggaaggaaaaagacaggacaagaagctctctctcagacaaccatctcatgggccccattccaggacacttctgagtacatcatttcatgtcatcctgttggcactgatgaagaacccttacagttcagggttcctggaacttctaccagtgccactctgacaggcctcaccagaggtgccacctacaacatcatagtggaggcactgaaagaccagcagaggcataaggttcgggaagaggttgttaccgtgggcaactctgtcaacgaaggcttgaaccaacctacggatgactcgtgctttgacccctacacagtttcccattatgccgttggagatgagtgggaacgaatgtctgaatcaggctttaaactgttgtgccagtgcttaggctttggaagtggtcatttcagatgtgattcatctagatggtgccatgacaatggtgtgaactacaagattggagagaagtgggaccgtcagggagaaaatggccagatgatgagctgcacatgtcttgggaacggaaaaggagaattcaagtgtgaccctcatgaggcaacgtgttatgatgatgggaagacataccacgtaggagaacagtggcagaaggaatatctcggtgccatttgctcctgcacatgctttggaggccagcggggctggcgctgtgacaactgccgcagacctgggggtgaacccagtcccgaaggcactactggccagtcctacaaccagtattctcagagataccatcagagaacaaacactaatgttaattgcccaattgagtgcttcatgcctttagatgtacaggctgacagagaagattcccgagag

SEQ ID NO: 3583 - DNA, 369 bp, Homo Sapiens
gaccggcctccctctcctgtgaatgtgacggtcactcacctcagagccaactcggccactgtgtcctgggacgtcccagaaggcaacatcgtcattggctactccatttcccagcaacggcagaatggccccgggcagcgtgtgattcgggaggtgaacaccaccacccgggcctgtgccctctggggcctggctgaagacagtgactacacagtgcaggtcaggagcatcggccttcggggagagagtcccccagggccccgggtgcacttccgaactctcaagggttctgaccggctaccttcaaacagttcaagcccaggtgacatcacagtggaaggtctggatggagagcggccactgcagact

SEQ ID NO: 3584 - DNA, 351 bp, Homo Sapiens
gccccagtgaacgtcaccgtcaggcacctcaaggccaactctgcagtggtgagctgggatgttctggaggatgaggttgtcatcggatttgccatctcccagcagaagaaggatgtgcggatgctgcgcttcatccaggaggtgaacaccaccacccgctcatgtgccctctgggacctggaggaggatacggagtacatagtccacgtgcaggccatctccattcagggccagagcccagccagcgagcctgtgctcttcaagaccccgcgtgaggctgagaagatggcctccaagaacaaagatgaggtaaccatgaaagagatggggaggaaccaacagctgcggaca

SEQ ID NO: 3585 - DNA, 1335 bp, Homo Sapiens
gcacccggaagagtgacgatccaagaagatccccctggccacctgtctgtggcttggtccagtgtagatctgggtgactactatgtggtctttgtgaagagtgatgatggcttggaagtacactgcaacacatctctcactcagtgcaacttcttatctgagtgtggcttcacttattttattagtgtttttgtctataacaaggcagggcaaagtcctttgggtgacatattcaattataccacagctccctgttgtcctagtgacattaaccccgtgttggtgtccagtgacagagttgagattgtctggtctcctgtccgtggtgccgaactgtatgaaaccaaggctgtagatgggtacaacatggttgagtgcaatgacactactcctgcgtgcaccctttcggctctagagtgtgacaccaagtacaacatcacagtgtattcattcaatgaagtccgaggcagcaatatgtcatgtactccccagttcataaccacagctccttgcagtcctgaaataaaaaatgtttcaagggatgcattctccatgattaatgtgcactggcgatccactaatgatgatgctacttacacggtgactgcccaaggggagaaaggactgtatcagtgcagcagcacaggagagtcctgcaccatgcggggcttgccctgtggctcagtgttctctgtcactgctgtggccgaaacacaggcaggacggagcctgcccagctacagtgtgcccctggaaacagtgccatgctgtccaaccggtctgacagtaactcaaatcacccagtcagtaatcaacgtgagctggactattgggagagtggctcaaacccatgttgcagttctggagtcacacactggacagtctaagtgtcacactcatcaaaaccactgcctcctagggtgcatcacatgtggcatcaattacacagtgacattaaaagcaattagtgccaccgggttgactgcagattgctcctaccaaagttatttctctggtgcctgctgccctttgggggtgaaattatataggctgggccctaatggcatccggatctactggcaagcctccaggggctctgccaattacagcactgacctctatggctccaaaggcattttcacgtgcaccccgagtgctggcctcagtttctgtgatgtcactgagataccctgtggggatgtatacactgtgatggtctcaccagttgctaaaacaggattgaagcttactttctgtccaaaaaaaatatattcagtaacttgctctggaagtacacttggaatggtgatttatagagggaagagaaatgaagaa

SEQ ID NO: 3586 - DNA, 2145 bp, Homo Sapiens
atggtgacacaagaatccatgctgaaggctgccttgcctctctttaccagattcatcatcagcaatggactgcggaccgagcacggggtgtttgagatcacactggagactgtggacagagccctgcctgtggtaaccaggaacaaggggttgagactggcccaaggggccgtgggcctgctttcccctgacctccttcagctgaccgaccctgatacacctgcggagaacctcaccttcctcttggttcagctcccccagcatggccagctctacctgtgggggacagggctacttcaacacaatttcacccagcaggatgtggacagcaagaatgtggcctatcggcactcaggaggggactcccagactgactgctttactttcatggccacagacgggacaaaccaaggctttattgtgaatgggagagtgtgggaagaacctgttttattcaccattcaggtagaccaattggacaaaacagctcctcgtatcacactcttgcattccccttctcaagtggggctcctgaaaaatggctgctacgggatttacatcacttcccgcgtgttgaaggcatcagaccctgacactgaggacgatcagatcatctttaaaattctacaaggcccaaaacatggacatctggagaacacaacaacaggtgaatttatccatgagaaatttagccaaaaggacttaaacagtaagactattctttacatcataaacccatctttggaagtaaattcagataccgtggaatttcaaatcatggaccccacagggaactcggccactcctcaaaatttggaactgaagtggtctcatattgaatggtcacagaccgaatatgaagtctgtgagaatgtgggtttgttgcccttggaaattatcagaaggggatattccatggactcggcctttgtgggtataaaggtcaaccaagtgtcagctgcagttggaaaagatttcaccgtgattccatctaaactgattcagtttgacccaggaatgtcaactaagatgtggaatatagcaattacctatgacggattagaggaagatgatgaggtctttgaagtaattctgaactcccctgtgaatgcagttcttggcacaaagacaaaagctgcagtgaaaattttggactcaaaaggaggacaatgccatccttcatattcctccaaccaaagcaagcacagcacatgggagaagggcatttggcatctgctgcccccagggtcttcctcatccaccacttctggttcctttcatctggaaagaagacctcttccatcctccatgcagctagcagtcatcaggggagacaccctgcggggctttgattctacagatctttctcaaaggaagcttaggacccgtgggaatggcaaaacagttcgtccatcctctgtttatagaaatggaacagacatcatctataattatcatgggatagtttccttgaaactggaggatgacagtttcccaactcacaaaaggaaggccaaagtatccatcattagtcagccacaaaagacaatcaaagtggcagaactgcctcaagcagataaggtggaatccacaactgactcacacttccccagacaggaccagttgccctcatttccaaagaactgcactctggaattaaagggactcttccattttgaagaaggcatccagaagctgtatcagtgcaatgggatcgcctggaaagcctggagtccccaaaccaaggatgtggaagacaaatcctgtccagccgggtggcaccagcactcaggctactgtcacatcttgatcacagagcagaaaggcacctggaatgcggctgcccaagcttgcagggaacaatacctgggcaaccttgtaactgtattctccaggcagcacatgcggtggctctgggacattggtgggagaaagtccttttggataggtttgaacgaccaagtgcatgctggccactgggagtggatcggtggtgaacctgttgccttcaccaatgggagaagagggccctctccacgctccaagcttggaaagagctgtgttttggttcaaagacaagggaaatggcaaacaaaagactgtaggagagccaaacctcataattatgggtgttccagaaaactc

SEQ ID NO: 3587 - DNA, 1047 bp, Homo Sapiens
tgtcatcatcggatctgtcactgctctaacagggtttttctctgccaagagagcaaggtgacagagattccttctgacctcccgaggaatgccattgaactgaggtttgtcctcaccaagcttcgagtcatccaaaaaggtgcattttcaggatttggggacctggagaaaatagagatctctcagaatgatgtcttggaggtgatagaggcagatgtgttctccaaccttcccaaattacatgaaattagaattgaaaaggccaacaacctgctctacatcaaccctgaggccttccagaaccttcccaaccttcaatatctgttaatatccaacacaggtattaagcaccttccagatgttcacaagattcattctctccaaaaagttttacttgacattcaagataacataaacatccacacaattgaaagaaattctttcgtggggctgagctttgaaagtgtgattctatggctgaataagaatgggattcaagaaatacacaactgtgcattcaatggaacccaactagatgagctgaatctaagcgataataataatttagaagaattgcctaatgatgttttccacggagcctctggaccagtcattctagatatttcaagaacaaggatccattccctgcctagctatggcttagaaaatcttaagaagctgagggccaggtcgacttacaacttaaaaaagctgcctactctggaaaagcttgtcgccctcatggaagccagcctcacctatcccagccattgctgtgcctttgcaaactggagacggcaaatctctgagcttcatccaatttgcaacaaatctattttaaggcaagaagttgattatatgactcagactaggggtcagagatcctctctggcagaagacaatgagtccagctacagcagaggatttgacatgacgtacactgagtttgactatgacttatgcaatgaagtggttgacgtgacctgctcccctaagccagatgcattcaacccatgtgaagatatcatggggtacaacatcctcaga

SEQ ID NO: 3588 - DNA, 1749 bp, Homo Sapiens
tggatggacccaggaaccagcagaggcccggatgtgggtgtgggggagtcacaggcagaggagcccagaagctttgaagtcacaagaagagaagggctttccagccacaacgagctgctggcctcctgcgggaagaagttctgcagccgagggagccggtgcgtgctcagcaggaagacaggggagcccgaatgccagtgcctggaggcatgcaggcccagctacgtgcctgtgtgcggctctgatgggaggttttatgaaaaccactgtaagctccaccgtgctgcttgcctcctgggaaagaggatcaccgtcatccacagcaaggactgtttcctcaaaggtgacacgtgcaccatggccggctacgcccgcttgaagaatgtccttctggcactccagacccgtctgcagccactccaagaaggagacagcagacaagaccctgcctcccagaagcgcctcctggtggaatctctgttcagggacttagatgcagatggcaatggccacctcagcagctccgaactggctcagcatgtgctgaagaagcaggacctggatgaagacttacttggttgctcaccaggtgacctcctccgatttgacgattacaacagtgacagctccctgaccctccgcgagttctacattgccttccaagtggttcagctcagcctcgcccccgaggacagggtcagtgtgaccacagtgaccgtggggctgagcacagtgctgacctgcgccgtccatggagacctgaggccaccaatcatctggaagcgcaacgggctcaccctgaacttcctggacttggaagacatcaatgactttggagaggatgattccctgtacatcaccaaggtgaccaccatccacatgggcaattacacctgccatgcttccggccacgagcagctgttccagacccacgtcctgcaggtgaatgtgccgccagtcatccgtgtctatccagagagccaggcacaggagcctggagtggcagccagcctaagatgccatgctgagggcattcccatgcccagaatcacttggctgaaaaacggcgtggatgtctcaactcagatgtccaaacagctctcccttttagccaatgggagcgaactccacatcagcagtgttcggtatgaagacacaggggcatacacctgcattgccaaaaatgaagtgggtgtggatgaagatatctcctcgctcttcattgaagactcagctagaaagacccttgcaaacatcctgtggcgagaggaaggcctcagcgtgggaaacatgttctatgtcttctccgacgacggtatcatcgtcatccatcctgtggactgtgagatccagaggcacctcaaacccacggaaaagattttcatgagctatgaagaaatctgtcctcaaagagaaaaaaatgcaacccagccctgccagtgggtatctgcagtcaatgtccggaaccggtacatctatgtggcccagccagcactgagcagagtccttgtggtcgacatccaagcccagaaagtcctacagtccataggtgtggaccctctgccggctaagctgtcctatgacaagtcacatgaccaagtgtgggtcctgagctggggggacgtgcacaagtcccgaccaagtctccaggtgatcacagaagccagcaccggccagagccagcacctcatccgcacaccctttgcaggagtggatgatttcttcattcccccaataaaccttgaacag

SEQ ID NO: 3589 - DNA, 2481 bp, Homo Sapiens
aggccaaccaaagaaggaggatatggccttaaatcctatcagcctctaatgagattgcgacataagcaggaaaaaaatcaagaaagttcaagagtcaaaggatttatgattcaggatggcccttttggatcttgtgaaaataagtactgtggtttgggaagacactgtgttaccagcagagagacagggcaagcagaatgtgcctgtatggacctttgcaaacgtcactacaaacctgtgtgtggatctgacggagaattctatgaaaaccactgtgaagtgcacagagctgcttgcctgaaaaaacaaaagattaccattgttcacaatgaagactgcttctttaaaggagataagtgcaagactactgaatacagcaagatgaaaaatatgctattagatttacaaaatcaaaaatatattatgcaagaaaatgaaaatcctaatggcgacgacatatctcggaagaagctattggtggatcaaatgtttaaatattttgatgcagacagtaatggacttgtagatattaatgaactaactcaggtgataaaacaggaagaacttggcaaggatctctttgattgtactttgtatgttctattgaaatatgatgattttaatgctgacaagcacctggctcttgaagaattttatagagcattccaagtgatccagttgagtctgccagaagatcagaaactaagcatcactgcagcaactgtgggacaaagtgctgttctgagctgtgccattcaaggaaccctgagacctcccattatctggaaaaggaacaatattattctaaataatttagatttggaagacatcaatgactttggagatgatgggtccttgtatattactaaggttaccacaactcacgttggcaattacacctgctatgcagatggctatgaacaagtctatcagactcacatcttccaagtgaatgttcctccagtcatccgggtgtatccagagagtcaggctagagagcctggggtaactgccagtcttaggtgccatgcagagggcataccaaagcctcagcttggctggttgaagaatggaattgatattacaccaaagctttccaaacaactcacgcttcaagcaaatggcagtgaggttcacataagcaatgtgcgctatgaagatactggagcatacacttgtatcgcaaagaatgaagcaggagtggatgaagacatctcttctctttttgtggaagactctgctagaaagaccctagctaacatattatggagagaagaaggtctgggaattgggaacatgttctatgttttttatgaagatggaatcaaagtgatacaacccatagaatgtgaatttcagaggcacattaagcctagtgaaaagctccttggatttcaggatgaagtctgtcccaaagctgagggagatgaagttcagaggtgtgtgtgggcatcagctgttaatgtcaaagacaagttcatttatgttgcacagccaactttggacagagtccttattgttgatgtgcagtcccaaaaagttgttcaggcagtgagcacagaccctgtcccagttaaattacactatgacaaatcacatgatcaggtctgggtgctaagctggggtaccttggagaagtcatcaccaacactacaggtaattaccctggccagtgggaatgtgcctcaccacacgatccacacccaaccagtgggaaagcaatttgacagagtggatgattttttcattcccaccacaacactcattatcacccatatgaggtttggatttattcttcataaagatgaagctgcactacaaaaaattgatattgaaaccatgtcatacatcaagacaattaacttgaaggactataagtgcgttcctcagtcattggcatatacacacttgggaggctactacttcattggctgcaaacctgacagcaccggagcagtttccccacaggtcatggtggacggtgtaactgactcagtcattgggttcaatagtgatgtgacgggcactccatatgtctctccagatggccactaccttgtcagcattaatgatgtgaaaggtcttgtaagggttcagtacattaccatcagaggagaaatacaggaggcttttgatatttacacaaatctgcacatatctgatctggcatttcaaccatcctttactgaagcccaccaatataacatctacggtagttcaagcacacaaactgatgtgctctttgtggagctctcttctgggaaggtcaagatgataaagagtctcaaggaaccactcaaggcagaagaatggccttggaaccggaaaaacaggcaaatccaggacagtggcttgtttggtcaatacctgatgacaccttccaaggactctctcttcatcctagatggacgactcaataaattaaactgtgagatcactgaagttgaaaaaggaaatacagtcatttgggttggagatgcc

SEQ ID NO: 3590 - DNA, 468 bp, Homo Sapiens
ggctgggacctgacggtgaagatgctggcgggcaacgaattccaggtgtccctgagcagctccatgtcggtgtcagagctgaaggcgcagatcacccagaagatcggcgtgcacgccttccagcagcgtctggctgtccacccgagcggtgtggcgctgcaggacagggtcccccttgccagccagggcctgggccccggcagcacggtcctgctggtggtggacaaatgcgacgaacctctgagcatcctggtgaggaataacaagggccgcagcagcacctacgaggtacggctgacgcagaccgtggcccacctgaagcagcaagtgagcgggctggagggtgtgcaggacgacctgttctggctgaccttcgaggggaagcccctggaggaccagctcccgctgggggagtacggcctcaagcccctgagcaccgtgttcatgaatctgcgcctgcggggaggc

SEQ ID NO: 3591 - DNA, 1944 bp, Homo Sapiens
gcgctgttgccggcgcgcgaggccacgcagttcctgcggcccaggcagcgccgcgcctttcaggtcttcgaggaggccaagcagggccacctggagagggagtgcgtggaggagctgtgcagccgcgaggaggcgcgggaggtgttcgagaacgaccccgagacggattatttttacccaagatacttagactgcatcaacaagtatgggtctccgtacaccaaaaactcaggcttcgccacctgcgtgcaaaacctgcctgaccagtgcacgcccaacccctgcgataggaaggggacccaagcctgccaggacctcatgggcaacttcttctgcctgtgtaaagctggctgggggggccggctctgcgacaaagatgtcaacgaatgcagccaggagaacgggggctgcctccagatctgccacaacaagccgggtagcttccactgttcctgccacagcggcttcgagctctcctctgatggcaggacctgccaagacatagacgagtgcgcagactcggaggcctgcggggaggcgcgctgcaagaacctgcccggctcctactcctgcctctgtgacgagggctttgcgtacagctcccaggagaaggcttgccgagatgtggacgagtgtctgcagggccgctgtgagcaggtctgcgtgaactccccagggagctacacctgccactgtgacgggcgtgggggcctcaagctgtcccaggacatggacacctgtgaggacatcttgccgtgcgtgcccttcagcgtggccaagagtgtgaagtccttgtacctgggccggatgttcagtgggacccccgtgatccgactgcgcttcaagaggctgcagcccaccaggctggtagctgagtttgacttccggacctttgaccccgagggcatcctcctctttgccggaggccaccaggacagcacctggatcgtgctggccctgagagccggccggctggagctgcagctgcgctacaacggtgtcggccgtgtcaccagcagcggcccggtcatcaaccatggcatgtggcagacaatctctgttgaggagctggcgcggaatctggtcatcaaggtcaacagggatgctgtcatgaaaatcgcggtggccggggacttgttccaaccggagcgaggactgtatcatctgaacctgaccgtgggaggtattcccttccatgagaaggacctcgtgcagcctataaaccctcgtctggatggctgcatgaggagctggaactggctgaacggagaagacaccaccatccaggaaacggtgaaagtgaacacgaggatgcagtgcttctcggtgacggagagaggctctttctaccccgggagcggcttcgccttctacagcctggactacatgcggacccctctggacgtcgggactgaatcaacctgggaagtagaagtcgtggctcacatccgcccagccgcagacacaggcgtgctgtttgcgctctgggcccccgacctccgtgccgtgcctctctctgtggcactggtagactatcactccacgaagaaactcaagaagcagctggtggtcctggccgtggagcatacggccttggccctaatggagatcaaggtctgcgacggccaagagcacgtggtcaccgtctcgctgagggacggtgaggccaccctggaggtggacggcaccaggggccagagcgaggtgagcgccgcgcagctgcaggagaggctggccgtgctcgagaggcacctgcggagccccgtgctcacctttgctggcggcctgccagatgtgccggtgacttcagcgccagtcaccgcgttctaccgcggctgcatgacactggaggtcaaccggaggctgctggacctggacgaggcggcgtacaagcacagcgacatcacggcccactcctgcccccccgtggagcccgccgcagcc

SEQ ID NO: 3592 - DNA, 330 bp, Homo Sapiens
cagtgggatgagccgagggtgtgctcccggaggtacctgaaggtggacttcgcagacatcggctggaatgaatggataatctcaccgaaatcttttgatgcctactactgcgcgggagcatgtgagttccccatgcctaagatcgttcgtccatccaaccatgccaccatccagagcattgtcagggctgtgggcatcatccctggcatcccagagccctgctgtgttcccgataagatgaactcccttggggtcctcttcctggatgagaatcggaatgtggttctgaaggtgtaccccaacatgtccgtggacacctgtgcctgccgg

SEQ ID NO: 3593 - DNA, 327 bp, Homo Sapiens
aacctgggtctggactgcgacgagcactcaagcgagtcccgctgctgccgatatcccctcacagtggactttgaggctttcggctgggactggatcatcgcacctaagcgctacaaggccaactactgctccggccagtgcgagtacatgttcatgcaaaaatatccgcatacccatttggtgcagcaggccaatccaagaggctctgctgggccctgttgtacccccaccaagatgtccccaatcaacatgctctacttcaatgacaagcagcagattatctacggcaagatccctggcatggtggtggatcgctgtggctgctct

SEQ ID NO: 3594 - DNA, 342 bp, Homo Sapiens
gcgcgtgcgcgcaacggggaccactgtccgctcgggcccgggcgttgctgccgtctgcacacggtccgcgcgtcgctggaagacctgggctgggccgattgggtgctgtcgccacgggaggtgcaagtgaccatgtgcatcggcgcgtgcccgagccagttccgggcggcaaacatgcacgcgcagatcaagacgagcctgcaccgcctgaagcccgacacggtgccagcgccctgctgcgtgcccgccagctacaatcccatggtgctcattcaaaagaccgacaccggggtgtcgctccagacctatgatgacttgttagccaaagactgccactgcata

SEQ ID NO: 3595 - DNA, 330 bp, Homo Sapiens
agcgccggggctggcagccactgtcaaaagacctccctgcgggtaaacttcgaggacatcggctgggacagctggatcattgcacccaaggagtatgaagcctacgagtgtaagggcggctgcttcttccccttggctgacgatgtgacgccgacgaaacacgctatcgtgcagaccctggtgcatctcaagttccccacaaaggtgggcaaggcctgctgtgtgcccaccaaactgagccccatctccgtcctctacaaggatgacatgggggtgcccaccctcaagtaccattacgagggcatgagcgtggcagagtgtgggtgcagg

SEQ ID NO: 3596 - DNA, 342 bp, Homo Sapiens
gcagccatccctgtccccaagctttcttgtaagaacctctgccaccgtcaccagctattcattaacttccgggacctgggttggcacaagtggatcattgcccccaaggggttcatggcaaattactgccatggagagtgtcccttctcactgaccatctctctcaacagctccaattatgctttcatgcaagccctgatgcatgccgttgacccagagatcccccaggctgtgtgtatccccaccaagctgtctcccatttccatgctctaccaggacaataatgacaatgtcattctacgacattatgaagacatggtagtcgatgaatgtgggtgtggg

SEQ ID NO: 3597 - DNA, 360 bp, Homo Sapiens
gccccactggccactcgccagggcaagcgacccagcaagaaccttaaggctcgctgcagtcggaaggcactgcatgtcaacttcaaggacatgggctgggacgactggatcatcgcaccccttgagtacgaggctttccactgcgaggggctgtgcgagttcccattgcgctcccacctggagcccacgaatcatgcagtcatccagaccctgatgaactccatggaccccgagtccacaccacccacctgctgtgttcccacgcggctgagtcccatcagcatcctcttcattgactctgccaacaacgtggtgtataagcagtatgaggacatggtcgtggagtcgtgtggctgcagg

SEQ ID NO: 3598 - DNA, 360 bp, Homo Sapiens
acggccttcgccagtcgccatggcaagcggcacggcaagaagtccaggctacgctgcagcaagaagcccctgcacgtgaacttcaaggagctgggctgggacgactggattatcgcgcccctggagtacgaggcctatcactgcgagggtgtatgcgacttcccgctgcgctcgcacctggagcccaccaaccacgccatcatccagacgctgatgaactccatggaccccggctccaccccgcccagctgctgcgtgcccaccaaattgactcccatcagcattctatacatcgacgcgggcaataatgtggtctacaagcagtacgaggacatggtggtggagtcgtgcggctgcagg

SEQ ID NO: 3599 - DNA, 327 bp, Homo Sapiens
gattttggtcttgactgtgatgagcactcaacagaatcacgatgctgtcgttaccctctaactgtggattttgaagcttttggatgggattggattatcgctcctaaaagatataaggccaattactgctctggagagtgtgaatttgtatttttacaaaaatatcctcatactcatctggtacaccaagcaaaccccagaggttcagcaggcccttgctgtactcccacaaagatgtctccaattaatatgctatattttaatggcaaagaacaaataatatatgggaaaattccagcgatggtagtagaccgctgtgggtgctca

SEQ ID NO: 3600 - DNA, 405 bp, Homo Sapiens
ggtcaggaaactgtcagttctgaattgaagaagcccttgggcccagcttccttcaatctgagtgaatacttcagacaatttcttcttccccaaaatgagtgtgagctccatgactttagacttagctttagtcagctgaagtgggacaactggattgtggctccgcacaggtacaaccctcgatactgtaaaggggactgtccaagggcagttggacatcggtatggctctccagttcacaccatggtacagaacatcatctatgagaagctggactcctcagtgccaagaccgtcatgtgtacctgccaaatacagccccttgagtgttttgaccattgagcccgatggctcaattgcctataaagagtacgaagatatgatagctacaaagtgcacctgtcgt

SEQ ID NO: 3601 - DNA, 402 bp, Homo Sapiens
tcaccagataaacaaatggcagtgcttcctagaagagagcggaatcggcaggctgcagctgccaacccagagaattccagaggaaaaggtcggagaggccagaggggcaaaaaccggggttgtgtcttaactgcaatacatttaaatgtcactgacttgggtctgggctatgaaaccaaggaggaactgatttttaggtactgcagcggctcttgcgatgcagctgagacaacgtacgacaaaatattgaaaaacttatccagaaatagaaggctggtgagtgacaaagtagggcaggcatgttgcagacccatcgcctttgatgatgacctgtcgtttttagatgataacctggtttaccatattctaagaaagcattccgctaaaaggtgtggatgtatc

SEQ ID NO: 3602 - DNA, 1200 bp, Homo Sapiens
gaccgcctggattgcgtgaaagccagtgatcagtgcctgaaggagcagagctgcagcaccaagtaccgcacgctaaggcagtgcgtggcgggcaaggagaccaacttcagcctggcatccggcctggaggccaaggatgagtgccgcagcgccatggaggccctgaagcagaagtcgctctacaactgccgctgcaagcggggtatgaagaaggagaagaactgcctgcgcatttactggagcatgtaccagagcctgcagggaaatgatctgctggaggattccccatatgaaccagttaacagcagattgtcagatatattccgggtggtcccattcatatcagtggagcacattcccaaagggaacaactgcctggatgcagcgaaggcctgcaacctcgacgacatttgcaagaagtacaggtcggcgtacatcaccccgtgcaccaccagcgtgtccaatgatgtctgcaaccgccgcaagtgccacaaggccctccggcagttctttgacaaggtcccggccaagcacagctacggaatgctcttctgctcctgccgggacatcgcctgcacagagcggaggcgacagaccatcgtgcctgtgtgctcctatgaagagagggagaagcccaactgtttgaatttgcaggactcctgcaagacgaattacatctgcagatctcgccttgcggatttttttaccaactgccagccagagtcaaggtctgtcagcagctgtctaaaggaaaactacgctgactgcctcctcgcctactcggggcttattggcacagtcatgacccccaactacatagactccagtagcctcagtgtggccccatggtgtgactgcagcaacagtgggaacgacctagaagagtgcttgaaatttttgaatttcttcaaggacaatacatgtcttaaaaatgcaattcaagcctttggcaatggctccgatgtgaccgtgtggcagccagccttcccagtacagaccaccactgccactaccaccactgccctccgggttaagaacaagcccctggggccagcagggtctgagaatgaaattcccactcatgttttgccaccgtgtgcaaatttacaggcacagaagctgaaatccaatgtgtcgggcaatacacacctctgtatttccaatggtaattatgaaaaagaaggtctcggtgcttccagc

SEQ ID NO: 3603 - DNA, 1269 bp, Homo Sapiens
agcccttcctccctgcagggccccgagctccacggctggcgccccccagtggactgtgtccgggccaatgagctgtgtgccgccgaatccaactgcagctctcgctaccgcactctgcggcagtgcctggcaggccgcgaccgcaacaccatgctggccaacaaggagtgccaggcggccttggaggtcttgcaggagagcccgctgtacgactgccgctgcaagcggggcatgaagaaggagctgcagtgtctgcagatctactggagcatccacctggggctgaccgagggtgaggagttctacgaagcctccccctatgagccggtgacctcccgcctctcggacatcttcaggcttgcttcaatcttctcagggacaggggcagacccggtggtcagcgccaagagcaaccattgcctggatgctgccaaggcctgcaacctgaatgacaactgcaagaagctgcgctcctcctacatctccatctgcaaccgcgagatctcgcccaccgagcgctgcaaccgccgcaagtgccacaaggccctgcgccagttcttcgaccgggtgcccagcgagtacacctaccgcatgctcttctgctcctgccaagaccaggcgtgcgctgagcgccgccggcaaaccatcctgcccagctgctcctatgaggacaaggagaagcccaactgcctggacctgcgtggcgtgtgccggactgaccacctgtgtcggtcccggctggccgacttccatgccaattgtcgagcctcctaccagacggtcaccagctgccctgcggacaattaccaggcgtgtctgggctcttatgctggcatgattgggtttgacatgacacctaactatgtggactccagccccactggcatcgtggtgtccccctggtgcagctgtcgtggcagcgggaacatggaggaggagtgtgagaagttcctcagggacttcaccgagaacccatgcctccggaacgccatccaggcctttggcaacggcacggacgtgaacgtgtccccaaaaggcccctcgttccaggccacccaggcccctcgggtggagaagacgccttctttgccagatgacctcagtgacagtaccagcttggggaccagtgtcatcaccacctgcacgtctgtccaggagcaggggctgaaggccaacaactccaaagagttaagcatgtgcttcacagagctcacgacaaatatcatcccagggagtaacaaggtgatcaaacctaactcaggccccagc

SEQ ID NO: 3604 - DNA, 1029 bp, Homo Sapiens
gacccccttcccacagaaagccgactcatgaacagctgtctccaggccaggaggaagtgccaggctgatcccacctgcagtgctgcctaccaccacctggattcctgcacctctagcataagcaccccactgccctcagaggagccttcggtccctgctgactgcctggaggcagcacagcaactcaggaacagctctctgataggctgcatgtgccaccggcgcatgaagaaccaggttgcctgcttggacatctattggaccgttcaccgtgcccgcagccttggtaactatgagctggatgtctccccctatgaagacacagtgaccagcaaaccctggaaaatgaatctcagcaaactgaacatgctcaaaccagactcagacctctgcctcaagtttgccatgctgtgtactctcaatgacaagtgtgaccggctgcgcaaggcctacggggaggcgtgctccgggccccactgccagcgccacgtctgcctcaggcagctgctcactttcttcgagaaggccgccgagccccacgcgcagggcctgctactgtgcccatgtgcccccaacgaccggggctgcggggagcgccggcgcaacaccatcgcccccaactgcgcgctgccgcctgtggcccccaactgcctggagctgcggcgcctctgcttctccgacccgctttgcagatcacgcctggtggatttccagacccactgccatcccatggacatcctaggaacttgtgcaacagagcagtccagatgtctacgagcatacctggggctgattgggactgccatgacccccaactttgtcagcaatgtcaacaccagtgttgccttaagctgcacctgccgaggcagtggcaacctgcaggaggagtgtgaaatgctggaagggttcttctcccacaacccctgcctcacggaggccattgcagctaagatgcgttttcacagccaactcttctcccaggactggccacaccctacctttgctgtgatggcacaccagaatgaaaac

SEQ ID NO: 3605 - DNA, 774 bp, Homo Sapiens
gtcggagggaaccgatgtgtggacgcggccgaagcctgcacggcggacgcgcggtgccagcgtttgcgctccgagtatgtggcgcagtgcctgggccgggctgcgcaggggggctgtccccgcgcccgctgccgccgggccctgcgccgcttcttcgcccgcgggccgcccgcgctcacccacgcactgctcttctgcccgtgcgcgggccccgcgtgcgccgagcgtcggcgccagaccttcgtgccctcctgcgccttttcggggcccggccccgcgccgccctcctgccttgagcccttaaacttctgcgagcgcagccgggtctgcaggtgcgcgcgggcggcggcggggccgtggcgagggtggggacggggcctctctccggctcaccgccctcccgccgcgcaggcctcgcctcctggcctttcaggtctcgtgcaccccagcgcccagcgcccccgacggctgcctgctggaccagggcgcccgctgcctgcgcgcctacgcgggcctcgtggggtccccgcaggcaccgccgtcacccctaactacgtggacaacgtgagcgcgcgcgtggcgccctggtgcgactgcggagccagcgggaaccggcgtgaggactgcgaagccttccgggggctctttaccaggaaccgctgcttggatggtgccattcaggcctttgccagcgggtggcccccagtcctgctggaccagctgaacccccagggagacccggagcacagcctcctgcaggtgtcctccacaggc

SEQ ID NO: 3606 - DNA, 738 bp, Homo Sapiens
tttagcggctcagaagctactgctgctatcctatctagagctccgtggtccttacaatccgtaaacccaggtttgaaaacaaacagcagcaaagaacccaaatttacgaaatgtaggtctcccgagagggaaactttctcatgccattggactgacgaagttcatcacgggaccaaaaaccttggccctatacagttgttttacacgagaagaaatacgcaagaatggacgcaagagtggaaagagtgccctgactatgtctccgcaggagagaactcttgttatttcaactcatcatttacatccatttggataccatattgcattaaactgacgagtaacggcggtactgtggacgagaagtgcttctccgtcgatgagatagtgcaaccagacccgccgatagcgctaaactggaccttgctaaatgtttccttgactggcatccatgcggacatacaggtcaggtgggaagccccaagaaacgcggatattcaaaaagggtggatggtactagagtatgaattacaatacaaagaagttaatgagaccaaatggaaaatgatggacccgattttgactacatccgtacctgtatattctttgaaagtggacaaagaatatgaagttagggtcaggtccaagcagagaaatagtggtaactacggagaattctccgaagtattgtacgtgacgctgccccagatgagccagtttacgtgcgaagaggatttttac

SEQ ID NO: 3607 - DNA, 411 bp, Homo Sapiens
caaagacctacaggaggaccgggctgcggccctggaaggttgctacttggcacaggcaccgatgctcgttgctgccgtgtacacaccactagatgttgcagggactaccccggagaggagtgttgtagcgaatgggactgtatgtgcgtccaaccagaatttcactgtggtgatccctgttgcacgacttgcaggcatcacccgtgtccgccgggtcaaggcgtccaatctcagggaaagttctcctttggtttccagtgcattgactgtgcctcaggcaccttttcagggggtcacgaaggtcactgcaaaccttggacggactgtacacaattcggttttctgacagtgttcccaggcaataagactcataatgccgtatgcgtcccaggaagcccgccggcagaacct

SEQ ID NO: 3608 - DNA, 348 bp, Homo Sapiens
agtgccaccatgcgcgctcagtggacttacagtttgagatgccatgactgtgcggtcataaatgacttcaactgtcccaacattagagtatgtccgtatcatattaggcgctgtatgacaatctccattcgcataaattctcgtgaactacttgtttataagaactgtacaaacaactgcacatttgtatatgcagctgaacagcctcctgaagccccaggaaaaatcttcaaaactaatagcttctactgggtttgttgttgtaatagcatggtttgcaatgcaggaggacctactaatcttgaaagggacatgttacccgatgaagtaactgaggaggagcttcca

SEQ ID NO: 3609 - DNA, 369 bp, Homo Sapiens
cgtctgagccctgagtactacgacctggcaagagcccacctgcgtgatgaggagaaatcctgcccgtgcctggcccaggagggcccccagggtgacctgttgaccaaaacacaggagctgggccgtgactacaggacctgtctgacgatagtccaaaaactgaagaagatggtggataagcccacccagagaagtgtttccaatgctgcgacccgggtgtgtaggacggggaggtcacgatggcgcgacgtctgcagaaatttcatgaggaggtatcagtctagagttacccagggcctcgtggccggagaaactgcccagcagatctgtgaggacctcaggttgtgtataccttctacaggtcccctc

SEQ ID NO: 3610 - DNA, 1467 bp, Homo Sapiens
caccccatctgtgaggtctccaaagtggccagccacctagaagtgaactgtgacaagaggaatctgacagcgctgcctccagacctgccgaaagacacaaccatcctccacctgagtgagaacctcctgtacaccttctccctggcaaccctgatgccttacactcgcctcactcagctgaacctagataggtgcgagctcaccaagctccaggtcgatgggacgctgccagtgctggggaccctggatctatcccacaatcagctgcaaagcctgcccttgctagggcagacactgcctgctctcaccgtcctggacgtctccttcaaccggctgacctcgctgcctcttggtgccctgcgtggtcttggcgaactccaagagctctacctgaaaggcaatgagctgaagaccctgcccccagggctcctgacgcccacacccaagctggagaagctcagtctggctaacaacaacttgactgagctccccgctgggctcctgaatgggctggagaatctcgacacccttctcctccaagagaactcgctgtatacaataccaaagggcttttttgggtcccacctcctgccttttgcttttctccacgggaacccctggttatgcaactgtgagatcctctattttcgtcgctggctgcaggacaatgctgaaaatgtctacgtatggaagcaaggtgtggacgtcaaggccatgacctctaacgtggccagtgtgcagtgtgacaattcagacaagtttcccgtctacaaatacccaggaaaggggtgccccacccttggtgatgaaggtgacacagacctatatgattactacccagaagaggacactgagggcgataaggtgcgtgccacaaggactgtggtcaagttccccaccaaagcccatacaaccccctggggtctattctactcatggtccactgcttctctagacagccaaatgccctcctccttgcatccaacacaagaatccactaaggagcagaccacattcccacctagatggaccccaaatttcacacttcacatggaatccatcacattctccaaaactccaaaatccactactgaaccaaccccaagcccgaccacctcagagcccgtcccggagcccgccccaaacatgaccaccctggagcccactccaagcccgaccaccccagagcccacctcagagcccgcccccagcccgaccaccccggagcccaccccaatcccgaccatcgccacaagcccgaccatcctggtgtctgccacaagcctgatcactccaaaaagcacatttttaactaccacaaaacccgtatcactcttagaatccaccaaaaaaaccatccctgaacttgatcagccaccaaagctccgtggggtgctccaagggcatttggagagctccagaaatgacccttttctccaccccgacttttgctgcctcctccccctg

SEQ ID NO: 3611 - DNA, 363 bp, Homo Sapiens
cctgctccgtgttcatgtgccggtactttagtcgactgtggtagaaggggattgacatgggccagccttcccacagcttttcctgtcgataccactgaattagttctaacaggtaacaatctgaccgctctgccacccggacttttagacgctcttcccgcactaaggacagcacacttgggggctaacccgtggagatgcgattgtcgtctggtccctttacgtgcgtggctggccgggcgtcccgaaagggctccatatcgtgacctaagatgtgtcgcccctccggcgttgagagggcgtctacttccctacctagcagaagacgagcttagggccgcgtgtgctccgggtcccctttgc

SEQ ID NO: 3612 - DNA, 981 bp, Homo Sapiens
gtggaggacaagtgtgagaaggcctgccgccccgaggaggagtgccttgccctcaacagcacctggggctgtttctgcagacaggacctcaatagttctgatgtccacagtttgcagcctcagctagactgtgggcccagggagatcaaggtgaaggtggacaaatgtttgctgggaggcctgggtttgggggaggaggtcattgcctacctgcgagacccaaactgcagcagcatcttgcagacagaggagaggaactgggtatctgtgaccagccccgtccaggctagtgcctgcaggaacattctggagagaaatcaaacccatgccatctacaaaaacaccctctccttggtcaatgatttcatcatcagagacaccatcctcaacatcaacttccaatgtgcctacccactggacatgaaagtcagcctccaagctgccttgcagcccattgtaagttccctgaacgtcagtgtggacgggaatggagagttcattgtcaggatggccctcttccaagaccagaactacacgaatccttaccaaggggatgcagttgaactgtctgttgagtccgtgctgtatgtgggtgccatcttggaacaaggggacacctcccggtttaacctggtgttgaggaactgctatgccacccccactgaagacaaggctgaccttgtgaagtatttcatcatcagaaacagctgctcaaatcaacgtgattccaccatccacgtggaggagaatgggcagtcctcggaaagccggttctcagttcagatgttcatgtttgctggacattatgacctagttttcctgcattgtgagattcatctctgtgattctcttaatgaacagtgccagccttcttgctcaagaagtcaagtccgcagtgaagtaccggccatcgacctagcccgggttctagatttggggcccatcactcggagaggtgcacagtctcccggtgtcatgaat

SEQ ID NO: 3613 - DNA, 1521 bp, Homo Sapiens
cagcccttcccctgtccgccagcttgcaagtgtgtcttccgggacgccgcgcagtgctcggggggcgacgtggcgcgcatctccgcgctaggcctgcccaccaacctcacgcacatcctgctcttcggaatgggccgcggcgtcctgcagagccagagcttcagcggcatgaccgtcctgcagcgcctcatgatctccgacagccacatttccgccgttgcccccggcaccttcagtgacctgataaaactgaaaaccctgaggctgtcgcgcaacaaaatcacgcatcttccaggtgcgctgctggataagatggtgctcctggagcagttgtttttggaccacaatgcgctaaggggcattgaccaaaacatgtttcagaaactggttaacctgcaggagctcgctctgaaccagaatcagctcgatttccttcctgccagtctcttcacgaatctggagaacctgaagttgttggatttatcgggaaacaacctgacccacctgcccaaggggttgcttggagcacaggctaagctcgagagacttctgctccactcgaaccgccttgtgtctctggattcggggctgttgaacagcctgggcgccctgacggagctgcagttccaccgaaatcacatccgttccatcgcacccggggccttcgaccggctcccaaacctcagttctttgacgctttcgagaaaccaccttgcgtttctcccctctgcgctctttcttcattcgcacaatctgactctgttgactctgttcgagaacccgctggcagagctcccgggggtgctcttcggggagatggggggcctgcaggagctgtggctgaaccgcacccagctgcgcaccctgcccgccgccgccttccgcaacctgagccgcctgcggtacttaggggtgactctgagcccgcggctgagcgcgcttccgcagggcgccttccagggccttggcgagctccaggtgctcgccctgcactccaacggcctgaccgccctccccgacggcttgctgcgcggcctcggcaagctgcgccaggtgtccctgcgccgcaacaggctgcgcgccctgccccgtgccctcttccgcaatctcagcagcctggagagcgtccagctcgaccacaaccagctggagaccctgcctggcgacgtgtttggggctctgccccggctgacggaggtcctgttggggcacaactcctggcgctgcgactgtggcctggggcccttcctggggtggctgcggcagcacctaggcctcgtgggcggggaagagcccccacggtgcgcaggccctggggcgcacgccggcctgccgctctgggccctgccggggggtgacgcggagtgcccgggcccccggggcccgcctccccgccccgctgcggacagctcctcggaagcccctgtccacccagccttggctcccaacagctcagaaccctgggtgtgggcccagccggtgaccacgggcaaaggtcaagatcatagtccgttctggggg

SEQ ID NO: 3614 - DNA, 741 bp, Homo Sapiens
cagagtggaccgctccccaagccctccctccaggctctgcccagctccctggtgcccctggagaagccagtgaccctccggtgccagggacctccgggcgtggacctgtaccgcctggagaagctgagttccagcaggtaccaggatcaggcagtcctcttcatcccggccatgaagagaagtctggctggacgctaccgctgctcctaccagaacggaagcctctggtccctgcccagcgaccagctggagctcgttgccacgggagtttttgccaaaccctcgctctcagcccagcccggcccggcggtgtcgtcaggaggggacgtaaccctacagtgtcagactcggtatggctttgaccaatttgctctgtacaaggaaggggaccctgcgccctacaagaatcccgagagatggtaccgggctagtttccccatcatcacggtgaccgccgcccacagcggaacctaccgatgctacagcttctccagcagggacccatacctgtggtcggcccccagcgaccccctggagcttgtggtcacaggaacctctgtgacccccagccggttaccaacagaaccaccttcctcggtagcagaattctcagaagccaccgctgaactgaccgtctcattcacaaacaaagtcttcacaactgagacttctaggagtatcaccaccagtccaaaggagtcagactctccagctggtcctgcccgccagtactacaccaag

SEQ ID NO: 3615 - DNA, 393 bp, Homo Sapiens
accaaggactgccccagcccatgtacctgccgcgccctggaaaccatggggctgtgggtggactgcaggggccacggactcacggccctgcctgccctgccggcccgcacccgccaccttctgctggccaacaacagccttcagtccgtgcccccgggagcctttgaccacctgccccagctgcagaccctcgatgtgacgcagaacccctggcactgtgactgcagcctcacctatctgcgcctctggctggaggaccgcacgcccgaggccctgctgcaggtccgctgtgccagccccagcctcgctgcccatggcccgctgggccggctgacaggctaccagctgggcagctgtggctggcagctgcaggcgtcctgggtgcgcccgggg

SEQ ID NO: 3616 - DNA, 642 bp, Homo Sapiens
atctctgtggaaactccgcaggacgttcttcgggcttcgcagggaaagagtgtcaccctgccctgcacctaccacacttccacctccagtcgagagggacttattcaatgggataagctcctcctcactcatacggaaagggtggtcatctggccgttttcaaacaaaaactacatccatggtgagctttataagaatcgcgtcagcatatccaacaatgctgagcagtccgatgcctccatcaccattgatcagctgaccatggctgacaacggcacctacgagtgttctgtctcgctgatgtcagacctggagggcaacaccaagtcacgtgtccgcctgttggtcctcgtgccaccctccaaaccagaatgcggcatcgagggagagaccataattgggaacaacatccagctgacctgccaatcaaaggagggctcaccaacccctcagtacagctggaagaggtacaacatcctgaatcaggagcagcccctggcccagccagcctcaggtcagcctgtctccctgaagaatatctccacagacacatcgggttactacatctgtacctccagcaatgaggaggggacgcagttctgcaacatcacggtggccgtcagatctccctccatgaacgtg

SEQ ID NO: 3617 - DNA, 1671 bp, Homo Sapiens
gccgctctcacccgggacccccagttccagaagctgcagcaatggtaccgcgagcaccgctccgagctgaacctgcgccgcctcttcgatgccaacaaggaccgcttcaaccacttcagcttgaccctcaacaccaaccatgggcatatcctggtggattactccaagaacctggtgacggaggacgtgatgcggatgctggtggacttggccaagtccaggggcgtggaggccgcccgggagcggatgttcaatggtgagaagatcaactacaccgagggtcgagccgtgctgcacgtggctctgcggaaccggtcaaacacacccatcctggtagacggcaaggatgtgatgccagaggtcaacaaggttctggacaagatgaagtctttctgccagcgtgtccggagcggtgactggaaggggtacacaggcaagaccatcacggacgtcatcaacattggcattggcggctccgacctgggacccctcatggtgactgaagcccttaagccatactcttcaggaggtccccgcgtctggtatgtctccaacattgatggaactcacattgccaaaaccctggcccagctgaaccccgagtcctccctgttcatcattgcctccaagacctttactacccaggagaccatcacgaatgcagagacggcgaaggagtggtttctccaggcggccaaggatccttctgcagtggcgaagcactttgttgccctgtctactaacacaaccaaagtgaaggagtttggaattgaccctcaaaacatgttcgagttctgggattgggtgggaggacgctactcgctgtggtcggccatcggactctccattgccctgcacgtgggttttgacaacttcgagcagctgctctcgggggctcactggatggaccagcacttccgcacgacgcccctggagaagaacgcccccgtcttgctggccctgctgggtatctggtacatcaactgctttgggtgtgagacacacgccatgctgccctatgaccagtacctgcaccgctttgctgcgtacttccagcagggcgacatggagtccaatgggaaatacatcaccaaatctggaacccgtgtggaccaccagacaggccccattgtgtggggggagccagggaccaatggccagcatgctttttaccagctcatccaccaaggcaccaagatgataccctgtgacttcctcatcccggtccagacccagcaccccatacggaagggtctgcatcacaagatcctcctggccaacttcttggcccagacagaggccctgatgaggggaaaatcgacggaggaggcccgaaaggagctccaggctgcgggcaagagtccagaggaccttgagaggctgctgccacataaggtctttgaaggaaatcgcccaaccaactctattgtgttcaccaagctcacaccattcatgcttggagccttggtcgccatgtatgagcacaagatcttcgttcagggcatcatctgggacatcaacagctttgaccagtggggagtggagctgggaaagcagctggctaagaaaatagagcctgagcttgatggcagtgctcaagtgacctctcacgacgcttctaccaatgggctcatcaacttcatcaagcagcagcgcgaggccagagtccaa

SEQ ID NO: 3618 - DNA, 393 bp, Homo Sapiens
cagacacagcaggaggaagaggaagaggacgaggaccacgggccagatgactacgacgaggaagatgaggatgaggtggaagaggaggagaccaacaggctccctggtggcaggagcagagtgctgctgcggtgctacacctgcaagtccctgcccagggacgagcgctgcaacctgacgcagaactgctcacatggccagacctgcacaaccctcattgcccacgggaacaccgagtcaggcctcctgaccacccactccacgtggtgcacagacagctgccagcccatcaccaagacggtggaggggacccaggtgaccatgacctgctgccagtccagcctgtgcaatgtcccaccctggcaaagctcccgagtccaggacccaacaggc

SEQ ID NO: 3619 - DNA, 1395 bp, Homo Sapiens
gccaaacgatttcatgatgtgctgggcaatgaaagaccttctgcttacatgagggagcacaatcaattaaatggctggtcttctgatgaaaatgactggaatgaaaaactctacccagtgtggaagcggggagacatgaggtggaaaaactcctggaagggaggccgtgtgcaggcggtcctgaccagtgactcaccagccctcgtgggctcaaatataacatttgcggtgaacctgatattccctagatgccaaaaggaagatgccaatggcaacatagtctatgagaagaactgcagaaatgaggctggtttatctgctgatccgtatgtttacaactggacagcatggtcagaggacagtgacggggaaaatggcaccggccaaagccatcataacgtcttccctgatgggaaaccttttcctcaccaccccggatggagaagatggaatttcatctacgtcttccacacacttggtcagtatttccagaaattgggacgatgttcagtgagagtttctgtgaacacagccaatgtgacacttgggcctcaactcatggaagtgactgtctacagaagacatggacgggcatatgttcccatcgcacaagtgaaagatgtgtacgtggtaacagatcagattcctgtgtttgtgactatgttccagaagaacgatcgaaattcatccgacgaaaccttcctcaaagatctccccattatgtttgatgtcctgattcatgatcctagccacttcctcaattattctaccattaactacaagtggagcttcggggataatactggcctgtttgtttccaccaatcatactgtgaatcacacgtatgtgctcaatggaaccttcagccttaacctcactgtgaaagctgcagcaccaggaccttgtccgccaccgccaccaccacccagaccttcaaaacccaccccttctttagcaactactctaaaatcttatgattcaaacaccccaggacctgctggtgacaaccccctggagctgagtaggattcctgatgaaaactgccagattaacagatatggccactttcaagccaccatcacaattgtagagggaatcttagaggttaacatcatccagatgacagacgtcctgatgccggtgccatggcctgaaagctccctaatagactttgtcgtgacctgccaagggagcattcccacggaggtctgtaccatcatttctgaccccacctgcgagatcacccagaacacagtctgcagccctgtggatgtggatgagatgtgtctgctgactgtgagacgaaccttcaatgggtctgggacgtactgtgtgaacctcaccctgggggatgacacaagcctggctctcacgagcaccctgatttctgttcct

SEQ ID NO: 3620 - DNA, 1887 bp, Homo Sapiens
ctgcagggcgggatgctgtacccccaggagagcccgtcgcgggagtgcaaggagctggacggcctctggagcttccgcgccgacttctctgacaaccgacgccggggcttcgaggagcagtggtaccggcggccgctgtgggagtcaggccccaccgtggacatgccagttccctccagcttcaatgacatcagccaggactggcgtctgcggcattttgtcggctgggtgtggtacgaacgggaggtgatcctgccggagcgatggacccaggacctgcgcacaagagtggtgctgaggattggcagtgcccattcctatgccatcgtgtgggtgaatggggtcgacacgctagagcatgaggggggctacctccccttcgaggccgacatcagcaacctggtccaggtggggcccctgccctcccggctccgaatcactatcgccatcaacaacacactcacccccaccaccctgccaccagggaccatccaatacctgactgacacctccaagtatcccaagggttactttgtccagaacacatattttgactttttcaactacgctggactgcagcggtctgtacttctgtacacgacacccaccacctacatcgatgacatcaccgtcaccaccagcgtggagcaagacagtgggctggtgaattaccagatctctgtcaagggcagtaacctgttcaagttggaagtgcgtcttttggatgcagaaaacaaagtcgtggcgaatgggactgggacccagggccaacttaaggtgccaggtgtcagcctctggtggccgtacctgatgcacgaacgccctgcctatctgtattcattggaggtgcagctgactgcacagacgtcactggggcctgtgtctgacttctacacactccctgtggggatccgcactgtggctgtcaccaagagccagttcctcatcaatgggaaacctttctatttccacggtgtcaacaagcatgaggatgcggacatccgagggaagggcttcgactggccgctgctggtgaaggacttcaacctgcttcgctggcttggtgccaacgctttccgtaccagccactacccctatgcagaggaagtgatgcagatgtgtgaccgctatgggattgtggtcatcgatgagtgtcccggcgtgggcctggcgctgccgcagttcttcaacaacgtttctctgcatcaccacatgcaggtgatggaagaagtggtgcgtagggacaagaaccaccccgcggtcgtgatgtggtctgtggccaacgagcctgcgtcccacctagaatctgctggctactacttgaagatggtgatcgctcacaccaaatccttggacccctcccggcctgtgacctttgtgagcaactctaactatgcagcagacaagggggctccgtatgtggatgtgatctgtttgaacagctactactcttggtatcacgactacgggcacctggagttgattcagctgcagctggccacccagtttgagaactggtataagaagtatcagaagcccattattcagagcgagtatggagcagaaacgattgcagggtttcaccaggatccacctctgatgttcactgaagagtaccagaaaagtctgctagagcagtaccatctgggtctggatcaaaaacgcagaaaatacgtggttggagagctcatttggaattttgccgatttcatgactgaacagtcaccgacgagagtgctggggaataaaaaggggatcttcactcggcagagacaaccaaaaagtgcagcgttccttttgcgagagagatactggaagattgccaatgaaaccaggtatccccactcagtagccaagtcacaatgtttggaaaacagcctgtttact

SEQ ID NO: 3621 - DNA, 1611 bp, Homo Sapiens
ttctccctgatgtctttattggaaagcctggacccagactggacccctgaccagtatgattacagctacgaggattataatcaggaagagaacaccagtagcacacttacccacgctgagaatcctgactggtactacactgaggaccaagctgatccatgccagcccaacccctgtgaacacggtggggactgcctcgtccatgggagcaccttcacatgcagctgcctggctcctttctctgggaataagtgtcagaaagtgcaaaatacgtgcaaggacaacccatgtggccggggccaatgtctcattacccagagtcctccctactaccgctgtgtctgtaaacacccttacacaggtcccagctgctcccaagtggttcctgtatgcaggccaaacccctgccagaatggggctacctgctcccggcataagcggagatccaagttcacctgtgcctgtcccgaccagttcaaggggaaattctgtgaaataggttctgatgactgctatgttggcgatggctactcttaccgagggaaaatgaataggacagtcaaccagcatgcgtgcctttactggaactcccacctcctcttgcaggagaattacaacatgtttatggaggatgctgaaacccatgggattggggaacacaatttctgcagaaacccagatgcggacgaaaagccctggtgctttattaaagttaccaatgacaaggtgaaatgggaatactgtgatgtctcagcctgctcagcccaggacgttgcctacccagaggaaagccccactgagccatcaaccaagcttccggggtttgactcctgtggaaagactgagatagcagagaggaagatcaagagaatctatggaggctttaagagcacggcgggcaagcacccatggcaggcgtccctccagtcctcgctgcctctgaccatctccatgccccagggccacttctgtggtggggcgctgatccacccctgctgggtgctcactgctgcccactgcaccgacataaaaaccagacatctaaaggtggtgctaggggaccaggacctgaagaaagaagaatttcatgagcagagctttagggtggagaagatattcaagtacagccactacaatgaaagagatgagattccccacaatgatattgcattgctcaagttaaagccagtggatggtcactgtgctctagaatccaaatacgtgaagactgtgtgcttgcctgatgggtcctttccctctgggagtgagtgccacatctctggctggggtgttacagaaacaggaaaagggtcccgccagctcctggatgccaaagtcaagctgattgccaacactttgtgcaactcccgccaactctatgaccacatgattgatgacagtatgatctgtgcaggaaatcttcagaaacctgggcaagacacctgccagggtgactctggaggccccctgacctgtgagaaggacggcacctactacgtctatgggatagtgagctggggcctggagtgtgggaagaggccaggggtctacacccaagttaccaaattcctgaattggatcaaagccaccatcaaaagtgaaagtggcttc

SEQ ID NO: 3622 - DNA, 75 bp, Homo Sapiens
gacacccacttccccatctgcattttctgctgcggctgctgtcatcgatcaaagtgtgggatgtgctgcaagacg

SEQ ID NO: 3623 - DNA, 1017 bp, Homo Sapiens
gatcatctttcagacaactatactctggatcatgacagagctattcacatccaagcagaaaatggcccccatctacttgtggaagcagagcaagccaaggtgttttcacacagaggtggcaatgttacactgccatgtaaattttatcgagaccctacagcatttggctcaggaatccataaaatccgaattaagtggaccaagctaacttcggattacctcaaggaagtggatgtttttgtttccatgggataccacaaaaaaacctatggaggctaccagggtagagtgtttctgaagggaggcagtgatagtgatgcttctctggtcatcacagacctcactctggaagattatgggagatataagtgtgaggtgattgaaggattagaagatgatactgttgtggtagcactggacttacaaggtgtggtattcccttactttccacgactggggcgctacaatctcaattttcacgaggcgcagcaggcgtgtctggaccaggatgctgtgatcgcctccttcgaccagctgtacgacgcctggcggggcgggctggactggtgcaatgccggctggctcagtgatggctctgtgcaatatcccatcacaaagcccagagagccctgtgggggccagaacacagtgcccggagtcaggaactacggattttgggataaagataaaagcagatatgatgttttctgttttacatccaatttcaatggccgtttttactatctgatccaccccaccaaactgacctatgatgtagcggtgcaagcttgtctcaatgatggtgctcagattgcaaaagtgggccagatatttgctgcctggaaaattctcggatatgaccgctgtgatgcgggctggttggcggatggcagcgtccgctaccccatctctaggccaagaaggcgctgcagtcctactgaggctgcagtgcgcttcgtgggtttcccagataaaaagcataagctgtatggtgtctactgcttcagagcatacaac

SEQ ID NO: 3624 - DNA, 942 bp, Homo Sapiens
gacccagcatcccacccgggcccccactacctcctgccccccatccacgaggtcattcactctcatcgtggggccacggccacgctgccctgcgtcctgggcaccacgcctcccagctacaaggtgcgctggagcaaggtggagcctggggagctccgggaaacgctgatcctcatcaccaacggactgcacgcccgggggtatgggcccctgggagggcgcgccaggatgcggagggggcatcgactagacgcctccctggtcatcgcgggcgtgcgcctggaggacgagggccggtaccgctgcgagctcatcaacggcatcgaggacgagagcgtggcgctgaccttgagcttggagggtgtggtgtttccgtaccaacccagccggggccggtaccagttcaattactacgaggcgaagcaggcgtgcgaggagcaggacggacgcctggccacctactcccagctctaccaggcttggaccgagggtctggactggtgtaacgcgggctggctgctcgagggctccgtgcgctaccctgtgctcaccgcacgcgccccgtgcggcggccgaggccggcccgggatccgcagctacggaccccgcgaccggatgcgcgaccgctacgacgccttctgcttcacctccgcgctggcgggccaagtgttcttcgtgcccgggcggctgacgctgtctgaagcccacgcggcgtgccggcgacgcggcgccgtggtggccaaggttgggcacctctacgccgcctggaagttttcggggctagaccagtgcgacggcggctggctggctgacggcagtgtgcgcttcccaatcaccacgccgaggccgcgctgcggggggctcccggatcccggagtgcgcagtttcggcttccccaggccccaacaggcagcctatgggacctactgctacgccgagaat

SEQ ID NO: 3625 - DNA, 1029 bp, Homo Sapiens
ctgcccttctacaacggcttctactactccaacagcgccaacgaccagaacctaggcaacggtcatggcaaagacctccttaatggagtgaagctggtggtggagacacccgaggagaccctgttcacctaccaaggggccagtgtgatcctgccctgccgctaccgctacgagccggccctggtctccccgcggcgtgtgcgtgtcaaatggtggaagctgtcggagaacggggccccagagaaggacgtgctggtggccatcgggctgaggcaccgctcctttggggactaccaaggccgcgtgcacctgcggcaggacaaagagcatgacgtctcgctggagatccaggatctgcggctggaggactatgggcgttaccgctgtgaggtcattgacgggctggaggatgaaagcggtctggtggagctggagctgcggggtgtggtctttccttaccagtcccccaacgggcgctaccagttcaacttccacgagggccagcaggtctgtgcagagcaggctgcggtggtggcctcctttgagcagctcttccgggcctgggaggagggcctggactggtgcaacgcgggctggctgcaggatgccacggtgcagtaccccatcatgttgccccggcagccctgcggtggcccgggcctggcacctggcgtgcgaagctacggcccccgccaccgccgcctgcaccgctatgatgtattctgcttcgctactgccctcaaggggcgggtgtactacctggagcaccctgagaagctgacgctgacagaggcaagggaggcctgccaggaagatgatgccacgatcgccaaggtgggacagctctttgccgcctggaagttccatggcctggaccgctgcgacgctggctggctggcagatggtagcgtccgctaccctgtggttcacccgcatcctaactgtgggcccccagagcctggggtccgaagctttggcttccccgacccgcagagccgcttgtacggtgtttactgctaccgccagcac

SEQ ID NO: 3626 - DNA, 1119 bp, Homo Sapiens
cagcgtggccggaagaaggtcgtgcacgtgctggagggtgagtcgggctcggtagtggtacagacagcgcctgggcaggtggtaagccaccgtggtggcaccatcgtcttgccctgccgctaccactatgaggcagccgcccacggtcacgacggcgtccggctcaagtggacaaaggtggtggacccgctggccttcaccgacgtcttcgtggcactaggcccccagcaccgggcattcggcagctaccgtgggcgggctgagctgcagggcgacgggcctggggatgcctccctggtcctccgcaacgtcacgctgcaagactacgggcgctatgagtgcgaagtcaccaatgagctggaagatgacgctggcatggtcaagctggacctggaaggcgtggtctttccctaccacccccgtggaggccgatacaagctgaccttcgcggaggcgcagcgcgcgtgcgccgagcaggacggcatcctggcatctgcagaacagctgcacgcggcctggcgcgacggcctggactggtgcaacgcgggctggttgcgcgacggctcagtgcaataccccgtgaaccggccccgggagccctgcggcggcctgggggggaccgggagtgcagggggcggcggtgatgccaacgggggcctgcgcaactacgggtatcgccataacgccgaggaacgctacgacgccttctgcttcacgtccaacctgccggggcgcgtgttcttcctgaagccgctgcgacctgtacccttctccggagctgcgcgcgcgtgtgctgcgcgtggcgcggccgtggccaaggtggggcagctgttcgccgcgtggaagctgcagctgctagaccgctgcaccgcgggttggctggccgatggcagtgcgcgctaccccatcgtgaacccgcgagcgcgctgcggaggccgcaggcctggtgtgcgcagcctcggcttcccggacgccacccgacggctcttcggcgtctactgctaccgcgctccaggagcaccggacccggcacctggcggctggggctggggctgggcgggcggcggcggctgggcagggggcgcgcgcgatcctgctgcctggacccctctgcacgtc

SEQ ID NO: 3627 - DNA, 825 bp, Homo Sapiens
tctgtaaaggttggtggagaggcaggtccatctgtcacactaccctgccactacagtggagctgtcacatccatgtgctggaatagaggctcatgttctctattcacatgccaaaatggcattgtctggaccaatggaacccacgtcacctatcggaaggacacacgctataagctattgggggacctttcaagaagggatgtctctttgaccatagaaaatacagctgtgtctgacagtggcgtatattgttgccgtgttgagcaccgtgggtggttcaatgacatgaaaatcaccgtatcattggagattgtgccacccaaggtcacgactactccaattgtcacaactgttccaaccgtcacgactgttcgaacgagcaccactgttccaacgacaacgactgttccaatgacgactgttccaacgacaactgttccaacaacaatgagcattccaacgacaacgactgttctgacgacaatgactgtttcaacgacaacgagcgttccaacgacaacgagcattccaacaacaacaagtgttccagtgacaacaactgtctctacctttgttcctccaatgcctttgcccaggcagaaccatgaaccagtagccacttcaccatcttcacctcagccagcagaaacccaccctacgacactgcagggagcaataaggagagaacccaccagctcaccattgtactcttacacaacagatgggaatgacaccgtgacagagtcttcagatggcctttggaataacaatcaaactcaactgttcctagaacatagtctactgacggccaataccactaaagga

SEQ ID NO: 3628 - DNA, 543 bp, Homo Sapiens
tcagaagtggaatacagagcggaggtcggtcagaatgcctatctgccctgcttctacaccccagccgccccagggaacctcgtgcccgtctgctggggcaaaggagcctgtcctgtgtttgaatgtggcaacgtggtgctcaggactgatgaaagggatgtgaattattggacatccagatactggctaaatggggatttccgcaaaggagatgtgtccctgaccatagagaatgtgactctagcagacagtgggatctactgctgccggatccaaatcccaggcataatgaatgatgaaaaatttaacctgaagttggtcatcaaaccagccaaggtcacccctgcaccgactctgcagagagacttcactgcagcctttccaaggatgcttaccaccaggggacatggcccagcagagacacagacactggggagcctccctgatataaatctaacacaaatatccacattggccaatgagttacgggactctagattggccaatgacttacgggactctggagcaaccatcagaataggc

SEQ ID NO: 3629 - DNA, 258 bp, Homo Sapiens
gacttgcaagaggcagatctggaccttttgagagtcactttatcctccaagccacaagcactggccacaccaaacaaggaggagcacgggaaaagaaagaagaaaggcaaggggctagggaagaagagggacccatgtcttcggaaatacaaggacttctgcatccatggagaatgcaaatatgtgaaggagctccgggctccctcctgcatctgccacccgggttaccatggagagaggtgtcatgggctgagcctc

SEQ ID NO: 3630 - DNA, 621 bp, Homo Sapiens
gtgaacatcaccagccccgtgcgcctgatccatggcaccgtggggaagtcggctctgctttctgtgcagtacagcagtaccagcagcgacaggcctgtagtgaagtggcagctgaagcgggacaagccagtgaccgtggtgcagtccattggcacagaggtcatcggcaccctgcggcctgactatcgagaccgtatccgactctttgaaaatggctccctgcttctcagcgacctgcagctggccgatgagggcacctatgaggtcgagatctccatcaccgacgacaccttcactggggagaagaccatcaaccttactgtagatgtgcccatttcgaggccacaggtgttggtggcttcaaccactgtgctggagctcagcgaggccttcaccttgaactgctcacatgagaatggcaccaagcccagctacacctggctgaaggatggcaagcccctcctcaatgactcgagaatgctcctgtcccccgaccaaaaggtgctcaccatcacccgcgtgctcatggaggatgacgacctgtacagctgcatggtggagaaccccatcagccagggccgcagcctgcctgtcaagatcaccgtatacagaagaagctcc

SEQ ID NO: 3631 - DNA, 960 bp, Homo Sapiens
ctgaaggtgacagtgccatcacacactgtccatggcgtcagaggtcaggccctctacctacccgtccactatggcttccacactccagcatcagacatccagatcatatggctatttgagagaccccacacaatgcccaaatacttactgggctctgtgaataagtctgtggttcctgacttggaataccaacacaagttcaccatgatgccacccaatgcatctctgcttatcaacccactgcagttccctgatgaaggcaattacatcgtgaaggtcaacattcagggaaatggaactctatctgccagtcagaagatacaagtcacggttgatgatcctgtcacaaagccagtggtgcagattcatcctccctctggggctgtggagtatgtggggaacatgaccctgacatgccatgtggaagggggcactcggctagcttaccaatggctaaaaaatgggagacctgtccacaccagctccacctactccttttctccccaaaacaatacccttcatattgctccagtaaccaaggaagacattgggaattacagctgcctggtgaggaaccctgtcagtgaaatggaaagtgatatcattatgcccatcatatattatggaccttatggacttcaagtgaattctgataaagggctaaaagtaggggaagtgtttactgttgaccttggagaggccatcctatttgattgttctgctgattctcatccccccaacacctactcctggattaggaggactgacaatactacatatatcattaagcatgggcctcgcttagaagttgcatctgagaaagtagcccagaagacaatggactatgtgtgctgtgcttacaacaacataaccggcaggcaagatgaaactcatttcacagttatcatcacttccgtaggactggagaagcttgcacagaaaggaaaatcattgtcacct

SEQ ID NO: 3632 - DNA, 852 bp, Homo Sapiens
cgcttgctgcgttcacactctctgcactacctcttcatgggtgcctcagagcaggaccttggtctttccttgtttgaagctttgggctacgtggatgaccagctgttcgtgttctatgatcatgagagtcgccgtgtggagccccgaactccatgggtttccagtagaatttcaagccagatgtggctgcagctgagtcagagtctgaaagggtgggatcacatgttcactgttgacttctggactattatggaaaatcacaaccacagcaaggagtcccacaccctgcaggtcatcctgggctgtgaaatgcaagaagacaacagtaccgagggctactggaagtacgggtatgatgggcaggaccaccttgaattctgccctgacacactggattggagagcagcagaacccagggcctggcccaccaagctggagtgggaaaggcacaagattcgggccaggcagaacagggcctacctggagagggactgccctgcacagctgcagcagttgctggagctggggagaggtgttttggaccaacaagtgcctcctttggtgaaggtgacacatcatgtgacctcttcagtgaccactctacggtgtcgggccttgaactactacccccagaacatcaccatgaagtggctgaaggataagcagccaatggatgccaaggagttcgaacctaaagacgtattgcccaatggggatgggacctaccagggctggataaccttggctgtaccccctggggaagagcagagatatacgtgccaggtggagcacccaggcctggatcagcccctcattgtgatctgggagccctcaccgtctggcaccctagtc

SEQ ID NO: 3633 - DNA, 2091 bp, Homo Sapiens
caaaggaaaagaagaaatacaattcatgaattcaaaaaatcagcaaagactaccctaatcaaaatagatccagcactgaagataaaaaccaaaaaagtgaatactgcagaccaatgtgctaatagatgtactaggaataaaggacttccattcacttgcaaggcttttgtttttgataaagcaagaaaacaatgcctctggttccccttcaatagcatgtcaagtggagtgaaaaaagaatttggccatgaatttgacctctatgaaaacaaagactacattagaaactgcatcattggtaaaggacgcagctacaagggaacagtatctatcactaagagtggcatcaaatgtcagccctggagttccatgataccacacgaacacagctttttgccttcgagctatcggggtaaagacctacaggaaaactactgtcgaaatcctcgaggggaagaagggggaccctggtgtttcacaagcaatccagaggtacgctacgaagtctgtgacattcctcagtgttcagaagttgaatgcatgacctgcaatggggagagttatcgaggtctcatggatcatacagaatcaggcaagatttgtcagcgctgggatcatcagacaccacaccggcacaaattcttgcctgaaagatatcccgacaagggctttgatgataattattgccgcaatcccgatggccagccgaggccatggtgctatactcttgaccctcacacccgctgggagtactgtgcaattaaaacatgcgctgacaatactatgaatgacactgatgttcctttggaaacaactgaatgcatccaaggtcaaggagaaggctacaggggcactgtcaataccatttggaatggaattccatgtcagcgttgggattctcagtatcctcacgagcatgacatgactcctgaaaatttcaagtgcaaggacctacgagaaaattactgccgaaatccagatgggtctgaatcaccctggtgttttaccactgatccaaacatccgagttggctactgctcccaaattccaaactgtgatatgtcacatggacaagattgttatcgtgggaatggcaaaaattatatgggcaacttatcccaaacaagatctggactaacatgttcaatgtgggacaagaacatggaagacttacatcgtcatatcttctgggaaccagatgcaagtaagctgaatgagaattactgccgaaatccagatgatgatgctcatggaccctggtgctacacgggaaatccactcattccttgggattattgccctatttctcgttgtgaaggtgataccacacctacaatagtcaatttagaccatcccgtaatatcttgtgccaaaacgaaacaattgcgagttgtaaatgggattccaacacgaacaaacataggatggatggttagtttgagatacagaaataaacatatctgcggaggatcattgataaaggagagttgggttcttactgcacgacagtgtttcccttctcgagacttgaaagattatgaagcttggcttggaattcatgatgtccacggaagaggagatgagaaatgcaaacaggttctcaatgtttcccagctggtatatggccctgaaggatcagatctggttttaatgaagcttgccaggcctgctgtcctggatgattttgttagtacgattgatttacctaattatggatgcacaattcctgaaaagaccagttgcagtgtttatggctggggctacactggattgatcaactatgatggcctattacgagtggcacatctctatataatgggaaatgagaaatgcagccagcatcatcgagggaaggtgactctgaatgagtctgaaatatgtgctggggctgaaaagattggatcaggaccatgtgagggggattatggtggcccacttgtttgtgagcaacataaaatgagaatggttcttggtgtcattgttcctggtcgtggatgtgccattccaaatcgtcctggtatttttgtccgagtagcatattatgcaaaatggatacacaaaattattttaacatataaggtaccacagtca

SEQ ID NO: 3634 - DNA, 849 bp, Homo Sapiens
gtccaactgtcaccggatctcctggcgaccctgcctgagccagcctccccggggcgccaggcctgcggcaggaggcacaagaagaggacgttcctgcggccacgtatcatcggcggctcctcctcgctgcccggctcgcacccctggctggccgccatctacatcggggacagcttctgcgccgggagcctggtccacacctgctgggtggtgtcggccgcccactgcttctcccacagcccccccagggacagcgtctccgtggtgctgggccagcacttcttcaaccgcacgacggacgtgacgcagaccttcggcatcgagaagtacatcccgtacaccctgtactcggtgttcaaccccagcgaccacgacctcgtcctgatccggctgaagaagaaaggggaccgctgtgccacacgctcgcagttcgtgcagcccatctgcctgcccgagcccggcagcaccttccccgcaggacacaagtgccagattgcgggctggggccacttggatgagaacgtgagcggctactccagctccctgcgggaggccctggtccccctggtcgccgaccacaagtgcagcagccctgaggtctacggcgccgacatcagccccaacatgctctgtgccggctacttcgactgcaagtccgacgcctgccagggggactcaggggggcccctggcctgcgagaagaacggcgtggcttacctctacggcatcatcagctggggtgacggctgcgggcggctccacaagccgggggtctacacccgcgtggccaactatgtggactggatcaacgaccggatacggcctcccaggcggcttgtggctccctcc

SEQ ID NO: 3635 - DNA, 2049 bp, Homo Sapiens
ttctttgaaggagatgctaagtttggggaaagaaacgaagggagcggagcaaggaggagaaggtgcctgaatgggaaccccccgaagcgcctgaaaaggagagacaggaggatgatgtcccagctggagctgctgagtgggggagagatgctgtgcggtggcttctaccctcggctgtcctgctgcctgcggagtgacagcccggggctagggcgcctggagaataagatattttctgttaccaacaacacagaatgtgggaagttactggaggaaatcaaatgtgcactttgctctccacattctcaaagcctgttccactcacctgagagagaagtcttggaaagagacctagtacttcctctgctctgcaaagactattgcaaagaattcttttacacttgccgaggccatattccaggtttccttcaaacaactgcggatgagttttgcttttactatgcaagaaaagatggtgggttgtgctttccagattttccaagaaaacaagtcagaggaccagcatctaactacttggaccagatggaagaatatgacaaagtggaagagatcagcagaaagcacaaacacaactgcttctgtattcaggaggttgtgagtgggctgcggcagcccgttggtgccctgcatagtggggatggctcgcaacgtctcttcattctggaaaaagaaggttatgtgaagatacttacccctgaaggagaaattttcaaggagccttatttggacattcacaaacttgttcaaagtggaataaagggaggagatgaaagaggactgctaagcctcgcattccatcccaattacaagaaaaatggaaagttgtatgtgtcctataccaccaaccaagaacggtgggctatcgggcctcatgaccacattcttagggttgtggaatacacagtatccagaaaaaatccacaccaagttgatttgagaacagccagagtctttcttgaagttgcagaactccacagaaagcatctgggaggacaactgctctttggccctgacggctttttgtacatcattcttggtgatgggatgattacactggatgatatggaagaaatggatgggttaagtgatttcacaggctcagtgctacggctggatgtggacacagacatgtgcaacgtgccttattccataccaaggagcaacccacacttcaacagcaccaaccagccccccgaagtgtttgctcatgggctccacgatccaggcagatgtgctgtggatagacatcccactgatataaacatcaatttaacgatactgtgttcagactccaatggaaaaaacagatcatcagccagaattctacagataataaaggggaaagattatgaaagtgagccatcacttttagaattcaagccattcagtaatggtcctttggttggtggatttgtataccggggctgccagtcagaaagattgtatggaagctacgtgtttggagatcgtaatgggaatttcctaactctccagcaaagtcctgtgacaaagcagtggcaagaaaaaccactctgtctcggcactagtgggtcctgtagaggctacttttccggtcacatcttgggatttggagaagatgaactaggtgaagtttacattttatcaagcagtaaaagtatgacccagactcacaatggaaaactctacaaaattgtagatcccaaaagacctttaatgcctgaggaatgcagagccacggtacaacctgcacagacactgacttcagagtgctccaggctctgtcgaaacggctactgcacccccacgggaaagtgctgctgcagtccaggctgggagggggacttctgcagaactgcaaaatgtgagccagcatgtcgtcatggaggtgtctgtgttagaccgaacaagtgcctctgtaaaaaaggatatcttggtcctcaatgtgaacaagtggacagaaacatccgcagagtgaccagggcaggtattcttgatcagatcattgacatgacatcttacttgctggatctaacaagttacattgta

SEQ ID NO: 3636 - DNA, 966 bp, Homo Sapiens
atattccctttggctttcttcatttatgttcctatgaatgaacaaatcgtcattggaagacttgatgaagatataattctcccttcttcatttgagaggggatccgaagtcgtaatacactggaagtatcaagatagctataaggttcatagttactacaaaggcagtgaccatttggaaagccaagatcccagatatgcaaacaggacatcccttttctataatgagattcaaaatgggaatgcgtcactatttttcagaagagtaagccttctggacgaaggaatttacacctgctatgtaggaacagcaattcaagtgattacaaacaaagtggtgctaaaggtgggagtttttctcacacccgtgatgaagtatgaaaagaggaacacaaacagcttcttaatatgcagcgtgttaagtgtttatcctcgtccaattatcacgtggaaaatggacaacacacctatctctgaaaacaacatggaagaaacagggtctttggattctttttctattaacagcccactgaatattacaggatcaaattcatcttatgaatgtacaattgaaaattcactgctgaagcaaacatggacagggcgctggacgatgaaagatggccttcataaaatgcaaagtgaacacgtttcactctcatgtcaacctgtaaatgattatttttcaccaaaccaagacttcaaagttacttggtccagaatgaaaagtgggactttctctgtcctggcttactatctgagctcctcacaaaatacaattatcaatgaatcccgattctcatggaacaaagagctgataaaccagagtgacttctctatgaatttgatggatcttaatctttcagacagtggggaatatttatgcaatatttcttcggatgaatatactttacttaccatccacacagtgcatgtagaaccgagccaagaaacagcttcccataac

SEQ ID NO: 3637 - DNA, 852 bp, Homo Sapiens
cgtagtcattccatgagatatttctataccaccatgagtaggcccggcgctggcgagcctcgttttataagcgttggttatgtagatgatacacaattcgtaaggtttgacagtgatgacgcaagcccgcgtgaggaaccgcgtgcgccctggatggaaagggagggccctaaatattgggataggaatacgcaaatatgcaaagctcaagcgcaaactgagcgtgaaaatcttcgtatcgcattgcgttactataatcagtctgaggggggttcccatacgatgcaggtaatgtatggctgtgacgtgggcccggatgggcccttccttaggggatatgagcaacatgcctatgatggtaaggactatattgctttaaatgaagatttgagatcatggacagccgcagatatggctgctcaaattaccaaaaggaagtgggaggcggccagaagggcagaacaacgtagggtctacctagaaggcgaatttgtcgaatggttgcgtcgttacctagaaaatggcaaagaaactctgcaaagagctgatcccccaaagacgcacatgacgcaccaccccatcagcgaccacgaagccactctacgttgctgggcgctaggtttttaccccgccgaaatcacattgacttggcagagggacggagaagaccaaacgcaggacaccgaattggtcgagaccaggcccgcaggagatggcacattccagaaatgggctgccgttgtcgtaccgtccggtgaggaacagagatatacctgtcatgtacagcacgagggactgcccgaacccctgaccttgagatgggagccgtcttcacaaccaaccgtaccaata

SEQ ID NO: 3638 - DNA, 855 bp, Homo Sapiens
ggctcccactccatgaggtatttctacaccgccatgtcccggcccggccgcggggagccccgcttcatctcagtgggctacgtggacgacacgcagttcgtgaggttcgacagcgacgccgcgagtccgagagaggagccgcgggcgccgtggatagagcaggaggggccggagtattgggaccggaacacacagatctgcaagaccaacacacagacttaccgagagagcctgcggaacctgcgcggctactacaaccagagcgaggccgggtctcacaccctccagaggatgtacggctgcgacgtggggccggacgggcgcctcctccgcgggcatgaccagtacgcctacgacggcaaggattacatcgccctgaacgaggacctgagctcctggaccgcggcggacacggcggctcagatcacccagcgcaagtgggaggcggcccgtgaggcggagcagctgagagcctacctggagggcctgtgcgtggagtggctccgcagatacctggagaacgggaaggagacgctgcagcgcgcggaccccccaaagacacatgtgacccaccaccccatctctgaccatgaggccaccctgaggtgctgggccctgggcttctaccctgcggagatcacactgacctggcagcgggatggcgaggaccaaactcaggacaccgagcttgtggagaccagaccagcaggagatagaaccttccagaagtgggcagctgtggtggtgccttctggagaagagcagagatacacatgccatgtacagcatgaggggctgccgaagcccctcaccctgagatgggagccatcttcccagtccaccatccccatcgtg

SEQ ID NO: 3639 - DNA, 852 bp, Homo Sapiens
ggctcccactccatgaggtatttctacacctccgtgtcccggcccggccgcggggagccccgcttcatcgccgtgggctacgtggacgacacgcagttcgtgcggttcgacagcgacgccgcgagccagaggatggagccgcgggcgccgtggatagagcaggaggggccggagtattgggaccggaacacacggaatgtgaaggcccactcacagactgaccgagagagcctgcggatcgcgctccgctactacaaccagagcgaggacggttctcacaccatccagaggatgtatggctgcgacgtggggccggacgggcgcttcctccgcgggtaccagcaggacgcttacgacggcaaggattacatcgccctgaacgaggacctgcgctcttggaccgcggcggacatggcggctcagatcacccagcgcaagtgggagacggcccatgaggcggagcagtggagagcctacctggagggccggtgcgtggagtggctccgcagatacctggagaacgggaaggagacgctgcagcgcacggacgcccccaagacgcatatgactcaccacgctgtctctgaccatgaggccaccctgaggtgctgggccctgagcttctaccctgcggagatcacactgacctggcagcgggatggggaggaccagacccaggacacggagctcgtggagaccaggcctgcaggggatgggaccttccagaagtgggcgtctgtggtggtgccttctggacaggagcagagatacacctgccatgtgcagcatgagggtctgcccaagcccctcaccctgagatgggagccgtcttcccagcccaccatccccatc

SEQ ID NO: 3640 - DNA, 852 bp, Homo Sapiens
gggtcacatagtatgaggtacttttttacaagtgtcagccgtcctggaaggggggagccgagatttatagcggtaggctacgttgacgatacgcaattcgtgagatttgattcagatgctgcgtcacagagaatggagccgagggcaccctggattgaacaggaaggcccggaatattgggatggagaaactaggaaagtaaaagcgcattctcaaacgcacagagtggacttagggactctgagggggtattataaccaatctgaggccggtagccatacagtacaaagaatgtacgggtgtgacgtagggtccgactggagattcttgcgtggctaccaccagtatgcatacgacgggaaagattacattgcattaaaggaggatcttcgttcctggacggctgctgacatggcggcccaaaccaccaagcacaaatgggaagcagcccatgtcgcagagcagctaagagcatatttagagggcacgtgcgtcgaatggcttcgtaggtatttagagaatggaaaggagactctacagagaaccgatgcgcccaagactcacatgacacatcatgccgtgtctgaccacgaggctacactaaggtgttgggcactttccttttatccggcggaaatcaccttgacgtggcaaagagacggtgaagatcaaacacaggacactgaacttgtagaaacgagacctgcgggtgatggaacgttccagaaatgggccgctgtagttgtaccatcaggccaagagcaaagatatacttgtcacgtgcagcacgagggacttcctaagccattaaccttgaggtgggagccttctagccagcctactatccctatt

SEQ ID NO: 3641 - DNA, 852 bp, Homo Sapiens
ggtagccacagtatgagatatttttatacggcgatgtcaagacctggaaggggggaaccaagattcatcgcagtaggatacgtggatgacacccaatttgtaagatttgattcagacgcggccagtcccagaactgaacccagggcgccctggattgagcaagaaggaccagaatattgggataggaatacccaaatcttcaagactaatacgcagacttatagggagtctctgaggaacctgaggggttattataaccaaagcgaagcgggatcacatataatacaaagaatgtacggatgtgatctaggcccggatgggaggctgcttagaggtcacgaccagagcgcctacgatggcaaggattatattgcgcttaacgaggacttatcaagctggacggcagcggacacagccgctcagataacgcagaggaaatgggaggcggccagggtcgctgaacagttgagggcatacttggagggtctgtgcgtcgaatggctgagacgttacttagaaaacgggaaagaaacgcttcagagagctgacccaccgaaaacgcacgttacacatcaccctgtaagtgaccacgaagctacattgaggtgctgggccttaggtttttatccggcggagataactctgacctggcagcgtgatggagaagaccagacccaagacaccgaattagtcgagaccaggcccgccggagacaggaccttccagaaatgggcagcagttgttgtaccatcaggggaggagcagcgttacacgtgccatgtccaacatgaaggattgccaaaacccttaactcttagatgggaaccgagttcccaatctactatcccaatt

SEQ ID NO: 3642 - DNA, 852 bp, Homo Sapiens
ggctcccactccatgaggtatttcttcacatccgtgtcccggcccggccgcggggagccccgcttcatcgccgtgggctacgtggacgacacgcagttcgtgcggttcgacagcgacgccgcgagccagaagatggagccgcgggcgccgtggatagagcaggaggggccggagtattgggaccaggagacacggaatatgaaggcccactcacagactgaccgagcgaacctggggaccctgcgcggctactacaaccagagcgaggacggttctcacaccatccagataatgtatggctgcgacgtggggccggacgggcgcttcctccgcgggtaccggcaggacgcctacgacggcaaggattacatcgccctgaacgaggacctgcgctcttggaccgcggcggacatggcagctcagatcaccaagcgcaagtgggaggcggtccatgcggcggagcagcggagagtctacctggagggccggtgcgtggacgggctccgcagatacctggagaacgggaaggagacgctgcagcgcacggacccccccaagacacatatgacccaccaccccatctctgaccatgaggccaccctgaggtgctgggccctgggcttctaccctgcggagatcacactgacctggcagcgggatggggaggaccagacccaggacacggagctcgtggagaccaggcctgcaggggatggaaccttccagaagtgggcggctgtggtggtgccttctggagaggagcagagatacacctgccatgtgcagcatgagggtctgcccaagcccctcaccctgagatgggagctgtcttcccagcccaccatccccatc

SEQ ID NO: 3643 - DNA, 855 bp, Homo Sapiens; identical to SEQ ID NO: 3638

SEQ ID NO: 3644 - DNA, 852 bp, Homo Sapiens
tgctcccactccatgaggtatttctacaccgccgtgtcccggcccggccgcggagagccccgcttcatcgcagtgggctacgtggacgacacgcagttcgtgcggttcgacagcgacgccgcgagtccaagaggggagccgcgggcgccgtgggtggagcaggaggggccggagtattgggaccgggagacacagaagtacaagcgccaggcacagactgaccgagtgagcctgcggaacctgcgcggctactacaaccagagcgaggccgggtctcacaccctccagtggatgtatggctgcgacctggggcccgacgggcgcctcctccgcgggtatgaccagtccgcctacgacggcaaggattacatcgccctgaacgaggacctgcgctcctggaccgccgcggacacggcggctcagatcacccagcgcaagtgggaggcggcccgtgcggcggagcagcagagagcctacctggagggcacgtgcgtggagtggctccgcagatacctggagaacgggaaggagacgctgcagcgcgcggaacacccaaagacacacgtgacccaccatctcgtctctgaccatgaggccaccctgaggtgctgggccctgggcttctaccctgcggagatcacactgacctggcagcgggatggcgaggaccaaactcaggacaccgagcttgtggagaccaggccagcaggagatggaaccttccagaagtgggcagctgtggtggtgccttctggagaagagcagagatacacgtgccatgtgcagcacgaggggctgccggagcccctcaccctgagatgggagccatcttcccagcccaccatccccatc

SEQ ID NO: 3645 - DNA, 621 bp, Homo Sapiens
gtccctgaagctcctactccaatgtggccagatgacctgcaaaaccacacattcctgcacacagtgtactgccaggatgggagtcccagtgtgggactctctgaggcctacgacgaggaccagcttttcttcttcgacttttcccagaacactcgggtgcctcgcctgcccgaatttgctgactgggctcaggaacagggagatgctcctgccattttatttgacaaagagttctgcgagtggatgatccagcaaatagggccaaaacttgatgggaaaatcccggtgtccagagggtttcctatcgctgaagtgttcacgctgaagcccctggagtttggcaagcccaacactttggtctgttttgtcagtaatctcttcccacccatgctgacagtgaactggcagcatcattccgtccctgtggaaggatttgggcctacttttgtctcagctgtcgatggactcagcttccaggccttttcttacttaaacttcacaccagaaccttctgacattttctcctgcattgtgactcacgaaattgaccgctacacagcaattgcctattgggtaccccggaacgcactgccctcagatctgctggagaatgtgctgtgt

SEQ ID NO: 3646 - DNA, 600 bp, Homo Sapiens
ggtggcttcgtggcccatgtggaaagcacctgtctgttggatgatgctgggactccaaaggatttcacatactgcatctccttcaacaaggatctgctgacctgctgggatccagaggagaataagatggccccttgcgaatttggggtgctgaatagcttggcgaatgtcctctcacagcacctcaaccaaaaagacaccctgatgcagcgcttgcgcaatgggcttcagaattgtgccacacacacccagcccttctggggatcactgaccaacaggacacggccaccatctgtgcaagtagccaaaaccactccttttaacacgagggagcctgtgatgctggcctgctatgtgtggggcttctatccagcagaagtgactatcacgtggaggaagaacgggaagcttgtcatgcctcacagcagtgcgcacaagactgcccagcccaatggagactggacataccagaccctctcccatttagccttaaccccctcttacggggacacttacacctgtgtggtagagcacattggggctcctgagcccatccttcgggactggacacctgggctgtcccccatgcagaccctgaag

SEQ ID NO: 3647 - DNA, 576 bp, Homo Sapiens
accaaggctgaccacatgggctcctacggacccgccttctaccagtcttacggcgcctcgggccagttcacccatgaatttgatgaggaacagctgttctctgtggacctgaagaaaagcgaggccgtgtggcgtctgcctgagtttggcgactttgcccgctttgacccgcagggcgggctggccggcatcgccgcaatcaaagcccatctggacatcctggtggagcgctccaaccgcagcagagccatcaacgtgcctccacgggtgaccgtgctccccaaatctcgggtggagctgggccagcccaacatcctcatctgcatcgtggacaacatcttcccccctgtgatcaatatcacctggctgcgcaacggccaaactgtcactgagggagtggcccagaccagcttctattcccagcctgaccatttgttccgcaagttccactacctgcccttcgtgccctcagccgaggacgtctatgactgccaggtggagcactggggcctggatgcgccactcctcaggcattgggagctccaggtgcctattccaccaccagatgccatggag

SEQ ID NO: 3648 - DNA, 594 bp, Homo Sapiens
acagactctccagaagattttgtgattcaggcaaaggctgactgttacttcaccaacgggacagaaaaggtgcagtttgtggtcagattcatctttaacttggaggagtatgtacgtttcgacagtgatgtggggatgtttgtggcattgaccaagctggggcagccagatgctgagcagtggaacagccggctggatctcttggagaggagcagacaggccgtggatggggtctgtagacacaactacaggctgggcgcacccttcactgtggggagaaaagtgcaaccagaggtgacagtgtacccagagaggaccccactcctgcaccagcataatctgctgcactgctctgtgacaggcttctatccaggggatatcaagatcaagtggttcctgaatgggcaggaggagagagctggggtcatgtccactggccctatcaggaatggagactggacctttcagactgtggtgatgctagaaatgactcctgaacttggacatgtctacacctgccttgtcgatcactccagcctgctgagccctgtttctgtggagtggagagctcagtctgaatattcttggagaaag

SEQ ID NO: 3649 - DNA, 582 bp, Homo Sapiens
gctggggccatcaaggcggaccatgtgtcaacttatgccgcgtttgtacagacccatagaccaacaggggagtttatgtttgaatttgatgaagatgagcagttctatgtggatctggataaaaaggagaccgtctggcatctggaggagtttggccgagccttttcctttgaggctcagggcgggctggctaacattgctatattgaacaacaacttgaataccttgatccagcgttccaaccacactcaggccgccaatgatccccctgaggtgaccgtgtttcccaaggagcctgtggagctgggccagcccaacaccctcatctgccacattgacaggttcttcccaccagtgctcaacgtcacatggctgtgcaatggggagccagtcactgagggtgtcgctgagagcctcttcctgcccagaacagattacagcttccacaagttccattacctgacctttgtgccctcagcagaggacgtctatgactgcagggtggagcactggggcttggaccagccgctcctcaagcactgggaggcccaagagccaatccagatgcctgagacaacggag

SEQ ID NO: 3650 - DNA, 588 bp, Homo Sapiens
agggccactccagagaattaccttttccagggacggcaggaatgctacgcgtttaatgggacacagcgcttcctggagagatacatctacaaccgggaggagttcgtgcgcttcgacagcgacgtgggggagttccgggcggtgacggagctggggcggcctgctgcggagtactggaacagccagaaggacatcctggaggagaagcgggcagtgccggacaggatgtgcagacacaactacgagctgggcgggcccatgaccctgcagcgccgagtccagcctagggtgaatgtttccccctccaagaaggggcccttgcagcaccacaacctgcttgtctgccacgtgacggatttctacccaggcagcattcaagtccgatggttcctgaatggacaggaggaaacagctggggtcgtgtccaccaacctgatccgtaatggagactggaccttccagatcctggtgatgctggaaatgaccccccagcagggagatgtctacacctgccaagtggagcacaccagcctggatagtcctgtcaccgtggagtggaaggcacagtctgattctgcccggagtaag

SEQ ID NO: 3651 - DNA, 579 bp, Homo Sapiens
gaagacattgtggctgaccacgtcgcctcttatggtgtaaacttgtaccagtcttacggtccctctggccagtacacccatgaatttgatggagatgagcagttctacgtggacctggggaggaaggagactgtctggtgtttgcctgttctcagacaatttagatttgacccgcaatttgcactgacaaacatcgctgtcctaaaacataacttgaacatcctgattaaacgctccaactctactgctgctaccaatgaggttcctgaggtcacagtgttttccaagtctcccgtgacgctgggtcagcccaacaccctcatctgtcttgtggacaacatctttcctcctgtggtcaacatcacatggctgagcaatgggcactcagtcacagaaggtgtttctgagaccagcttcctctccaagagtgatcattccttcttcaagatcagttacctcaccttcctcccttctgctgatgagatttatgactgcaaggtggagcactggggcctggacgagcctcttctgaaacactgggagcctgagattccagcccctatgtcagagctcacagag

SEQ ID NO: 3652 - DNA, 594 bp, Homo Sapiens
agagactctcccgaggatttcgtgtaccagtttaagggcatgtgctacttcaccaacgggacggagcgcgtgcgtcttgtgaccagatacatctataaccgagaggagtacgcacgcttcgacagcgacgtgggggtgtatcgggcggtgacgccgctggggccgcctgccgccgagtactggaacagccagaaggaagtcctggagaggacccgggcggagttggacacggtgtgcagacacaactaccagttggagctccgcacgaccttgcagcggcgagtggagcccacagtgaccatctccccatccaggacagaggccctcaaccaccacaacctgctggtctgctcagtgacagatttctatccagcccagatcaaagtccggtggtttcggaatgaccaggaggagacaactggcgttgtgtccaccccccttattaggaacggtgactggaccttccagatcctggtgatgctggaaatgactccccagcgtggagacgtctacacctgccacgtggagcaccccagcctccagaaccccatcatcgtggagtggcgggctcagtctgaatctgcccagagcaag

SEQ ID NO: 3653 - DNA, 573 bp, Homo Sapiens
atcaaagaagaacatgtgatcatccaggccgagttctatctgaatcctgaccaatcaggcgagtttatgtttgactttgatggtgatgagattttccatgtggatatggcaaagaaggagacggtctggcggcttgaagaatttggacgatttgccagctttgaggctcaaggtgcattggccaacatagctgtggacaaagccaacctggaaatcatgacaaagcgctccaactatactccgatcaccaatgtacctccagaggtaactgtgctcacgaacagccctgtggaactgagagagcccaacgtcctcatctgtttcatagacaagttcaccccaccagtggtcaatgtcacgtggcttcgaaatggaaaacctgtcaccacaggagtgtcagagacagtcttcctgcccagggaagaccaccttttccgcaagttccactatctccccttcctgccctcaactgaggacgtttacgactgcagggtggagcactggggcttggatgagcctcttctcaagcactgggagtttgatgctccaagccctctcccagagactacagag

SEQ ID NO: 3654 - DNA, 594 bp, Homo Sapiens
ggggacacccgaccacgtttcctgtggcagcctaagagggagtgtcatttcttcaatgggacggagcgggtgcggttcctggacagatacttctataaccaggaggagtccgtgcgcttcgacagcgacgtgggggagttccgggcggtgacggagctggggcggcctgacgctgagtactggaacagccagaaggacatcctggagcaggcgcgggccgcggtggacacctactgcagacacaactacggggttggtgagagcttcgcagtgcagcggcgagtccaacctaaggtgactgtatatccttcaaagacccagcccctgcagcaccacaacctcctggtctgctctgtgagtggtttctatccaggcagcattgaagtcaggtggttcctgaacggccaggaagagaaggctgggatggtgtccacaggcctgatccagaatggagactggaccttccagaccctggtgatgctggaaacagttcctcgaagtggagaggtttacacctgccaagtggagcacccaagcgtgacaagccctctcacagtggaatggagagcacggtctgaatctgcacagagcaag

SEQ ID NO: 3655 - DNA, 852 bp, Homo Sapiens
ggctcccactccttgaagtatttccacacttccgtgtcccggcccggccgcggggagccccgcttcatctctgtgggctacgtggacgacacccagttcgtgcgcttcgacaacgacgccgcgagtccgaggatggtgccgcgggcgccgtggatggagcaggaggggtcagagtattgggaccgggagacacggagcgccagggacaccgcacagattttccgagtgaacctgcggacgctgcgcggctactacaatcagagcgaggccgggtctcacaccctgcagtggatgcatggctgcgagctggggcccgacaggcgcttcctccgcgggtatgaacagttcgcctacgacggcaaggattatctcaccctgaatgaggacctgcgctcctggaccgcggtggacacggcggctcagatctccgagcaaaagtcaaatgatgcctctgaggcggagcaccagagagcctacctggaagacacatgcgtggagtggctccacaaatacctggagaaggggaaggagacgctgcttcacctggagcccccaaagacacacgtgactcaccaccccatctctgaccatgaggccaccctgaggtgctgggccctgggcttctaccctgcggagatcacactgacctggcagcaggatggggagggccatacccaggacacggagctcgtggagaccaggcctgcaggggatggaaccttccagaagtgggcagctgtggtggtgccttctggagaggagcagagatacacgtgccatgtgcagcatgaggggctacccgagcccgtcaccctgagatggaagccggcttcccagcccaccatccccatc

SEQ ID NO: 3656 - DNA, 852 bp, Homo Sapiens
ggctcccactccttgaggtatttcagcaccgctgtgtcgcggcccggccgcggggagccccgctacatcgccgtggagtacgtagacgacacgcaattcctgcggttcgacagcgacgccgcgattccgaggatggagccgcgggagccgtgggtggagcaagaggggccgcagtattgggagtggaccacagggtacgccaaggccaacgcacagactgaccgagtggccctgaggaacctgctccgccgctacaaccagagcgaggctgggtctcacaccctccagggaatgaatggctgcgacatggggcccgacggacgcctcctccgcgggtatcaccagcacgcgtacgacggcaaggattacatctccctgaacgaggacctgcgctcctggaccgcggcggacaccgtggctcagatcacccagcgcttctatgaggcagaggaatatgcagaggagttcaggacctacctggagggcgagtgcctggagttgctccgcagatacttggagaatgggaaggagacgctacagcgcgcagatcctccaaaggcacacgttgcccaccaccccatctctgaccatgaggccaccctgaggtgctgggccctgggcttctaccctgcggagatcacgctgacctggcagcgggatggggaggaacagacccaggacacagagcttgtggagaccaggcctgcaggggatggaaccttccagaagtgggccgctgtggtggtgccttctggagaggaacagagatacacatgccatgtgcagcacgaggggctgccccagcccctcatcctgagatgggagcagtctccccagcccaccatccccatc

SEQ ID NO: 3657 - DNA, 852 bp, Homo Sapiens
ggctcccactccatgaggtatttcagcgccgccgtgtcccggcccagccgcggggagccccgcttcatcgccatgggctacgtggacgacacgcagttcgtgcggttcgacagcgactcggcgtgtccgaggatggagccgcgggcgccgtgggtggagcgggaggggccagagtattgggaagaggagacacggaacaccaaggcccacgcacagactgacagaatgaacctgcagaccctgcgcggctactacaaccagagcgaggccagttctcataccctccagtggatgattggctgcgacctggggtccgacggacgcctcctccgcgggtatgaacagtatgcctacgatggcaaggattacctcgccctgaacgaggacctgcgctcctggaccgcagcggacactgcggctcagatctccaagcgcaagtgtgaggcggccaatgtggctgaacaaaggagagcctacctggagggcacgtgcgtggagtggctccacagatacctggagaacgggaaggagatgctgcagcgcgcggacccccccaagacacacgtgacccaccaccctgtctttgactatgaggccaccctgaggtgctgggccctgggcttctaccctgcggagatcatactgacctggcagcgggatggggaggaccagacccaggacgtggagctcgtggagaccaagcctgcaggggatggaaccttccagaagtgggcagctgtggtggtgccttctggagaggagcagagatacacgtgccatgtgcagcatgaggggctgccggagcccctcatgctgagatggaagcagtcttccctgcccaccatccccatc

SEQ ID NO: 3658 - DNA, 642 bp, Homo Sapiens
ggcaaaggagatcctaagaagccgagaggcaaaatgtcatcatatgcattttttgtgcaaacttgtcgggaggagcataagaagaagcacccagatgcttcagtcaacttctcagagttttctaagaagtgctcagagaggtggaagaccatgtctgctaaagagaaaggaaaatttgaagatatggcaaaggcggacaaggcccgttatgaaagagaaatgaaaacctatatccctcccaaaggggagacaaaaaagaagttcaaggatcccaatgcacccaagaggcctccttcggccttcttcctcttctgctctgagtatcgcccaaaaatcaaaggagaacatcctggcctgtccattggtgatgttgcgaagaaactgggagagatgtggaataacactgctgcagatgacaagcagccttatgaaaagaaggctgcgaagctgaaggaaaaatacgaaaaggatattgctgcatatcgagctaaaggaaagcctgatgcagcaaaaaagggagttgtcaaggctgaaaaaagcaagaaaaagaaggaagaggaggaagatgaggaagatgaagaggatgaggaggaggaggaagatgaagaagatgaagatgaagaagaagatgatgatgatgaa

SEQ ID NO: 3659 - DNA, 624 bp, Homo Sapiens
ggtaaaggagaccccaacaagccgcggggcaaaatgtcctcgtacgccttcttcgtgcagacctgccgggaagagcacaagaagaaacacccggactcttccgtcaatttcgcggaattctccaagaagtgttcggagagatggaagaccatgtctgcaaaggagaagtcgaagtttgaagatatggcaaaaagtgacaaagctcgctatgacagggagatgaaaaattacgttcctcccaaaggtgataagaaggggaagaaaaaggaccccaatgctcctaaaaggccaccatctgccttcttcctgttttgctctgaacatcgcccaaagatcaaaagtgaacaccctggcctatccattggggatactgcaaagaaattgggtgaaatgtggtctgagcagtcagccaaagataaacaaccatatgaacagaaagcagctaagctaaaggagaaatatgaaaaggatattgctgcatatcgtgccaagggcaaaagtgaagcaggaaagaagggccctggcaggccaacaggctcaaagaagaagaacgaaccagaagatgaggaggaggaggaggaagaagaagatgaagatgaggaggaagaggatgaagatgaagaa

SEQ ID NO: 3660 - DNA, 1242 bp, Homo Sapiens
tttaggggccccttgctacccaaccggcccttcaccaccgtctggaatgcaaacacccagtggtgcctggagaggcacggtgtggacgtggatgtcagtgtcttcgatgtggtagccaacccagggcagaccttccgcggccctgacatgacaattttctatagctcccagctgggcacctacccctactacacgcccactggggagcctgtgtttggtggtctgccccagaatgccagcctgattgcccacctggcccgcacattccaggacatcctggctgccatacctgctcctgacttctcagggctggcagtcatcgactgggaggcatggcgcccacgctgggccttcaactgggacaccaaggacatttaccggcagcgctcacgggcactggtacaggcacagcaccctgattggccagctcctcaggtggaggcagtagcccaggaccagttccagggagctgcacgggcctggatggcaggcaccctccagctggggcgggcactgcgtcctcgcggcctctggggcttctatggcttccctgactgctacaactatgactttctaagccccaactacaccggccagtgcccatcaggcatccgtgcccaaaatgaccagctagggtggctgtggggccagagccgtgccctctatcccagcatctacatgcccgcagtgctggagggcacagggaagtcacagatgtatgtgcaacaccgtgtggccgaggcattccgtgtggctgtggctgctggtgaccccaatctgccggtgctgccctatgtccagatcttctatgacacgacaaaccactttctgcccctggatgagctggagcacagcctgggggagagtgcggcccagggggcagctggagtggtgctctgggtgagctgggaaaatacaagaaccaaggaatcatgtcaggccatcaaggagtatatggacactacactggggcccttcatcctgaacgtgaccagtggggcccttctctgcagtcaagccctgtgctccggccatggccgctgtgtccgccgcaccagccaccccaaagccctcctcctccttaaccctgccagtttctccatccagctcacgcctggtggtgggcccctgagcctgcggggtgccctctcacttgaagatcaggcacagatggctgtggagttcaaatgtcgatgctaccctggctggcaggcaccgtggtgtgagcggaagagcatgtgg

SEQ ID NO: 3661 - DNA, 1284 bp, Homo Sapiens
atggagctcaagcccacagcaccacccatcttcactggccggccctttgtggtagcgtgggacgtgcccacacaggactgtggcccacgcctcaaggtgccactggacctgaatgcctttgatgtgcaggcctcacctaatgagggttttgtgaaccagaatattaccatcttctaccgcgaccgtctaggcctgtatccacgcttcgattctgccggaaggtctgtgcatggtggtgtgccacagaatgtcagcctttgggcacaccggaagatgctgcagaaacgtgtggagcactacattcggacacaggagtctgcggggctggcggtcatcgactgggaggactggcgacctgtgtgggtgcgcaactggcaggacaaagatgtgtatcgccggttatcacgccagctagtggccagtcgtcaccctgactggcctccagaccgcatagtcaaacaggcacaatatgagtttgagttcgcagcacagcagttcatgctggagacactgcgttatgtcaaggcagtgcggccccggcacctctggggcttctacctctttcctgactgctacaatcatgattatgtgcagaactgggagagctacacaggccgctgccctgatgttgaggtggcccgcaatgaccagctggcctggctgtgggctgagagcacggccctcttcccgtctgtctacctggacgagacacttgcttcctcccgccatggccgcaactttgtgagcttccgtgttcaggaggcccttcgtgtggctcgcacccaccatgccaaccatgcactcccagtctacgtcttcacacgacccacctacagccgcaggctcacggggcttagtgagatggacctcatctctaccattggcgagagtgcggccctgggcgcagctggtgtcatcctctggggtgacgcggggtacaccacaagcacggagacctgccagtacctcaaagattacctgacacggctgctggtcccctacgtggtcaatgtgtcctgggccacccaatattgcagccgggcccagtgccatggccatgggcgctgtgtgcgccgcaaccccagtgccagtaccttcctgcatctcagcaccaacagtttccgcctagtgcctggccatgcacctggtgaaccccagctgcgacctgtgggggagctcagttgggccgacattgaccacctgcagacacacttccgctgccagtgctacttgggctggagtggtgagcaatgccagtgggaccataggcaggcagctggaggt

SEQ ID NO: 3662 - DNA, 1191 bp, Homo Sapiens
cagcccctaccacaggtccctgaacgccccttctctgtgctgtggaatgtaccctcagcacactgtgaggcccgctttggtgtgcacctgccactcaattctctgggcatcatagccaaccgtggccagcattttcacggtcagaacatgaccattttctacaagaaccaactcggcctctatccctactttggacccaggggcacagctcacaatgggggcatcccccaggctttgccccttgaccgccacctggcactggctgcctaccagatccaccacagcctgagacctggctttgctggcccagcagtgctggattgggaggagtggtgtccactctgggctgggaactggggccgccgccgagcttatcaggcagcctcttgggcttgggcacagcaggtattccctgacctggaccctcaggagcagctctacaaggcctatactggctttgagcaggcggcccgtgcactgatggaggatacgctgcgggtggcccaggcactacggccccatggactctggggcttctatcactacccagcctgtggcaatggctggcatagtatggcttccaactataccggccgctgccatgcagccacccttgcccgcaacactcaactgcattggctctgggccgcctccagtgccctcttccccagcatctacctcccacccaggctgccacctgcccaccaccaggcctttgtccgacatcgcctggaggaggccttccgtgtggcccttgttgggcaccgacatcccctgcctgtcctggcctatgtccgcctcacacaccggagatctgggaggttcctgtcccaggatgaccttgtgcagtccattggtgtgagtgcagcactaggggcagccggcgtggtgctctggggggacctgagcctctccagctctgaggaggagtgctggcatctccatgactacctggtggacaccttgggcccctatgtgatcaatgtgaccagggcagcgatggcctgcagtcaccagcggtgccatggccacgggcgctgtgcccggcgagatccaggacagatggaagcctttctacacctgtggccagacggcagccttggagattggaagtccttcagctgccactgttactggggctgggctggccccacctgccaggagcccaggcctgggcctaaagaagcagta

SEQ ID NO: 3663 - DNA, 1359 bp, Homo Sapiens
cagacatctgtgtccccctcaaaagtcatcctgccccggggaggctccgtgctggtgacatgcagcacctcctgtgaccagcccaagttgttgggcatagagaccccgttgcctaaaaaggagttgctcctgcctgggaacaaccggaaggtgtatgaactgagcaatgtgcaagaagatagccaaccaatgtgctattcaaactgccctgatgggcagtcaacagctaaaaccttcctcaccgtgtactggactccagaacgggtggaactggcacccctcccctcttggcagccagtgggcaagaaccttaccctacgctgccaggtggagggtggggcaccccgggccaacctcaccgtggtgctgctccgtggggagaaggagctgaaacgggagccagctgtgggggagcccgctgaggtcacgaccacggtgctggtgaggagagatcaccatggagccaatttctcgtgccgcactgaactggacctgcggccccaagggctggagctgtttgagaacacctcggccccctaccagctccagacctttgtcctgccagcgactcccccacaacttgtcagcccccgggtcctagaggtggacacgcaggggaccgtggtctgttccctggacgggctgttcccagtctcggaggcccaggtccacctggcactgggggaccagaggttgaaccccacagtcacctatggcaacgactccttctcggccaaggcctcagtcagtgtgaccgcagaggacgagggcacccagcggctgacgtgtgcagtaatactggggaaccagagccaggagacactgcagacagtgaccatctacagctttccggcgcccaacgtgattctgacgaagccagaggtctcagaagggaccgaggtgacagtgaagtgtgaggcccaccctagagccaaggtgacgctgaatggggttccagcccagccactgggcccgagggcccagctcctgctgaaggccaccccagaggacaacgggcgcagcttctcctgctctgcaaccctggaggtggccggccagcttatacacaagaaccagacccgggagcttcgtgtcctgtatggcccccgactggacgagagggattgtccgggaaactggacgtggccagaaaattcccagcagactccaatgtgccaggcttgggggaacccattgcccgagctcaagtgtctaaaggatggcactttcccactgcccatcggggaatcagtgactgtcactcgagatcttgagggcacctacctctgtcgggccaggagcactcaaggggaggtcacccgcaaggtgaccgtgaatgtgctctccccccggtatgag

SEQ ID NO: 3664 - DNA, 597 bp, Homo Sapiens
aaggtattcgaggtacacgtgaggccaaagaagctggcggttgagcccaaagggtccctcgaggtcaactgcagcaccacctgtaaccagcctgaagtgggtggtctggagacctctctagataagattctgctggacgaacaggctcagtggaaacattacttggtctcaaacatctcccatgacacggtcctccaatgccacttcacctgctccgggaagcaggagtcaatgaattccaacgtcagcgtgtaccagcctccaaggcaggtcatcctgacactgcaacccactttggtggctgtgggcaagtccttcaccattgagtgcagggtgcccaccgtggagcccctggacagcctcaccctcttcctgttccgtggcaatgagactctgcactatgagaccttcgggaaggcagcccctgctccgcaggaggccacagccacattcaacagcacggctgacagagaggatggccaccgcaacttctcctgcctggctgtgctggacttgatgtctcgcggtggcaacatctttcacaaacactcagccccgaagatgttggagatctatgagcctgtgtcggacagccag

SEQ ID NO: 3665 - DNA, 1368 bp, Homo Sapiens
caggagttccttttgcgggtggagccccagaaccctgtgctctctgctggagggtccctgtttgtgaactgcagtactgattgtcccagctctgagaaaatcgccttggagacgtccctatcaaaggagctggtggccagtggcatgggctgggcagccttcaatctcagcaacgtgactggcaacagtcggatcctctgctcagtgtactgcaatggctcccagataacaggctcctctaacatcaccgtgtacaggctcccggagcgtgtggagctggcacccctgcctccttggcagccggtgggccagaacttcaccctgcgctgccaagtggaggatgggtcgccccggaccagcctcacggtggtgctgcttcgctgggaggaggagctgagccggcagcccgcagtggaggagccagcggaggtcactgccactgtgctggccagcagagacgaccacggagcccctttctcatgccgcacagaactggacatgcagccccaggggctgggactgttcgtgaacacctcagccccccgccagctccgaacctttgtcctgcccgtgacccccccgcgcctcgtggccccccggttcttggaggtggaaacgtcgtggccggtggactgcaccctagacgggctttttccagcctcagaggcccaggtctacctggcgctgggggaccagatgctgaatgcgacagtcatgaaccacggggacacgctaacggccacagccacagccacggcgcgcgcggatcaggagggtgcccgggagatcgtctgcaacgtgaccctagggggcgagagacgggaggcccgggagaacttgacggtctttagcttcctaggacccattgtgaacctcagcgagcccaccgcccatgaggggtccacagtgaccgtgagttgcatggctggggctcgagtccaggtcacgctggacggagttccggccgcggccccggggcagccagctcaacttcagctaaatgctaccgagagtgacgacggacgcagcttcttctgcagtgccactctcgaggtggacggcgagttcttgcacaggaacagtagcgtccagctgcgagtcctgtatggtcccaaaattgaccgagccacatgcccccagcacttgaaatggaaagataaaacgagacacgtcctgcagtgccaagccaggggcaacccgtaccccgagctgcggtgtttgaaggaaggctccagccgggaggtgccggtggggatcccgttcttcgtcaacgtaacacataatggtacttatcagtgccaagcgtccagctcacgaggcaaatacaccctggtcgtggtgatggacattgaggctgggagctcccac

SEQ ID NO: 3666 - DNA, 750 bp, Homo Sapiens
gcgctgggacgccggactaagcgggcgcaaagccccaagggtagccctctcgcgccctccgggacctcagtgcccttctgggtgcgcatgagcccggagttcgtggctgtgcagccggggaagtcagtgcagctcaattgcagcaacagctgtccccagccgcagaattccagcctccgcaccccgctgcggcaaggcaagacgctcagagggccgggttgggtgtcttaccagctgctcgacgtgagggcctggagctccctcgcgcactgcctcgtgacctgcgcaggaaaaacacgctgggccacctccaggatcaccgcctacagtgttcccggtgggctacttggtggtgaccctgaggcatggaagccgggtcatctattccgaaagcctggagcgcttcaccggcctggatctggccaacgtgaccttgacctacgagtttgctgctggaccccgcgacttctggcagcccgtgatctgccacgcgcgcctcaatctcgacggcctggtggtccgcaacagctcggcacccattacactgatgctcgcttggagccccgcgcccacagctttggcctccggttccatcgctgcccttgtagggatcctcctcactgtgggcgctgcgtacctatgcaagtgcctagctatgaagtcccaggcgtaaagggggatgttctatgccggctgagcgagaaaaagaggaatatgaaacaatctggggaaatggccatacatggtggc

SEQ ID NO: 3667 - DNA, 2412 bp, Homo Sapiens
gagcccttctgggcggacctgcagcctcgcgtggcgttcgtggagcgcgggggctcgctgtggctgaattgcagcaccaactgccctcggccggagcgcggtggcctggagacctcgctgcgccgaaacgggacccagaggggtttgcgttggttggcgcggcagctggtggacattcgcgagccggagactcagcccgtctgcttcttccgctgcgcgcggcgcacactacaggcgcgtgggctcattcgcactttccagcgaccagatcgcgtagagctgatgccgctgcctccctggcagccggtgggcgagaacttcaccctgagctgtagggtccccggcgccgggccccgtgcgagcctcacgctgaccctgctgcggggcgcccaggagctgatccgccgcagcttcgccggtgaaccaccccgagcgcggggcgcggtgctcacagccacggtactggctcggagggaggaccatggagccaatttctcgtgtcgcgccgagctggacctgcggccgcacggactgggactgtttgaaaacagctcggcccccagagagctccgaaccttctccctgtctccggatgccccgcgcctcgctgctccccggctcttggaagttggctcggaaaggcccgtgagctgcactctggacggactgtttccagcctcagaggccagggtctacctcgcactgggggaccagaatctgagtcctgatgtcaccctcgaaggggacgcattcgtggccactgccacagccacagctagcgcagagcaggagggtgccaggcagctgatctgcaacgtcaccctggggggcgaaaaccgggagacccgggagaacgtgaccatctacagcttcccggcaccactcctgaccctgagcgaacccagcgtctccgaggggcagatggtgacagtaacctgcgcagctgggacccaagctctggtcacactggagggagttccagccgcggtcccggggcagcccgcccagcttcagctaaatgccaccgagaacgacgacagacgcagcttcttctgcgacgccaccctcgatgtggacggggagaccctgatcaagaacaggagcgcagagcttcgtgtcctatacgctccccggctagacgattcggactgccccaggagttggacgtggcccgagggcccagagcagacgctgcgctgcgaggcccgcgggaacccagaaccctcagtgcactgtgcgcgctccgacggcggggccgtgctggctctgggcctgctgggtccagtcactcgggcgctctcaggcacttaccgctgcaaggcggccaatgatcaaggcgaggcggtcaaggacgtaacgctaacggtggagtacgcaccagcgctggacagcgtgggctgcccagaacgcattacttggctggagggaacagaagcctcgctgagctgtgtggcgcacggggtaccgccgcctgatgtgatctgcgtgcgctctggagaactcggggccgtcatcgaagggctgttgcgtgtggcccgggagcatgcgggcacttaccgctgcgaagccaccaaccctcggggctctgcggccaaaaatgtggccgtcacggtggaatatggccccaggtttgaggagccgagctgccccagcaattggacatgggtggaaggatctgggcgcctgttttcctgtgaggtcgatgggaagccacagccaagcgtgaagtgcgtgggctccgggggcgccactgagggggtgctgctgccgctggcacccccagaccctagtcccagagctcccagaatccctagagtcctggcacccggtatctacgtctgcaacgccaccaaccgccacggctccgtggccaaaacagtcgtcgtgagcgcggagtcgccaccggagatggatgaatctacctgcccaagtcaccagacgtggctggaaggggctgaggcttccgcgctggcctgcgccgcccggggtcgcccttccccaggagtgcgctgctctcgggaaggcatcccatggcctgagcagcagcgcgtgtcccgagaggacgcgggcacttaccactgtgtggccaccaatgcgcatggcacggactcccggaccgtcactgtgggcgtggaataccggccagtggtggccgaacttgctgcctcgccccctggaggcgtgcgcccaggaggaaacttcacgttgacctgccgcgcggaggcctggcctccagcccagatcagctggcgcgcgcccccgggggccctcaacatcggcctgtcgagcaacaacagcacactgagcgtggcaggcgccatgggaagccacggcggcgagtacgagtgcgcagccaccaacgcgcacgggcgccacgcgcggcgcatcacggtgcgcgtggccggtccgtgg

SEQ ID NO: 3668 - DNA, 360 bp, Homo Sapiens
gaaatcaatggttctgccaattatgagatgtttatatttcacaacggaggtgtacaaattttatgcaaatatcctgacattgtccagcaatttaaaatgcagttgctgaaaggggggcaaatactctgcgatctcactaagacaaaaggaagtggaaacacagtgtccattaagagtctgaaattctgccattctcagttatccaacaacagtgtctctttttttctatacaacttggaccattctcatgccaactattacttctgcaacctatcaatttttgatcctcctccttttaaagtaactcttacaggaggatatttgcatatttatgaatcacaactttgttgccagctgaag

SEQ ID NO: 3669 - DNA, 714 bp, Homo Sapiens
gatactcaggagaaggaagtcagagcgatggtaggcagcgacgtggagctcagctgcgcttgccctgaaggaagccgttttgatttaaatgatgtttacgtatattggcaaaccagtgagtcgaaaaccgtggtgacctaccacatcccacagaacagctccttggaaaacgtggacagccgctaccggaaccgagccctgatgtcaccggccggcatgctgcggggcgacttctccctgcgcttgttcaacgtcaccccccaggacgagcagaagtttcactgcctggtgttgagccaatccctgggattccaggaggttttgagcgttgaggttacactgcatgtggcagcaaacttcagcgtgcccgtcgtcagcgccccccacagcccctcccaggatgagctcaccttcacgtgtacatccataaacggctaccccaggcccaacgtgtactggatcaataagacggacaacagcctgctggaccaggctctgcagaatgacaccgtcttcttgaacatgcggggcttgtatgacgtggtcagcgtgctgaggatcgcacggacccccagcgtgaacattggctgctgcatagagaacgtgcttctgcagcagaacctgactgtcggcagccagacaggaaatgacatcggagagagagacaagatcacagagaatccagtcagtaccggcgagaaaaacgcggccacg

SEQ ID NO: 3670 - DNA, 462 bp, Homo Sapiens
atgagggaggggaagaggggaccgccatgtattttgtcctttaggggaactctggaaagggttgaagcacaatgggaattggaggcgcaagggcctggacaatgccctgcacccctgggagaccctgcctctactactgatggcgcacaagaagccagagtacctctggatggcgctttttggatcccgcgtcctccagcgggtagtccaaaaggatgcttcgcgtgcgtctcaaaacccccagcattacaggcacctgctgccccggcccctgagcccagtgcgtctcccccgatggctcctactctgtttccaatggagtcaaagagctccaagaccgattcagttagggctgccggggcgccaccagcttgcaaacacttagcggagaaaaagaccatgacaaaccctactaccgtaatagaggtatatccagatactactgaagtaaatgattattac

SEQ ID NO: 3671 - DNA, 498 bp, Homo Sapiens
tgtgatctgcctcagacccacagcctgggtaataggagggccttgatactcctgggacaaatgggaagaatctctcctttctcctgcctgaaggacagacatgatttccgaatcccccaggaggagtttgatggcaaccagttccagaaggctcaagccatctctgtcctccatgagatgatccagcagaccttcaatctcttcagcacagaggactcatctgctgcttgggaacagagcctcctagaaaaattttccactgaactttaccagcaactgaatgacctggaagcatgtgtgatacaggaggttggggtggaagagactcccctgatgaatgaggactccatcctggctgtgaggaaatacttccaaagaatcactctttatctaatagagaggaaatacagcccttgtgcctgggaggttgtcagagcagaaatcatgagatccctctcgttttcaacaaacttgcaaaaaagattaaggaggaaggat

SEQ ID NO: 3672 - DNA, 498 bp, Homo Sapiens
tgtgatctccctgagacccacagcttggataacaggaggaccttgatgctcctggcacaaatgagcagaatctctccttcctcctgtctgatggacagacatgactttggatttccccaggaggagtttgatggcaaccagttccagaaggctccagccatctctgtcctccatgagctgatccagcagatcttcaacctctttaccacaaaagattcatctgctgcttgggatgaggacctcctagacaaattctgcaccgaactctaccagcagctgaatgacttggaagcctgtgtgatgcaggaggagagggtgggagaaactcccctgatgaatgcggactccatcttggctgtgaagaaatacttccgaagaatcactctctatctgacagagaagaaatacagcccttgtgcctgggaggttgtcagagcagaaatcatgagatccctctctttatcaacaaacttgcaagaaagattaaggaggaaggaa

SEQ ID NO: 3673 - DNA, 498 bp, Homo Sapiens
tgtaatctgtctcaaacccacagcctgaataacaggaggactttgatgctcatggcacaaatgaggagaatctctcctttctcctgcctgaaggacagacatgactttgaatttccccaggaggaatttgatggcaaccagttccagaaagctcaagccatctctgtcctccatgagatgatgcagcagaccttcaatctcttcagcacaaagaactcatctgctgcttgggatgagaccctcctagaaaaattctacattgaacttttccagcaaatgaatgacctggaagcctgtgtgatacaggaggttggggtggaagagactcccctgatgaatgaggactccatcctggctgtgaagaaatacttccaaagaatcactctttatctgatggagaagaaatacagcccttgtgcctgggaggttgtcagagcagaaatcatgagatccctctctttttcaacaaacttgcaaaaaagattaaggaggaaggat

SEQ ID NO: 3674 - DNA, 498 bp, Homo Sapiens
tgtgatctgcctcagactcacagcctgggtaataggagggccttgatactcctggcacaaatgggaagaatctctcatttctcctgcctgaaggacagatatgatttcggattcccccaggaggtgtttgatggcaaccagttccagaaggctcaagccatctctgccttccatgagatgatccagcagaccttcaatctcttcagcacaaaggattcatctgctgcttgggatgagaccctcctagacaaattctacattgaacttttccagcaactgaatgacctagaagcctgtgtgacacaggaggttggggtggaagagattgccctgatgaatgaggactccatcctggctgtgaggaaatactttcaaagaatcactctttatctgatggggaagaaatacagcccttgtgcctgggaggttgtcagagcagaaatcatgagatccttctctttttcaacaaacttgcaaaaaggattaagaaggaaggat

SEQ ID NO: 3675 - DNA, 498 bp, Homo Sapiens
tgtgacctacctcagacccactcattaggcaaccgtcgtgccctgattcttctagcgcaaatgggaaggatttcccctttctcatgtcttaaggacagacatgactttggacttccacaagaagaatttgatgggaaccagttccagaagacgcaggctatttcagtgttacatgagatgatccaacagaccttcaatctattctctacagaggactcaagcgctgcatgggaacaatcccttcttgagaagttcagcacagagctttaccaacaactgaacaatttggaagcgtgtgtgattcaggaggttggcatggaagaaactccactgatgaacgaagactctatattggcggttcgtaagtattttcaacgtattaccctttatttgactgaaaagaaatacagcccctgtgcgtgggaagtggtacgtgctgaaataatgcgtagtttgtctttttctacgaacctacagaagatccttaggagaaaagac

SEQ ID NO: 3676 - DNA, 498 bp, Homo Sapiens
tgtgatctgcctcagacccacagcctgggtaataggagggccttgatactcctggcacaaatgggaagaatctctcctttctcctgcctgaaggacagacatgactttggacttccccaggaggagtttgatggcaaccagttccagaagactcaagccatctctgtcctccatgagatgatccagcagaccttcaatctcttcagcacagaggactcatctgctgcttgggaacagagcctcctagaaaaattttccactgaactttaccagcaactgaataacctggaagcatgtgtgatacaggaggttgggatggaagagactcccctgatgaatgaggactccatcctggctgtgaggaaatacttccaaagaatcactctttatctaacagagaagaaatacagcccttgtgcctgggaggttgtcagagcagaaatcatgagatctctctctttttcaacaaacttgcaaaaaatattaaggaggaaggat

SEQ ID NO: 3677 - DNA, 495 bp, Homo Sapiens
tgtgatctgcctcaaacccacagcctgggtagcaggaggaccttgatgctcctggcacagatgaggagaatctctcttttctcctgcttgaaggacagacatgactttggatttccccaggaggagtttggcaaccagttccaaaaggctgaaaccatccctgtcctccatgagatgatccagcagatcttcaatctcttcagcacaaaggactcatctgctgcttgggatgagaccctcctagacaaattctacactgaactctaccagcagctgaatgacctggaagcctgtgtgatacagggggtgggggtgacagagactcccctgatgaaggaggactccattctggctgtgaggaaatacttccaaagaatcactctctatctgaaagagaagaaatacagcccttgtgcctgggaggttgtcagagcagaaatcatgagatctttttctttgtcaacaaacttgcaagaaagtttaagaagtaaggaa

SEQ ID NO: 3678 - DNA, 498 bp, Homo Sapiens
tgtgatctgcctcagacccacagcctgggtaataggagggccttgatactcctggcacaaatgggaagaatctctcctttctcctgcctgaaggacagacatgactttggattcccccaggaggagtttgatggcaaccagttccagaaggctcaagccatctctgtcctccatgagatgatccagcagaccttcaatctcttcagcacaaaggactcatctgctacttgggaacagagcctcctagaaaaattttccactgaacttaaccagcagctgaatgacctggaagcctgcgtgatacaggaggttggggtggaagagactcccctgatgaatgtggactccatcctggctgtgaagaaatacttccaaagaatcactctttatctgacagagaagaaatacagcccttgtgcctgggaggttgtcagagcagaaatcatgagatccttctctttatcaaaaatttttcaagaaagattaaggaggaaggaa

SEQ ID NO: 3679 - DNA, 498 bp, Homo Sapiens
tgtgatctgcctcagacccacagcctgggtaataggagggccttgatactcctggcacaaatgggaagaatctctcatttctcctgcctgaaggacagacatgatttcggattccccgaggaggagtttgatggccaccagttccagaaggctcaagccatctctgtcctccatgagatgatccagcagaccttcaatctcttcagcacagaggactcatctgctgcttgggaacagagcctcctagaaaaattttccactgaactttaccagcaactgaatgacctggaagcatgtgtgatacaggaggttggggtggaagagactcccctgatgaatgaggactccatcctggctgtgaggaaatacttccaaagaatcactctttatctaacagagaagaaatacagcccttgtgcctgggaggttgtcagagcagaaatcatgagatccctctcgttttcaacaaacttgcaaaaaagattaaggaggaaggat

SEQ ID NO: 3680 - DNA, 498 bp, Homo Sapiens
tgtgatctgcctcagacccacagcctgagtaacaggaggactttgatgataatggcacaaatgggaagaatctctcctttctcctgcctgaaggacagacatgactttggatttcctcaggaggagtttgatggcaaccagttccagaaggctcaagccatctctgtcctccatgagatgatccagcagaccttcaatctcttcagcacaaaggactcatctgctacttgggatgagacacttctagacaaattctacactgaactttaccagcagctgaatgacctggaagcctgtatgatgcaggaggttggagtggaagacactcctctgatgaatgtggactctatcctgactgtgagaaaatactttcaaagaatcaccctctatctgacagagaagaaatacagcccttgtgcatgggaggttgtcagagcagaaatcatgagatccttctctttatcagcaaacttgcaagaaagattaaggaggaaggaa

SEQ ID NO: 3681 - DNA, 507 bp, Homo Sapiens
tctctggactgtgatctgcctcagacccacagcctgggtcacaggaggaccatgatgctcctggcacaaatgaggagaatctctcttttctcctgtctgaaggacagacatgacttcagatttccccaggaggagtttgatggcaaccagttccagaaggctgaagccatctctgtcctccatgaggtgattcagcagaccttcaacctcttcagcacaaaggactcatctgttgcttgggatgagaggcttctagacaaactctatactgaactttaccagcagctgaatgacctggaagcctgtgtgatgcaggaggtgtgggtgggagggactcccctgatgaatgaggactccatcctggctgtgagaaaatacttccaaagaatcactctctacctgacagagaaaaagtacagcccttgtgcctgggaggttgtcagagcagaaatcatgagatccttctcttcatcaagaaacttgcaagaaaggttaaggaggaaggaa

SEQ ID NO: 3682 - DNA, 498 bp, Homo Sapiens
tgtgatctgcctcagactcacagcctgggtaacaggagggccttgatactcctggcacaaatgcgaagaatctctcctttctcctgcctgaaggacagacatgactttgaattcccccaggaggagtttgatgataaacagttccagaaggctcaagccatctctgtcctccatgagatgatccagcagaccttcaacctcttcagcacaaaggactcatctgctgctttggatgagacccttctagatgaattctacatcgaacttgaccagcagctgaatgacctggagtcctgtgtgatgcaggaagtgggggtgatagagtctcccctgatgtacgaggactccatcctggctgtgaggaaatacttccaaagaatcactctatatctgacagagaagaaatacagctcttgtgcctgggaggttgtcagagcagaaatcatgagatccttctctttatcaatcaacttgcaaaaaagattgaagagtaaggaa

SEQ ID NO: 3683 - DNA, 1227 bp, Homo Sapiens
aaaaatctaaaatctcctcaaaaagtagaggtcgacatcatagatgacaactttatcctgaggtggaacaggagcgatgagtctgtcgggaatgtgactttttcattcgattatcaaaaaactgggatggataattggataaaattgtctgggtgtcagaatattactagtaccaaatgcaacttttcttcactcaagctgaatgtttatgaagaaattaaattgcgtataagagcagaaaaagaaaacacttcttcatggtatgaggttgactcatttacaccatttcgcaaagctcagattggtcctccagaagtacatttagaagctgaagataaggcaatagtgatacacatctctcctggaacaaaagatagtgttatgtgggctttggatggtttaagctttacatatagcttagttatctggaaaaactcttcaggtgtagaagaaaggattgaaaatatttattccagacataaaatttataaactctcaccagagactacttattgtctaaaagttaaagcagcactacttacgtcatggaaaattggtgtctatagtccagtacattgtataaagaccacagttgaaaatgaactacctccaccagaaaatatagaagtcagtgtccaaaatcagaactatgttcttaaatgggattatacatatgcaaacatgacctttcaagttcagtggctccacgcctttttaaaaaggaatcctggaaaccatttgtataaatggaaacaaatacctgactgtgaaaatgtcaaaactacccagtgtgtctttcctcaaaacgttttccaaaaaggaatttaccttctccgcgtacaagcatctgatggaaataacacatctttttggtctgaagagataaagtttgatactgaaatacaagctttcctacttcctccagtctttaacattagatcccttagtgattcattccatatctatatcggtgctccaaaacagtctggaaacacgcctgtgatccaggattatccactgatttatgaaattattttttgggaaaacacttcaaatgctgagagaaaaattatcgagaaaaaaactgatgttacagttcctaatttgaaaccactgactgtatattgtgtgaaagccagagcacacaccatggatgaaaagctgaataaaagcagtgtttttagtgacgctgtatgtgagaaaacaaaaccaggaaatacctctaaa

SEQ ID NO: 3684 - DNA, 651 bp, Homo Sapiens
atttcatatgattcgcctgattacacagatgaatcttgcactttcaagatatcattgcgaaatttccggtccatcttatcatgggaattaaaaaaccactccattgtaccaactcactatacattgctgtatacaatcatgagtaaaccagaagatttgaaggtggttaagaactgtgcaaataccacaagatcattttgtgacctcacagatgagtggagaagcacacacgaggcctatgtcaccgtcctagaaggattcagcgggaacacaacgttgttcagttgctcacacaatttctggctggccatagacatgtcttttgaaccaccagagtttgagattgttggttttaccaaccacattaatgtgatggtgaaatttccatctattgttgaggaagaattacagtttgatttatctctcgtcattgaagaacagtcagagggaattgttaagaagcataaacccgaaataaaaggaaacatgagtggaaatttcacctatatcattgacaagttaattccaaacacgaactactgtgtatctgtttatttagagcacagtgatgagcaagcagtaataaagtctcccttaaaatgcaccctccttccacctggccaggaatcagaatcagcagaatctgccaaa

SEQ ID NO: 3685 - DNA, 498 bp, Homo Sapiens
atgagctacaacttgcttggattcctacaaagaagcagcaattttcagtgtcagaagctcctgtggcaattgaatgggaggcttgaatactgcctcaaggacaggatgaactttgacatccctgaggagattaagcagctgcagcagttccagaaggaggacgccgcattgaccatctatgagatgctccagaacatctttgctattttcagacaagattcatctagcactggctggaatgagactattgttgagaacctcctggctaatgtctatcatcagataaaccatctgaagacagtcctggaagaaaaactggagaaagaagatttcaccaggggaaaactcatgagcagtctgcacctgaaaagatattatgggaggattctgcattacctgaaggccaaggagtacagtcactgtgcctggaccatagtcagagtggaaatcctaaggaacttttacttcattaacagacttacaggttacctccgaaac

SEQ ID NO: 3686 - DNA, 561 bp, Homo Sapiens
ctagatttgaaactgattatcttccagcaaagacaagtgaatcaagaaagtttaaaactcttgaataagttgcaaaccttgtcaattcagcagtgtctaccacacaggaaaaactttctgcttcctcagaagtctttgagtcctcagcagtaccaaaaaggacacactctggccattctccatgagatgcttcagcagatcttcagcctcttcagggcaaatatttctctggatggttgggaggaaaaccacacggagaaattcctcattcaacttcatcaacagctagaatacctagaagcactcatgggactggaagcagagaagctaagtggtactttgggtagtgataaccttagattacaagttaaaatgtacttccgaaggatccatgattacctggaaaaccaggactacagcacctgtgcctgggccattgtccaagtagaaatcagccgatgtctgttctttgtgttcagtctcacagaaaaactgagcaaacaaggaagacccttgaacgacatgaagcaagagcttactacagagtttagaagcccgagg

SEQ ID NO: 3687 - DNA, 414 bp, Homo Sapiens
caggacccatatgtaaaagaagcagaaaaccttaagaaatattttaatgcaggtcattcagatgtagcggataatggaactcttttcttaggcattttgaagaattggaaagaggagagtgacagaaaaataatgcagagccaaattgtctccttttacttcaaactttttaaaaactttaaagatgaccagagcatccaaaagagtgtggagaccatcaaggaagacatgaatgtcaagtttttcaatagcaacaaaaagaaacgagatgacttcgaaaagctgactaattattcggtaactgacttgaatgtccaacgcaaagcaatacatgaactcatccaagtgatggctgaactgtcgccagcagctaaaacagggaagcgaaaaaggagtcagatgctgtttcgaggt

SEQ ID NO: 3688 - DNA, 684 bp, Homo Sapiens
gagatgggcaccgcggatctggggccgtcctcagtgcctacaccaactaatgttacaattgaatcctataacatgaaccctatcgtatattgggagtaccagatcatgccacaggtccctgtttttaccgtagaggtaaagaactatggtgttaagaattcagaatggattgatgcctgcatcaatatttctcatcattattgtaatatttctgatcatgttggtgatccatcaaattctctttgggtcagagttaaagccagggttggacaaaaagaatctgcctatgcaaagtcagaagaatttgctgtatgccgagatggaaaaattggaccacctaaactggatatcagaaaggaggagaagcaaatcatgattgacatatttcacccttcagtttttgtaaatggagacgagcaggaagtcgattatgatcccgaaactacctgttacattagggtgtacaatgtgtatgtgagaatgaacggaagtgagatccagtataaaatactcacgcagaaggaagatgattgtgacgagattcagtgccagttagcgattccagtatcctcactgaattctcagtactgtgtttcagcagaaggagtcttacatgtgtggggtgttacaactgaaaagtcaaaagaagtttgtattaccattttcaatagcagtataaaaggt

SEQ ID NO: 3689 - DNA, 660 bp, Homo Sapiens
tcccagctgcccgctcctcagcacccgaagattcgcctgtacaacgcagagcaggtcctgagttgggagccagtggccctgagcaatagcacgaggcctgttgtctaccaagtgcagtttaaatacaccgacagtaaatggttcacggccgacatcatgtccataggggtgaattgtacacagatcacagcaacagagtgtgacttcactgccgccagtccctcagcaggcttcccaatggatttcaatgtcactctacgccttcgagctgagctgggagcactccattctgcctgggtgacaatgccttggtttcaacactatcggaatgtgactgtcgggcctccagaaaacattgaggtgaccccaggagaaggctccctcatcatcaggttctcctctccctttgacatcgctgatacctccacggcctttttttgttattatgtccattactgggaaaaaggaggaatccaacaggtcaaaggccctttcagaagcaactccatttcattggataacttaaaaccctccagagtgtactgtttacaagtccaggcacaactgctttggaacaaaagtaacatctttagagtcgggcatttaagcaacatatcttgctacgaaacaatggcagatgcctccactgagcttcagcaa

SEQ ID NO: 3690 - DNA, 540 bp, Homo Sapiens
ctggactgtaacttactgaacgttcacctgagaagagtcacctggcaaaatctgagacatctgagtagtatgagcaattcatttcctgtagaatgtctacgagaaaacatagcttttgagttgccccaagagtttctgcaatacacccaacctatgaagagggacatcaagaaggccttctatgaaatgtccctacaggccttcaacatcttcagccaacacaccttcaaatattggaaagagagacacctcaaacaaatccaaataggacttgatcagcaagcagagtacctgaaccaatgcttggaggaagacaagaatgaaaatgaagacatgaaagaaatgaaagagaatgagatgaaaccctcagaagccagggtcccccagctgagcagcctggaactgaggagatatttccacaggatagacaatttcctgaaagaaaagaaatacagtgactgtgcctgggagattgtccgagtggaaatcagaagatgtttgtattacttttacaaatttacagctctattcaggaggaaa

SEQ ID NO: 3691 - DNA, 525 bp, Homo Sapiens
gttcctgtcgccaggctccacggggctctcccggatgcaaggggctgccacatagcccagttcaagtccctgtctccacaggagctgcaggcctttaagagggccaaagatgccttagaagagtcgcttctgctgaaggactgcaggtgccactcccgcctcttccccaggacctgggacctgaggcagctgcaggtgagggagcgccccatggctttggaggctgagctggccctgacgctgaaggttctggaggccaccgctgacactgacccagccctggtggacgtcttggaccagccccttcacaccctgcaccatatcctctcccagttccgggcctgtatccagcctcagcccacggcagggcccaggacccggggccgcctccaccattggctgtaccggctccaggaggccccaaaaaaggagtcccctggctgcctcgaggcctctgtcaccttcaacctcttccgcctcctcacgcgagacctgaattgtgttgccagtggggacctgtgtgtc

SEQ ID NO: 3692 - DNA, 522 bp, Homo Sapiens
ctgggctgtgatctgcctcagaaccatggcctacttagcaggaacaccttggtgcttctgcaccaaatgaggagaatctcccctttcttgtgtctcaaggacagaagagacttcaggttcccccaggagatggtaaaagggagccagttgcagaaggcccatgtcatgtctgtcctccatgagatgctgcagcagatcttcagcctcttccacacagagcgctcctctgctgcctggaacatgaccctcctagaccaactccacactggacttcatcagcaactgcaacacctggagacctgcttgctgcaggtagtgggagaaggagaatctgctggggcaattagcagccctgcactgaccttgaggaggtacttccagggaatccgtgtctacctgaaagagaagaaatacagcgactgtgcctgggaagttgtcagaatggaaatcatgaaatccttgttcttatcaacaaacatgcaagaaagactgagaagtaaagatagagacctgggctcatct

SEQ ID NO: 3693 - DNA, 1815 bp, Homo Sapiens
cttggccactctgccgaactggcatttgctgtggagccaagtgatgatgttgccgtccccgggcagcctatagtgctggactgcagggtggaggggacccctccagtgcgaatcacctggaggaagaatggggtagagctgccagagagtacccactccaccttgctggccaatgggtccttgatgatccgtcacttcaggctggagccgggaggcagcccttcggatgaaggtgactatgagtgtgtggcccagaaccgctttgggctggtggtcagccggaaggctcgcatccaagctgcaaccatgtcggacttccacgtgcatccccaggccaccgtgggtgaggagggtggtgtggcccgcttccagtgccaaatccatgggcttcccaaacccctgatcacttgggagaagaacagagtcccaattgacacggacaatgagaggtacacattgctgcccaagggggtcctgcagatcacaggacttcgagctgaggacggtggcatcttccactgtgtggcctcaaacatcgccagtatccggatcagccacggggccaggctcactgtgtcaggctcgggctctggggcctacaaggagccagccatcctcgtggggcctgagaacctcaccctgacagtgcaccagaccgcggtgcttgagtgtgtcgccacgggcaacccgcgccccattgtgtcctggagccgcctggatggtcgccctatcggggtggagggcatccaggtgctgggcacaggaaacctcatcatctcagacgtgacggtccagcactctggcgtctacgtctgtgcagccaacagacctggcacccgggtgaggagaacggcacagggccggctggtggtgcaagccccagctgagtttgtgcagcatccccagtccatctccaggccagctgggaccacagccatgttcacctgccaagcccagggtgagccaccgcctcatgtcacgtggctgaaaaatggacaggtgctggggccaggaggccacgtcaggctcaagaataacaacagcacactgaccatttctggaatcggtcctgaggatgaagccatttatcagtgtgtggccgagaacagtgcgggctcatcacaggccagtgccaggctgaccgtactgtgggctgaggggctccccgggcctccccgcaatgtgcgggcagtctctgtgtcttccactgaggtgcgtgtgtcctggagtgagccgctggccaacaccaaggagatcatcggctacgtcctgcacatcaggaaggctgctgacccaccggagctggagtatcaggaggcagtcagcaagagcacctttcagcacctggtcagcgacctggagccctccacagcctacagtttctacatcaaggcctacacaccaaggggggccagctcagcctctgtgcccaccctagctagcaccctgggtgaagcccctgccccacccccactgtcagtgcgagtcctgggcagctcctccttgcagctgctgtgggagccttggccccggctggcccagcacgagggcggcttcaagctgttttaccgcccagcaagcaagacctccttcaccggccccatcctgctgcctggaaccgtctcctcctacaacctcagccagctcgaccccactgcagtgtatgaggtgaagctgctcgcctacaaccagcatggagatggcaatgccacagtccgctttgtgtctttgaggggagcatctgagaggacagccttgagcccaccatgtgactgccggaaggaggaggccgccaaccagacgtccaccacaggc

SEQ ID NO: 3694 - DNA, 101 bp, Homo Sapiens
tggtcctccgcgccagcttcgacgagagacagccttacgcccacatgaacgggggccgcaagaacgagcgggccttgccgctgccccagtcttcgacctgc

SEQ ID NO: 3695 - DNA, 201 bp, Homo Sapiens
gcttaccgccccagtgagaccctgtgcggcggggagctggtggacaccctccagttcgtctgtggggaccgcggcttctacttcagcaggcccgcaagccgtgtgagccgtcgcagccgtggcatcgttgaggagtgctgtttccgcagctgtgacctggccctcctggagacgtactgtgctacccccgccaagtccgag

SEQ ID NO: 3696 - DNA, 2760 bp, Homo Sapiens
tcaaggtacagtgacaactgggaagccatcactgggacgggggacccggagcactacctcatcaatgtctgcaagtctctggccccgcaggctggcactgagccgtgccctccagaagcagccgcgtgtctgctgggtggctccaagcccgtgaacctcggcagggtaagggacggacctcagtggagagatggcataattgtcctgaaatacgttgatggcgacttatgtccagatgggattcggaaaaagtcaaccaccatccgattcacctgcagcgagagccaagtgaactccaggcccatgttcatcagcgccgtggaggactgtgagtacacctttgcctggcccacagccacagcctgtcccatgaagagcaacgagcatgatgactgccaggtcaccaacccaagcacaggacacctgtttgatctgagctccttaagtggcagggcgggattcacagctgcttacagcgagaaggggttggtttacatgagcatctgtggggagaatgaaaactgccctcctggcgtgggggcctgctttggacagaccaggattagcgtgggcaaggccaacaagaggctgagatacgtggaccaggtcctgcagctggtgtacaaggatgggtccccttgtccctccaaatccggcctgagctataagagtgtgatcagtttcgtgtgcaggcctgaggccgggccaaccaataggcccatgctcatctccctggacaagcagacatgcactctcttcttctcctggcacacgccgctggcctgcgagcaagcgaccgaatgttccgtgaggaatggaagctctattgttgacttgtctccccttattcatcgcactggtggttatgaggcttatgatgagagtgaggatgatgcctccgataccaaccctgatttctacatcaatatttgtcagccactaaatcccatgcacggagtgccctgtcctgccggagccgctgtgtgcaaagttcctattgatggtccccccatagatatcggccgggtagcaggaccaccaatactcaatccaatagcaaatgagatttacttgaattttgaaagcagtactccttgcttagcggacaagcatttcaactacacctcgctcatcgcgtttcactgtaagagaggtgtgagcatgggaacgcctaagctgttaaggaccagcgagtgcgactttgtgttcgaatgggagactcctgtcgtctgtcctgatgaagtgaggatggatggctgtaccctgacagatgagcagctcctctacagcttcaacttgtccagcctttccacgagcacctttaaggtgactcgcgactcgcgcacctacagcgttggggtgtgcacctttgcagtcgggccagaacaaggaggctgtaaggacggaggagtctgtctgctctcaggcaccaagggggcatcctttggacggctgcaatcaatgaaactggattacaggcaccaggatgaagcggtcgttttaagttacgtgaatggtgatcgttgccctccagaaaccgatgacggcgtcccctgtgtcttccccttcatattcaatgggaagagctacgaggagtgcatcatagagagcagggcgaagctgtggtgtagcacaactgcggactacgacagagaccacgagtggggcttctgcagacactcaaacagctaccggacatccagcatcatatttaagtgtgatgaagatgaggacattgggaggccacaagtcttcagtgaagtgcgtgggtgtgatgtgacatttgagtggaaaacaaaagttgtctgccctccaaagaagttggagtgcaaattcgtccagaaacacaaaacctacgacctgcggctgctctcctctctcaccgggtcctggtccctggtccacaacggagtctcgtactatataaatctgtgccagaaaatatataaagggcccctgggctgctctgaaagggccagcatttgcagaaggaccacaactggtgacgtccaggtcctgggactcgttcacacgcagaagctgggtgtcataggtgacaaagttgttgtcacgtactccaaaggttatccgtgtggtggaaataagaccgcatcctccgtgatagaattgacctgtacaaagacggtgggcagacctgcattcaagaggtttgatatcgacagctgcacttactacttcagctgggactcccgggctgcctgcgccgtgaagcctcaggaggtgcagatggtgaatgggaccatcaccaaccctataaatggcaagagcttcagcctcggagatatttattttaagctgttcagagcctctggggacatgaggaccaatggggacaactacctgtatgagatccaactttcctccatcacaagctccagaaacccggcgtgctctggagccaacatatgccaggtgaagcccaacgatcagcacttcagtcggaaagttggaacctctgacaagaccaagtactaccttcaagacggcgatctcgatgtcgtgtttgcctcttcctctaagtgcggaaaggataagaccaagtctgtttcttccaccatcttcttccactgtgaccctctggtggaggacgggatccccgagttcagtcacgagactgccgactgccagtacctcttctcttggtacacctcagccgtgtgtcctctgggggtgggctttgacagcgagaatcccggggacgacgggcagatgcacaaggggctgtcagaacggagccag

SEQ ID NO: 3697 - DNA, 1734 bp, Homo Sapiens
gcagaccccggaacgccgggggaagccgagggcccagcgtgcccggccgcctgtgtctgcagctacgatgacgacgcggatgagctcagcgtcttctgcagctccaggaacctcacgcgcctgcctgatggagtcccgggcggcacccaagccctgtggctggacggcaacaacctctcgtccgtccccccggcagccttccagaacctctccagcctgggcttcctcaacctgcagggcggccagctgggcagcctggagccacaggcgctgctgggcctagagaacctgtgccacctgcacctggagcggaaccagctgcgcagcctggcactcggcacgtttgcacacacgcccgcgctggcctcgctcggcctcagcaacaaccgtctgagcaggctggaggacgggctcttcgagggcctcggcagcctctgggacctcaacctcggctggaatagcctggcggtgctccccgatgcggcgttccgcggcctgggcagcctgcgcgagctggtgctggcgggcaacaggctggcctacctgcagcccgcgctcttcagcggcctggccgagctccgggagctggacctgagcaggaacgcgctgcgggccatcaaggcaaacgtgttcgtgcagctgccccggctccagaaactctacctggaccgcaacctcatcgctgccgtggccccgggcgccttcctgggcctgaaggcgctgcgatggctggacctgtcccacaaccgcgtggctggcctcctggaggacacgttccccggtctgctgggcctgcgtgtgctgcggctgtcccacaacgccatcgccagcctgcggccccgcaccttcaaggacctgcacttcctggaggagctgcagctgggccacaaccgcatccggcagctggctgagcgcagctttgagggcctggggcagcttgaggtgctcacgctagaccacaaccagctccaggaggtcaaggcgggcgctttcctcggcctcaccaacatggcggtcatgaacctctctgggaactgtctccggaaccttccggagcaggtgttccggggcctgggcaagctgcacagcctgcacctggagggcagctgcctgggacgcatccgcccgcacaccttcaccggcctctcggggctccgccgactcttcctcaaggacaacggcctcgtgggcattgaggagcagagcctgtgggggctggcggagctgctggagctcgacctgacctccaaccagctcacgcacctgccccaccgcctcttccagggcctgggcaagctggagtacctgctgctctcccgcaaccgcctggcagagctgccggcggacgccctgggccccctgcagcgggccttctggctggacgtctcgcacaaccgcctggaggcattgcccaacagcctcttggcaccactggggcggctgcgctacctcagcctcaggaacaactcactgcggaccttcacgccgcagcccccgggcctggagcgcctgtggctggagggtaacccctgggactgtggctgccctctcaaggcgctgcgggacttcgccctgcagaaccccagtgctgtgccccgcttcgtccaggccatctgtgagggggacgattgccagccgcccgcgtacacctacaacaacatcacctgtgccagcccgcccgaggtcgtggggctcgacctgcgggacctcagcgaggcccactttgctccctgc

SEQ ID NO: 3698 - DNA, 768 bp, Homo Sapiens
tcctcttcggacacctgcggcccctgcgagccggcctcctgcccgcccctgcccccgctgggctgcctgctgggcgagacccgcgacgcgtgcggctgctgccctatgtgcgcccgcggcgagggcgagccgtgcgggggtggcggcgccggcagggggtactgcgcgccgggcatggagtgcgtgaagagccgcaagaggcggaagggtaaagccggggcagcagccggcggtccgggtgtaagcggcgtgtgcgtgtgcaagagccgctacccggtgtgcggcagcgacggcaccacctacccgagcggctgccagctgcgcgccgccagccagagggccgagagccgcggggagaaggccatcacccaggtcagcaagggcacctgcgagcaaggtccttccatagtgacgccccccaaggacatctggaatgtcactggtgcccaggtgtacttgagctgtgaggtcatcggaatcccgacacctgtcctcatctggaacaaggtaaaaaggggtcactatggagttcaaaggacagaactcctgcctggtgaccgggacaacctggccattcagacccggggtggcccagaaaagcatgaagtaactggctgggtgctggtatctcctctaagtaaggaagatgctggagaatatgagtgccatgcatccaattcccaaggacaggcttcagcatcagcaaaaattacagtggttgatgccttacatgaaataccagtgaaaaaaggtgaaggtgccgagcta

SEQ ID NO: 3699 - DNA, 759 bp, Homo Sapiens
cttgggatccgcgacgtgggcggccggcgccccaagtgtggtccgtgccggccagagggctgcccggcgcctgcgccctgcccggcgcccgggatctcggcgctcgacgagtgcggctgctgcgcccgctgcctgggagccgagggcgcgagctgcgggggccgcgccggcgggcgctgtggccccggcctggtatgcgcgagccaggccgctggggcagcgcccgagggcaccgggctctgcgtgtgcgcgcagcgcggcaccgtctgcggctccgacggtcgctcgtaccccagcgtctgcgcgctgcgcctgcgcgctcggcacacgccccgcgcgcaccccggtcacctgcacaaggcgcgcgacggcccttgcgagttcgctcctgtggtcgtcgttcctccccgaagtgttcacaacgtcaccggggcgcaggtgggcctgtcctgtgaagtgagggctgtgcctaccccagtcatcacgtggagaaaggtcacgaagtcccctgagggcacccaagcactggaggagctgcctggggaccatgtcaatatagctgtccaagtgcgagggggcccttctgaccatgaggccacggcctggattttgatcaaccccctgcgaaaggaggatgagggtgtgtaccagtgccatgcagccaacatggtgggagaggctgagtcccacagcacagtgacggttctagatctgagtaaatacaggagcttccacttcccagctcccgatgaccgcatg

SEQ ID NO: 3700 - DNA, 258 bp, Homo Sapiens
gccccagtggcccccatgactccttacctgatgctgtgccagccacacaagagatgtggggacaagttctacgaccccctgcagcactgttgctatgatgatgccgtcgtgcccttggccaggacccagacgtgtggaaactgcaccttcagagtctgctttgagcagtgctgcccctggaccttcatggtgaagctgataaaccagaactgcgactcagcccggacctcggatgacaggctttgtcgcagtgtcagc

SEQ ID NO: 3701 - DNA, 282 bp, Homo Sapiens
cccgctggctcagaaccatggctgtgccagccggcacccaggtgtggagacaagatctacaaccccttggagcagtgctgttacaatgacgccatcgtgtccctgagcgagacccgccaatgtggtcccccctgcaccttctggccctgctttgagctctgctgtcttgattcctttggcctcacaaacgattttgttgtgaagctgaaggttcagggtgtgaattcccagtgccactcatctcccatctccagtaaatgtgaaagcagaagacgttttccc

SEQ ID NO: 3702 - DNA, 303 bp, Homo Sapiens
actacagacgctcctgttggctcaggactgtggctgtgccagccgacacccaggtgtgggaacaagatctacaacccttcagagcagtgctgttatgatgatgccatcttatccttaaaggagacccgccgctgtggctccacctgcaccttctggccctgctttgagctctgctgtcccgagtcttttggcccccagcagaagtttcttgtgaagttgagggttctgggtatgaagtctcagtgtcacttatctcccatctcccggagctgtaccaggaacaggaggcacgtcctgtaccca

SEQ ID NO: 3703 - DNA, 69 bp, Homo Sapiens
aaatcaccatgtggaaaccaagcaaacgtgttgtgcatcagccggcttgagtttgttcaatatcaaagc

SEQ ID NO: 3704 - DNA, 528 bp, Homo Sapiens
ctgctgcgcccaacagctgcatcgcagagcagggccctgggccctggagcccctggaggaagcagccggtccagcctgaggagccggtggggcaggttcctgctccagcgcggctcctggactggccccaggtgctggccccgggggtttcaatccaagcataactcagtgacgcatgtgtttggcagcgggacccagctcaccgttttaagtcagcccaaggccaccccctcggtcactctgttcccgccgtcctctgaggagctccaagccaacaaggctacactggtgtgtctcatgaatgacttttatccgggaatcttgacggtgacctggaaggcagatggtacccccatcacccagggcgtggagatgaccacgccctccaaacagagcaacaacaagtacgcggccagcagctacctgagcctgacgcccgagcagtggaggtcccgcagaagctacagctgccaggtcatgcacgaagggagcaccgtggagaagacggtggcccctgcagaatgttca

SEQ ID NO: 3705 - DNA, 645 bp, Homo Sapiens
gttctggcgcagccgccctcagtgtctggggccccagggcagacggtcaccatctcgtgcactgggagcagcaccaacatcggggcgggttatgctgtacactggtaccagcagtttccaggagcggcccccaaagtcctcatctatggtaactacaatcggccctcaggggtccctgaccgattctctggctccaagtctggcacctcagcctccctggccatcactgggctccaggctgaagatgaggctgattattactgccagtcgtatgacggcagcctgagtggttctgtcttcggagctgggaccaaggtcaccgtcctgggtcagcccaaggccaaccccactgtcactctgttcccgccctcctctgaggagctccaagccaacaaggccacactagtgtgtctgatcagtgacttctacccgggagctgtgacagtggcctggaaggcagatggcagccccgtcaaggcgggagtggagaccaccaaaccctccaaacagagcaacaacaagtacgcggccagcagctacctgagcctgacgcccgagcagtggaagtcccacagaagctacagctgccaggtcacgcatgaagggagcaccgtggagaagacagtggcccctacagaatgttca

SEQ ID NO: 3706 - DNA, 918 bp, Homo Sapiens
caatcactagagtttaatagtccagccgataattacactgtctgcgaaggtgataacgccaccctgtcatgctttattgatgagcatgtcaccagggtggcatggttaaaccgttctaacattctttatgcaggaaatgacaggtggacatctgatcctagggttagactgttgataaatacgccagaggaattcagtatccttataacagaggttggtttaggagacgagggtttgtacacctgctcttttcaaacaagacatcaaccctataccacacaggtatatctgatcgtacacgtaccggcgagaatcgtgaatatttcatctcccgtgacggtgaatgaagggggcaatgttaatcttttatgtctggctgtgggtaggccagaaccgacagtcacatggcgtcagctaagggatggttttacaagcgagggcgaaatattagaaataagtgacattcagagggggcaagccggggagtatgagtgtgtaacacacaacggcgtaaactctgcccccgatagtcgtagagttctagtaaccgtcaattaccctccgactataacagacgtaacgtccgcccgtactgcattaggaagagcggcgcttttgagatgcgaggctatggccgtgccaccagcagattttcagtggtataaggatgatagacttttatcatctggtacagccgagggcctgaaagtacagacagagaggacacgtagcatgcttttgttcgccaatgtctccgctcgtcattacggcaactacacttgccgtgcggccaaccgtttgggtgctagtagtgcaagtatgcgtttgcttaggccgggctccctagagaacagcgcgcctaggcccccaggccttttagcattgctatccgctttgggctggctgtggtggaggatg

SEQ ID NO: 3707 - DNA, 1470 bp, Homo Sapiens
atgacatcgatagtgatggaccctcaaccggagttgtggatagagtccaactacccccaggccccttgggagaacatcacgctttggtgccgaagcccctctcggatatcaagcaagttcctgctgctgaaggataagacacagatgacctggatccgcccttcccacaagaccttccaagtttcattccttataggtgcccttactgagtccaatgcaggtctttaccggtgctgctactggaaggagacaggctggtcaaagcccagtaaagttctagagttggaggcaccaggccaactgcccaagcccatcttctggattcaggctgagacccccgctcttcctgggtgtaatgttaacatcctctgccatggctggctgcaggatttggtattcatgctgtttaaagagggatatgcagagcctgtggattaccaagtcccaactgggacaatggccatattctccattgacaacctgacacctgaggatgaaggggtttacatctgccgcactcatatccagatgctccccaccctgtggtcagagcccagcaaccccctgaagctggttgtagcaggactctaccccaaaccaactttgacagcccatcctgggcccatcatggcacctggagaaagcctgaatctcaggtgccaagggccaatctatggaatgacctttgctctaatgagggttgaagacttggagaagtccttttaccacaagaagacaataaaaaatgaggcaaatttcttcttccagtctttgaagatccaagatactggacattacctctgtttttactatgacgcatcatatagaggttcactccttagtgatgtcctgaaaatctgggtaactgacactttccccaagacctggctacttgctcggcccagtgctgtggtccaaatgggtcagaatgtgagcctacggtgtcgaggaccagtggatggagtgggtcttgcactctataagaaaggagaagacaaaccacttcaatttttggatgccaccagcatcgatgacaacacatcattcttcctcaacaatgtaacctacagtgatactggcatctatagctgccactatcttctcacctggaagacctccattaggatgccatcacacaacactgtggagcttatggttgtagataagccccccaaaccctccctgtcagcttggccaagcactgtgttcaagctaggaaaggccatcacccttcagtgccgagtatctcatccagtactggaattttctctggaatgggaagaaagagaaacattccaaaaattctcagtaaacggagacttcatcatcagtaatgttgacgggaaaggcacagggacctacagttgcagctatcgcgtagagacacatcctaacatctggtcacatcgcagtgagcccctgaagctgatggggccagcaggctatctcacctggaattacgttctgaat

SEQ ID NO: 3708 - DNA, 1170 bp, Homo Sapiens
cctccattaatcaatggtctgtatacaaatagaactgttattaaagccacagctgtgagacattccaaaaaacactttgactgcagagctgaagggacaccatctcctgaagtcatgtggatcatgccagacaatattttcctcacagccccatactatggaagcagaatcacagtccataaaaatggaaccttggaaattaggaatgtgaggctttcagattcagccgactttatctgtgtggcccgaaatgaaggtggagagagcgtgttggtagtacagttagaagtactggaaatgctgagaagaccgacatttagaaatccatttaatgaaaaaatagttgcccagctgggaaagtccacagcattgaattgctctgttgatggtaacccaccacctgaaataatctggattttaccaaatggcacacgattttccaatggaccacaaagttatcagtatctgatagcaagcaatggttcttttatcatttctaaaacaactcgggaggatgcaggaaaatatcgctgtgcagctaggaataaagttggctatattgagaaattagtcatattagaaattggccagaagccagttattcttacctatgcaccagggacagtaaaaggcatcagtggagaatctctatcactgcattgtgtgtctgatggaatccctaagccaaatatcaaatggactatgccaagtggttatgtagtagacaggcctcaaattaatgggaaatacatattgcatgacaatggcaccttagtcattaaagaagcaacagcttatgacagaggaaactatatctgtaaggctcaaaatagtgttggtcatacactgattactgttccagtaatgattgtagcctaccctccccgaattacaaatcgtccacccaggagtattgtcaccaggacaggggcagcctttcagctccactgtgtggccttgggagttcccaagccagaaatcacgtgggagatgcctgaccactcccttctctcaacggcaagtaaagagaggacacatggaagtgagcagcttcacttacaaggtaccctagtcattcagaatccccaaacctccgattctgggatatacaaatgcacagcaaagaacccacttggtagtgattatgcagcaacgtatattcaagtaatc

SEQ ID NO: 3709 - DNA, 657 bp, Homo Sapiens
ctggaagtgtcagagagccctgggagtatccaggtggcccggggtcagacagcagtcctgccctgcactttcactaccagcgctgccctcattaacctcaatgtcatttggatggtcactcctctctccaatgccaaccaacctgaacaggtcatcctgtatcagggtggacagatgtttgatggtgccccccggttccacggtagggtaggatttacaggcaccatgccagctaccaatgtctctatcttcattaataacactcagttatcagacactggcacctaccagtgcctggtcaacaaccttccagacatagggggcaggaacattggggtcaccggtctcacagtgttagttcccccttctgccccacactgccaaatccaaggatcccaggatattggcagcgatgtcatcctgctctgtagctcagaggaaggcattcctcgaccaacttacctttgggagaagttagacaataccctcaaactacctccaacagctactcaggaccaggtccagggaacagtcaccatccggaacatcagtgccctgtcttcaggtttgtaccagtgcgtggcttctaatgctattggaaccagcacctgtcttctggatctccaggttatttcaccccagcccaggaacattgga

SEQ ID NO: 3710 - DNA, 1260 bp, Homo Sapiens
tacctgacagtcaacattgagcctctcccccctgtggtggctggagacgccgtgactttgaagtgtaacttcaagacagatgggcgcatgcgggagatcgtgtggtaccgggtgacggatggtggcaccatcaagcaaaagatcttcaccttcgacgccatgttctccaccaactactcacacatggagaactaccgcaagcgagaggacctggtgtaccagtccactgtgaggctgcccgaggtccggatctcagacaatggtccctatgagtgccatgtgggcatctacgaccgcgccaccagggagaaggtggtcctggcatcaggcaacatcttcctcaacgtcatggctcctcccacctccattgaagtggtggctgctgacacaccagcccccttcagccgctaccaagcccagaacttcacgctggtctgcatcgtgtctggaggaaaaccagcacccatggtttatttcaaacgagatggggaaccaatcgacgcagtgcccctatcagagccaccagctgcgagctccggccccctacaggacagcaggcccttccgcagccttctgcaccgtgacctggatgacaccaagatgcagaagtcactgtccctcctggacgccgagaaccggggtgggcgaccctacacggagcgcccctcccgtggcctgaccccagatcccaacatcctcctccagccaaccacagagaacataccagagacggtcgtgagccgtgagtttccccgctgggtccacagcgccgagcccacctacttcctgcgccacagccgcaccccgagcagtgacggcactgtggaagtacgtgccctgctcacctggaccctcaacccacagatcgacaacgaggccctcttcagctgcgaggtcaagcacccagctctgtcgatgcccatgcaggcagaggtcacgctggttgcccccaaaggacccaaaattgtgatgacgcccagcagagcccgggtaggggacacagtgaggattctggtccatgggtttcagaacgaagtcttcccggagcccatgttcacgtggacgcgggttgggagccgcctcctggacggcagcgctgagttcgacgggaaggagctggtgctggagcgggttcccgccgagctcaatggctccatgtatcgctgcaccgcccagaacccactgggctccaccgacacgcacacccggctcatcgtgtttgaaaacccaaatatcccaagaggaacggaggactctaat

SEQ ID NO: 3711 - DNA, 3318 bp, Homo Sapiens
cagcggcaggtcaccgttcaggaaggacccttgtaccgcacggagggctcccacatcactatctggtgcaatgtgagtggctaccagggaccttctgagcagaatttccagtggtccatttacctgccttcgtcgccagagcgagaggtgcagatcgtcagcaccatggactcttccttcccctatgccatctacacccagcgcgtccgcggagggaagatcttcatagaaagagtccaggggaactcaaccctattgcacatcacagatcttcaggcccgggatgccggggagtatgaatgccacacacccagcactgataagcaatactttgggagttacagtgcaaagatgaacctagtggtgatcccagactccctgcagaccactgccatgccccagactctgcacagagtggagcaggacccgctggagctcacttgtgaggtggcctcagagaccattcagcacagccacctgtctgtggcctggctccggcagaaagttggcgagaagcccgtggaggtcatctccctgagccgagatttcatgcttcactccagcagcgaatatgcccagaggcagagcctgggggaggtgcggctggacaagctggggaggaccaccttccgcctcaccatcttccacctgcagccttctgaccagggcgaattctactgcgaggccgccgagtggatccaggatccggatgggtcgtggtatgctatgacccgaaagcgttccgagggagccgtggtcaacgtccagccaactgacaaagaattcactgttcggctggagacagagaagcggctgcacacggtgggcgagccggtggagttcagatgcatcctggaggctcagaatgttcccgaccgttactttgctgtctcctgggccttcaacagctcgctcatcgccaccatgggtcctaacgctgtgcctgtcctcaacagcgaatttgctcaccgggaagccaggggacagcttaaggtggccaaagagagcgacagtgtctttgtgctgaagatctaccacctccgccaggaagatagcgggaaatacaactgccgggtgactgagcgagagaaaaccgtgaccggggaattcattgataaggagagcaagcgtcccaagaacatccccatcatagtcctccccctcaagagcagcatctccgtggaggtggccagcaatgccagcgtcatccttgagggcgaggacctgcgcttctcctgcagtgtccgcacggcaggcaggccgcagggtcgcttctctgtcatctggcagcttgtggacaggcagaaccgccgcagcaatatcatgtggctagaccgggatggcaccgtgcagccaggctcgtcctactgggagcgcagcagctttgggggcgtccagatggagcaggtgcagcccaactcgttcagcctgggcatcttcaacagcaggaaggaggacgagggccagtatgaatgccatgtgactgaatgggtgcgggcagtggatggcgagtggcagattgttggggagcgccgggccagcactcccatctccatcacagctcttgaaatgggcttcgcagtcacagccatctcccggacaccgggggtgacctacagcgactcctttgacttgcagtgtatcatcaaaccccactaccctgcctgggtccccgtgtcggtgacatggcggttccagccggtgggcacggtggagttccatgacttggtgaccttcacccgggacggaggggtccagtggggggacaggtcctccagcttccgaacccgaactgccatcgagaaggctgagtccggcaacaacgtccgcctaagcatcagccgagccagtgacacggaagcaggcaagtaccagtgtgtggcagagctgtggcggaagaactacaacaacacctggacgcgactggcggagaggacctccaacctgctggagatcagggtgctgcagccagtgacaaagctgcaggtgagcaaatcgaagaggaccctcaccctggtggaaaacaagcccattcagttgaactgctcagtcaagtctcagactagccagaactcccactttgcggtgctctggtatgtccacaagccctcggatgccgatggcaagcttatcctgaagaccacccacaactccgcctttgaatacggtacttacgccgaggaggagggcctgagagccaggctccagtttgagaggcatgtgtcggggggcctgttcagcctcaccgtccagagagccgaggtcagcgacagcggcagctactactgccacgtggaggagtggctgctgagccccaactacgcctggtacaagctggcagaggaggtttctgggcgcacagaagtcactgtgaaacagccagacagccgcctgaggctcagccaagcccaggggaacctgtcggttctggagacccggcaggtacagctggagtgtgtggttctcaaccgcaccagcataacctcccagctcatggtggaatggtttgtatggaagcccaaccaccctgagcgggagactgtggcccgcttgagccgtgacgccaccttccactatggagagcaggcagccaagaacaatctgaaggggcggctgcatttggagagtccttcccccggcgtgtaccgtctcttcatccagaacgtggctgtgcaggacagcgggacctacagctgccatgtggaggagtggctgcccagccccagtggcatgtggtataagcgggcagaggacaccgctgggcagacagctctgacagtcatgcgaccagatgcttccctgcaggtggacacagtggtccccaatgccacggtctctgagaaggcagctttccagctggactgtagcatcgtgtcccgctccagccaggactcccgcttcgctgtggcctggtattccctgaggactaaagctggggggaaaaggagcagccctggcctggaagaacaggaagaggaaagggaggaggaggaggaggaggaggaggacgacgacgacgacgacccaacagagcggacggccctgctgagcgtgggcccagatgctgtctttggcccagagggcagtccttgggagggcaggcttcgcttccagaggctctccccggtgctctaccggctcacagtgctgcaggcaagcccccaagatacaggcaattactcctgccatgtggaggagtggctgcccagccctcagaaggaatggtaccggctgacggaggaggagtcagcccccatcggcatccgtgttctagatacaagtcccaccctccagtccatcatctgctccaacgacgca

SEQ ID NO: 3712 - DNA, 918 bp, Homo Sapiens
aacctctcccaggacgacagccagccctggacatctgatgaaacagtggtggctggtggcaccgtggtgctcaagtgccaagtgaaagatcacgaggactcatccctgcaatggtctaaccctgctcagcagactctctactttggggagaagagagcccttcgagataatcgaattcagctggttacctctacgccccacgagctcagcatcagcatcagcaatgtggccctggcagacgagggcgagtacacctgctcaatcttcactatgcctgtgcgaactgccaagtccctcgtcactgtgctaggaattccacagaagcccatcatcactggttataaatcttcattacgggaaaaagacacagccaccctaaactgtcagtcttctgggagcaagcctgcagcccggctcacctggagaaagggtgaccaagaactccacggagaaccaacccgcatacaggaagatcccaatggtaaaaccttcactgtcagcagctcggtgacattccaggttacccgggaggatgatggggcgagcatcgtgtgctctgtgaaccatgaatctctaaagggagctgacagatccacctctcaacgcattgaagttttatacacaccaactgcgatgattaggccagaccctccccatcctcgtgagggccagaagctgttgctacactgtgagggtcgcggcaatccagtcccccagcagtacctatgggagaaggagggcagtgtgccacccctgaagatgacccaggagagtgccctgatcttccctttcctcaacaagagtgacagtggcacctacggctgcacagccaccagcaacatgggcagctacaaggcctactacaccctcaatgttaatgaccccagtccggtgccctcctcctccagcacctaccac

SEQ ID NO: 3713 - DNA, 912 bp, Homo Sapiens
ccaggggcaggacaggaagtacagacagagaacgtgacagtggctgagggtggggtggctgagatcacctgccgtctgcaccagtatgatgggtccatagttgtcatccagaacccagcccggcagaccctcttcttcaatggcacccgtgccttgaaggatgagcgtttccagcttgaggagttctccccacgccgggtgcggatccggctctcagatgcccgcctggaggacgaggggggctatttctgccagctctacacagaagacacccaccaccagattgccacgctcacggtactagtggccccagagaatcctgtggtggaggtccgggagcaggcggtagagggcggcgaggtggagctcagctgcctcgttccgcggtcccgtccggctgccaccctgcgctggtaccgggaccgcaaggagctgaaaggagtgagcagcagccaggaaaatggcaaggtctggagcgtggcaagcacagtacggtttcgtgtggaccgtaaggacgacggtggtatcatcatctgtgaggcgcagaaccaggcgctgccctccggacacagcaagcagacgcagtacgtgctggatgtgcagtactcccccacggcccggattcatgcctcccaagctgtggtgagggagggagacacgctggtgttgacgtgtgctgtcacggggaaccccaggccaaaccagatccgctggaaccgcgggaatgagtctttgccggagagggcggaggccgtgggagagacgctcacgctgccgggtctggtatccgcggataacggcacctacacttgcgaggcgtccaataagcacggccatgcgagggcgctctacgtacttgtggtctacgaccctggtgcggtggtagaggctcagacgtcggttccctatgcc

SEQ ID NO: 3714 - DNA, 798 bp, Homo Sapiens
atgggtcagaaggaaaggagcacagcagatactctgccggatctggaggaatggaagtcagcggcgggtctgcgatggtggcaaacagcagtggtggacggttctgggtctggtaatgaagtcatagaaggcccccaaaatgcaagagtcctgaagggctcccaggctcgcttcaactgcaccgtctcccagggctggaagctcatcatgtgggctctcagtgacatggtggtgctaagcgtcaggcccatggagcccatcatcaccaatgaccgcttcacctctcagaggtacgaccagggcgggaacttcacctcggagatgatcatccacaatgtggagcccagtgattcggggaacatcagatgcagcctccagaacagtcgcctgcatggatctgcttaccttaccgtccaagttatgggagagctgttcattcccagtgttaatcttgtagtcgctgagaatgaaccttgtgaagttacttgtctaccctcacactggacccggctcccggatatttcctgggagctcggtctcctggtcagccattcaagctattattttgttccggagcccagcgaccttcaaagtgcagtgagcatcctggctctgaccccacagagcaatgggactttgacttgcgtggctacctggaagagcctgaaggcccgcaagtctgcaactgtaaatctcactgtgattcggtgtccccaagacactggaggtggtattaatattccaggtgtattatcaagtttaccgagtttaggtttttcattgcctacttggggcaaa

SEQ ID NO: 3715 - DNA, 378 bp, Homo Sapiens
tgtactctctctgtcacacaaccgtggtacctagaagtggactacactcatgaggccgtcaccataaagtgtaccttctccgcaaccggatgcccttctgagcaaccaacatgcctgtggtttcgctacggtgctcaccggcctgagaacctgtgcttggacgggtgcaaaagtgaggcagacaagttcacagtgagggaggccctcaaagaaaaccaagtttccctcactgtaaacagagtgacttcaaatgacagtgcaatttacatctgtggaatagcattccccagtgtgccggaagcgagagctaaacagacaggaggagggaccacactggtggtaagagaaattaagctgctcagcaaggaactgcggagc

SEQ ID NO: 3716 - DNA, 1656 bp, Homo Sapiens
cgggaggtgctggtccccgaggggcccttgtaccgcgtggctggcacagctgtctccatctcctgcaatgtgaccggctatgagggccctgcccagcagaacttcgagtggttcctgtataggcccgaggccccagatactgcactgggcattgtcagtaccaaggatacccagttctcctatgctgtcttcaagtcccgagtggtggcgggtgaggtgcaggtgcagcgcctacaaggtgatgccgtggtgctcaagattgcccgcctgcaggcccaggatgccggcatttatgagtgccacaccccctccactgatacccgctacctgggcagctacagcggcaaggtggagctgagagttcttccagatgtcctccaggtgtctgctgcccccccagggccccgaggccgccaggccccaacctcacccccacgcatgacggtgcatgaggggcaggagctggcactgggctgcctggcgaggacaagcacacagaagcacacacacctggcagtgtcctttgggcgatctgtgcccgaggcaccagttgggcggtcaactctgcaggaagtggtgggaatccggtcagacttggccgtggaggctggagctccctatgctgagcgattggctgcaggggagcttcgtctgggcaaggaagggaccgatcggtaccgcatggtagtagggggtgcccaggcaggggacgcaggcacctaccactgcactgccgctgagtggattcaggatcctgatggcagctgggcccagattgcagagaaaagggccgtcctggcccacgtggatgtgcagacgctgtccagccagctggcagtgacagtggggcctggtgaacgtcggatcggcccaggggagcccttggaactgctgtgcaatgtgtcaggggcacttcccccagcaggccgtcatgctgcatactctgtaggttgggagatggcacctgcgggggcacctgggcccggccgcctggtagcccagctggacacagagggtgtgggcagcctgggccctggctatgagggccgacacattgccatggagaaggtggcatccagaacataccggctacggctagaggctgccaggcctggtgatgcgggcacctaccgctgcctcgccaaagcctatgttcgagggtctgggacccggcttcgtgaagcagccagtgcccgttcccggcctctccctgtacatgtgcgggaggaaggtgtggtgctggaggctgtggcatggctagcaggaggcacagtgtaccgcggggagactgcctccctgctgtgcaacatctctgtgcggggtggccccccaggactgcggctggccgccagctggtgggtggagcgaccagaggacggagagctcagctctgtccctgcccagctggtgggtggcgtaggccaggatggtgtggcagagctgggagtccggcctggaggaggccctgtcagcgtagagctggtggggccccgaagccatcggctgagactacacagcttggggcccgaggatgaaggcgtgtaccactgtgcccccagcgcctgggtgcagcatgccgactacagctggtaccaggcgggcagtgcccgctcagggcctgttacagtctacccctacatgcatgccctggacacc

SEQ ID NO: 3717 - DNA, 2094 bp, Homo Sapiens
cgagggaagcctgaggtggtatcggtggtgggccgggctgaggagagtgtggtgctgggctgtgacctgctgcccccggccggccggccccccctgcatgtcatcgagtggctgcgctttggattcctgcttcccatcttcatccagttcggcctctactctccccgaattgaccctgattacgtgggacgagtccggctgcagaagggggcctctctccagattgagggtctccgggtggaagaccagggctggtacgagtgccgcgtgttcttcctggaccagcacatccctgaagacgattttgctaacggctcctgggtgcatctgacagtcaattcaccccctcaattccaggagacacctcctgctgtgttggaagtgcaggaactggagcctgtgaccctgcgttgtgtggcccgtggcagccccctgcctcatgtgacgtggaagctccgaggaaaggaccttggccagggccagggccaggtgcaagtgcagaacgggacgctgcggatccgccgggtagagcgaggcagctctggggtctacacctgccaagcctccagcactgagggcagcgccacccacgccacccagctgctagtgctaggacccccagtcatcgtggtgccccccaagaacagcacagtcaatgcctcccaggatgtttcattggcctgccatgctgaggcataccctgctaacctcacctacagctggttccaggacaacatcaatgtcttccacattagccgcctgcagccccgggtgcagatcctggtggacgggagcctgcggctgctggccacccagcctgatgatgccggctgctacacctgtgtgcccagcaatggcctcctgcatccaccctcagcctctgcctacctcactgtgctctgcatgccgggggtgatccgctgcccggttcgtgccaaccccccactgctctttgtcagctggaccaaggatggaaaggccctgcagctggacaagttccctggctggtcccagggcacagaaggctcactgatcatcgccctggggaacgaggatgccctgggagaatactcctgcaccccctacaacagtcttggtaccgccgggccctctcctgtgacccgcgtgctgctcaaggctcccccagcttttatagagcggcccaaggaagaatatttccaagaagtagggcgggagctgctcatcccctgctccgcccaaggggaccctcctcctgttgtctcttggaccaaggtgggccgggggctgcaaggccaggcccaggtggacagcaacagcagcctcatcctgcgaccattgaccaaggaggcccacgggcactgggaatgcagtgccagcaatgctgtggcccgagtggccacctccacgaacgtctacgtgctgggcactagccctcatgttgtcaccaatgtgtccgtggtggctttgcccaagggtgccaatgtctcctgggagcctggctttgatggtggttatctgcagagattcagtgtctggtacaccccactggccaagcgtcctgaccgaatgcaccatgactgggtgtccttggcagtgcctgtgggggctgctcacctcctagtgccagggctgcagccccacacccagtaccagttcagcgtgctagctcagaacaagctggggagtggtcccttcagcgaaatcgtcttgtctgctccggaagggcttcctaccacgccagctgcacccgggcttcccccaacagagataccgcctcccctgtcccctccgcggggtctggtggcagtgaggacaccccggggggtactcctgcattgggatcccccagagctggtccctaagagactggatggctacgtcttggaaggccggcaaggctcccagggctgggaggtgctggacccggctgtggcaggcacagaaacagagctgctggtgccaggcctcatcaaggatgttctctacgagttccgcctcgtggccttcgcgggcagcttcgtcagcgaccccagcaacacggccaacgtctccacttccggtctggaggtctacccttcgcgcacgcagctgccgggcctcctgcctcagccc

SEQ ID NO: 3718 - DNA, 480 bp, Homo Sapiens
agcccaggccagggcacccagtctgagaacagctgcacccacttcccaggcaacctgcctaacatgcttcgagatctccgagatgccttcagcagagtgaagactttctttcaaatgaaggatcagctggacaacttgttgttaaaggagtccttgctggaggactttaagggttacctgggttgccaagccttgtctgagatgatccagttttacctggaggaggtgatgccccaagctgagaaccaagacccagacatcaaggcgcatgtgaactccctgggggagaacctgaagaccctcaggctgaggctacggcgctgtcatcgatttcttccctgtgaaaacaagagcaaggccgtggagcaggtgaagaatgcctttaataagctccaagagaaaggcatctacaaagccatgagtgagtttgacatcttcatcaactacatagaagcctacatgacaatgaagatacgaaac

SEQ ID NO: 3719 - DNA, 642 bp, Homo Sapiens
catgggacagagctgcccagccctccgtctgtgtggtttgaagcagaatttttccaccacatcctccactggacacccatcccaaatcagtctgaaagtacctgctatgaagtggcactcctgaggtatggaatagagtcctggaactccatctccaactgtagccagaccctgtcctatgaccttaccgcagtgaccttggacctgtaccacagcaatggctaccgggccagagtgcgggctgtggacggcagccggcactccaactggaccgtcaccaacacccgcttctctgtggatgaagtgactctgacagttggcagtgtgaacctagagatccacaatggcttcatcctcgggaagattcagctacccaggcccaagatggcccccgcaaatgacacatatgaaagcatcttcagtcacttccgagagtatgagattgccattcgcaaggtgccgggaaacttcacgttcacacacaagaaagtaaaacatgaaaacttcagcctcctaacctctggagaagtgggagagttctgtgtccaggtgaaaccatctgtcgcttcccgaagtaacaaggggatgtggtctaaagaggagtgcatctccctcaccaggcagtatttcaccgtgaccaac

SEQ ID NO: 3720 - DNA, 603 bp, Homo Sapiens
atggtaccacctcccgaaaatgtcagaatgaattctgttaatttcaagaacattctacagtgggagtcacctgcttttgccaaagggaacctgactttcacagctcagtacctaagttataggatattccaagataaatgcatgaatactaccttgacggaatgtgatttctcaagtctttccaagtatggtgaccacaccttgagagtcagggctgaatttgcagatgagcattcagactgggtaaacatcaccttctgtcctgtggatgacaccattattggaccccctggaatgcaagtagaagtacttgctgattctttacatatgcgtttcttagcccctaaaattgagaatgaatacgaaacttggactatgaagaatgtgtataactcatggacttataatgtgcaatactggaaaaacggtactgatgaaaagtttcaaattactccccagtatgactttgaggtcctcagaaacctggagccatggacaacttattgtgttcaagttcgagggtttcttcctgatcggaacaaagctggggaatggagtgagcctgtctgtgagcaaacaacccatgacgaaacggtcccctcc

SEQ ID NO: 3721 - DNA, 534 bp, Homo Sapiens
cctgggccaccacctggcccccctcgagtttccccagaccctcgggccgagctggacagcaccgtgctcctgacccgctctctcctggcggacacgcggcagctggctgcacagctgagggacaaattcccagctgacggggaccacaacctggattccctgcccaccctggccatgagtgcgggggcactgggagctctacagctcccaggtgtgctgacaaggctgcgagcggacctactgtcctacctgcggcacgtgcagtggctgcgccgggcaggtggctcttccctgaagaccctggagcccgagctgggcaccctgcaggcccgactggaccggctgctgcgccggctgcagctcctgatgtcccgcctggccctgccccagccacccccggacccgccggcgcccccgctggcgcccccctcctcagcctgggggggcatcagggccgcccacgccatcctgggggggctgcacctgacacttgactgggccgtgaggggactgctgctgctgaagactcggctg

SEQ ID NO: 3722 - DNA, 1041 bp, Homo Sapiens
tccccctgcccccaggcctggggccccccaggggtccagtatgggcagccaggcaggtccgtgaagctgtgttgtcctggagtgactgccggggacccagtgtcctggtttcgggatggggagccaaagctgctccagggacctgactctgggctagggcatgaactggtcctggcccaggcagacagcactgatgagggcacctacatctgccagaccctggatggtgcacttgggggcacagtgaccctgcagctgggctaccctccagcccgccctgttgtctcctgccaagcagccgactatgagaacttctcttgcacttggagtcccagccagatcagcggtttacccacccgctacctcacctcctacaggaagaagacagtcctaggagctgatagccagaggaggagtccatccacagggccctggccatgcccacaggatcccctaggggctgcccgctgtgttgtccacggggctgagttctggagccagtaccggattaatgtgactgaggtgaacccactgggtgccagcacacgcctgctggatgtgagcttgcagagcatcttgcgccctgacccaccccagggcctgcgggtagagtcagtaccaggttacccccgacgcctgcgagccagctggacataccctgcctcctggccgtgccagccccacttcctgctcaagttccgtttgcagtaccgtccggcgcagcatccagcctggtccacggtggagccagctggactggaggaggtgatcacagatgctgtggctgggctgccccatgctgtacgagtcagtgcccgggactttctagatgctggcacctggagcacctggagcccggaggcctggggaactccgagcactgggaccataccaaaggagataccagcatggggccagctacacacgcagccagaggtggagcctcaggtggacagccctgctcctccaaggccctccctccaaccacaccctcggctacttgatcacagggactctgtggagcaggtagctgtgctggcg

SEQ ID NO: 3723 - DNA, 591 bp, Homo Sapiens
agaaacctccccgtggccactccagacccaggaatgttcccatgccttcaccactcccaaaacctgctgagggccgtcagcaacatgctccagaaggccagacaaactctagaattttacccttgcacttctgaagagattgatcatgaagatatcacaaaagataaaaccagcacagtggaggcctgtttaccattggaattaaccaagaatgagagttgcctaaattccagagagacctctttcataactaatgggagttgcctggcctccagaaagacctcttttatgatggccctgtgccttagtagtatttatgaagacttgaagatgtaccaggtggagttcaagaccatgaatgcaaagcttctgatggatcctaagaggcagatctttctagatcaaaacatgctggcagttattgatgagctgatgcaggccctgaatttcaacagtgagactgtgccacaaaaatcctcccttgaagaaccggatttttataaaactaaaatcaagctctgcatacttcttcatgctttcagaattcgggcagtgactattgatagagtgatgagctatctgaatgcttcc

SEQ ID NO: 3724 - DNA, 918 bp, Homo Sapiens
atatgggaactgaagaaagatgtttatgtcgtagaattggattggtatccggatgcccctggagaaatggtggtcctcacctgtgacacccctgaagaagatggtatcacctggaccttggaccagagcagtgaggtcttaggctctggcaaaaccctgaccatccaagtcaaagagtttggagatgctggccagtacacctgtcacaaaggaggcgaggttctaagccattcgctcctgctgcttcacaaaaaggaagatggaatttggtccactgatattttaaaggaccagaaagaacccaaaaataagacctttctaagatgcgaggccaagaattattctggacgtttcacctgctggtggctgacgacaatcagtactgatttgacattcagtgtcaaaagcagcagaggctcttctgacccccaaggggtgacgtgcggagctgctacactctctgtagagagagtcagaggggacaacaaggagtatgagtactcagtggagtgccaggaggacagtgcctgcccagctgctgaggagagtctgcccattgaggtcatggtggatgccgttcacaagctcaagtatgaaaactacaccagcagcttcttcatcagggacatcatcaaacctgacccacccaagaacttgcagctgaagccattaaagaattctcggcaggtggaggtcagctgggagtaccctgacacctggagtactccacattcctacttctccctgacattctgcgttcaggtccagggcaagagcaagagagaaaagaaagatagagtcttcacggacaagacctcagccacggtcatctgccgcaaaaatgccagcattagcgtgcgggcccaggaccgctactatagctcatcttggagcgaatgggcatctgtgccctgcagt

SEQ ID NO: 3725 - DNA, 1566 bp, Homo Sapiens
tgcagaaccagtgagtgctgttttcaggacccgccatatccggatgcagactcaggctcggcctcgggccctagggacctgagatgctatcggatatccagtgatcgttacgagtgctcctggcagtatgagggtcccacagctggggtcagccacttcctgcggtgttgccttagctccgggcgctgctgctacttcgccgccggctcagccaccaggctgcagttctccgaccaggctggggtgtctgtgctgtacactgtcacactctgggtggaatcctgggccaggaaccagacagagaagtctcctgaggtgaccctgcagctctacaactcagttaaatatgagcctcctctgggagacatcaaggtgtccaagttggccgggcagctgcgtatggagtgggagaccccggataaccaggttggtgctgaggtgcagttccggcaccggacacccagcagcccatggaagttgggcgactgcggacctcaggatgatgatactgagtcctgcctctgccccctggagatgaatgtggcccaggaattccagctccgacgacggcagttggggagccaaggaagttcctggagcaagtggagcagccccgtgtgcgttccccctgaaaaccccccacagcctcaggtgagattctcggtggagcagctgggccaggatgggaggaggcggctgaccctgaaagagcagccaacccagctggagcttccagaaggctgtcaagggctggcgcctggcacggaggtcacttaccgactacagctccacatgctgtcctgcccgtgtaaggccaaggccaccgggaccctgcacctggggaagatgccctatctctcgggtgctgcctacaacgtggctgtcatctcctcgaaccaatttggtcctggcctgaaccagacgtggcacattcctgccgacacccacacagaaccagtggctctgaatatcagcgtcggaaccaacgggaccaccatgtattggccagcccgggctcagagcatgacgtattgcattgaatggcagcctgtgggccaggacgggggccttgccacctgcagcctgactgcgccgcaagacccggatccggctggaatggcaacctacagctggagtcgagggtctggggcaatggggcaggaaaagtgttactacattaccatctttgcctctgcgcaccccgagaagctcaccttgtggtctacggtcctgtccacctaccactttgggggcaatgcctcagcagctgggacaccgcaccacgtctcggtgaagaatcatagcttggactctgtgtctgtggactgggcaccatccctgctgagcacctgtcccggcgtcctaaaggagtatgttgtccgctgccgagatgaagacagcaaacaggtgtcagagcatcccgtgcagcccacagagacccaagttaccctcagtggcctgcgggctggtgtagcctacacggtgcaggtgcgagcagacacagcgtggctgaggggtgtctggagccagccccagcgcttcagcatcgaagtgcaggtttctgat

SEQ ID NO: 3726 - DNA, 1797 bp, Homo Sapiens
aaaatagatgcgtgcaagagaggcgatgtgactgtgaagccttcccatgtaattttacttggatccactgtcaatattacatgctctttgaagcccagacaaggctgctttcactattccagacgtaacaagttaatcctgtacaagtttgacagaagaatcaattttcaccatggccactccctcaattctcaagtcacaggtcttccccttggtacaaccttgtttgtctgcaaactggcctgtatcaatagtgatgaaattcaaatatgtggagcagagatcttcgttggtgttgctccagaacagcctcaaaatttatcctgcatacagaagggagaacaggggactgtggcctgcacctgggaaagaggacgagacacccacttatacactgagtatactctacagctaagtggaccaaaaaatttaacctggcagaagcaatgtaaagacatttattgtgactatttggactttggaatcaacctcacccctgaatcacctgaatccaatttcacagccaaggttactgctgtcaatagtcttggaagctcctcttcacttccatccacattcacattcttggacatagtgaggcctcttcctccgtgggacattagaatcaaatttcaaaaggcttccgtgagcagatgtaccctttattggagagatgagggactggtactgcttaatcgactcagatatcggcccagtaacagcaggctctggaatatggttaatgttacaaaggccaaaggaagacatgatttgctggatctgaaaccatttacagaatatgaatttcagatttcctctaagctacatctttataagggaagttggagtgattggagtgaatcattgagagcacaaacaccagaagaagagcctactgggatgttagatgtctggtacatgaaacggcacattgactacagtagacaacagatttctcttttctggaagaatctgagtgtctcagaggcaagaggaaaaattctccactatcaggtgaccttgcaggagctgacaggagggaaagccatgacacagaacatcacaggacacacctcctggaccacagtcattcctagaaccggaaattgggctgtggctgtgtctgcagcaaattcaaaaggcagttctctgcccactcgtattaacataatgaacctgtgtgaggcagggttgctggctcctcgccacgtctctgcaaactcagagggcatggacaacattctggtgacttggcagcctcccaggaaagatccctctgctgttcaggagtacgtggtggaatggagagagctccatccagggggtgacacacaggtccctctaaactggctacggagtcgaccctacaatgtgtctgctctgatttcagagaacataaaatcctacatctgttatgaaatccgtgtgtatgcactctcaggggatcaaggaggatgcagctccatcctgggtaactctaagcacaaagcaccactgagtggcccccacattaatgccatcacagaggaaaaggggagcattttaatttcatggaacagcattccagtccaggagcaaatgggctgcctcctccattataggatatactggaaggaacgggactccaactcccagcctcagctctgtgaaattccctacagagtctcccaaaattcacatccaataaacagcctgcagccccgagtgacatatgtcctgtggatgacagctctgacagctgctggtgaaagttcccacggaaatgagagggaattttgtctgcaaggtaaagccaat

SEQ ID NO: 3727 - DNA, 366 bp, Homo Sapiens
ctcacttgccttggcggctttgcctccccaggccctgtgcctccctctacagccctcagggagctcattgaggagctggtcaacatcacccagaaccagaaggctccgctctgcaatggcagcatggtatggagcatcaacctgacagctggcatgtactgtgcagccctggaatccctgatcaacgtgtcaggctgcagtgccatcgagaagacccagaggatgctgagcggattctgcccgcacaaggtctcagctgggcagttttccagcttgcatgtccgagacaccaaaatcgaggtggcccagtttgtaaaggacctgctcttacatttaaagaaactttttcgcgagggacagttcaac

SEQ ID NO: 3728 - DNA, 966 bp, Homo Sapiens
gggggcgggggcgccgcgcctacggaaactcagccacctgtgacaaatttgagtgtctctgttgaaaacctctgcacagtaatatggacatggaatccacccgagggagccagctcaaattgtagtctatggtattttagtcattttggcgacaaacaagataagaaaatagctccggaaactcgtcgttcaatagaagtacccctgaatgagaggatttgtctgcaagtggggtcccagtgtagcaccaatgagagtgagaagcctagcattttggttgaaaaatgcatctcacccccagaaggtgatcctgagtctgctgtgactgagcttcaatgcatttggcacaacctgagctacatgaagtgttcttggctccctggaaggaataccagtcccgacactaactatactctctactattggcacagaagcctggaaaaaattcatcaatgtgaaaacatctttagagaaggccaatactttggttgttcctttgatctgaccaaagtgaaggattccagttttgaacaacacagtgtccaaataatggtcaaggataatgcaggaaaaattaaaccatccttcaatatagtgcctttaacttcccgtgtgaaacctgatcctccacatattaaaaacctctccttccacaatgatgacctatatgtgcaatgggagaatccacagaattttattagcagatgcctattttatgaagtagaagtcaataacagccaaactgagacacataatgttttctacgtccaagaggctaaatgtgagaatccagaatttgagagaaatgtggagaatacatcttgtttcatggtccctggtgttcttcctgatactttgaacacagtcagaataagagtcaaaacaaataagttatgctatgaggatgacaaactctggagtaattggagccaagaaatgagtataggtaagaagcgcaattccaca

SEQ ID NO: 3729 - DNA, 951 bp, Homo Sapiens
gacaccgagataaaagttaaccctcctcaggattttgagatagtggatcccggatacttaggttatctctatttgcaatggcaacccccactgtctctggatcattttaaggaatgcacagtggaatatgaactaaaataccgaaacattggtagtgaaacatggaagaccatcattactaagaatctacattacaaagatgggtttgatcttaacaagggcattgaagcgaagatacacacgcttttaccatggcaatgcacaaatggatcagaagttcaaagttcctgggcagaaactacttattggatatcaccacaaggaattccagaaactaaagttcaggatatggattgcgtatattacaattggcaatatttactctgttcttggaaacctggcataggtgtacttcttgataccaattacaacttgttttactggtatgagggcttggatcatgcattacagtgtgttgattacatcaaggctgatggacaaaatataggatgcagatttccctatttggaggcatcagactataaagatttctatatttgtgttaatggatcatcagagaacaagcctatcagatccagttatttcacttttcagcttcaaaatatagttaaacctttgccgccagtctatcttacttttactcgggagagttcatgtgaaattaagctgaaatggagcatacctttgggacctattccagcaaggtgttttgattatgaaattgagatcagagaagatgatactaccttggtgactgctacagttgaaaatgaaacatacaccttgaaaacaacaaatgaaacccgacaattatgctttgtagtaagaagcaaagtgaatatttattgctcagatgacggaatttggagtgagtggagtgataaacaatgctgggaaggtgaagacctatcgaagaaaactttgctacgt

SEQ ID NO: 3730 - DNA, 342 bp, Homo Sapiens
aactgggtgaatgtaataagtgatttgaaaaaaattgaagatcttattcaatctatgcatattgatgctactttatatacggaaagtgatgttcaccccagttgcaaagtaacagcaatgaagtgctttctcttggagttacaagttatttcacttgagtccggagatgcaagtattcatgatacagtagaaaatctgatcatcctagcaaacaacagtttgtcttctaatgggaatgtaacagaatctggatgcaaagaatgtgaggaactggaggaaaaaaatattaaagaatttttgcagagttttgtacatattgtccaaatgttcatcaacacttct

SEQ ID NO: 3731 - DNA, 525 bp, Homo Sapiens
atcacgtgccctccccccatgtccgtggaacacgcagacatctgggtcaagagctacagcttgtactccagggagcggtacatttgtaactctggtttcaagcgtaaagccggcacgtccagcctgacggagtgcgtgttgaacaaggccacgaatgtcgcccactggacaacccccagtctcaaatgcattagagaccctgccctggttcaccaaaggccagcgccaccctccacagtaacgacggcaggggtgaccccacagccagagagcctctccccttctggaaaagagcccgcagcttcatctcccagctcaaacaacacagcggccacaacagcagctattgtcccgggctcccagctgatgccttcaaaatcaccttccacaggaaccacagagataagcagtcatgagtcctcccacggcaccccctctcagacaacagccaagacctgggaactcacagcatccgcctcccaccagccgccaggtgtgtatccacagggccacagcgacaccact

SEQ ID NO: 3732 - DNA, 360 bp, Homo Sapiens
tctgcagcctcagcctctgcagccagtgatgtttctgtagaatctacagaggccacagtctgcacggtgacactggagaagatgtcggcagggctgggcttcagcctggaaggagggaagggctccctacacggagacaagcctctcaccattaacaggattttcaaaggagcagcctcagaacaaagtgagacagtccagcctggagatgaaatcttgcagctgggtggcactgccatgcagggcctcacacggtttgaagcctggaacatcatcaaggcactgcctgatggacctgtcacgattgtcatcaggagaaaaagcctccagtccaaggaaaccacagctgctggagactcc

SEQ ID NO: 3733 - DNA, 396 bp, Homo Sapiens
ggaatcacaatcccacgaaatccaggatgcccaaattctgaggacaagaacttcccccggactgtgatggtcaacctgaacatccataaccggaataccaataccaatcccaaaaggtcctcagattactacaaccgatccacctcaccttggaatctccaccgcaatgaggaccctgagagatatccctctgtgatctgggaggcaaagtgccgccacttgggctgcatcaacgctgatgggaacgtggactaccacatgaactctgtccccatccagcaagagatcctggtcctgcgcagggagcctccacactgccccaactccttccggctggagaagatactggtgtccgtgggctgcacctgtgtcaccccgattgtccaccatgtggcc

SEQ ID NO: 3734 - DNA, 480 bp, Homo Sapiens
cagcccaggagccccaaaagcaagaggaaggggcaagggcggcctgggcccctggcccctggccctcaccaggtgccactggacctggtgtcacggatgaaaccgtatgcccgcatggaggagtatgagaggaacatcgaggagatggtggcccagctgaggaacagctcagagctggcccagagaaagtgtgaggtcaacttgcagctgtggatgtccaacaagaggagcctgtctccctggggctacagcatcaaccacgaccccagccgtatccccgtggacctgccggaggcacggtgcctgtgtctgggctgtgtgaaccccttcaccatgcaggaggaccgcagcatggtgagcgtgccggtgttcagccaggttcctgtgcgccgccgcctctgcccgccaccgccccgcacagggccttgccgccagcgcgcagtcatggagaccatcgctgtgggctgcacctgcatcttc

SEQ ID NO: 3735 - DNA, 825 bp, Homo Sapiens
cgagagccgaccgttcaatgtggctctgaaactgggccatctccagagtggatgctacaacatgatctaatcccgggagacttgagggacctccgagtagaacctgttacaactagtgttgcaacaggggactattcaattttgatgaatgtaagctgggtactccgggcagatgccagcatccgcttgttgaaggccaccaagatttgtgtgacgggcaaaagcaacttccagtcctacagctgtgtgaggtgcaattacacagaggccttccagactcagaccagaccctctggtggtaaatggacattttcctacatcggcttccctgtagagctgaacacagtctatttcattggggcccataatattcctaatgcaaatatgaatgaagatggcccttccatgtctgtgaatttcacctcaccaggctgcctagaccacataatgaaatataaaaaaaagtgtgtcaaggccggaagcctgtgggatccgaacatcactgcttgtaagaagaatgaggagacagtagaagtgaacttcacaaccactcccctgggaaacagatacatggctcttatccaacacagcactatcatcgggttttctcaggtgtttgagccacaccagaagaaacaaacgcgagcttcagtggtgattccagtgactggggatagtgaaggtgctacggtgcagctgactccatattttcctacttgtggcagcgactgcatccgacataaaggaacagttgtgctctgcccacaaacaggcgtccctttccctctggataacaacaaaagcaagccgggaggctggctgcct

SEQ ID NO: 3736 - DNA, 537 bp, Homo Sapiens
caccatgacccctccctcagggggcacccccacagtcacggtaccccacactgctactcggctgaggaactgcccctcggccaggcccccccacacctgctggctcgaggtgccaagtgggggcaggctttgcctgtagccctggtgtccagcctggaggcagcaagccacagggggaggcacgagaggccctcagctacgacccagtgcccggtgctgcggccggaggaggtgttggaggcagacacccaccagcgctccatctcaccctggagataccgtgtggacacggatgaggaccgctatccacagaagctggccttcgccgagtgcctgtgcagaggctgtatcgatgcacggacgggccgcgagacagctgcgctcaactccgtgcggctgctccagagcctgctggtgctgcgccgccggccctgctcccgcgacggctcggggctccccacacctggggcctttgccttccacaccgagttcatccacgtccccgtcggctgcacctgcgtgctgccccgttcagtg

SEQ ID NO: 3737 - DNA, 561 bp, Homo Sapiens
gcgggcgccccgagggcgggcaggcgccccgcgcggccgcggggctgcgcggaccggccggaggagctactggagcagctgtacgggcgcctggcggccggcgtgctcagtgccttccaccacacgctgcagctggggccgcgtgagcaggcgcgcaacgcgagctgcccggcagggggcaggcccgccgaccgccgcttccggccgcccaccaacctgcgcagcgtgtcgccctgggcctacagaatctcctacgacccggcgaggtaccccaggtacctgcctgaagcctactgcctgtgccggggctgcctgaccgggctgttcggcgaggaggacgtgcgcttccgcagcgcccctgtctacatgcccaccgtcgtcctgcgccgcacccccgcctgcgccggcggccgttccgtctacaccgaggcctacgtcaccatccccgtgggctgcacctgcgtccccgagccggagaaggacgcagacagcatcaactccagcatcgacaaacagggcgccaagctcctgctgggccccaacgacgcgcccgctggcccc

SEQ ID NO: 3738 - DNA, 399 bp, Homo Sapiens
cggaaaatccccaaagtaggacatacttttttccaaaagcctgagagttgcccgcctgtgccaggaggtagtatgaagcttgacattggcatcatcaatgaaaaccagcgcgtttccatgtcacgtaacatcgagagccgctccacctccccctggaattacactgtcacttgggaccccaaccggtacccctcggaagttgtacaggcccagtgtaggaacttgggctgcatcaatgctcaaggaaaggaagacatctccatgaattccgttcccatccagcaagagaccctggtcgtccggaggaagcaccaaggctgctctgtttctttccagttggagaaggtgctggtgactgttggctgcacctgcgtcacccctgtcatccaccgtgtgcag

SEQ ID NO: 3739 - DNA, 864 bp, Homo Sapiens
ctgcgactcctggaccaccgggcgctggtctgctcccagccggggctaaactgcacggtcaagaatagtacctgcctggatgacagctggattcaccctcgaaacctgaccccctcctccccaaaggacctgcagatccagctgcactttgcccacacccaacaaggagacctgttccccgtggctcacatcgaatggacactgcagacagacgccagcatcctgtacctcgagggtgcagagttatctgtcctgcagctgaacaccaatgaacgtttgtgcgtcaggtttgagtttctgtccaaactgaggcatcaccacaggcggtggcgttttaccttcagccactttgtggttgaccctgaccaggaatatgaggtgaccgttcaccacctgcccaagcccatccctgatggggacccaaaccaccagtccaagaatttccttgtgcctgactgtgagcacgccaggatgaaggtaaccacgccatgcatgagctcaggcagcctgtgggaccccaacatcaccgtggagaccctggaggcccaccagctgcgtgtgagcttcaccctgtggaacgaatctacccattaccagatcctgctgaccagttttccgcacatggagaaccacagttgctttgagcacatgcaccacatacctgcgcccagaccagaagagttccaccagcgatccaacgtcacactcactctacgcaaccttaaagggtgctgtcgccaccaagtgcagatccagcccttcttcagcagctgcctcaatgactgcctcagacactccgcgactgtttcctgcccagaaatgccagacactccagaaccaattccggactacatgcccctgtgg

SEQ ID NO: 3740 - DNA, 1296 bp, Homo Sapiens
ctggagaggcttgtggggcctcaggacgctacccactgctctccgggcctctcctgccgcctctgggacagtgacatactctgcctgcctggggacatcgtgcctgctccgggccccgtgctggcgcctacgcacctgcagacagagctggtgctgaggtgccagaaggagaccgactgtgacctctgtctgcgtgtggctgtccacttggccgtgcatgggcactgggaagagcctgaagatgaggaaaagtttggaggagcagctgactcaggggtggaggagcctaggaatgcctctctccaggcccaagtcgtgctctccttccaggcctaccctactgcccgctgcgtcctgctggaggtgcaagtgcctgctgcccttgtgcagtttggtcagtctgtgggctctgtggtatatgactgcttcgaggctgccctagggagtgaggtacgaatctggtcctatactcagcccaggtacgagaaggaactcaaccacacacagcagctgcctgccctgccctggctcaacgtgtcagcagatggtgacaacgtgcatctggttctgaatgtctctgaggagcagcacttcggcctctccctgtactggaatcaggtccagggccccccaaaaccccggtggcacaaaaacctgactggaccgcagatcattaccttgaaccacacagacctggttccctgcctctgtattcaggtgtggcctctggaacctgactccgttaggacgaacatctgccccttcagggaggacccccgcgcacaccagaacctctggcaagccgcccgactgcgactgctgaccctgcagagctggctgctggacgcaccgtgctcgctgcccgcagaagcggcactgtgctggcgggctccgggtggggacccctgccagccactggtcccaccgctttcctgggagaacgtcactgtggacaaggttctcgagttcccattgctgaaaggccaccctaacctctgtgttcaggtgaacagctcggagaagctgcagctgcaggagtgcttgtgggctgactccctggggcctctcaaagacgatgtgctactgttggagacacgaggcccccaggacaacagatccctctgtgccttggaacccagtggctgtacttcactacccagcaaagcctccacgagggcagctcgccttggagagtacttactacaagacctgcagtcaggccagtgtctgcagctatgggacgatgacttgggagcgctatgggcctgccccatggacaaatacatccacaagcgc

SEQ ID NO: 3741 - DNA, 465 bp, Homo Sapiens
atggaatctcaacctttcctgaatatgaaatttgaaacggattatttcgtaaaggttgtcccttttccttccattaaaaacgaaagcaattaccaccctttcttctttagaacccgagcctgtgacctgttgttacagccggacaatctagcttgtaaacccttctggaagcctcggaacctgaacatcagccagcatggctcggacatgcaggtgtccttcgaccacgcaccgcacaacttcggcttccgtttcttctatcttcactacaagctcaagcacgaaggacctttcaagcgaaagacctgtaagcaggagcaaactacagagacgaccagctgcctccttcaaaatgtttctccaggggattatataattgagctggtggatgacactaacacaacaagaaaagtgatgcattatgccttaaagccagtgcactccccgtgggccgggcccatcaga

SEQ ID NO: 3742 - DNA, 1293 bp, Homo Sapiens
gctgggattggctttcgccacctgccccactggaacacccgctgtcctctggcctcccacacggatgacagtttcactggaagttctgcctatatcccttgccgcacctggtgggccctcttctccacaaagccttggtgtgtgcgagtctggcactgttcccgctgtttgtgccagcatctgctgtcaggtggctcaggtcttcaacggggcctcttccacctcctggtgcagaaatccaaaaagtcttccacattcaagttctataggagacacaagatgccagcacctgctcagaggaagctgctgcctcgtcgtcacctgtctgagaagagccatcacatttccatcccctccccagacatctcccacaagggacttcgctctaaaaggacccaaccttcggatccagagacatgggaaagtcttcccagattggactcacaaaggcatggaggacccgagttctcctttgatttgctgcctgaggcccgggctattcgggtgaccatatcttcaggccctgaggtcagcgtgcgtctttgtcaccagtgggcactggagtgtgaagagctgagcagtccctatgatgtccagaaaattgtgtctgggggccacactgtagagctgccttatgaattccttctgccctgtctgtgcatagaggcatcctacctgcaagaggacactgtgaggcgcaaaaaatgtcccttccagagctggccagaagcctatggctcggacttctggaagtcagtgcacttcactgactacagccagcacactcagatggtcatggccctgacactccgctgcccactgaagctggaagctgccctctgccagaggcacgactggcataccctttgcaaagacctcccgaatgccacagctcgagagtcagatgggtggtatgttttggagaaggtggacctgcacccccagctctgcttcaagttctcttttggaaacagcagccatgttgaatgcccccaccagactgggtctctcacatcctggaatgtaagcatggatacccaagcccagcagctgattcttcacttctcctcaagaatgcatgccaccttcagtgctgcctggagcctcccaggcttggggcaggacactttggtgccccccgtgtacactgtcagccaggcccggggctcaagcccagtgtcactagacctcatcattcccttcctgaggccagggtgctgtgtcctggtgtggcggtcagatgtccagtttgcctggaagcacctcttgtgtccggatgtctcttacagacac

SEQ ID NO: 3743 - DNA, 471 bp, Homo Sapiens
tactttggcaagcttgaatctaaattatcagtcataagaaatttgaatgaccaagttctcttcattgaccaaggaaatcggcctctatttgaagatatgactgattctgactgtagagataatgcaccccggaccatatttattataagtatgtataaagatagccagcctagaggtatggctgtaactatctctgtgaagtgtgagaaaatttcaactctctcctgtgagaacaaaattatttcctttaaggaaatgaatcctcctgataacatcaaggatacaaaaagtgacatcatattctttcagagaagtgtcccaggacatgataataagatgcaatttgaatcttcatcatacgaaggatactttctagcttgtgaaaaagagagagacctttttaaactcattttgaaaaaagaggatgaattgggggatagatctataatgttcactgttcaaaacgaagac

SEQ ID NO: 3744 - DNA, 492 bp, Homo Sapiens
acacctgtctcgcagaccaccacagctgccactgcctcagttagaagcacaaaggacccctgcccctcccagcccccagtgttcccagcagctaagcagtgtccagcattggaagtgacctggccagaggtggaagtgccactgaatggaacgctgagcttatcctgtgtggcctgcagccgcttccccaacttcagcatcctctactggctgggcaatggttccttcattgagcacctcccaggccgactgtgggaggggagcaccagccgggaacgtgggagcacaggtacgcagctgtgcaaggccttggtgctggagcagctgacccctgccctgcacagcaccaacttctcctgtgtgctcgtggaccctgaacaggttgtccagcgtcacgtcgtcctggcccagctctgggctgggctgagggcaaccttgccccccacccaagaagccctgccctccagccacagcagtccacagcagcagggt

SEQ ID NO: 3745 - DNA, 924 bp, Homo Sapiens
tgtacttcacgtccccacattactgtggttgaaggggaacctttctatctgaaacattgctcgtgttcacttgcacatgagattgaaacaaccaccaaaagctggtacaaaagcagtggatcacaggaacatgtggagctgaacccaaggagttcctcgagaattgctttgcatgattgtgttttggagttttggccagttgagttgaatgacacaggatcttactttttccaaatgaaaaattatactcagaaatggaaattaaatgtcatcagaagaaataaacacagctgtttcactgaaagacaagtaactagtaaaattgtggaagttaaaaaattttttcagataacctgtgaaaacagttactatcaaacactggtcaacagcacatcattgtataagaactgtaaaaagctactactggagaacaataaaaacccaacgataaagaagaacgccgagtttgaagatcaggggtattactcctgcgtgcatttccttcatcataatggaaaactatttaatatcaccaaaaccttcaatataacaatagtggaagatcgcagtaatatagttccggttcttcttggaccaaagcttaaccatgttgcagtggaattaggaaaaaacgtaaggctcaactgctctgctttgctgaatgaagaggatgtaatttattggatgttcggggaagaaaatggatcggatcctaatatacatgaagagaaagaaatgagaattatgactccagaaggcaaatggcatgcttcaaaagtattgagaattgaaaatattggtgaaagcaatctaaatgttttatataattgcactgtggccagcacgggaggcacagacaccaaaagcttcatcttggtgagaaaagcagacatggctgatatcccaggccacgtcttcacaaga

SEQ ID NO: 3746 - DNA, 1011 bp, Homo Sapiens
tttaatatttcaggttgttccacaaaaaaactcctttggacatattctacaaggagtgaagaggaatttgtcttattttgtgatttaccagagccacagaaatcacatttctgccacagaaatcgactctcaccaaaacaagtccctgagcacctgcccttcatgggtagtaacgacctatctgatgtccaatggtaccaacaaccttcgaatggagatccattagaggacattaggaaaagctatcctcacatcattcaggacaaatgtacccttcactttttgaccccaggggtgaataattctgggtcatatatttgtagacccaagatgattaagagcccctatgatgtagcctgttgtgtcaagatgattttagaagttaagccccagacaaatgcatcctgtgagtattccgcatcacataagcaagacctacttcttgggagcactggctctatttcttgccccagtctcagctgccaaagtgatgcacaaagtccagcggtaacctggtacaagaatggaaaactcctctctgtggaaaggagcaaccgaatcgtagtggatgaagtttatgactatcaccagggcacatatgtatgtgattacactcagtcggatactgtgagttcgtggacagtcagagctgttgttcaagtgagaaccattgtgggagacactaaactcaaaccagatattctggatcctgtcgaggacacactggaagtagaacttggaaagcctttaactattagctgcaaagcacgatttggctttgaaagggtctttaaccctgtcataaaatggtacatcaaagattctgacctagagtgggaagtctcagtacctgaggcgaaaagtattaaatccactttaaaggatgaaatcattgagcgtaatatcatcttggaaaaagtcactcagcgtgatcttcgcaggaagtttgtttgctttgtccagaactccattggaaacacaacccagtccgtccaactgaaagaaaagaga

SEQ ID NO: 3747 - DNA, 459 bp, Homo Sapiens
ctcaggagatgtctgatttccacagacatgcaccatatagaagagagtttccaagaaatcaaaagagccatccaagctaaggacaccttcccaaatgtcactatcctgtccacattggagactctgcagatcattaagcccttagatgtgtgctgcgtgaccaagaacctcctggcgttctacgtggacagggtgttcaaggatcatcaggagccaaaccccaaaatcttgagaaaaatcagcagcattgccaactctttcctctacatgcagaaaactctgcggcaatgtcaggaacagaggcagtgtcactgcaggcaggaagccaccaatgccaccagagtcatccatgacaactatgatcagctggaggtccacgctgctgccattaaatccctgggagagctcgacgtctttctagcctggattaataagaatcatgaagtaatgttctcagct

SEQ ID NO: 3748 - DNA, 477 bp, Homo Sapiens
tcagcaccttttagcttcctgagcaatgtgaaatacaactttatgaggatcatcaaatacgaattcatcctgaatgacgccctcaatcaaagtataattcgagccaatgatcagtacctcacggctgctgcattacataatctggatgaagcagtgaaatttgacatgggtgcttataagtcatcaaaggatgatgctaaaattaccgtgattctaagaatctcaaaaactcaattgtatgtgactgcccaagatgaagaccaaccagtgctgctgaaggagatgcctgagatacccaaaaccatcacaggtagtgagaccaacctcctcttcttctgggaaactcacggcactaagaactatttcacatcagttgcccatccaaacttgtttattgccacaaagcaagactactgggtgtgcttggcaggggggccaccctctatcactgactttcagatactggaaaaccaggcg

SEQ ID NO: 3749 - DNA, 459 bp, Homo Sapiens
gcacctgtacgatcactgaactgcacgctccgggactcacagcaaaaaagcttggtgatgtctggtccatatgaactgaaagctctccacctccagggacaggatatggagcaacaagtggtgttctccatgtcctttgtacaaggagaagaaagtaatgacaaaatacctgtggccttgggcctcaaggaaaagaatctgtacctgtcctgcgtgttgaaagatgataagcccactctacagctggagagtgtagatcccaaaaattacccaaagaagaagatggaaaagcgatttgtcttcaacaagatagaaatcaataacaagctggaatttgagtctgcccagttccccaactggtacatcagcacctctcaagcagaaaacatgcccgtcttcctgggagggaccaaaggcggccaggatataactgacttcaccatgcaatttgtgtcttcc

SEQ ID NO: 3750 - DNA, 456 bp, Homo Sapiens
atgtgttccctccccatggcaagatactacataattaaatatgcagaccagaaggctctatacacaagagatggccagctgctggtgggagatcctgttgcagacaactgctgtgcagagaagatctgcacacttcctaacagaggcttggaccgcaccaaggtccccattttcctggggatccagggagggagccgctgcctggcatgtgtggagacagaagaggggccttccctacagctggaggatgtgaacattgaggaactgtacaaaggtggtgaagaggccacacgcttcaccttcttccagagcagctcaggctccgccttcaggcttgaggctgctgcctggcctggctggttcctgtgtggcccggcagagccccagcagccagtacagctcaccaaggagagtgagccctcagcccgtaccaagttttactttgaacagagctgg

SEQ ID NO: 3751 - DNA, 462 bp, Homo Sapiens
gtcctgagtggggcgctgtgcttccgaatgaaggactcggcattgaaggtgctttatctgcataataaccagcttctagctggagggctgcatgcagggaaggtcattaaaggtgaagagatcagcgtggtccccaatcggtggctggatgccagcctgtcccccgtcatcctgggtgtccagggtggaagccagtgcctgtcatgtggggtggggcaggagccgactctaacactagagccagtgaacatcatggagctctatcttggtgccaaggaatccaagagcttcaccttctaccggcgggacatggggctcacctccagcttcgagtcggctgcctacccgggctggttcctgtgcacggtgcctgaagccgatcagcctgtcagactcacccagcttcccgagaatggtggctggaatgcccccatcacagacttctacttccagcagtgtgac

SEQ ID NO: 3752 - DNA, 459 bp, Homo Sapiens
aaaattgacacacctcagcaggggagcattcaggatatcaatcatcgggtgtgggttcttcaggaccagacgctcatagcagtcccgaggaaggaccgtatgtctccagtcactattgccttaatctcatgccgacatgtggagacccttgagaaagacagagggaaccccatctacctgggcctgaatggactcaatctctgcctgatgtgtgctaaagtcggggaccagcccacactgcagctgaaggaaaaggatataatggatttgtacaaccaacccgagcctgtgaagtcctttctcttctaccacagccagagtggcaggaactccaccttcgagtctgtggctttccctggctggttcatcgctgtcagctctgaaggaggctgtcctctcatccttacccaagaactggggaaagccaacactactgactttgggttaactatgctgttt

SEQ ID NO: 3753 - DNA, 519 bp, Homo Sapiens
gttcacacaagtccaaaggtgaagaacttaaacccgaagaaattcagcattcatgaccaggatcacaaagtactggtcctggactctgggaatctcatagcagttccagataaaaactacatacgcccagagatcttctttgcattagcctcatccttgagctcagcctctgcggagaaaggaagtccgattctcctgggggtctctaaaggggagttttgtctctactgtgacaaggataaaggacaaagtcatccatcccttcagctgaagaaggagaaactgatgaagctggctgcccaaaaggaatcagcacgccggcccttcatcttttatagggctcaggtgggctcctggaacatgctggagtcggcggctcaccccggatggttcatctgcacctcctgcaattgtaatgagcctgttggggtgacagataaatttgagaacaggaaacacattgaattttcatttcaaccagtttgcaaagctgaaatgagccccagtgaggtcagcgat

SEQ ID NO: 3754 - DNA, 456 bp, Homo Sapiens
tcaatgtgtaaacctattactgggactattaatgatttgaatcagcaagtgtggacccttcagggtcagaaccttgtggcagttccacgaagtgacagtgtgaccccagtcactgttgctgttatcacatgcaagtatccagaggctcttgagcaaggcagaggggatcccatttatttgggaatccagaatccagaaatgtgtttgtattgtgagaaggttggagaacagcccacattgcagctaaaagagcagaagatcatggatctgtatggccaacccgagcccgtgaaacccttccttttctaccgtgccaagactggtaggacctccacccttgagtctgtggccttcccggactggttcattgcctcctccaagagagaccagcccatcattctgacttcagaacttgggaagtcatacaacactgcctttgaattaaatataaatgac

SEQ ID NO: 3755 - DNA, 957 bp, Homo Sapiens
ctggaggctgataaatgcaaggaacgtgaagaaaaaataattttagtgtcatctgcaaatgaaattgatgttcgtccctgtcctcttaacccaaatgaacacaaaggcactataacttggtataaagatgacagcaagacacctgtatctacagaacaagcctccaggattcatcaacacaaagagaaactttggtttgttcctgctaaggtggaggattcaggacattactattgcgtggtaagaaattcatcttactgcctcagaattaaaataagtgcaaaatttgtggagaatgagcctaacttatgttataatgcacaagccatatttaagcagaaactacccgttgcaggagacggaggacttgtgtgcccttatatggagttttttaaaaatgaaaataatgagttacctaaattacagtggtataaggattgcaaacctctacttcttgacaatatacactttagtggagtcaaagataggctcatcgtgatgaatgtggctgaaaagcatagagggaactatacttgtcatgcatcctacacatacttgggcaagcaatatcctattacccgggtaatagaatttattactctagaggaaaacaaacccacaaggcctgtgattgtgagcccagctaatgagacaatggaagtagacttgggatcccagatacaattgatctgtaatgtcaccggccagttgagtgacattgcttactggaagtggaatgggtcagtaattgatgaagatgacccagtgctaggggaagactattacagtgtggaaaatcctgcaaacaaaagaaggagtaccctcatcacagtgcttaatatatcggaaattgaaagtagattttataaacatccatttacctgttttgccaagaatacacatggtatagatgcagcatatatccagttaatatatccagtcactaatttccagaag

SEQ ID NO: 3756 - DNA, 990 bp, Homo Sapiens
ttcacccttcagcctgcggcacacacaggggctgccagaagctgccggtttcgtgggaggcattacaagcgggagttcaggctggaaggggagcctgtagccctgaggtgcccccaggtgccctactggttgtgggcctctgtcagcccccgcatcaacctgacatggcataaaaatgactctgctaggacggtcccaggagaagaagagacacggatgtgggcccaggacggtgctctgtggcttctgccagccttgcaggaggactctggcacctacgtctgcactactagaaatgcttcttactgtgacaaaatgtccattgagctcagagtttttgagaatacagatgctttcctgccgttcatctcatacccgcaaattttaaccttgtcaacctctggggtattagtatgccctgacctgagtgaattcacccgtgacaaaactgacgtgaagattcaatggtacaaggattctcttcttttggataaagacaatgagaaatttctaagtgtgagggggaccactcacttactcgtacacgatgtggccctggaagatgctggctattaccgctgtgtcctgacatttgcccatgaaggccagcaatacaacatcactaggagtattgagctacgcatcaagaaaaaaaaagaagagaccattcctgtgatcatttcccccctcaagaccatatcagcttctctggggtcaagactgacaatcccgtgtaaggtgtttctgggaaccggcacacccttaaccaccatgctgtggtggacggccaatgacacccacatagagagcgcctacccgggaggccgcgtgaccgaggggccacgccaggaatattcagaaaataatgagaactacattgaagtgccattgatttttgatcctgtcacaagagaggatttgcacatggattttaaatgtgttgtccataataccctgagttttcagacactacgcaccacagtcaaggaa

SEQ ID NO: 3757 - DNA, 1008 bp, Homo Sapiens
tcagaacgctgcgatgactggggactagacaccatgaggcaaatccaagtgtttgaagatgagccagctcgcatcaagtgcccactctttgaacacttcttgaaattcaactacagcacagcccattcagctggccttactctgatctggtattggactaggcaggaccgggaccttgaggagccaattaacttccgcctccccgagaaccgcattagtaaggagaaagatgtgctgtggttccggcccactctcctcaatgacactggcaactatacctgcatgttaaggaacactacatattgcagcaaagttgcatttcccttggaagttgttcaaaaagacagctgtttcaattcccccatgaaactcccagtgcataaactgtatatagaatatggcattcagaggatcacttgtccaaatgtagatggatattttccttccagtgtcaaaccgactatcacttggtatatgggctgttataaaatacagaattttaataatgtaatacccgaaggtatgaacttgagtttcctcattgccttaatttcaaataatggaaattacacatgtgttgttacatatccagaaaatggacgtacgtttcatctcaccaggactctgactgtaaaggtagtaggctctccaaaaaatgcagtgccccctgtgatccattcacctaatgatcatgtggtctatgagaaagaaccaggagaggagctactcattccctgtacggtctattttagttttctgatggattctcgcaatgaggtttggtggaccattgatggaaaaaaacctgatgacatcactattgatgtcaccattaacgaaagtataagtcatagtagaacagaagatgaaacaagaactcagattttgagcatcaagaaagttacctctgaggatctcaagcgcagctatgtctgtcatgctagaagtgccaaaggcgaagttgccaaagcagccaaggtgaagcagaaaggtaatagatgcggtcag

SEQ ID NO: 3758 - DNA, 1017 bp, Homo Sapiens
ttgaaggttgtgaccaaaagaggctccgccgatggatgcactgactggtctatcgatatcaagaaatatcaagttttggtgggagagcctgttcgaatcaaatgtgcactcttttatggttatatcagaacaaattactcccttgcccaaagtgctggactcagtttgatgtggtacaaaagttctggtcctggagactttgaagagccaatagcctttgacggaagtagaatgagcaaagaagaagactccatttggttccggccaacattgctacaggacagtggtctctacgcctgtgtcatcagaaactccacttactgtatgaaagtatccatctcactgacagtgggtgaaaatgacactggactctgctataattccaagatgaagtattttgaaaaagctgaacttagcaaaagcaaggaaatttcatgccgtgacatagaggattttctactgccaaccagagaacctgaaatcctttggtacaaggaatgcaggacaaaaacatggaggccaagtattgtattcaaaagagatactctgcttataagagaagtcagagaagatgacattggaaattatacctgtgaattaaaatatggaggctttgttgtgagaagaactactgaattaactgttacagcccctctgactgataagccacccaagcttttgtatcctatggaaagtaaactgacaattcaggagacccagctgggtgactctgctaatctaacctgcagagctttctttgggtacagcggagatgtcagtcctttaatttactggatgaaaggagaaaaatttattgaagatctggatgaaaatcgagtttgggaaagtgacattagaattcttaaggagcatcttggggaacaggaagtttccatctcattaattgtggactctgtggaagaaggtgacttgggaaattactcctgttatgttgaaaatggaaatggacgtcgacacgccagcgttctccttcataaacgagagctaatgtacaca

SEQ ID NO: 3759 - DNA, 1014 bp, Homo Sapiens
acaaatctgaagatggtgtcaaagagaaattctgtggatggctgcattgactggtcagtggatctcaagacatacatggctttggcaggtgaaccagtccgagtgaaatgtgcccttttctacagttatattcgtaccaactatagcacggcccagagcactgggctcaggcttatgtggtacaaaaacaaaggtgatttggaagagcccatcatcttttcagaggtcaggatgagcaaagaggaagattcaatatggtttcactcagctgaggcacaagacagtggattctacacttgtgttttaagaaactcaacatattgcatgaaggtgtcaatgtccttgactgttgcagagaatgaatcaggcctgtgctacaacagcaggatccgctatttagaaaaatctgaagtcactaaaagaaaggagatctcctgtccagacatggatgactttaaaaagtccgatcaggagcctgatgttgtgtggtataaggaatgcaagccaaaaatgtggagaagcataataatacagaaaggaaatgctcttctgatccaagaagttcaagaagaagatggaggaaattacacatgtgaacttaaatatgaaggaaaacttgtaagacgaacaactgaattgaaagttacagctttactcacagacaagcctcccaagccattgttccccatggagaatcagccaagtgttatagatgtccagctgggtaagcctctgaacatcccctgcaaagcattcttcggattcagtggagagtctgggccaatgatctactggatgaaaggagaaaagtttattgaagaactggcaggtcacattagagaaggtgaaataaggcttctcaaagagcatcttggagaaaaagaagttgaattggcactcatctttgactcagttgtggaagctgacctggcgaattatacctgccatgttgaaaaccgaaatggacggaaacatgccagtgttttgctgcgtaaaaaggatttaatctataaa

SEQ ID NO: 3760 - DNA, 930 bp, Homo Sapiens
aagtttagtaaacaatcatggggcctggaaaatgaggctttaattgtaagatgtcctagacaaggaaaacctagttacaccgtggattggtattactcacaaacaaacaaaagtattcccactcaggaaagaaatcgtgtgtttgcctcaggccaacttctgaagtttctaccagctgcagttgctgattctggtatttatacctgtattgtcagaagtcccacattcaataggactggatatgcgaatgtcaccatatataaaaaacaatcagattgcaatgttccagattatttgatgtattcaacagtatctggatcagaaaaaaattccaaaatttattgtcctaccattgacctctacaactggacagcacctcttgagtggtttaagaattgtcaggctcttcaaggatcaaggtacagggcgcacaagtcatttttggtcattgataatgtgatgactgaggacgcaggtgattacacctgtaaatttatacacaatgaaaatggagccaattatagtgtgacggcgaccaggtccttcacggtcaaggatgagcaaggcttttctctgtttccagtaatcggagcccctgcacaaaatgaaataaaggaagtggaaattggaaaaaacgcaaacctaacttgctctgcttgttttggaaaaggcactcagttcttggctgccgtcctgtggcagcttaatggaacaaaaattacagactttggtgaaccaagaattcaacaagaggaagggcaaaatcaaagtttcagcaatgggctggcttgtctagacatggttttaagaatagctgacgtgaaggaagaggatttattgctgcagtacgactgtctggccctgaatttgcatggcttgagaaggcacaccgtaagactaagtaggaaaaatccaagtaaggagtgtttc

SEQ ID NO: 3761 - DNA, 651 bp, Homo Sapiens
atgacagggctcgtgtccctgtcatattttccactctccacgaggtcctgcgcgcttcaatcctgcagcccggtttggggatgtggtccttgctgctctgcgggttgtccatcgcccttccactgtctgtcacagcaggactgtaacgagattaaaggggagcggttcactgttttggaaaccaggcttttggtgagcaatgtctcggcagaggacagagggaactacgcgtgtcaagccatactgacacactcagggaagcagtacgaggttttaaatggcatcactgtgagcattaaaagagctggatatggaggaagtgtccctaaaatcatttatccaaaaaatcattcaattgaagtacagcttggtaccactctgattgtggactgcaatgtaacagacaccaaggataatacaaatctacgatgctggagagtcaataacactttggtggatgattactatgatgaatccaaacgaatcagagaaggggtggaaacccatgtctcttttcgggaacataatttgtacacagtaaacatcaccttcttggaagtgaaaatggaagattatggccttcctttcatgtgccacgctggagtgtccacagcatacattatattacagctcccagctccggattttcga

SEQ ID NO: 3762 - DNA, 456 bp, Homo Sapiens
cgaccctctgggagaaaatccagcaagatgcaagccttcagaatctgggatgttaaccagaagaccttctatctgaggaacaaccaactagttgccggatacttgcaaggaccaaatgtcaatttagaagaaaagatagatgtggtacccattgagcctcatgctctgttcttgggaatccatggagggaagatgtgcctgtcctgtgtcaagtctggtgatgagaccagactccagctggaggcagttaacatcactgacctgagcgagaacagaaagcaggacaagcgcttcgccttcatccgctcagacagtggccccaccaccagttttgagtctgccgcctgccccggttggttcctctgcacagcgatggaagctgaccagcccgtcagcctcaccaatatgcctgacgaaggcgtcatggtcaccaaattctacttccaggaggacgag

SEQ ID NO: 3763 - DNA, 399 bp, Homo Sapiens
gcacctacttcaagttctacaaagaaaacacagctacaactggagcatttactgctggatttacagatgattttgaatggaattaataattacaagaatcccaaactcaccaggatgctcacatttaagttttacatgcccaagaaggccacagaactgaaacatcttcagtgtctagaagaagaactcaaacctctggaggaagtgctaaatttagctcaaagcaaaaactttcacttaagacccagggacttaatcagcaatatcaacgtaatagttctggaactaaagggatctgaaacaacattcatgtgtgaatatgctgatgagacagcaaccattgtagaatttctgaacagatggattaccttttgtcaaagcatcatctcaacactgact

SEQ ID NO: 3764 - DNA, 456 bp, Homo Sapiens
ctgaagacactcaatttgggaagctgtgtgatcgccacaaaccttcaggaaatacgaaatggattttctgagatacggggcagtgtgcaagccaaagatggaaacattgacatcagaatcttaaggaggactgagtctttgcaagacacaaagcctgcgaatcgatgctgcctcctgcgccatttgctaagactctatctggacagggtatttaaaaactaccagacccctgaccattatactctccggaagatcagcagcctcgccaattcctttcttaccatcaagaaggacctccggctctgtcatgcccacatgacatgccattgtggggaggaagcaatgaagaaatacagccagattctgagtcactttgaaaagctggaacctcaggcagcagttgtgaaggctttgggggaactagacattcttctgcaatggatggaggagacagaa

SEQ ID NO: 3765 - DNA, 663 bp, Homo Sapiens
gttccctgtgtctctggtggtttgcctaaacctgcaaacatcaccttcttatccatcaacatgaagaatgtcctacaatggactccaccagagggtcttcaaggagttaaagttacttacactgtgcagtatttcatatatgggcaaaagaaatggctgaataaatcagaatgcagaaatatcaatagaacctactgtgatctttctgctgaaacttctgactacgaacaccagtattatgccaaagttaaggccatttggggaacaaagtgttccaaatgggctgaaagtggacggttctatccttttttagaaacacaaattggcccaccagaggtggcactgactacagatgagaagtccatttctgttgtcctgacagctccagagaagtggaagagaaatccagaagaccttcctgtttccatgcaacaaatatactccaatctgaagtataacgtgtctgtgttgaatactaaatcaaacagaacgtggtcccagtgtgtgaccaaccacacgctggtgctcacctggctggagccgaacactctttactgcgtacacgtggagtccttcgtcccagggccccctcgccgtgctcagccttctgagaagcagtgtgccaggactttgaaagatcaatcatcagagttcaaggctaaa

SEQ ID NO: 3766 - DNA, 612 bp, Homo Sapiens
gatgaagtggccattctgcctgcccctcagaacctctctgtactctcaaccaacatgaagcatctcttgatgtggagcccagtgatcgcgcctggagaaacagtgtactattctgtcgaataccagggggagtacgagagcctgtacacgagccacatctggatccccagcagctggtgctcactcactgaaggtcctgagtgtgatgtcactgatgacatcacggccactgtgccatacaaccttcgtgtcagggccacattgggctcacagacctcagcctggagcatcctgaagcatccctttaatagaaactcaaccatccttacccgacctgggatggagatcaccaaagatggcttccacctggttattgagctggaggacctggggccccagtttgagttccttgtggcctactggaggagggagcctggtgccgaggaacatgtcaaaatggtgaggagtgggggtattccagtgcacctagaaaccatggagccaggggctgcatactgtgtgaaggcccagacattcgtgaaggccattgggaggtacagcgccttcagccagacagaatgtgtggaggtgcaaggagaggccattcccctg

SEQ ID NO: 3767 - DNA, 399 bp, Homo Sapiens
caaggtcaagatcgccacatgattagaatgcgtcaacttatagatattgttgatcagctgaaaaattatgtgaatgacttggtccctgaatttctgccagctccagaagatgtagagacaaactgtgagtggtcagctttttcctgctttcagaaggcccaactaaagtcagcaaatacaggaaacaatgaaaggataatcaatgtatcaattaaaaagctgaagaggaaaccaccttccacaaatgcagggagaagacagaaacacagactaacatgcccttcatgtgattcttatgagaaaaaaccacccaaagaattcctagaaagattcaaatcacttctccaaaagatgattcatcagcatctgtcctctagaacacacggaagtgaagattcc

SEQ ID NO: 3768 - DNA, 639 bp, Homo Sapiens
tgccccgacctcgtctgctacaccgattacctccagacggtcatctgcatcctggaaatgtggaacctccaccccagcacgctcacccttacctggcaagaccagtatgaagagctgaaggacgaggccacctcctgcagcctccacaggtcggcccacaatgccacgcatgccacctacacctgccacatggatgtattccacttcatggccgacgacattttcagtgtcaacatcacagaccagtctggcaactactcccaggagtgtggcagctttctcctggctgagagcatcaagccggctccccctttcaacgtgactgtgaccttctcaggacagtataatatctcctggcgctcagattacgaagaccctgccttctacatgctgaagggcaagcttcagtatgagctgcagtacaggaaccggggagacccctgggctgtgagtccgaggagaaagctgatctcagtggactcaagaagtgtctccctcctccccctggagttccgcaaagactcgagctatgagctgcaggtgcgggcagggcccatgcctggctcctcctaccaggggacctggagtgaatggagtgacccggtcatctttcagacccagtcagaggagttaaaggaa

SEQ ID NO: 3769 - DNA, 438 bp, Homo Sapiens
gcgcccatcagctcccactgcaggcttgacaagtccaacttccagcagccctatatcaccaaccgcaccttcatgctggctaaggaggctagcttggctgataacaacacagacgttcgtctcattggggagaaactgttccacggagtcagtatgagtgagcgctgctatctgatgaagcaggtgctgaacttcacccttgaagaagtgctgttccctcaatctgataggttccagccttatatgcaggaggtggtgcccttcctggccaggctcagcaacaggctaagcacatgtcatattgaaggtgatgacctgcatatccagaggaatgtgcaaaagctgaaggacacagtgaaaaagcttggagagagtggagagatcaaagcaattggagaactggatttgctgtttatgtctctgagaaatgcctgcatt

SEQ ID NO: 3770 - DNA, 639 bp, Homo Sapiens
cacgcccctgaggacccctcggatctgctccagcacgtgaaattccagtccagcaactttgaaaacatcctgacgtgggacagcgggccggagggcaccccagacacggtctacagcatcgagtataagacgtacggagagagggactgggtggcaaagaagggctgtcagcggatcacccggaagtcctgcaacctgacggtggagacgggcaacctcacggagctctactatgccagggtcaccgctgtcagtgcgggaggccggtcagccaccaagatgactgacaggttcagctctctgcagcacactaccctcaagccacctgatgtgacctgtatctccaaagtgagatcgattcagatgattgttcatcctacccccacgcccatccgtgcaggcgatggccaccggctaaccctggaagacatcttccatgacctgttctaccacttagagctccaggtcaaccgcacctaccaaatgcaccttggagggaagcagagagaatatgagttcttcggcctgacccctgacacagagttccttggcaccatcatgatttgcgttcccacctgggccaaggagagtgccccctacatgtgccgagtgaagacactgccagaccggacatggacc

SEQ ID NO: 3771 - DNA, 630 bp, Homo Sapiens
actcagtcaacgcatgagtctctgaagcctcagagggtacaatttcagtcccgaaattttcacaacattttgcaatggcagcctgggagggcacttactggcaacagcagtgtctattttgtgcagtacaaaatatatggacagagacaatggaaaaataaagaagactgttggggtactcaagaactctcttgtgaccttaccagtgaaacctcagacatacaggaaccttattacgggagggtgagggcggcctcggctgggagctactcagaatggagcatgacgccgcggttcactccctggtgggaaacaaaaatagatcctccagtcatgaatataacccaagtcaatggctctttgttggtaattctccatgctccaaatttaccatatagataccaaaaggaaaaaaatgtatctatagaagattactatgaactactataccgagtttttataattaacaattcactagaaaaggagcaaaaggtttatgaaggggctcacagagcggttgaaattgaagctctaacaccacactccagctactgtgtagtggctgaaatatatcagcccatgttagacagaagaagtcagagaagtgaagagagatgtgtggaaattcca

SEQ ID NO: 3772 - DNA, 510 bp, Homo Sapiens
agagctgtgcctgggggcagcagccctgcctggactcagtgccagcagctttcacagaagctctgcacactggcctggagtgcacatccactagtgggacacatggatctaagagaagagggagatgaagagactacaaatgatgttccccatatccagtgtggagatggctgtgacccccaaggactcagggacaacagtcagttctgcttgcaaaggatccaccagggtctgattttttatgagaagctgctaggatcggatattttcacaggggagccttctctgctccctgatagccctgtgggccagcttcatgcctccctactgggcctcagccaactcctgcagcctgagggtcaccactgggagactcagcagattccaagcctcagtcccagccagccatggcagcgtctccttctccgcttcaaaatccttcgcagcctccaggcctttgtggctgtagccgcccgggtctttgcccatggagcagcaaccctgagtccc

SEQ ID NO: 3773 - DNA, 996 bp, Homo Sapiens
gggattaccaacattaactgcagtgggcatatatgggtagaacctgcaacaatatttaagatgggtatgaatatcagtatatactgtcaagcggctatcaagaattgtcaacctcgtaaattgcatttttataagaacgggataaaagaaaggttccaaatcacccgtatcaacaagaccaccgccaggctttggtacaagaatttcttggaaccacacgcgtccatgtactgtaccgctgagtgccccaagcactttcaggaaactctaatatgtggcaaagacataagttccggctatccaccggacattccagatgaggtaacttgtgtgatatatgagtacagtgggaacatgacatgcacctggaatgccgggaagctaacgtacatagataccaagtacgtggtgcacgtgaagtccctggagactgaagaagaacagcagtatcttacttcctcttatataaacatatccactgactcacttcaaggaggcaagaaataccttgtgtgggtgcaagctgcgaacgcgctgggcatggaggagtccaaacagcttcaaatacatttggacgatatagtgattccaagtgccgcggttatctcacgtgcagaaactattaatgctacggttcctaagacgatcatatattgggacagccaaactactatcgaaaaagtctcctgcgagatgagatataaagcaacaactaatcagacatggaatgtcaaggagtttgatacgaacttcacttacgtacagcagagcgaattttatttagagcctaatataaagtacgtcttccaagtaagatgtcaagaaactggtaagaggtactggcaaccctggtcaagtctattttttcacaaaacaccagagaccgtaccacaagtgactagcaaggcctttcaacatgacacatggaacagtggtctaactgttgcttcaatcagcacgggtcatttgacgagcgataatagaggcgacatcggg

SEQ ID NO: 3774 - DNA, 465 bp, Homo Sapiens
caagaattccactttgggccctgccaagtgaagggggttgttccccagaaactgtgggaagccttctgggctgtgaaagacactatgcaagctcaggataacatcacgagtgcccggctgctgcagcaggaggttctgcagaacgtctcggatgctgagagctgttaccttgtccacaccctgctggagttctacttgaaaactgttttcaaaaactaccacaatagaacagttgaagtcaggactctgaagtcattctctactctggccaacaactttgttctcatcgtgtcacaactgcaacccagtcaagaaaatgagatgttttccatcagagacagtgcacacaggcggtttctgctattccggagagcattcaaacagttggacgtagaagcagctctgaccaaagcccttggggaagtggacattcttctgacctggatgcagaaattctacaagctc

SEQ ID NO: 3775 - DNA, 435 bp, Homo Sapiens
tacagccactggcccagctgctgccccagcaaagggcaggacacctctgaggagctgctgaggtggagcactgtgcctgtgcctcccctagagcctgctaggcccaaccgccacccagagtcctgtagggccagtgaagatggacccctcaacagcagggccatctccccctggagatatgagttggacagagacttgaaccggctcccccaggacctgtaccacgcccgttgcctgtgcccgcactgcgtcagcctacagacaggctcccacatggacccccggggcaactcggagctgctctaccacaaccagactgtcttctacaggcggccatgccatggcgagaagggcacccacaagggctactgcctggagcgcaggctgtaccgtgtttccttagcttgtgtgtgtgtgcggccccgtgtgatgggc

SEQ ID NO: 3776 - DNA, 450 bp, Homo Sapiens
aagcacaagcaatcttccttcaccaaaagttgttacccaaggggaacattgtcccaagctgttgacgctctctatatcaaagcagcatggctcaaagcaacgattccagaagaccgcataaaaaatatacgattattaaaaaagaaaacaaaaaagcagtttatgaaaaactgtcaatttcaagaacagcttctgtccttcttcatggaagacgtttttggtcaactgcaattgcaaggctgcaagaaaatacgctttgtggaggactttcatagccttaggcagaaattgagccactgtatttcctgtgcttcatcagctagagagatgaaatccattaccaggatgaaaagaatattttataggattggaaacaaaggaatctacaaagccatcagtgaactggatattcttctttcctggattaaaaaattattggaaagcagtcag

SEQ ID NO: 3777 - DNA, 645 bp, Homo Sapiens
ttcccaaggcccccagggaggccccagctgagcctgcaggagctgcggagggagttcacagtcagcctgcatctcgccaggaagctgctcgccgaggttcggggccaggcccaccgctttgcggaatctcacctgccaggagtgaacctgtacctcctgcccctgggagagcagctccctgatgtttccctgaccttccaggcctggcgccgcctctctgacccggagcgtctctgcttcatctccaccacgcttcagcccttccatgccctgctgggagggctggggacccagggccgctggaccaacatggagaggatgcagctgtgggccatgaggctggacctccgcgatctgcagcggcacctccgcttccaggtgctggctgcaggattcaacctcccggaggaggaggaggaggaagaggaggaggaggaggaggagaggaaggggctgctcccaggggcactgggcagcgccttacagggcccggcccaggtgtcctggccccagctcctctccacctaccgcctgctgcactccttggagctcgtcttatctcgggccgtgcgggagttgctgctgctgtccaaggctgggcactcagtctggcccttggggttcccaacattgagcccccagccc

SEQ ID NO: 3778 - DNA, 1452 bp, Homo Sapiens
cagggcagcgccgggccactgcagtgctacggagttggacccttgggcgacttgaactgctcgtgggagcctcttggggacctgggagccccctccgagttacacctccagagccaaaagtaccgttccaacaaaacccagactgtggcagtggcagccggacggagctgggtggccattcctcgggaacagctcaccatgtctgacaaactccttgtctggggcactaaggcaggccagcctctctggccccccgtcttcgtgaacctagaaacccaaatgaagccaaacgccccccggctgggccctgacgtggacttttccgaggatgaccccctggaggccactgtccattgggccccacctacatggccatctcataaagttctgatctgccagttccactaccgaagatgtcaggaggcggcctggaccctgctggaaccggagctgaagaccatacccctgacccctgttgagatccaagatttggagctagccactggctacaaagtgtatggccgctgccggatggagaaagaagaggatttgtggggcgagtggagccccattttgtccttccagacaccgccttctgctccaaaagatgtgtgggtatcagggaacctctgtgggacgcctggaggagaggaacctttgcttctatggaaggccccagggccctgtgtgcaggtgagctacaaagtctggttctgggttggaggtcgtgagctgagtccagaaggaattacctgctgctgctccctaattcccagtggggcggagtgggccagggtgtccgctgtcaacgccacaagctgggagcctctcaccaacctctctttggtctgcttggattcagcctctgccccccgtagcgtggcagtcagcagcatcgctgggagcacggagctactggtgacctggcaaccggggcctggggaaccactggagcatgtagtggactgggctcgagatggggaccccctggagaaactcaactgggtccggcttccccctgggaacctcagtgctctgttaccagggaatttcactgtcggggtcccctatcgaatcactgtgaccgcagtctctgcttcaggcttggcctctgcatcctccgtctgggggttcagggaggaattagcacccctagtggggccaacgctttggcgactccaagatgcccctccagggacccccgccatagcgtggggagaggtcccaaggcaccagcttcgaggccacctcacccactacaccttgtgtgcacagagtggaaccagcccctccgtctgcatgaatgtgagtggcaacacacagagtgtcaccctgcctgaccttccttggggtccctgtgagctgtgggtgacagcatctaccatcgctggacagggccctcctggtcccatcctccggcttcatctaccagataacaccctgaggtggaaa

SEQ ID NO: 3779 - DNA, 525 bp, Homo Sapiens
gttcctgtcgccaggctccgcggggctctcccggatgcaaggggctgccacatagcccagttcaagtccctgtctccacaggagctgcaggcctttaagagggccaaagatgccttagaagagtcgcttctgctgaaggactgcaagtgccgctcccgcctcttccccaggacctgggacctgaggcagctgcaggtgagggagcgccccgtggctttggaggctgagctggccctgacgctgaaggttctggaggccaccgctgacactgacccagccctgggggatgtcttggaccagccccttcacaccctgcaccatatcctctcccagctccgggcctgtatccagcctcagcccacggcagggcccaggacccggggccgcctccaccattggctgcaccggctccaggaggccccaaaaaaggagtcccctggctgcctcgaggcctctgtcaccttcaacctcttccgcctcctcacgcgagacctgaattgtgttgccagcggggacctgtgtgtc

SEQ ID NO: 3780 - DNA, 624 bp, Homo Sapiens
aggccccgtctggcccctccccagaatgtgacgctgctctcccagaacttcagcgtgtacctgacatggctcccagggcttggcaacccccaggatgtgacctattttgtggcctatcagagctctcccacccgtagacggtggcgcgaagtggaagagtgtgcgggaaccaaggagctgctatgttctatgatgtgcctgaagaaacaggacctgtacaacaagttcaagggacgcgtgcggacggtttctcccagctccaagtccccctgggtggagtccgaatacctggattacctttttgaagtggagccggccccacctgtcctggtgctcacccagacggaggagatcctgagtgccaatgccacgtaccagctgcccccctgcatgcccccactggatctgaagtatgaggtggcattctggaaggagggggccggaaacaagaccctatttccagtcactccccatggccagccagtccagatcactctccagccagctgccagcgaacaccactgcctcagtgccagaaccatctacacgttcagtgtcccgaaatacagcaagttctctaagcccacctgcttcttgctggaggtcccagaagccaactgggct

SEQ ID NO: 3781 - DNA, 543 bp, Homo Sapiens
ggccctgtccccacttccaagcccaccacaactgggaagggctgccacattggcaggttcaaatctctgtcaccacaggagctagcgagcttcaagaaggccagggacgccttggaagagtcactcaagctgaaaaactggagttgcagctctcctgtcttccccgggaattgggacctgaggcttctccaggtgagggagcgccctgtggccttggaggctgagctggccctgacgctgaaggtcctggaggccgctgctggcccagccctggaggacgtcctagaccagccccttcacaccctgcaccacatcctctcccagctccaggcctgtatccagcctcagcccacagcagggcccaggccccggggccgcctccaccactggctgcaccggctccaggaggcccccaaaaaggagtccgctggctgcctggaggcatctgtcaccttcaacctcttccgcctcctcacgcgagacctcaaatatgtggccgatgggaacctgtgtctgagaacgtcaacccaccctgagtccacc

SEQ ID NO: 3782 - DNA, 657 bp, Homo Sapiens
gagctctgtgacgatgacccgccagagatcccacacgccacattcaaagccatggcctacaaggaaggaaccatgttgaactgtgaatgcaagagaggtttccgcagaataaaaagcgggtcactctatatgctctgtacaggaaactctagccactcgtcctgggacaaccaatgtcaatgcacaagctctgccactcggaacacaacgaaacaagtgacacctcaacctgaagaacagaaagaaaggaaaaccacagaaatgcaaagtccaatgcagccagtggaccaagcgagccttccaggtcactgcagggaacctccaccatgggaaaatgaagccacagagagaatttatcatttcgtggtggggcagatggtttattatcagtgcgtccagggatacagggctctacacagaggtcctgctgagagcgtctgcaaaatgacccacgggaagacaaggtggacccagccccagctcatatgcacaggtgaaatggagaccagtcagtttccaggtgaagagaagcctcaggcaagccccgaaggccgtcctgagagtgagacttcctgcctcgtcacaacaacagattttcaaatacagacagaaatggctgcaaccatggagacgtccatatttacaacagagtaccag

SEQ ID NO: 3783 - DNA, 642 bp, Homo Sapiens
gcggtgaatggcacttcccagttcacatgcttctacaactcgagagccaacatctcctgtgtctggagccaagatggggctctgcaggacacttcctgccaagtccatgcctggccggacagacggcggtggaaccaaacctgtgagctgctccccgtgagtcaagcatcctgggcctgcaacctgatcctcggagccccagattctcagaaactgaccacagttgacatcgtcaccctgagggtgctgtgccgtgagggggtgcgatggagggtgatggccatccaggacttcaagccctttgagaaccttcgcctgatggcccccatctccctccaagttgtccacgtggagacccacagatgcaacataagctgggaaatctcccaagcctcccactactttgaaagacacctggagttcgaggcccggacgctgtccccaggccacacctgggaggaggcccccctgctgactctcaagcagaagcaggaatggatctgcctggagacgctcaccccagacacccagtatgagtttcaggtgcgggtcaagcctctgcaaggcgagttcacgacctggagcccctggagccagcccctggccttcaggacaaagcctgcagcccttgggaaggacacc

SEQ ID NO: 3784 - DNA, 720 bp, Homo Sapiens
ctgaacacgacaattctgacgcccaatgggaatgaagacaccacagctgatttcttcctgaccactatgcccactgactccctcagtgtttccactctgcccctcccagaggttcagtgttttgtgttcaatgtcgagtacatgaattgcacttggaacagcagctctgagccccagcctaccaacctcactctgcattattggtacaagaactcggataatgataaagtccagaagtgcagccactatctattctctgaagaaatcacttctggctgtcagttgcaaaaaaaggagatccacctctaccaaacatttgttgttcagctccaggacccacgggaacccaggagacaggccacacagatgctaaaactgcagaatctggtgatcccctgggctccagagaacctaacacttcacaaactgagtgaatcccagctagaactgaactggaacaacagattcttgaaccactgtttggagcacttggtgcagtaccggactgactgggaccacagctggactgaacaatcagtggattatagacataagttctccttgcctagtgtggatgggcagaaacgctacacgtttcgtgttcggagccgctttaacccactctgtggaagtgctcagcattggagtgaatggagccacccaatccactgggggagcaatacttcaaaagagaatcctttcctgtttgcattggaagcc

SEQ ID NO: 3785 - DNA, 399 bp, Homo Sapiens
gctcccatgacccagacaacgcccttgaagacaagctgggttaactgctctaacatgatcgatgaaattataacacacttaaagcagccacctttgcctttgctggacttcaacaacctcaatggggaagaccaagacattctgatggaaaataaccttcgaaggccaaacctggaggcattcaacagggctgtcaagagtttacagaacgcatcagcaattgagagcattcttaaaaatctcctgccatgtctgcccctggccacggccgcacccacgcgacatccaatccatatcaaggacggtgactggaatgaattccggaggaaactgacgttctatctgaaaacccttgagaatgcgcaggctcaacagacgactttgagcctcgcgatcttt

SEQ ID NO: 3786 - DNA, 423 bp, Homo Sapiens
tcccacacgttgcccgtccgtttactacgaccaagtgatgatgtacagaaaatagtcgaggaattacagtccctctcgaagatgcttttgaaagatgtggaggaagagaagggcgtgctcgtgtcccagaattacacgctgccgtgtctcagccctgacgcccagccgccaaacaacatccacagcccagccatccgggcatatctcaagacaatcagacagctagacaacaaatctgttattgatgagatcatagagcacctcgacaaactcatatttcaagatgcaccagaaacaaacatttctgtgccaacagacacccatgaatgtaaacgcttcatcctgactatttctcaacagttttcagagtgcatggacctcgcactaaaatcattgacctctggagcccaacaggccaccact

SEQ ID NO: 3787 - DNA, 1500 bp, Homo Sapiens
tctctgccagctaagcctgagaacatttcctgtgtctactactataggaaaaatttaacctgcacttggagtccaggaaaggaaaccagttatacccagtacacagttaagagaacttacgcttttggagaaaaacatgataattgtacaaccaatagttctacaagtgaaaatcgtgcttcgtgctcttttttccttccaagaataacgatcccagataattataccattgaggtggaagctgaaaatggagatggtgtaattaaatctcatatgacatactggagattagagaacatagcgaaaactgaaccacctaagattttccgtgtgaaaccagttttgggcatcaaacgaatgattcaaattgaatggataaagcctgagttggcgcctgtttcatctgatttaaaatacacacttcgattcaggacagtcaacagtaccagctggatggaagtcaacttcgctaagaaccgtaaggataaaaaccaaacgtacaacctcacggggctgcagccttttacagaatatgtcatagctctgcgatgtgcggtcaaggagtcaaagttctggagtgactggagccaagaaaaaatgggaatgactgaggaagaagctccatgtggcctggaactgtggagagtcctgaaaccagctgaggcggatggaagaaggccagtgcggttgttatggaagaaggcaagaggagccccagtcctagagaaaacacttggctacaacatatggtactatccagaaagcaacactaacctcacagaaacaatgaacactactaaccagcagcttgaactgcatctgggaggcgagagcttttgggtgtctatgatttcttataattctcttgggaagtctccagtggccaccctgaggattccagctattcaagaaaaatcatttcagtgcattgaggtcatgcaggcctgcgttgctgaggaccagctagtggtgaagtggcaaagctctgctctagacgtgaacacttggatgattgaatggtttccggatgtggactcagagcccaccaccctttcctgggaatctgtgtctcaggccacgaactggacgatccagcaagataaattaaaacctttctggtgctataacatctctgtgtatccaatgttgcatgacaaagttggcgagccatattccatccaggcttatgccaaagaaggcgttccatcagaaggtcctgagaccaaggtggagaacattggcgtgaagacggtcacgatcacatggaaagagattcccaagagtgagagaaagggtatcatctgcaactacaccatcttttaccaagctgaaggtggaaaaggattctccaagacagtcaattccagcatcttgcagtacggcctggagtccctgaaacgaaagacctcttacattgttcaggtcatggccagcaccagtgctgggggaaccaacgggaccagcataaatttcaagacattgtcattcagtgtctttgag

SEQ ID NO: 3788 - DNA, 612 bp, Homo Sapiens
gcctgggtctcagcgtgtgacactgaggacactgtgggacacctgggaccctggagggacaaggatccggccctttggtgccaactctgcctctcttcacagcaccaggccatagaaagattttatgataaaatgcaaaatgcagaatcaggacgtggacaggtgatgtcgagcctggcagagctggaggacgacttcaaagagggctacctggagacagtggcggcttattatgaggagcagcacccagagctcactcctctacttgaaaaagaaagagatggattacggtgccgaggcaacagatcccctgtcccggatgttgaggatcccgcaaccgaggagcctggggagagcttttgtgacaaggtcatgagatggttccaggccatgctgcagcggctgcagacctggtggcacggggttctggcctgggtgaaggagaaggtggtggccctggtccatgcagtgcaggccctctggaaacagttccagagtttctgctgctctctgtcagagctcttcatgtcctctttccagtcctacggagccccacggggggacaaggaggagctgacaccccagaagtgctctgaaccccaatcttcaaaa

SEQ ID NO: 3789 - DNA, 810 bp, Homo Sapiens
atgaagcctaaaatgaagtattcaaccaacaaaatttccacagcaaagtggaagaacacagcaagcaaagccttgtgtttcaagctgggaaaatcccaacagaaggccaaagaagtttgccccatgtactttatgaagctccgctctggccttatgataaaaaaggaggcctgttactttaggagagaaaccaccaaaaggccttcactgaaaacaggtagaaagcacaaaagacatctggtactcgctgcctgtcaacagcagtctactgtggagtgctttgcctttggtatatcaggggtccagaaatatactagagcacttcatgattcaagtatcacaggaatttcacctattacagagtatcttgcttctctaagcacatacaatgatcaatccattacttttgctttggaggatgaaagttatgagatatatgttgaagacttgaaaaaagatgaaaagaaagataaggtgttactgagttactatgagtctcaacacccctcaaatgaatcaggtgacggtgttgatggtaagatgttaatggtaaccctgagtcctacaaaagacttctggttgcatgccaacaacaaggaacactctgtggagctccataagtgtgaaaaaccactgccagaccaggccttctttgtccttcataatatgcactccaactgtgtttcatttgaatgcaagactgatcctggagtgtttataggtgtaaaggataatcatcttgctctgattaaagtagactcttctgagaatttgtgtactgaaaatatcttgtttaagctctctgaaact

SEQ ID NO: 3790 - DNA, 666 bp, Homo Sapiens
aatgagcctttggagatgtggcccttgacgcagaatgaggagtgcactgtcacgggttttctgcgggacaagctgcagtacaggagccgacttcagtacatgaaacactacttccccatcaactacaagatcagtgtgccttacgagggggtgttcagaatcgccaacgtcaccaggctgcagagggcccaggtgagcgagcgggagctgcggtatctgtgggtcttggtgagcctcagtgccactgagtcggtgcaggacgtgctgctcgagggccacccatcctggaagtacctgcaggaggtgcagacgctgctgctgaatgtccagcagggcctcacggatgtggaggtcagccccaaggtggaatccgtgttgtccctcttgaatgccccagggccaaacctgaagctggtgcggcccaaagccctgctggacaactgcttccgggtcatggagctgctgtactgctcctgctgtaaacaaagctccgtcctaaactggcaggactgtgaggtgccaagtcctcagtcttgcagcccagagccctcattgcagtatgcggccacccagctgtaccctccgcccccgtggtcccccagctccccgcctcactccacgggctcggtgaggccggtcagggcacagggcgagggcctcttgccc

SEQ ID NO: 3791 - DNA, 459 bp, Homo Sapiens
cgggaggcagcacccaaatcctatgctattcgtgattctcgacagatggtgtgggtcctgagtggaaattctttaatagcagctcctcttagccgcagcattaagcctgtcactcttcatttaatagcctgtagagacacagaattcagtgacaaggaaaagggtaatatggtttacctgggaatcaagggaaaagatctctgtctcttctgtgcagaaattcagggcaagcctactttgcagcttaaggaaaaaaatatcatggacctgtatgtggagaagaaagcacagaagccctttctctttttccacaataaagaaggctccacttctgtctttcagtcagtctcttaccctggctggttcatagccacctccaccacatcaggacagcccatctttctcaccaaggagagaggcataactaataacactaacttctacttagattctgtggaa

SEQ ID NO: 3792 - DNA, 861 bp, Homo Sapiens
acgaaggaagatccaaacccaccaatcacgaacctaaggatgaaagcaaaggctcagcagttgacctgggaccttaacagaaatgtgaccgatatcgagtgtgttaaagacgccgactattctatgccggcagtgaacaatagctattgccagtttggagcaatttccttatgtgaagtgaccaactacaccgtccgagtggccaacccaccattctccacgtggatcctcttccctgagaacagtgggaagccttgggcaggtgcggagaatctgacctgctggattcatgacgtggatttcttgagctgcagctgggcggtaggcccgggggcccccgcggacgtccagtacgacctgtacttgaacgttgccaacaggcgtcaacagtacgagtgtcttcactacaaaacggatgctcagggaacacgtatcgggtgtcgtttcgatgacatctctcgactctccagcggttctcaaagttcccacatcctggtgcggggcaggagcgcagccttcggtatcccctgcacagataagtttgtcgtcttttcacagattgagatattaactccacccaacatgactgcaaagtgtaataagacacattcctttatgcactggaaaatgagaagtcatttcaatcgcaaatttcgctatgagcttcagatacaaaagagaatgcagcctgtaatcacagaacaggtcagagacagaacctccttccagctactcaatcctggaacgtacacagtacaaataagagcccgggaaagagtgtatgaattcttgagcgcctggagcaccccccagcgcttcgagtgcgaccaggaggagggcgcaaacacacgtgcctggcgg

SEQ ID NO: 3793 - DNA, 387 bp, Homo Sapiens
cacaagtgcgatatcaccttacaggagatcatcaaaactttgaacagcctcacagagcagaagactctgtgcaccgagttgaccgtaacagacatctttgctgcctccaagaacacaactgagaaggaaaccttctgcagggctgcgactgtgctccggcagttctacagccaccatgagaaggacactcgctgcctgggtgcgactgcacagcagttccacaggcacaagcagctgatccgattcctgaaacggctcgacaggaacctctggggcctggcgggcttgaattcctgtcctgtgaaggaagccaaccagagtacgttggaaaacttcttggaaaggctaaagacgatcatgagagagaaatattcaaagtgttcgagc

SEQ ID NO: 3794 - DNA, 621 bp, Homo Sapiens
atgaaggtcttgcaggagcccacctgcgtctccgactacatgagcatctctacttgcgagtggaagatgaatggtcccaccaattgcagcaccgagctccgcctgttgtaccagctggtttttctgctctccgaagcccacacgtgtgtccctgagaacaacggaggcgcggggtgcgtgtgccacctgctcatggatgacgtggtcagtgcggataactatacactggacctgtgggctgggcagcagctgctgtggaagggctccttcaagcccagcgagcatgtgaaacccagggccccaggaaacctgacagttcacaccaatgtctccgacactctgctgctgacctggagcaacccgtatccccctgacaattacctgtataatcatctcacctatgcagtcaacatttggagtgaaaacgacccggcagatttcagaatctataacgtgacctacctagaaccctccctccgcatcgcagccagcaccctgaagtctgggatttcctacagggcacgggtgagggcctgggctcagtgctataacaccacctggagtgagtggagccccagcaccaagtggcacaactcctacagggagcccttcgagcagcac

SEQ ID NO: 3795 - DNA, 345 bp, Homo Sapiens
atccccacagaaattcccacaagtgcattggtgaaagagaccttggcactgctttctactcatcgaactctgctgatagccaatgagactctgaggattcctgttcctgtacataaaaatcaccaactgtgcactgaagaaatctttcagggaataggcacactggagagtcaaactgtgcaagggggtactgtggaaagactattcaaaaacttgtccttaataaagaaatacattgacggccaaaaaaaaaagtgtggagaagaaagacggagagtaaaccaattcctagactacctgcaagagtttcttggtgtaatgaacaccgagtggataatagaaagt

SEQ ID NO: 3796 - DNA, 945 bp, Homo Sapiens
gacttacttcctgatgaaaagatttcacttctcccgcctgtcaatttcaccattaaagttactggtttggctcaagttcttttacaatggaaaccaaatcctgatcaagagcaaaggaatgttaatctagaatatcaagtgaaaataaacgctccaaaagaagatgactatgaaaccagaatcactgaaagcaaatgtgtaaccatcctccacaagggcttttcagcaagtgtgcggaccatcctgcagaacgaccactcactactggccagcagctgggcttctgctgaacttcatgccccaccagggtctcctggaacctcaattgtgaatttaacttgcaccacaaacactacagaagacaattattcacgtttaaggtcataccaagtttcccttcactgcacctggcttgttggcacagatgcccctgaggacacgcagtattttctctactataggtatggctcttggactgaagaatgccaagaatacagcaaagacacactggggagaaatatcgcatgctggtttcccaggacttttatcctcagcaaagggcgtgactggcttgcggtgcttgttgacggctccagcaagcactctgctatcaggccctttgatcagctgtttgcccttcacgccattgatcaaataaatcctccactgaatgtcacagcagagattgaaggaactcgtctctctatccaatgggagaaaccagtgtctgcttttccaatccattgctttgattatgaagtaaaaatacacaatacaaggaatggatatttgcagatagaaaaattgatgaccaatgcattcatctcaataattgatgatctttctaagtacgatgttcaagtgagagcagcagtgagctccatgtgcagagaggcagggctctggagtgagtggagccaacctatttatgtggggttctcaaga

SEQ ID NO: 3797 - DNA, 549 bp, Homo Sapiens
gtacccccaggagaagattccaaagatgtagccgccccacacagacagccactcacctcttcagaacgaattgacaaacaaattcggtacatcctcgacggcatctcagccctgagaaaggagacatgtaacaagagtaacatgtgtgaaagcagcaaagaggcactggcagaaaacaacctgaaccttccaaagatggctgaaaaagatggatgcttccaatctggattcaatgaggagacttgcctggtgaaaatcatcactggtcttttggagtttgaggtatacctagagtacctccagaacagatttgagagtagtgaggaacaagccagagctgtgcagatgagtacaaaagtcctgatccagttcctgcagaaaaaggcaaagaatctagatgcaataaccacccctgacccaaccacaaatgccagcctgctgacgaagctgcaggcacagaaccagtggctgcaggacatgacaactcatctcattctgcgcagctttaaggagttcctgcagtccagcctgagggctcttcggcaaatg

SEQ ID NO: 3798 - DNA, 1038 bp, Homo Sapiens
ctggccccaaggcgctgccctgcgcaggaggtggcgagaggcgtgctgaccagtctgccaggagacagcgtgactctgacctgcccgggggtagagccggaagacaatgccactgttcactgggtgctcaggaagccggctgcaggctcccaccccagcagatgggctggcatgggaaggaggctgctgctgaggtcggtgcagctccacgactctggaaactattcatgctaccgggccggccgcccagctgggactgtgcacttgctggtggatgttccccccgaggagccccagctctcctgcttccggaagagccccctcagcaatgttgtttgtgagtggggtcctcggagcaccccatccctgacgacaaaggctgtgctcttggtgaggaagtttcagaacagtccggccgaagacttccaggagccgtgccagtattcccaggagtcccagaagttctcctgccagttagcagtcccggagggagacagctctttctacatagtgtccatgtgcgtcgccagtagtgtcgggagcaagttcagcaaaactcaaacctttcagggttgtggaatcttgcagcctgatccgcctgccaacatcacagtcactgccgtggccagaaacccccgctggctcagtgtcacctggcaagacccccactcctggaactcatctttctacagactacggtttgagctcagatatcgggctgaacggtcaaagacattcacaacatggatggtcaaggacctccagcatcactgtgtcatccacgacgcctggagcggcctgaggcacgtggtgcagcttcgtgcccaggaggagttcgggcaaggcgagtggagcgagtggagcccggaggccatgggcacgccttggacagaatccaggagtcctccagctgagaacgaggtgtccacccccatgcaggcacttactactaataaagacgatgataatattctcttcagagattctgcaaatgcgacaagcctcccagtgcaagattcttcttcagtaccactgccc

SEQ ID NO: 3799 - DNA, 1791 bp, Homo Sapiens
gaacttctagatccatgtggttatatcagtcctgaatctccagttgtacaacttcattctaatttcactgcagtttgtgtgctaaaggaaaaatgtatggattattttcatgtaaatgctaattacattgtctggaaaacaaaccattttactattcctaaggagcaatatactatcataaacagaacagcatccagtgtcacctttacagatatagcttcattaaatattcagctcacttgcaacattcttacattcggacagcttgaacagaatgtttatggaatcacaataatttcaggcttgcctccagaaaaacctaaaaatttgagttgcattgtgaacgaggggaagaaaatgaggtgtgagtgggatcgtggaagggaaacacacttggagacaaacttcactttaaaatctgaatgggcaacacacaagtttgctgattgcaaagcaaaacgtgacacccccacctcatgcactgttgattattctactgtgtattttgtcaacattgaagtctgggtagaagcagagaatgcccttgggaaggttacatcagatcatatcaattttgatcctgtatataaagtgaagcccaatccgccacataatttatcagtgatcaactcagaggaactgtctagtatcttaaaattgacatggaccaacccaagtattaagagtgttataatactaaaatataacattcaatataggaccaaagatgcctcaacttggagccagattcctcctgaagacacagcatccacccgatcttcattcactgtccaagaccttaaaccttttacagaatatgtgtttaggattcgctgtatgaaggaagatggtaagggatactggagtgactggagtgaagaagcaagtgggatcacctatgaagatagaccatctaaagcaccaagtttctggtataaaatagatccatcccatactcaaggctacagaactgtacaactcgtgtggaagacattgcctccttttgaagccaatggaaaaatcttggattatgaagtgactctcacaagatggaaatcacatttacaaaattacacagttaatgccacaaaactgacagtaaatctcacaaatgatcgctatgtagcaaccctaacagtaagaaatcttgttggcaaatcagatgcagctgttttaactatccctgcctgtgactttcaagctactcaccctgtaatggatcttaaagcattccccaaagataacatgctttgggtggaatggactactccaagggaatctgtaaagaaatatatacttgagtggtgtgtgttatcagataaagcaccctgtatcacagactggcaacaagaagatggtaccgtgcatcgcacctatttaagagggaacttagcagagagcaaatgctatttgataacagttactccagtatatgctgatggaccaggaagccctgaatccataaaggcataccttaaacaagctccaccttccaaaggacctactgttcggacaaaaaaagtagggaaaaacgaagctgtcttagagtgggaccaacttcctgttgatgttcagaatggatttatcagaaattatactatattttatagaaccatcattggaaatgaaactgctgtgaatgtggattcttcccacacagaatatacattgtcctctttgactagtgacacattgtacatggtacgaatggcagcatacacagatgaaggtgggaaggatggtccagaattcacttttactaccccaaagtttgctcaaggagaaattgaa

SEQ ID NO: 3800 - DNA, 456 bp, Homo Sapiens
gattgtgatattgaaggtaaagatggcaaacaatatgagagtgttctaatggtcagcatcgatcaattattggacagcatgaaagaaattggtagcaattgcctgaataatgaatttaacttttttaaaagacatatctgtgatgctaataaggaaggtatgtttttattccgtgctgctcgcaagttgaggcaatttcttaaaatgaatagcactggtgattttgatctccacttattaaaagtttcagaaggcacaacaatactgttgaactgcactggccaggttaaaggaagaaaaccagctgccctgggtgaagcccaaccaacaaagagtttggaagaaaataaatctttaaaggaacagaaaaaactgaatgacttgtgtttcctaaagagactattacaagagataaaaacttgttggaataaaattttgatgggcactaaagaacac

SEQ ID NO: 3801 - DNA, 657 bp, Homo Sapiens
gaaagtggctatgctcaaaatggagacttggaagatgcagaactggatgactactcattctcatgctatagccagttggaagtgaatggatcgcagcactcactgacctgtgcttttgaggacccagatgtcaacatcaccaatctggaatttgaaatatgtggggccctcgtggaggtaaagtgcctgaatttcaggaaactacaagagatatatttcatcgagacaaagaaattcttactgattggaaagagcaatatatgtgtgaaggttggagaaaagagtctaacctgcaaaaaaatagacctaaccactatagttaaacctgaggctccttttgacctgagtgtcgtctatcgggaaggagccaatgactttgtggtgacatttaatacatcacacttgcaaaagaagtatgtaaaagttttaatgcacgatgtagcttaccgccaggaaaaggatgaaaacaaatggacgcatgtgaatttatccagcacaaagctgacactcctgcagagaaagctccaaccggcagcaatgtatgagattaaagttcgatccatccctgatcactattttaaaggcttctggagtgaatggagtccaagttattacttcagaactccagagatcaataatagctcaggggagatggat

SEQ ID NO: 3802 - DNA, 231 bp, Homo Sapiens
gcagttttgccaaggagtgctaaagaacttagatgtcagtgcataaagacatactccaaacctttccaccccaaatttatcaaagaactgagagtgattgagagtggaccacactgcgccaacacagaaattattgtaaagctttctgatggaagagagctctgtctggaccccaaggaaaactgggtgcagagggttgtggagaagtttttgaagagggctgagaattca

SEQ ID NO: 3803 - DNA, 144 bp, Homo Sapiens
atggaagattttaacatggagagtgacagctttgaagatttctggaaaggtgaagatcttagtaattacagttacagctctaccctgcccccttttctactagatgccgccccatgtgaaccagaatccctggaaatcaacaag

SEQ ID NO: 3804 - DNA, 378 bp, Homo Sapiens
caggggtgtccaaccttggcggggatcctggacatcaacttcctcatcaacaagatgcaggaagatccagcttccaagtgccactgcagtgctaatgtgaccagttgtctctgtttgggcattccctctgacaactgcaccagaccatgcttcagtgagagactgtctcagatgaccaataccaccatgcaaacaagatacccactgattttcagtcgggtgaaaaaatcagttgaagtactaaagaacaacaagtgtccatatttttcctgtgaacagccatgcaaccaaaccacggcaggcaacgcgctgacatttctgaagagtcttctggaaattttccagaaagaaaagatgagagggatgagaggcaagata

SEQ ID NO: 3805 - DNA, 654 bp, Homo Sapiens
tctgtcacaggggaaggacaagggccaaggtctagaaccttcacctgcctcaccaacaacattctcaggatcgattgccactggtctgccccagagctgggacagggctccagcccctggctcctcttcaccaggctcctggcggcacacataagtgcatcttgcggggcagtgagtgcaccgtcgtgctgccacctgaggcagtgctcgtgccatctgacaatttcaccatcactttccaccactgcatgtctgggagggagcaggtcagcctggtggacccggagtacctgccccggagacacgagcaacatcagttctggccactgcatcctgacctggagcatcagtcctgccttggagccaatgaccacacttctcagctatgagctggccttcaagaagcaggaagaggcctgggagcaggcccagcacagggatcacattgtcggggtgacctggcttatacttgaagcctttgagctggaccctggctttatccatgaggccaggctgcgtgtccagatggccacactggaggatgatgtggtagaggaggagcgttatacaggccagtggagtgagtggagccagcctgtgtgcttccaggctccccagagacaaggccctctgatcccaccctgggggtggcca

SEQ ID NO: 3806 - DNA, 432 bp, Homo Sapiens
ttgcttgtgacggtccagcacacagaacgctatgtcaccctgtttgcctctatcatcctcaaatgtgactacaccacctctgcccagctccaggacgtggtggtgacatggcgcttcaagtccttctgcaaggaccctatctttgactactactcagcgtcataccaggcagctttatccctgggccaggacccatccaatgactgcaacgacaaccagcgggaagttcgcatagtggcccagcggcgggggcagaatgagcccgtgctgggggtagattaccggcagcgcaagatcaccatccagaaccgagcagatctcgtgataaatgaagtgatgtggtgggaccatggagtgtattactgcaccattgaggctccaggggacacatcaggagaccccgataaggaagtaaagctcatcgtcctacac

SEQ ID NO: 3807 - DNA, 2583 bp, Homo Sapiens
ggtgaacagattgcagaattcagtatccaccttttggggaagcagtacagggaagaactacaggattcctccagctttcaccaccagcaccttgaagaagaatttatttcagaggttgaaaatgcatttactgggttaccaggctacaaggaaattcgtgtacttgaatttaggtcccccaaggaaaatgacagtggcgtagatgtttactatgcagttaccttcaatggtgaggccatcagcaataccacctgggacctcattagccttcactccaacaaggtggaaaaccatggccttgtggaactggatgataaacccactgttgtttatacaatcagtaacttcagagattatattgctgagacattgcagcagaattttttgctggggaactcttccttgaatccagatcctgattccctgcagcttatcaatgtgagaggagttttgcgtcaccaaactgaagatctagtttggaacacccaaagttcaagtcttcaggcaacgccgtcatctattctggataatacctttcaagctgcatggccctcagcagatgaatccatcaccagcagtattccaccacttgatttcagctctggtcctccctcagccactggcagggaactctggtcagaaagtcctttgggtgatttagtgtctacacacaaattagcctttccctcgaagatgggcctcagctcttccccagaggttttagaggttagcagcttgactcttcattctgtcaccccggcagtgcttcagactggcttgcctgtggcttctgaggaaaggacttctggatctcacttggtagaagatggattagccaatgttgaagagtcagaagattttctttctattgattcattgccttcaagttcattcactcaacctgtgccaaaagaaacaataccatccatggaagactctgatgtgtccttaacatcttcaccatatctgacctcttctataccttttggcttggactccttgacctccaaagtcaaagaccaattaaaagtgagccctttcctgccagatgcatccatggaaaaagagttaatatttgacggtggtttaggttcagggtctgggcaaaaggtagatctgattacttggccacggagtgagacttcatcagagaagagcgctgaaccactgtccaagccgtggcttgaagatgatgattcacttttgccagctgagattgaagacaagaaactagttttagttgacaaaatggattccacagaccaaattagtaagcactcaaaatatgaacatgatgacagatccatacactttccagaggaagagcctcttagtgggcctgctgtgcccatcttcgcagatactgcagctgaatctgcgtctctaaccctccccaagcacatatcagaagtacctggtgttgatgattactcagttaccaaagcacctcttatactgacatctgtagcaatctctgcctctactgataaatcagatcaggcagatgccatcctaagggaggatatggaacaaattactgagtcatccaactatgaatggtttgacagtgaggtttcaatggtaaagccagatatgcaaactttgtggactatattgccagaatcagagagagtttggacaagaacttcttccctagagaaattgtccagagacatattggcaagtacaccacagagtgctgacaggctctggttatctgtgacacagtctaccaaattgcctccaaccacaatctccaccctgctagaggatgaagtaattatgggtgtacaggatatttcgttagaactggaccggataggcacagattactatcagcctgagcaagtccaagagcaaaatggcaaggttggtagttatgtggaaatgtcaacaagtgttcactccacagagatggttagtgtggcttggcccacagaaggaggagatgacttgagttatacccagacttcaggagctttggtggttttcttcagcctccgagtgactaacatgatgttttcagaagatctgtttaataaaaactccttggagtataaagccctggagcaaagattcttagaattgctggttccctatctccagtcaaatctcacggggttccagaacttagaaatcctcaacttcagaaatggcagcattgtggtgaacagtcgaatgaagtttgccaattctgtccctcctaacgtcaacaatgcggtgtacatgattctggaagacttttgtaccactgcctacaataccatgaacttggctattgataaatactctcttgatgtggaatcaggtgatgaagccaacccttgcaagtttcaggcctgtaatgaattttcagagtgtctggtcaacccctggagtggagaagcaaagtgcagatgcttccctggatacctgagtgtggaagaacggccctgtcagagtctctgtgacctacagcctgacttctgcttgaatgatggaaagtgtgacattatgcctgggcacggggccatttgtaggtgccgggtgggtgagaactggtggtaccgaggcaagcactgtgaggaatttgtgtctgagccc

SEQ ID NO: 3808 - DNA, 474 bp, Homo Sapiens
gcagcccccagaaggtgtctattatctcattatcgttccttagagccccgtacgcttgcagcggccaaagcacttcgtgacaggtatgaagaagaggcattatcttggggacaaaggaattgtagctttcgtcctcgtagagacccaccccgtccttcaagttgcgccaggctaagacacgtagcgcgtggcatcgccgatgctcaagcggttctatcaggcttacatagatcagagcttcttccaggagccggcccaattctggagctacttgcggcggcgggaagagacgtggctgcgtgcctggagttagcaagaccaggctcaagtaggaaagtccccggtgcccagaaacgtcgtcataagcccaggagagcagactcaccaagatgtaggaaagcttcagtagtctttaatctactgaggctacttacgtgggaattacgtctggccgcccactctggcccgtgtctg

SEQ ID NO: 3809 - DNA, 258 bp, Homo Sapiens
tttgtgaaccaacacctgtgcggctcacacctggtggaagctctctacctagtgtgcggggaacgaggcttcttctacacacccaagacccgccgggaggcagaggacctgcaggtggggcaggtggagctgggcgggggccctggtgcaggcagcctgcagcccttggccctggaggggtccctgcagaagcgtggcattgtggaacaatgctgtaccagcatctgctccctctaccagctggagaactactgcaac

SEQ ID NO: 3810 - DNA, 333 bp, Homo Sapiens
ttgggccccgcgcccaccccagagatgcgtgagaagttgtgcggccaccacttcgtacgcgcgctagtgcgcgtgtgcgggggcccccgctggtccaccgaagccaggaggcctgcggccggaggcgaccgtgagttgctacagtggctggagagacgacatctgctccatgggctggtggccgacagtaatctcacgctgggacctggcctgcagcccctgccccagacctctcaccatcaccgccaccaccgtgcagctgccaccaaccctgcacgctactgctgcctcagtggctgtacccaacaagacctgctgaccctctgtccctac

SEQ ID NO: 3811 - DNA, 339 bp, Homo Sapiens
aaggagtctgtgagactctgtgggctagaatacatacggacagtcatctatatctgtgctagctccaggtggagaaggcatctggaggggatccctcaagctcagcaagctgagacaggaaactccttccagctcccacataaacgtgagttttctgaggaaaatccagcgcaaaaccttccgaaggtggatgcctcaggggaagaccgtctttggggtggacagatgcccactgaagagctttggaagtcaaagaagcattcagtgatgtcaagacaagatttacaaactttgtgttgcactgatggctgttccatgactgatttgagtgctctttgc

SEQ ID NO: 3812 - DNA, 534 bp, Homo Sapiens
cgtgaactgagcgacatcagcagtgccaggaagctgtgcggcaggtacttggtgaaagaaatagaaaaactctgcggccatgccaactggagccagttccgtttcgaggaggaaacccctttctcacggttgattgcacaggcctcggagaaggtcgaagcctacagcccataccagttcgaaagcccgcaaaccgcttccccggcccggggaagaggcacaaacccagtgtctacttcttgggaagaagcagtaaacagttgggaaatgcagtcactacctgagtataaggataaaaagggatattcaccccttggtaagacaagagaattttcttcatcacataatatcaatgtatatattcatgagaatgcaaaatttcagaagaaacgtagaaacaaaattaaaaccttaagcaatttgttttgggggcatcatccccaaagaaaacgcagaggatattcagaaaagtgttgtcttacaggatgtacaaaagaagaacttagcattgcatgtcttccatatattgatttt

SEQ ID NO: 3813 - DNA, 2157 bp, Homo Sapiens
cacctgtaccccggagaggtgtgtcccggcatggatatccggaacaacctcactaggttgcatgagctggagaattgctctgtcatcgaaggacacttgcagatactcttgatgttcaaaacgaggcccgaagatttccgagacctcagtttccccaaactcatcatgatcactgattacttgctgctcttccgggtctatgggctcgagagcctgaaggacctgttccccaacctcacggtcatccggggatcacgactgttctttaactacgcgctggtcatcttcgagatggttcacctcaaggaactcggcctctacaacctgatgaacatcacccggggttctgtccgcatcgagaagaacaatgagctctgttacttggccactatcgactggtcccgtatcctggattccgtggaggataattacatcgtgttgaacaaagatgacaacgaggagtgtggagacatctgtccgggtaccgcgaagggcaagaccaactgccccgccaccgtcatcaacgggcagtttgtcgaacgatgttggactcatagtcactgccagaaagtttgcccgaccatctgtaagtcacacggctgcaccgccgaaggcctctgttgccacagcgagtgcctgggcaactgttctcagcccgacgaccccaccaagtgcgtggcctgccgcaacttctacctggacggcaggtgtgtggagacctgcccgcccccgtactaccacttccaggactggcgctgtgtgaacttcagcttctgccaggacctgcaccacaaatgcaagaactcgcggaggcagggctgccaccagtacgtcattcacaacaacaagtgcatccctgagtgtccctccgggtacacgatgaattccagcaacttgctgtgcaccccatgcctgggtccctgtcccaaggtgtgccacctcctagaaggcgagaagaccatcgactcggtgacgtctgcccaggagctccgaggatgcaccgtcatcaacgggagtctgatcatcaacattcgaggaggcaacaatctggcagctgagctagaagccaacctcggcctcattgaagaaatttcagggtatctaaaaatccgccgatcctacgctctggtgtcactttccttcttccggaagttacgtctgattcgaggagagaccttggaaattgggaactactccttctatgccttggacaaccagaacctaaggcagctctgggactggagcaaacacaacctcaccatcactcaggggaaactcttcttccactataaccccaaactctgcttgtcagaaatccacaagatggaagaagtttcaggaaccaaggggcgccaggagagaaacgacattgccctgaagaccaatggggaccaggcatcctgtgaaaatgagttacttaaattttcttacattcggacatcttttgacaagatcttgctgagatgggagccgtactggccccccgacttccgagacctcttggggttcatgctgttctacaaagaggccccttatcagaatgtgacggagttcgacgggcaggatgcgtgtggttccaacagttggacggtggtagacattgacccacccctgaggtccaacgaccccaaatcacagaaccacccagggtggctgatgcggggtctcaagccctggacccagtatgccatctttgtgaagaccctggtcaccttttcggatgaacgccggacctatggggccaagagtgacatcatttatgtccagacagatgccaccaacccctctgtgcccctggatccaatctcagtgtctaactcatcatcccagattattctgaagtggaaaccaccctccgaccccaatggcaacatcacccactacctggttttctgggagaggcaggcggaagacagtgagctgttcgagctggattattgcctcaaagggctgaagctgccctcgaggacctggtctccaccattcgagtctgaagattctcagaagcacaaccagagtgagtatgaggattcggccggcgaatgctgctcctgtccaaagacagactctcagatcctgaaggagctggaggagtcctcgtttaggaagacgtttgaggattacctgcacaacgtggttttcgtccccaggccatct

SEQ ID NO: 3814 - DNA, 1230 bp, Homo Sapiens
tgccctgagccctgcgactgtggggaaaagtatggcttccagatcgccgactgtgcctaccgcgacctagaatccgtgccgcctggcttcccggccaatgtgactacactgagcctgtcagccaaccggctgccaggcttgccggagggtgccttcagggaggtgcccctgctgcagtcgctgtggctggcacacaatgagatccgcacggtggccgccggagccctggcctctctgagccatctcaagagcctggacctcagccacaatctcatctctgactttgcctggagcgacctgcacaacctcagtgccctccaattgctcaagatggacagcaacgagctgaccttcatcccccgcgacgccttccgcagcctccgtgctctgcgctcgctgcaactcaaccacaaccgcttgcacacattggccgagggcaccttcaccccgctcaccgcgctgtcccacctgcagatcaacgagaaccccttcgactgcacctgcggcatcgtgtggctcaagacatgggccctgaccacggccgtgtccatcccggagcaggacaacatcgcctgcacctcaccccatgtgctcaagggtacaccgctgagccgcctgccgccactgccatgctcggcgccctcagtgcagctcagctaccaacccagccaggatggtgccgagctgcggcctggttttgtgctggcactgcactgtgatgtggacgggcagccggcccctcagcttcactggcacatccagatacccagtggcattgtggagatcaccagccccaacgtgggcactgatgggcgtgccctgcctggcacccctgtggccagctcccagccgcgcttccaggcctttgccaatggcagcctgcttatccccgactttggcaagctggaggaaggcacctacagctgcctggccaccaatgagctgggcagtgctgagagctcagtggacgtggcactggccacgcccggtgagggtggtgaggacacactggggcgcaggttccatggcaaagcggttgagggaaagggctgctatacggttgacaacgaggtgcagccatcagggccggaggacaatgtggtcatcatctacctcagccgtgctgggaaccctgaggctgcagtcgcagaaggggtccctgggcagctgcccccaggcctgctcctgctgggccaaagcctcctcctcttcttcttcctgacctccttc

SEQ ID NO: 3815 - DNA, 1713 bp, Homo Sapiens
tcatgcccggagccgtgcgcctgcgtggacaagtacgctcaccagttcgcggactgcgcttacaaagagttgcgtgaggtgccggaaggactgcctgccaacgtgacgacgcttagtctgtccgcgaacaagatcactgtgctgcggcgcggggccttcgccgacgtcacacaggtcacgtcgctgtggctggcgcacaatgaggtgcgcaccgtggagccaggcgcactggccgtgctgagtcagctcaagaacctcgatctgagccacaacttcatatccagctttccgtggagcgacctgcgcaacctgagcgcgctgcagctgctcaaaatgaaccacaaccgcctgggctctctgccccgggacgcactcggtgcgctacccgacctgcgttccctgcgcatcaacaacaaccggctgcgtacgctggcgcctggcaccttcgacgcgcttagcgcgctgtcacacttgcaactctatcacaatcccttccactgcggctgcggccttgtgtggctgcaggcctgggccgcgagcacccgggtgtccttacccgagcccgactccattgcttgtgcctcgcctcccgcgctgcagggggtgccggtgtaccgcctgcccgccctgccctgtgcaccgcccagcgtgcatctgagtgccgagccaccgcttgaagcacccggcaccccactgcgcgcaggactggcgttcgtgttacactgcatcgccgacggccaccctacgcctcgcctgcaatggcaacttcagatccccggtggcaccgtagtcttagagccaccggttctgagcggggaggacgacggggttggggcggaggaaggagagggagaaggagatggggatttgctgacgcagacccaagcccaaacgccgactccagcacccgcttggccggcgcccccagccacaccgcgcttcctggccctcgcaaatggctccctgttggtgcccctcctgagtgccaaggaggcgggcgtctacacttgccgtgcacacaatgagctgggcgccaactctacgtcaatacgcgtggcggtggcagcaaccgggcccccaaaacacgcgcctggcgccgggggagaacccgacggacaggccccgacctctgagcgcaagtccacagccaagggccggggcaacagcgtcctgccttccaaacccgagggcaaaatcaaaggccaaggcctggccaaggtcagcattctcggggagaccgagacggagccggaggaggacacaagtgagggagaggaggccgaagaccagatcctcgcggacccggcggaggagcagcgctgtggcaacggggacccctctcggtacgtttctaaccacgcgttcaaccagagcgcagagctcaagccgcacgtcttcgagctgggcgtcatcgcgctggatgtggcggagcgcgaggcgcgggtgcagctgactccgctggctgcgcgctggggccctgggcccggcggggctggcggagccccgcgacccgggcggcgacccctgcgcctactctatctgtgtccagcggggggcggcgcggcagtgcagtggtcccgcgtagaggaaggcgtcaacgcctactggttccgcggcctgcggccgggtaccaactactccgtgtgcctggcgctggcgggcgaagcctgccacgtgcaagtggtgttttccaccaagaaggagctcccatcg

SEQ ID NO: 3816 - DNA, 3339 bp, Homo Sapiens
ttcaatgttgatgtgaaaaattcaatgactttcagcggcccggtggaagacatgtttggatatactgttcaacaatatgaaaatgaagaaggaaaatgggtgcttattggttctccgttagttggccaacccaaaaacagaactggagatgtctataagtgtccagttgggagaggtgaatcattaccttgcgtaaagttggatctaccagttaatacatcaattcccaatgtcacagaagtaaaggagaacatgacatttggatcaactttagtcaccaacccaaatggaggatttctggcttgtgggcccttatatgcctatagatgtggacatttgcattacacaactggaatctgttctgacgtcagccccacatttcaagtcgtgaattccattgcccctgtacaagaatgcagcactcaactggacatagtcatagtgctggatggttccaacagtatttacccatgggacagtgttacagcttttttaaatgaccttcttgaaagaatggatattggtcctaaacagacacaggttggaattgtacagtatggagaaaacgtgacccatgagttcaacctcaataagtattcttccaccgaagaggtacttgttgcagcaaagaaaatagtccagagaggtggccgccagactatgacagctcttggaatagacacagcaagaaaggaggcattcacggaagcccggggtgcccgaagaggagttaaaaaagtcatggttattgtgacagatggagagtctcatgacaatcatcgactgaagaaggtcatccaagactgtgaagatgaaaacattcaacggttttccatagctattcttggcagctataaccgaggaaatttaagcactgaaaaatttgtggaggaaataaaatcaattgcaagtgaacccactgaaaagcatttcttcaatgtctctgatgaattggctctagtcaccattgttaaaactctgggagaaagaatatttgccctggaagccacagctgaccagtcagcagcttcatttgaaatggaaatgtctcagactggcttcagtgctcattattcacaggactgggtcatgcttggagcagtaggagcctatgattggaatggaacagttgtcatgcagaaggctagtcaaatcataatccctcgaaacacaacctttaatgttgagtctaccaaaaagaatgaaccgcttgcttcttatttaggttacactgtaaactctgctactgcttcttctggagatgtgctctatattgctggacagcctcggtacaatcatacaggccaggtcattatctacaggatggaagatggaaacatcaaaattctccagacgctcagtggagaacagattggttcctactttggcagtattttaacaacaactgacattgacaaggattctaatactgacattcttctagtcggagcccctatgtacatgggaacagagaaggaggagcaaggaaaagtgtatgtgtatgctctcaatcagacaaggtttgaatatcaaatgagcctggaacctattaagcagacgtgctgttcatctcggcagcacaattcatgcacaacagaaaacaaaaatgagccatgcggggctcgttttggaactgcaattgctgctgtaaaagacctcaatcttgatggatttaatgacatcgtgataggagctccgctggaagatgatcacgggggagctgtgtacatttatcatggaagtggcaagactataaggaaagagtatgcacaacgtattccatcaggtggggatggtaagacactgaaattttttggccagtctatccacggagaaatggatttaaatggtgacggtctgacagatgtgactattgggggccttggtggtgctgccctcttctggtcccgagatgtggccgtagttaaagtgaccatgaattttgagccaaataaagtgaatattcaaaagaaaaactgccatatggagggaaaggaaacagtatgcataaatgctacagtgtgttttgatgtgaaattaaagtctaaagaagacacgatttatgaagctgatttgcagtaccgtgtcaccctagattcactaagacaaatatcacgaagttttttctctggaactcaagagagaaaggttcaaaggaacatcacagttcgaaaatcagaatgcactaagcactccttctacatgttggacaagcatgactttcaggactctgtgagaataacgttggactttaatcttaccgatccagaaaatgggcctgttcttgatgattctctaccaaactcagtacatgaatatattccctttgccaaagattgtggaaataaggaaaaatgtatctcagacctcagcctgcatgtcgccaccactgaaaaggacctgctgattgtccgatcccagaatgataagttcaacgttagcctcacagtcaaaaatacaaaggacagtgcctataacaccaggacaatagtgcattattctccaaatctagttttttcaggaattgaggctatccaaaaagacagttgtgaatctaatcataatatcacatgtaaagttggatatcccttcctgagaagaggagagatggtaactttcaaaatattgtttcagtttaacacatcctatctcatggaaaatgtgaccatttatttaagtgcaacaagtgacagcgaagaacctcctgaaaccctttctgataatgtagtaaacatttctatcccggtaaaatatgaagttggactacagttttacagctctgcaagtgaataccacatttcaattgctgccaatgagacagtccctgaagttattaattctactgaggacattggaaatgaaattaatatcttctacttgattagaaaaagtggatcttttccaatgccagagcttaagctgtcaatttcattccccaatatgacatcaaatggttaccctgtgctgtacccaactggattgtcatcttctgagaatgcaaactgcagaccccatatctttgaggatcctttcagtatcaactctggaaagaaaatgactacatcaactgaccatctcaaacgaggcacaattctggactgcaatacatgtaaatttgctaccatcacatgtaatctcacttcttctgacatcagccaagtcaatgtttcgcttatcttgtggaaaccaacttttataaaatcatatttttccagcttaaatcttactataaggggagaacttcggagtgaaaatgcatctctggttttaagtagcagcaatcaaaaaagagagcttgctattcaaatatccaaagatgggctaccgggcagagtgcca

SEQ ID NO: 3817 - DNA, 3309 bp, Homo Sapiens
tacaatgttggtctcccagaagcaaaaatattttccggtccttcaagtgaacagtttggctatgcagtgcagcagtttataaatccaaaaggcaactggttactggttggttcaccctggagtggctttcctgagaaccgaatgggagatgtgtataaatgtcctgttgacctatccactgccacatgtgaaaaactaaatttgcaaacttcaacaagcattccaaatgttactgagatgaaaaccaacatgagcctcggcttgatcctcaccaggaacatgggaactggaggttttctcacatgtggtcctctgtgggcacagcaatgtgggaatcagtattacacaacgggtgtgtgttctgacatcagtcctgattttcagctctcagccagcttctcacctgcaactcagccctgcccttccctcatagatgttgtggttgtgtgtgatgaatcaaatagtatttatccttgggatgcagtaaagaattttttggaaaaatttgtacaaggcctggatataggccccacaaagacacaggtggggttaattcagtatgccaataatccaagagttgtgtttaacttgaacacatataaaaccaaagaagaaatgattgtagcaacatcccagacatcccaatatggtggggacctcacaaacacattcggagcaattcaatatgcaagaaaatatgcttattcagcagcttctggtgggcgacgaagtgctacgaaagtaatggtagttgtaactgacggtgaatcacatgatggttcaatgttgaaagctgtgattgatcaatgcaaccatgacaatatactgaggtttggcatagcagttcttgggtacttaaacagaaacgcccttgatactaaaaatttaataaaagaaataaaagcaatcgctagtattccaacagaaagatactttttcaatgtgtctgatgaagcagctctactagaaaaggctgggacattaggagaacaaattttcagcattgaaggtactgttcaaggaggagacaactttcagatggaaatgtcacaagtgggattcagtgcagattactcttctcaaaatgatattctgatgctgggtgcagtgggagcttttggctggagtgggaccattgtccagaagacatctcatggccatttgatctttcctaaacaagcctttgaccaaattctgcaggacagaaatcacagttcatatttaggttactctgtggctgcaatttctactggagaaagcactcactttgttgctggtgctcctcgggcaaattataccggccagatagtgctatatagtgtgaatgagaatggcaatatcacggttattcaggctcaccgaggtgaccagattggctcctattttggtagtgtgctgtgttcagttgatgtggataaagacaccattacagacgtgctcttggtaggtgcaccaatgtacatgagtgacctaaagaaagaggaaggaagagtctacctgtttactatcaaagagggcattttgggtcagcaccaatttcttgaaggccccgagggcattgaaaacactcgatttggttcagcaattgcagctctttcagacatcaacatggatggctttaatgatgtgattgttggttcaccactagaaaatcagaattctggagctgtatacatttacaatggtcatcagggcactatccgcacaaagtattcccagaaaatcttgggatccgatggagcctttaggagccatctccagtactttgggaggtccttggatggctatggagatttaaatggggattccatcaccgatgtgtctattggtgcctttggacaagtggttcaactctggtcacaaagtattgctgatgtagctatagaagcttcattcacaccagaaaaaatcactttggtcaacaagaatgctcagataattctcaaactctgcttcagtgcaaagttcagacctactaagcaaaacaatcaagtggccattgtatataacatcacacttgatgcagatggattttcatccagagtaacctccagggggttatttaaagaaaacaatgaaaggtgcctgcagaagaatatggtagtaaatcaagcacagagttgccccgagcacatcatttatatacaggagccctctgatgttgtcaactctttggatttgcgtgtggacatcagtctggaaaaccctggcactagccctgcccttgaagcctattctgagactgccaaggtcttcagtattcctttccacaaagactgtggtgaggacggactttgcatttctgatctagtcctagatgtccgacaaataccagctgctcaagaacaaccctttattgtcagcaaccaaaacaaaaggttaacattttcagtaacgctgaaaaataaaagggaaagtgcatacaacactggaattgttgttgatttttcagaaaacttgttttttgcatcattctccctgccggttgatgggacagaagtaacatgccaggtggctgcatctcagaagtctgttgcctgcgatgtaggctaccctgctttaaagagagaacaacaggtgacttttactattaactttgacttcaatcttcaaaaccttcagaatcaggcgtctctcagtttccaagccttaagtgaaagccaagaagaaaacaaggctgataatttggtcaacctcaaaattcctctcctgtatgatgctgaaattcacttaacaagatctaccaacataaatttttatgaaatctcttcggatgggaatgttccttcaatcgtgcacagttttgaagatgttggtccaaaattcatcttctccctgaaggtaacaacaggaagtgttccagtaagcatggcaactgtaatcatccacatccctcagtataccaaagaaaagaacccactgatgtacctaactggggtgcaaacagacaaggctggtgacatcagttgtaatgcagatatcaatccactgaaaataggacaaacatcttcttctgtatctttcaaaagtgaaaatttcaggcacaccaaagaattgaactgcagaactgcttcctgtagtaatgttacctgctggttgaaagacgttcacatgaaaggagaatactttgttaatgtgactaccagaatttggaacgggactttcgcatcatcaacgttccagacagtacagctaacggcagctgcagaaatcaacacctataaccctgagatatatgtgattgaagataacactgttacgattcccctgatgataatgaaacctgatgagaaagccgaagtaccaaca

SEQ ID NO: 3818 - DNA, 2886 bp, Homo Sapiens
ttgaacctggacccagtgcagctcaccttctatgcaggccccaatggcagccagtttggattttcactggacttccacaaggacagccatgggagagtggccatcgtggtgggcgccccgcggaccctgggccccagccaggaggagacgggcggcgtgttcctgtgcccctggagggccgagggcggccagtgcccctcgctgctctttgacctccgtgatgagacccgaaatgtaggctcccaaactttacaaaccttcaaggcccgccaaggactgggggcgtcggtcgtcagctggagcgacgtcattgtggcctgcgccccctggcagcactggaacgtcctagaaaagactgaggaggctgagaagacgcccgtaggtagctgctttttggctcagccagagagcggccgccgcgccgagtactccccctgtcgcgggaacaccctgagccgcatttacgtggaaaatgattttagctgggacaagcgttactgtgaagcgggcttcagctccgtggtcactcaggccggagagctggtgcttggggctcctggcggctattatttcttaggtctcctggcccaggctccagttgcggatattttctcgagttaccgcccaggcatccttttgtggcacgtgtcctcccagagcctctcctttgactccagcaacccagagtacttcgacggctactgggggtactcggtggccgtgggcgagttcgacggggatctcaacactacagaatatgtcgtcggtgcccccacttggagctggaccctgggagcggtggaaattttggattcctactaccagaggctgcatcggctgcgcggagagcagatggcgtcgtattttgggcattcagtggctgtcactgacgtcaacggggatgggaggcatgatctgctggtgggcgctccactgtatatggagagccgggcagaccgaaaactggccgaagtggggcgtgtgtatttgttcctgcagccgcgaggcccccacgcgctgggtgcccccagcctcctgctgactggcacacagctctatgggcgattcggctctgccatcgcacccctgggcgacctcgaccgggatggctacaatgacattgcagtggctgccccctacgggggtcccagtggccggggccaagtgctggtgttcctgggtcagagtgaggggctgaggtcacgtccctcccaggtcctggacagccccttccccacaggctctgcctttggcttctcccttcgaggtgccgtagacatcgatgacaacggatacccagacctgatcgtgggagcttacggggccaaccaggtggctgtgtacagagctcagccagtggtgaaggcctctgtccagctactggtgcaagattcactgaatcctgctgtgaagagctgtgtcctacctcagaccaagacacccgtgagctgcttcaacatccagatgtgtgttggagccactgggcacaacattcctcagaagctatccctaaatgccgagctgcagctggaccggcagaagccccgccagggccggcgggtgctgctgctgggctctcaacaggcaggcaccaccctgaacctggatctgggcggaaagcacagccccatctgccacaccaccatggccttccttcgagatgaggcagacttccgggacaagctgagccccattgtgctcagcctcaatgtgtccctaccgcccacggaggctggaatggcccctgctgtcgtgctgcatggagacacccatgtgcaggagcagacacgaatcgtcctggactgtggggaagatgacgtatgtgtgccccagcttcagctcactgccagcgtgacgggctccccgctcctagttggggcagataatgtcctggagctgcagatggacgcagccaacgagggcgagggggcctatgaagcagagctggccgtgcacctgccccagggcgcccactacatgcgggccctaagcaatgtcgagggctttgagagactcatctgtaatcagaagaaggagaatgagaccagggtggtgctgtgtgagctgggcaaccccatgaagaagaacgcccagataggaatcgcgatgttggtgagcgtggggaatctggaagaggctggggagtctgtgtccttccagctgcagatacggagcaagaacagccagaatccaaacagcaagattgtgctgctggacgtgccggtccgggcagaggcccaagtggagctgcgagggaactcctttccagcctccctggtggtggcagcagaagaaggtgagagggagcagaacagcttggacagctggggacccaaagtggagcacacctatgagctccacaacaatggccctgggactgtgaatggtcttcacctcagcatccaccttccgggacagtcccagccctccgacctgctctacatcctggatatacagccccaggggggccttcagtgcttcccacagcctcctgtcaaccctctcaaggtggactgggggctgcccatccccagcccctcccccattcacccggcccatcacaagcgggatcgcagacagatcttcctgccagagcccgagcagccctcgaggcttcaggatccagttctcgtaagctgcgactcggcgccctgtactgtggtgcagtgtgacctgcaggagatggcgcgcgggcagcgggccatggtcacggtgctggccttcctgtggctgcccagcctctaccagaggcctctggatcagtttgtgctgcagtcgcacgcatggttcaacgtgtcctccctcccctatgcggtgcccccgctcagcctgccccgaggggaagctcaggtgtggacacagctgctccgggccttggaggagagg

SEQ ID NO: 3819 - DNA, 2877 bp, Homo Sapiens
ttcaacctggatacccgattcctggtagtgaaggaggccgggaacccgggcagcctcttcggctactcggtcgccctccatcggcagacagagcggcagcagcgctacctgctcctggctggtgccccccgggagctcgctgtgcccgatggctacaccaaccggactggtgctgtgtacctgtgcccactcactgcccacaaggatgactgtgagcggatgaacatcacagtgaaaaatgaccctggccatcacattattgaggacatgtggcttggagtgactgtggccagccagggccctgcaggcagagttctggtctgtgcccaccgctacacccaggtgctgtggtcagggtcagaagaccagcggcgcatggtgggcaagtgctacgtgcgaggcaatgacctagagctggactccagtgatgactggcagacctaccacaacgagatgtgcaatagcaacacagactacctggagacgggcatgtgccagctgggcaccagcggtggcttcacccagaacactgtgtacttcggcgcccccggtgcctacaactggaaaggaaacagctacatgattcagcgcaaggagtgggacttatctgagtatagttacaaggacccagaggaccaaggaaacctctatattgggtacacgatgcaggtaggcagcttcatcctgcaccccaaaaacatcaccattgtgacaggtgccccacggcaccgacatatgggcgcggtgttcttgctgagccaggaggcaggcggagacctgcggaggaggcaggtgctggagggctcgcaggtgggcgcctattttggcagcgccattgccctggcagacctgaacaatgatgggtggcaggacctcctggtgggcgccccctactacttcgagaggaaagaggaagtagggggtgccatctatgtcttcatgaaccaggcgggaacctccttccctgctcacccctcactccttcttcatggccccagtggctctgcctttggtttatctgtggccagcattggtgacatcaaccaggatggatttcaggatattgctgtgggagctccgtttgaaggcttgggcaaagtgtacatctatcacagtagctctaaggggctccttagacagccccagcaggtaatccatggagagaagctgggactgcctgggttggccaccttcggctattccctcagtgggcagatggatgtggatgagaacttctacccagaccttctagtgggaagcctgtcagaccacattgtgctgctgcgggcccggcccgtcatcaacatcgtccacaagaccttggtgcccaggccagctgtgctggaccctgcactttgcacggccacctcttgtgtgcaagtggagctgtgctttgcttacaaccagagtgccgggaaccccaactacaggcgaaacatcaccctggcctacactctggaggctgacagggaccgccggccgccccggttccgctttgccggcagtgagtccgctgtcttccacggcttcttctccatgcccgagatgcgctgccagaagctggagctgctcctgatggacaacctccgtgacaaactccgccccatcatcatctccatgaactactctttacctttgcggatgcccgatcgcccccggctggggctgcggtccctggacgcctacccgatcctcaaccaggcacaggctctggagaaccacactgaggtccagttccagaaggagtgcgggcctgacaacaagtgtgagagcaacttgcagatgcgggcagccttcgtgtcagagcagcagcagaagctgagcaggctccagtacagcagagacgtccggaaattgctcctgagcatcaacgtgacgaacacccggacctcggagcgctccggggaggacgcccacgaggcgctgctcaccctggtggtgcctcccgccctgctgctgtcctcagtgcgcccccccggggcctgccaagctaatgagaccatcttttgcgagctggggaaccccttcaaacggaaccagaggatggagctgctcatcgcctttgaggtcatcggggtgaccctgcacacaagggaccttcaggtgcagctgcagctctccacgtcgagtcaccaggacaacctgtggcccatgatcctcactctgctggtggactatacactccagacctcgcttagcatggtaaatcaccggctacaaagcttctttggggggacagtgatgggtgagtctggcatgaaaactgtggaggatgtaggaagccccctcaagtatgaattccaggtgggcccaatgggggaggggctggtgggcctggggaccctggtcctaggtctggagtggccctacgaagtcagcaatggcaagtggctgctgtatcccacggagatcaccgtccatggcaatgggtcctggccctgccgaccacctggagaccttatcaaccctctcaacctcactctttctgaccctggggacaggccatcatccccacagcgcaggcggcgacagctggatccagggggaggccagggccccccacctgtcactctggctgctgccaaaaaagccaagtctgagactgtgctgacctgtgccacagggcgtgcccactgtgtgtggctagagtgccccatccctgatgcccccgttgtcaccaacgtgactgtgaaggcacgagtgtggaacagcaccttcatcgaggattacagagactttgaccgagtccgggtaaatggctgggctaccctattcctccgaaccagcatccccaccatcaacatggagaacaagaccacgtggttctctgtggacattgactcggagctggtggaggagctgccggccgaaatcgag

SEQ ID NO: 3820 - DNA, 2829 bp, Homo Sapiens
aacgtggacactgagagcgcgctgctttaccagggcccccacaacacgctgttcggctactcggtcgtgctgcacagccacggggcgaaccgatggctcctagtgggtgcgcccactgccaactggctcgccaacgcttcagtgatcaatcccggggcgatttacagatgcaggatcggaaagaatcccggccagacgtgcgaacagctccagctgggtagccctaatggagaaccttgtggaaagacttgtttggaagagagagacaatcagtggttgggggtcacactttccagacagccaggagaaaatggatccatcgtgacttgtgggcatagatggaaaaatatattttacataaagaatgaaaataagctccccactggtggttgctatggagtgccccctgatttacgaacagaactgagtaaaagaatagctccgtgttatcaagattatgtgaaaaaatttggagaaaattttgcatcatgtcaagctggaatatccagtttttacacaaaggatttaattgtgatgggggccccaggatcatcttactggactggctctctttttgtctacaatataactacaaataaatacaaggcttttttagacaaacaaaatcaagtaaaatttggaagttatttaggatattcagtcggagctggtcattttcggagccagcatactaccgaagtagtcggaggagctcctcaacatgagcagattggtaaggcatatatattcagcattgatgaaaaagaactaaatatcttacatgaaatgaaaggtaaaaagcttggatcgtactttggagcttctgtctgtgctgtggacctcaatgcagatggcttctcagatctgctcgtgggagcacccatgcagagcaccatcagagaggaaggaagagtgtttgtgtacatcaactctggctcgggagcagtaatgaatgcaatggaaacaaacctcgttggaagtgacaaatatgctgcaagatttggggaatctatagttaatcttggcgacattgacaatgatggctttgaagatgttgctatcggagctccacaagaagatgacttgcaaggtgctatttatatttacaatggccgtgcagatgggatctcgtcaaccttctcacagagaattgaaggacttcagatcagcaaatcgttaagtatgtttggacagtctatatcaggacaaattgatgcagataataatggctatgtagatgtagcagttggtgcttttcggtctgattctgctgtcttgctaaggacaagacctgtagtaattgttgacgcttctttaagccaccctgagtcagtaaatagaacgaaatttgactgtgttgaaaatggatggccttctgtgtgcatagatctaacactttgtttctcatataagggcaaggaagttccaggttacattgttttgttttataacatgagtttggatgtgaacagaaaggcagagtctccaccaagattctatttctcttctaatggaacttctgacgtgattacaggaagcatacaggtgtccagcagagaagctaactgtagaacacatcaagcatttatgcggaaagatgtgcgggacatcctcaccccaattcagattgaagctgcttaccaccttggtcctcatgtcatcagtaaacgaagtacagaggaattcccaccacttcagccaattcttcagcagaagaaagaaaaagacataatgaaaaaaacaataaactttgcaaggttttgtgcccatgaaaattgttctgctgatttacaggtttctgcaaagattgggtttttgaagccccatgaaaataaaacatatcttgctgttgggagtatgaagacattgatgttgaatgtgtccttgtttaatgctggagatgatgcatatgaaacgactctacatgtcaaactacccgtgggtctttatttcattaagattttagagctggaagagaagcaaataaactgtgaagtcacagataactctggcgtggtacaacttgactgcagtattggctatatatatgtagatcatctctcaaggatagatattagctttctcctggatgtgagctcactcagcagagcggaagaggacctcagtatcacagtgcatgctacctgtgaaaatgaagaggaaatggacaatctaaagcacagcagagtgactgtagcaatacctttaaaatatgaggttaagctgactgttcatgggtttgtaaacccaacttcatttgtgtatggatcaaatgatgaaaatgagcctgaaacgtgcatggtggagaaaatgaacttaactttccatgttatcaacactggcaatagtatggctcccaatgttagtgtggaaataatggtaccaaattcttttagcccccaaactgataagctgttcaacattttggatgtccagactactactggagaatgccactttgaaaattatcaaagagtgtgtgcattagagcagcaaaagagtgcaatgcagaccttgaaaggcatagtccggttcttgtccaagactgataagaggctattgtactgcataaaagctgatccacattgtttaaatttcttgtgtaattttgggaaaatggaaagtggaaaagaagccagtgttcatatccaactggaaggccggccatccattttagaaatggatgagacttcagcactcaagtttgaaataagagcaacaggttttccagagccaaatccaagagtaattgaactaaacaaggatgagaatgttgcgcatgttctactggaaggactacatcatcaaagacccaaacgttatttcacc

SEQ ID NO: 3821 - DNA, 2862 bp, Homo Sapiens
ttcaacttagacgcggaggccccagcagtactctcggggcccccgggctccttcttcggattctcagtggagttttaccggccgggaacagacggggtcagtgtgctggtgggagcacccaaggctaataccagccagccaggagtgctgcagggtggtgctgtctacctctgtccttggggtgccagccccacacagtgcacccccattgaatttgacagcaaaggctctcggctcctggagtcctcactgtccagctcagagggagaggagcctgtggagtacaagtccttgcagtggttcggggcaacagttcgagcccatggctcctccatcttggcatgcgctccactgtacagctggcgcacagagaaggagccactgagcgaccccgtgggcacctgctacctctccacagataacttcacccgaattctggagtatgcaccctgccgctcagatttcagctgggcagcaggacagggttactgccaaggaggcttcagtgccgagttcaccaagactggccgtgtggttttaggtggaccaggaagctatttctggcaaggccagatcctgtctgccactcaggagcagattgcagaatcttattaccccgagtacctgatcaacctggttcaggggcagctgcagactcgccaggccagttccatctatgatgacagctacctaggatactctgtggctgttggtgaattcagtggtgatgacacagaagactttgttgctggtgtgcccaaagggaacctcacttacggctatgtcaccatccttaatggctcagacattcgatccctctacaacttctcaggggaacagatggcctcctactttggctatgcagtggccgccacagacgtcaatggggacgggctggatgacttgctggtgggggcacccctgctcatggatcggacccctgacgggcggcctcaggaggtgggcagggtctacgtctacctgcagcacccagccggcatagagcccacgcccacccttaccctcactggccatgatgagtttggccgatttggcagctccttgacccccctgggggacctggaccaggatggctacaatgatgtggccatcggggctccctttggtggggagacccagcagggagtagtgtttgtatttcctgggggcccaggagggctgggctctaagccttcccaggttctgcagcccctgtgggcagccagccacaccccagacttctttggctctgcccttcgaggaggccgagacctggatggcaatggatatcctgatctgattgtggggtcctttggtgtggacaaggctgtggtatacaggggccgccccatcgtgtccgctagtgcctccctcaccatcttccccgccatgttcaacccagaggagcggagctgcagcttagaggggaaccctgtggcctgcatcaaccttagcttctgcctcaatgcttctggaaaacacgttgctgactccattggtttcacagtggaacttcagctggactggcagaagcagaagggaggggtacggcgggcactgttcctggcctccaggcaggcaaccctgacccagaccctgctcatccagaatggggctcgagaggattgcagagagatgaagatctacctcaggaacgagtcagaatttcgagacaaactctcgccgattcacatcgctctcaacttctccttggacccccaagccccagtggacagccacggcctcaggccagccctacattatcagagcaagagccggatagaggacaaggctcagatcttgctggactgtggagaagacaacatctgtgtgcctgacctgcagctggaagtgtttggggagcagaaccatgtgtacctgggtgacaagaatgccctgaacctcactttccatgcccagaatgtgggtgagggtggcgcctatgaggctgagcttcgggtcaccgcccctccagaggctgagtactcaggactcgtcagacacccagggaacttctccagcctgagctgtgactactttgccgtgaaccagagccgcctgctggtgtgtgacctgggcaaccccatgaaggcaggagccagtctgtggggtggccttcggtttacagtccctcatctccgggacactaagaaaaccatccagtttgacttccagatcctcagcaagaatctcaacaactcgcaaagcgacgtggtttcctttcggctctccgtggaggctcaggcccaggtcaccctgaacggtgtctccaagcctgaggcagtgctattcccagtaagcgactggcatccccgagaccagcctcagaaggaggaggacctgggacctgctgtccaccatgtctatgagctcatcaaccaaggccccagctccattagccagggtgtgctggaactcagctgtccccaggctctggaaggtcagcagctcctatatgtgaccagagttacgggactcaactgcaccaccaatcaccccattaacccaaagggcctggagttggatcccgagggttccctgcaccaccagcaaaaacgggaagctccaagccgcagctctgcttcctcgggacctcagatcctgaaatgcccggaggctgagtgtttcaggctgcgctgtgagctcgggcccctgcaccaacaagagagccaaagtctgcagttgcatttccgagtctgggccaagactttcttgcagcgggagcaccagccatttagcctgcagtgtgaggctgtgtacaaagccctgaagatgccctaccgaatcctgcctcggcagctgccccaaaaagagcgtcaggtggccacagctgtgcaatggaccaaggcagaaggcagctat

SEQ ID NO: 3822 - DNA, 2964 bp, Homo Sapiens
ttcaacttggacactcgggaggacaacgtgatccggaaatatggagaccccgggagcctcttcggcttctcgctggccatgcactggcaactgcagcccgaggacaagcggctgttgctcgtgggggccccgcgggcagaagcgcttccactgcagagagccaacagaacgggagggctgtacagctgcgacatcaccgcccgggggccatgcacgcggatcgagtttgataacgatgctgaccccacgtcagaaagcaaggaagatcagtggatgggggtcaccgtccagagccaaggtccagggggcaaggtcgtgacatgtgctcaccgatatgaaaaaaggcagcatgttaatacgaagcaggaatcccgagacatctttgggcggtgttatgtcctgagtcagaatctcaggattgaagacgatatggatgggggagattggagcttttgtgatgggcgattgagaggccatgagaaatttggctcttgccagcaaggtgtagcagctacttttactaaagactttcattacattgtatttggagccccgggtacttataactggaaagggattgttcgtgtagagcaaaagaataacactttttttgacatgaacatctttgaagatgggccttatgaagttggtggagagactgagcatgatgaaagtctcgttcctgttcctgctaacagttacttaggtttttctttggactcagggaaaggtattgtttctaaagatgagatcacttttgtatctggtgctcccagagccaatcacagtggagccgtggttttgctgaagagagacatgaagtctgcacatctcctccctgagcacatattcgatggagaaggtctggcctcttcatttggctatgatgtggcggtggtggacctcaacaaggatgggtggcaagatatagttattggagccccacagtattttgatagagatggagaagttggaggtgcagtgtatgtctacatgaaccagcaaggcagatggaataatgtgaagccaattcgtcttaatggaaccaaagattctatgtttggcattacagtaaaaaatattggagatattaatcaagatggctacccagatattgcagttggagctccgtatgatgacttgggaaaggtttttatctatcatggatctgcaaatggaataaataccaaaccaacacaggttctcaagggtatatcaccttattttggatattcaattgctggaaacatggaccttgatcgaaattcctaccctgatgttgctgttggttccctctcagattcagtaactattttcagatcccggcctgtgattaatattcagaaaaccatcacagtaactcctaacagaattgacctccgccagaaaacagcgtgtggggcgcctagtgggatatgcctccaggttaaatcctgttttgaatatactgctaaccccgctggttataatccttcaatatcaattgtgggcacacttgaagctgaaaaagaaagaagaaaatctgggctatcctcaagagttcagtttcgaaaccaaggttctgagcccaaatatactcaagaactaactctgaagaggcagaaacagaaagtgtgcatggaggaaaccctgtggctacaggataatatcagagataaactgcgtcccattcccataactgcctcagtggagatccaagagccaagctctcgtaggcgagtgaattcacttccagaagttcttccaattctgaattcagatgaacccaagacagctcatattgatgttcacttcttaaaagagggatgtggagacgacaatgtatgtaacagcaaccttaaactagaatataaattttgcacccgagaaggaaatcaagacaaattttcttatttaccaattcaaaaaggtgtaccagaactagttctaaaagatcagaaggatattgctttagaaataacagtgacaaacagcccttccaacccaaggaatcccacaaaagatggcgatgatgcccatgaggctaaactgattgcaacgtttccagacactttaacctattctgcatatagagaactgagggctttccctgagaaacagttgagttgtgttgccaaccagaatggctcgcaagctgactgtgagctcggaaatccttttaaaagaaattcaaatgtcactttttatttggttttaagtacaactgaagtcacctttgacaccccagatctggatattaatctgaagttagaaacaacaagcaatcaagataatttggctccaattacagctaaagcaaaagtggttattgaactgcttttatcggtctcgggagttgctaaaccttcccaggtgtattttggaggtacagttgttggcgagcaagctatgaaatctgaagatgaagtgggaagtttaatagagtatgaattcagggtaataaacttaggtaaacctcttacaaacctcggcacagcaaccttgaacattcagtggccaaaagaaattagcaatgggaaatggttgctttatttggtgaaagtagaatccaaaggattggaaaaggtaacttgtgagccacaaaaggagataaactccctgaacctaacggagtctcacaactcaagaaagaaacgggaaattactgaaaaacagatagatgataacagaaaattttctttatttgctgaaagaaaataccagactcttaactgtagcgtgaacgtgaactgtgtgaacatcagatgcccgctgcgggggctggacagcaaggcgtctcttattttgcgctcgaggttatggaacagcacatttctagaggaatattccaaactgaactacttggacattctcatgcgagccttcattgatgtgactgctgctgccgaaaatatcaggctgccaaatgcaggcactcaggttcgagtgactgtgtttccctcaaagactgtagctcagtattcg

SEQ ID NO: 3823 - DNA, 3015 bp, Homo Sapiens
ttcaatctggacgtgatgggtgccttgcgcaaggagggcgagccaggcagcctcttcggcttctctgtggccctgcaccggcagttgcagcccagaccccagagctggctgctggtgggtgctccccaggccctggctcttcctgggcagcaggcgaatcgcactggaggcctcttcgcttgcccattgagcctggaggagactgactgctacagagtggacatcgaccagggagctgatatgcaaaaggaaagcaaggagaaccagtggttgggagtcagtgttcggagccaggggcctgggggcaagattgttacctgtgcacacagatatgaggcaaggcagcgagtggaccagatcctggagacgcgggatatgattggtcgctgctttgtgctcagccaggacctggccatccgggatgagttggatggtggggaatggaagttctgtgagggacgcccccaaggccatgaacaatttgggttctgccagcagggcacagctgccgccttctcccctgatagccactacctcctctttggggccccaggaacctataattggaaggggttgctttttgtgaccaacattgatagctcagaccccgaccagctggtgtataaaactttggaccctgctgaccggctcccaggaccagccggagacttggccctcaatagctacttaggcttctctattgactcggggaaaggtctggtgcgtgcagaagagctgagctttgtggctggagccccccgcgccaaccacaagggtgctgtggtcatcctgcgcaaggacagcgccagtcgcctggtgcccgaggttatgctgtctggggagcgcctgacctccggctttggctactcactggctgtggctgacctcaacagtgatggctggccagacctgatagtgggtgccccctacttctttgagcgccaagaagagctggggggtgctgtgtatgtgtacttgaaccaggggggtcactgggctgggatctcccctctccggctctgcggctcccctgactccatgttcgggatcagcctggctgtcctgggggacctcaaccaagatggctttccagatattgcagtgggtgccccctttgatggtgatgggaaagtcttcgtctaccatgggagcagcctgggggttgtcgccaaaccttcacaggtgctggagggcgaggctgtgggcatcaagagcttcggctactccctgtcaggcagcttggatatggatgggaaccaataccctgacctgctggtgggctccatggctgacaccgcagtgctcttcagggccagacccatcctccatgtctcccatgaggtctctattgctccacgaagcatcgacctggagcagcccaactgtgctggcggccactcggtctgtgtggacctaagggtctgtttcagctacattgcagtccccagcagctatagccctactgtggccctggactatgtgttagatgcggacacagaccggaggctccggggccaggttccccatgtgacgttcctgagccgtaacctggaagaacccaagcaccaggcctcgggcaccgtgtggctgaagcaccagcatgaccgagtctgtggagacgccatgttccagctccaggaaaatgtcaaagacaagcttcgggccattgtagtgaccttgtcctacagtctccagacccctcggctccggcgacaggctcctggccaggggctgcctccagtggcccccatcctcaatgcccaccagcccagcacccagcgggcagagatccacttcctgaagcaaggctgtggtgaagacaagatctgccagagcaatctgcagctggtccacgtccgcttctgtacccgggtcagcgacacggaattccaacctctgccaatggatgtggatggaacaacagccctgtttgcactgagtgggcagccagtcattggcctggagctgatggtcaccaacctgccatcggacccagcccagccccaggctgatggggatgatgcccatgaagcccagctcctggtcatgcttcctgactcactgcactactcaggggtccgggccctggaccctgcggagaagccactctgcctgtccaatgagaatgcctcccatgttgagtgtgagctggggaaccccatgaagagaggtgcccaggtcaccttctacctcatccttagcacctccgggatcagcattgagaccacggaactggaggtagagctgctgttggccacgatcagtgagcaggagctgcatccagtctctgcacgagcccgtgtcttcattgagctgccactgtccattgcaggaatggccattccccagcaactcttcttctctggtgtggtgaggggcgagagagccatgcagtctgagcgggatgtgggcagcaaggtcaagtatgaggtcacggtttccaaccaaggccagtcgctcagaaccctgggctctgccttcctcaacatcatgtggcctcatgagattgccaatgggaagtggttgctgtacccaatgcaggttgagctggagggcgggcaggggcctgggcagaaagggctttgctctcccaggcccaacatcctccacctggatgtggacagtagggataggaggcggcgggagctggagccacctgagcagcaggagcctggtgagcggcaggagcccagcatgtcctggtggccagtgtcctctgctgagaagaagaaaaacatcaccctggactgcgcccggggcacggccaactgtgtggtgttcagctgcccactctacagctttgaccacgcggctgtgctgcatgtctggggccgtctctggaacagcacctttctggaggagtactcagctgtgaagtccctggaagtgattgtccgggccaacatcacagtgaagtcctccataaagaacttgatgctccgagatgcctccacagtgatcccagtgatggtatacttggaccccatggctgtggtggcagaaggagtgccctgg

SEQ ID NO: 3824 - DNA, 2922 bp, Homo Sapiens
ttcaacctggacgtggaaaagctcacagtgtacagcggccccaagggcagctacttcggctacgccgtggacttccacatacccgacgcccgcacagcgagtgtcttggtgggggcgcccaaagccaacaccagccagcccgatatcgtggaagggggagccgtctattactgtccttggcccgcggaggggtctgcgcagtgcaggcagataccgtttgacaccaccaacaacagaaagatcagagttaatggaaccaaagaacctatcgagttcaaatccaatcagtggtttggagcaacagtgaaagctcacaaaggaaaagttgtggcctgtgctcctttatatcactggagaactcttaaaccgacaccagaaaaggacccagttggcacctgctatgtagcaattcagaacttcagcgcctatgccgagttctctccttgccggaacagcaatgctgatccggaaggccagggttactgccaagcaggatttagtctggatttttataagaatggagaccttattgtgggaggacctgggagtttctactggcaaggacaagtgatcactgccagtgttgcagatatcattgcaaattactcattcaaggatatcctcaggaaactggcaggagaaaagcagacggaagtggctccagcttcctatgatgacagttaccttggatactcagttgctgctggggagtttactggggattctcagcaagaattggttgctggaattccaagaggagcacagaattttggatatgtttccatcattaactctacggatatgacgtttattcagaatttcacgggagaacagatggcatcttattttggatataccgttgtcgtatcagatgttaacagtgatggactggatgatgtcctggttggggcacctctctttatggaacgtgaatttgagagcaaccccagagaagtagggcaaatctacctgtatttgcaagtgagctctctcctcttcagagacccccagatcctcactggcaccgagacgtttgggagattcggtagtgctatggcacacttaggagacctgaaccaagatggatacaatgacattgccatcggagtgccttttgcaggcaaggatcaaagaggcaaagtgctcatttataatgggaacaaagatggcttaaacaccaagccttcccaagttctgcaaggagtgtgggcctcacatgctgtcccttccggatttggctttactttaagaggagattcagacatagacaagaatgattacccagatttgattgtgggtgcatttggaacaggaaaagtcgctgtttacagagcaagaccggttgtgactgtagatgcccagcttctgctgcacccaatgattatcaatcttgaaaataaaacttgccaggttccagactctatgacatctgctgcctgcttttctttaagagtatgtgcatctgtcacaggccagagcattgcaaacacaatagtcttgatggcagaggtgcaattagattccctgaaacagaaaggagctattaaacggacgctcttccttgataaccatcaggctcatcgcgtcttccctcttgtgataaaaaggcagaaatcccaccagtgccaggatttcatcgtttaccttcgagatgaaactgaattccgagataaattatctccaatcaacattagtttgaattacagtttggacgaatccacctttaaagaaggcctggaagtgaaaccaatattgaactactacagagaaaacattgttagtgaacaggctcacattctggtggactgtggagaagacaatctgtgtgttcctgacttgaagctgtcggctagaccagataagcatcaggtaatcattggagatgaaaatcaccttatgctcataataaatgcaagaaatgaaggggaaggagcatatgaagctgaactctttgtaatgataccagaagaggcagattatgttggaatcgaacgcaacaacaagggatttcgaccactgagctgtgagtacaagatggaaaatgtaaccaggatggtggtgtgtgaccttgggaaccctatggtgtctggaacaaattattccctgggcctccgatttgcagttccacgtcttgagaaaacaaacatgagcattaacttcgatctccaaatcagaagttccaacaaggacaatccagacagcaattttgtgagcctgcaaatcaacatcactgctgtagcgcaggtggaaataagaggagtgtcacaccctccgcagattgttctgcccattcataactgggaaccagaagaggagccccacaaagaggaggaggttggaccattggtggaacatatttatgagctgcacaatattggaccaagtaccatcagtgacaccatcctggaggtgggctggcctttctctgcccgggatgaatttcttctctatattttccatattcaaactctgggacctctgcagtgccaaccaaatcctaatatcaatccacaggatataaagcctgctgcctccccagaggacacccctgagctcagcgcctttttgcgaaactctactattcctcatcttgtcaggaagagggatgtacatgtggtcgaattccacagacagagccctgcaaaaatactgaattgtacaaatatcgagtgtttacaaatctcctgtgcagtgggacgactcgaaggaggagaaagcgcagtcctgaaagtcaggtcacgattatgggcccacaccttcctccagagaaaaaatgatccctatgctcttgcatccctggtgtcctttgaagttaagaagatgccttatacagatcagccagcaaaactcccagaaggaagcatagcaattaagacatcagttatttgggcaactccgaatgtttccttctcaatcccatta

SEQ ID NO: 3825 - DNA, 1608 bp, Homo Sapiens
tacaacctcgacccgcagcgccccgtgcacttccagggccccgctgactcgttcttcggctacgcagttctggagcatttccacgacaacacgcgctgggtccttgtgggcgcaccaaaggcagattccaaatacagcccttcagtgaagtctcctggggctgtgtttaagtgccgtgttcacaccaaccctgaccggagatgcaccgaactggacatggctcgagggaagaatcggggcacgtcctgcggaaagacctgccgggaagaccgcgatgatgagtggatgggggtgagcctggcccgacagcccaaggctgatggccgtgtgttggcctgtgctcatcgctggaagaacatctactatgaagccgaccacatcctaccccatggcttctgctacatcatcccctccaacctccaggccaaaggcaggacgctgatcccttgctatgaagagtataagaagaagtacggagaggaacacggctcctgccaggctgggatagcgggcttcttcaccgaggagctggtggtgatgggtgctccagggtcattttattgggctggaaccatcaaagtgctgaaccttacggacaacacctatttaaaactgaacgacgaagtgatcatgaacaggcggtacacctacctgggctacgcagtgaccgctggccacttctctcacccgtccaccattgatgtggtaggaggtgccccacaggacaaaggcatcggcaaggtttatattttcagagctgaccgaagatcaggcaccttaattaagatctttcaagcatcaggtaaaaagatgggctcttacttcggctcctccttgtgcgcagttgacctgaatggggacggcctctctgacctgctggtgggggcccccatgttttctgagatcagggatgagggacaggtcactgtctacatcaacagaggaaatggagccctcgaggagcagctggctctgactggggatggtgcctacaatgcgcactttggagagagcattgccagcctggacgatctggacaatgatgggttcccagatgtggccattggtgcacccaaggaggatgacttcgcaggggcggtctatatctatcatggtgatgccggtgggatagtccctcagtactcaatgaaactgtctgggcagaagataaatccagtgctccggatgtttggtcagtccatatcgggaggcattgatatggatggaaatggctatcctgatgtcactgttggagccttcatgtccgacagcgtggttcttctcagagcaaggcctgtcattacggtggatgtctccatcttcctcccgggctccatcaacatcacagcgcctcagtgtcacgacggacagcagcctgtgaactgcctgaacgtcaccacctgcttcagcttccatggcaaacacgttccagaagagattggcctgaattatgttctgatggctgacgtggccaaaaaggagaagggccagatgcccagggtctactttgtgctgctgggagagaccatgggtcaggtcacagagaagctgcagctgacttacatggaggagacgtgtcgtcactatgtggcccatgtgaagcggagg

SEQ ID NO: 3826 - DNA, 3318 bp, Homo Sapiens
ttcaatgtggatgtggcccggccctggctcacgcccaagggaggtgcccctttcgtgctcagctcccttctgcaccaagaccccagcaccaaccagacctggctcctggtcaccagccccagaaccaagaggacaccagggcccctccatcgatgttcccttgtccaggatgaaatcctttgccatcctgtagagcatgtccccatccccaaggggaggcaccggggagtgaccgttgtccggagccaccacggtgttttgatatgcattcaagtgctggtccggcggcctcacagcctcagctcagaactcacaggcacctgtagcctcctgggccctgacctccgtccccaggctcaggccaacttcttcgaccttgaaaatctcctggatccagatgcacgtgtggacactggagactgctacagcaacaaagaaggcggtggagaagacgatgtgaacacagccaggcagcgccgggctctggagaaggaggaggaggaagacaaggaggaggaggaagacgaggaggaggaggaagctggcaccgagattgccatcatcctggatggctcaggaagcattgatcccccagactttcagagagccaaagacttcatctccaacatgatgaggaacttctatgaaaagtgttttgagtgcaactttgccttggtgcagtatggaggagtgatccagactgagtttgaccttcgggacagccaggatgtgatggcctccctcgccagagtccagaacatcactcaagtggggagtgtcaccaagactgcctcagccatgcaacacgtcttagacagcatcttcacctcaagccacggctccaggagaaaggcatccaaggtcatggtggtgctcaccgatggtggcatattcgaggaccccctcaaccttacgacagtcatcaactcccccaaaatgcagggtgttgagcgctttgccattggggtgggagaagaatttaagagtgctaggactgcgagggaactgaacctgatcgcctcagacccggatgagacccatgctttcaaggtgaccaactacatggcgctggatgggctgctgagcaaactgcggtacaacatcatcagcatggaaggcacggttggagacgcccttcactaccagctggcacagattggcttcagtgctcagatcctggatgagcggcaggtgctgctcggcgccgtcggggcctttgactggtccggaggggcgttgctctacgacacacgcagccgccggggccgcttcctgaaccagacagcggcggcggcggcagacgcggaggctgcgcagtacagctacctgggttacgctgtggccgtgctgcacaagacctgcagcctctcctacgtcgcgggggctccacagtacaaacatcatggggccgtgtttgagctccagaaggagggcagagaggccagcttcctgccagtgctggagggagagcagatggggtcctattttggctctgagctgtgccctgtggacattgacatggatggaagcacggacttcttgctggtggctgctccattttaccacgttcatggagaagaaggcagagtctacgtgtaccgtctcagcgagcaggatggttctttctccttggcacgcatactgagtgggcaccccgggttcaccaatgcccgctttggctttgccatggcggctatgggggatctcagtcaggataagctcacagatgtggccatcggggcccccctggaaggttttggggcagatgatggtgccagcttcggcagtgtgtatatctacaatggacactgggacggcctctccgccagcccctcgcagcggatcagagcctccacggtggccccaggactccagtacttcggcatgtccatggctggtggctttgatattagtggcgacggccttgccgacatcaccgtgggcactctgggccaggcggttgtgttccgctcccggcctgtggttcgcctgaaggtctccatggccttcacccccagcgcactgcccatcggcttcaacggcgtcgtgaatgtccgtttatgttttgaaatcagctctgtaaccacagcctctgagtcaggcctccgtgaggcacttctcaacttcacgctggatgtggatgtggggaagcagaggagacggctgcagtgttcagacgtaagaagctgtctgggctgcctgagggagtggagcagcggatcccagctttgtgaggacctcctgctcatgcccacagagggagagctctgtgaggaggactgcttctccaatgccagtgtcaaagtcagctaccagctccagacccctgagggacagacggaccatccccagcccatcctggaccgctacactgagccctttgccatcttccagctgccctatgagaaggcctgcaagaataagctgttttgtgtcgcagaattacagttggccaccaccgtctctcagcaggagttggtggtgggtctcacaaaggagctgaccctgaacattaacctaactaactccggggaagattcctacatgacaagcatggccttgaattaccccagaaacctgcagttgaagaggatgcaaaagcctccctctccaaacattcagtgtgatgaccctcagccggttgcttctgtcctgatcatgaactgcaggattggtcaccccgtcctcaagaggtcatctgctcatgtttcagtcgtttggcagctagaggagaatgcctttccaaacaggacagcagacatcactgtgactgtcaccaattccaatgaaagacggtctttggccaacgagacccacacccttcaattcaggcatggcttcgttgcagttctgtccaaaccatccataatgtacgtgaacacaggccaggggctttctcaccacaaagaattcctcttccatgtacatggggagaacctctttggagcagaataccagttgcaaatttgcgtcccaaccaaattacgaggtctccaggttgcagcagtgaagaagctgacgaggactcaggcctccacggtgtgcacctggagtcaggagcgcgcttgtgcgtacagttcggttcagcatgtggaagaatggcattcagtgagctgtgtcatcgcttcagataaagaaaatgtcaccgtggctgcagagatctcctgggatcactctgaggagttactaaaagatgtaactgaactgcagatccttggtgaaatatctttcaacaaatctctatatgagggactgaatgcagagaaccacagaactaagatcactgtcgtcttcctgaaagatgagaagtaccattct

SEQ ID NO: 3827 - DNA, 2943 bp, Homo Sapiens
tacaacctggacgtgcggggcgcgcggagcttctccccaccgcgcgccgggaggcactttggataccgcgtcctgcaggtcggaaacggggtcatcgtgggagctccaggggaggggaacagcacaggaagcctctatcagtgccagtcgggcacaggacactgcctgccagtcaccctgagaggttccaactatacctccaagtacttgggaatgaccttggcaacagaccccacagatggaagcattttgtttgctgctgttcagttttccacaagctacaaaacagaatttgatttctcagattatgttaaacggaaggaccctgatgctctgctgaagcatgtaaagcacatgttgctgttgaccaatacctttggtgccatcaattatgtcgcgacagaggtgttccgggaggagctgggggcccggccagatgccaccaaagtgcttatcatcatcacggatggggaggccactgacagtggcaacatcgatgcggccaaagacatcatccgctacatcatcgggattggaaagcattttcagaccaaggagagtcaggagaccctccacaaatttgcatcaaaacccgcgagcgagtttgtgaaaattctggacacatttgagaagctgaaagatctattcactgagctgcagaagaagatctatgtcattgagggcacaagcaaacaggacctgacttccttcaacatggagctgtcctccagcggcatcagtgctgacctcagcaggggccatgcagtcgtgggggcagtaggagccaaggactgggctgggggctttcttgacctgaaggcagacctgcaggatgacacatttattgggaatgaaccattgacaccagaagtgagagcaggctatttgggttacaccgtgacctggctgccctcccggcaaaagacttcgttgctggcctcgggagcccctcgataccagcacatgggccgagtgctgctgttccaagagccacagggcggaggacactggagccaggtccagacaatccatgggacccagattggctcttatttcggtggggagctgtgtggcgtcgacgtggaccaagatggggagacagagctgctgctgattggtgccccactgttctatggggagcagagaggaggccgggtgtttatctaccagagaagacagttggggtttgaagaagtctcagagctgcagggggaccccggctacccactcgggcggtttggagaagccatcactgctctgacagacatcaacggcgatgggctggtagacgtggctgtgggggcccctctggaggagcagggggctgtgtacatcttcaatgggaggcacggggggcttagtccccagccaagtcagcggatagaagggacccaagtgctctcaggaattcagtggtttggacgctccatccatggggtgaaggaccttgaaggggatggcttggcagatgtggctgtgggggctgagagccagatgatcgtgctgagctcccggcccgtggtggatatggtcaccctgatgtccttctctccagctgagatcccagtgcatgaagtggagtgctcctattcaaccagtaacaagatgaaagaaggagttaatatcacaatctgtttccagatcaagtctctcatcccccagttccaaggccgcctggttgccaatctcacttacactctgcagctggatggccaccggaccagaagacgggggttgttcccaggagggagacatgaactcagaaggaatatagctgtcaccaccagcatgtcatgcactgacttctcatttcatttcccggtatgtgttcaagacctcatctcccccatcaatgtttccctgaatttctctctttgggaggaggaagggacaccgagggaccaaagggcgggcaaggacataccgcccatcctgagaccctccctgcactcggaaacctgggagatcccttttgagaagaactgtggggaggacaagaagtgtgaggcaaacttgagagtgtccttctctcctgcaagatccagagccctgcgtctaactgcttttgccagcctctctgtggagctgagcctgagtaacttggaagaagatgcttactgggtccagctggacctgcacttccccccgggactctccttccgcaaggtggagatgctgaagccccatagccagatacctgtgagctgcgaggagcttcctgaagagtccaggcttctgtccagggcattatcttgcaatgtgagctctcccatcttcaaagcaggccactcggttgctctgcagatgatgtttaatacactggtaaacagctcctggggggactcggttgaattgcacgccaatgtgacctgtaacaatgaggactcagacctcctggaggacaactcagccactaccatcatccccatcctgtaccccatcaacatcctcatccaggaccaagaagactccacactctatgtcagtttcacccccaaaggccccaagatccaccaagtcaagcacatgtaccaggtgaggatccagccttccatccacgaccacaacatacccaccctggaggctgtggttggggtgccacagcctcccagcgaggggcccatcacacaccagtggagcgtgcagatggagcctcccgtgccctgccactatgaggatctggagaggctcccggatgcagctgagccttgtctccccggagccctgttccgctgccctgttgtcttcaggcaggagatcctcgtccaagtgatcgggactctggagctggtgggagagatcgaggcctcttccatgttcagcctctgcagctccctctccatctccttcaacagcagcaagcatttccacctctatggcagcaacgcctccctggcccaggttgtcatgaaggttgacgtggtgtatgagaagcagatgctc

SEQ ID NO: 3828 - DNA, 3264 bp, Homo Sapiens
ttcaacttggacactgaaaacgcaatgaccttccaagagaacgcaaggggcttcgggcagagcgtggtccagcttcagggatccagggtggtggttggagccccccaggagatagtggctgccaaccaaaggggcagcctctaccagtgcgactacagcacaggctcatgcgagcccatccacctgcaggtccccgtggaggccgtgaacatgtccctgggcctgtccctggcagccaccaccagcccccctcagctgctggcctgtggtcccaccgtgcaccagacttgcagtgagaacacgtatgtgaaagggctctgcttcctgtttggatccaacctacggcagcagccccagaagttcccagaggccctccgagggtgtcctcaagaggatagtgacattgccttcttgattgatggctctggtagcatcatcccacatgactttcggcggatgaaggagtttgtctcaactgtgatggagcaattaaaaaagtccaaaaccttgttctctttgatgcagtactctgaagaattccggattcactttaccttcaaagagttccagaacaaccctaacccaagatcactggtgaagccaataacgcagctgcttgggcggacacacacggccacgggcatccgcaaagtggtacgagagctgtttaacatcaccaacggagcccgaaagaatgcctttaagatcctagttgtcatcacggatggagaaaagtttggcgatcccttgggatatgaggatgtcatccctgaggcagacagagagggagtcattcgctacgtcattggggtgggagatgccttccgcagtgagaaatcccgccaagagcttaataccatcgcatccaagccgcctcgtgatcacgtgttccaggtgaataactttgaggctctgaagaccattcagaaccagcttcgggagaagatctttgcgatcgagggtactcagacaggaagtagcagctcctttgagcatgagatgtctcaggaaggcttcagcgctgccatcacctctaatggccccttgctgagcactgtggggagctatgactgggctggtggagtctttctatatacatcaaaggagaaaagcaccttcatcaacatgaccagagtggattcagacatgaatgatgcttacttgggttatgctgccgccatcatcttacggaaccgggtgcaaagcctggttctgggggcacctcgatatcagcacatcggcctggtagcgatgttcaggcagaacactggcatgtgggagtccaacgctaatgtcaagggcacccagatcggcgcctacttcggggcctccctctgctccgtggacgtggacagcaacggcagcaccgacctggtcctcatcggggccccccattactacgagcagacccgagggggccaggtgtccgtgtgccccttgcccagggggagggctcggtggcagtgtgatgctgttctctacggggagcagggccaaccctggggccgctttggggcagccctaacagtgctgggggacgtaaatggggacaagctgacggacgtggccattggggccccaggagaggaggacaaccggggtgctgtttacctgtttcacggaacctcaggatctggcatcagcccctcccatagccagcggatagcaggctccaagctctctcccaggctccagtattttggtcagtcactgagtgggggccaggacctcacaatggatggactggtagacctgactgtaggagcccaggggcacgtgctgctgctcaggtcccagccagtactgagagtcaaggcaatcatggagttcaatcccagggaagtggcaaggaatgtatttgagtgtaatgatcaggtggtgaaaggcaaggaagccggagaggtcagagtctgcctccatgtccagaagagcacacgggatcggctaagagaaggacagatccagagtgttgtgacttatgacctggctctggactccggccgcccacattcccgcgccgtcttcaatgagacaaagaacagcacacgcagacagacacaggtcttggggctgacccagacttgtgagaccctgaaactacagttgccgaattgcatcgaggacccagtgagccccattgtgctgcgcctgaacttctctctggtgggaacgccattgtctgctttcgggaacctccggccagtgctggcggaggatgctcagagactcttcacagccttgtttccctttgagaagaattgtggcaatgacaacatctgccaggatgacctcagcatcaccttcagtttcatgagcctggactgcctcgtggtgggtgggccccgggagttcaacgtgacagtgactgtgagaaatgatggtgaggactcctacaggacacaggtcaccttcttcttcccgcttgacctgtcctaccggaaggtgtccacgctccagaaccagcgctcacagcgatcctggcgcctggcctgtgagtctgcctcctccaccgaagtgtctggggtcttgaagagcaccagctgcagcataaaccaccccatcttcccggaaaactcagaggtcacctttaatatcacgtttgatgtagactctaaggcttcccttggaaacaaactgctcctcaaggccaatgtgaccagtgagaacaacatgcccagaaccaacaaaaccgaattccaactggagctgccggtgaaatatgctgtctacatggtggtcaccagccatggggtctccactaaatatctcaacttcacggcctcagagaataccagtcgggtcatgcagcatcaatatcaggtcagcaacctggggcagaggagcctccccatcagcctggtgttcttggtgcccgtccggctgaaccagactgtcatatgggaccgcccccaggtcaccttctccgagaacctctcgagtacgtgccacaccaaggagcgcttgccctctcactccgactttctggctgagcttcggaaggcccccgtggtgaactgctccatcgctgtctgccagagaatccagtgtgacatcccgttctttggcatccaggaagaattcaatgctaccctcaaaggcaacctctcgtttgactggtacatcaagacctcgcataaccacctcctgatcgtgagcacagctgagatcttgtttaacgattccgtgttcaccctgctgccgggacagggggcgtttgtgaggtcccagacggagaccaaagtggagccgttcgaggtccccaac

SEQ ID NO: 3829 - DNA, 2886 bp, Homo Sapiens
ttcaacctagacgtggacagtcctgccgagtactctggccccgagggaagttacttcggcttcgccgtggatttcttcgtgcccagcgcgtcttcccggatgtttcttctcgtgggagctcccaaagcaaacaccacccagcctgggattgtggaaggagggcaggtcctcaaatgtgactggtcttctacccgccggtgccagccaattgaatttgatgcaacaggcaatagagattatgccaaggatgatccattggaatttaagtcccatcagtggtttggagcatctgtgaggtcgaaacaggataaaattttggcctgtgccccattgtaccattggagaactgagatgaaacaggagcgagagcctgttggaacatgctttcttcaagatggaacaaagactgttgagtatgctccatgtagatcacaagatattgatgctgatggacagggattttgtcaaggaggattcagcattgattttactaaagctgacagagtacttcttggtggtcctggtagcttttattggcaaggtcagcttatttcggatcaagtggcagaaatcgtatctaaatacgaccccaatgtttacagcatcaagtataataaccaattagcaactcggactgcacaagctatttttgatgacagctatttgggttattctgtggctgtcggagatttcaatggtgatggcatagatgactttgtttcaggagttccaagagcagcaaggactttgggaatggtttatatttatgatgggaagaacatgtcctccttatacaattttactggcgagcagatggctgcatatttcggattttctgtagctgccactgacattaatggagatgattatgcagatgtgtttattggagcacctctcttcatggatcgtggctctgatggcaaactccaagaggtggggcaggtctcagtgtctctacagagagcttcaggagacttccagacgacaaagctgaatggatttgaggtctttgcacggtttggcagtgccatagctcctttgggagatctggaccaggatggtttcaatgatattgcaattgctgctccatatgggggtgaagataaaaaaggaattgtttatatcttcaatggaagatcaacaggcttgaacgcagtcccatctcaaatccttgaagggcagtgggctgctcgaagcatgccaccaagctttggctattcaatgaaaggagccacagatatagacaaaaatggatatccagacttaattgtaggagcttttggtgtagatcgagctatcttatacagggccagaccagttatcactgtaaatgctggtcttgaagtgtaccctagcattttaaatcaagacaataaaacctgctcactgcctggaacagctctcaaagtttcctgttttaatgttaggttctgcttaaaggcagatggcaaaggagtacttcccaggaaacttaatttccaggtggaacttcttttggataaactcaagcaaaagggagcaattcgacgagcactgtttctctacagcaggtccccaagtcactccaagaacatgactatttcaagggggggactgatgcagtgtgaggaattgatagcgtatctgcgggatgaatctgaatttagagacaaactcactccaattactatttttatggaatatcggttggattatagaacagctgctgatacaacaggcttgcaacccattcttaaccagttcacgcctgctaacattagtcgacaggctcacattctacttgactgtggtgaagacaatgtctgtaaacccaagctggaagtttctgtagatagtgatcaaaagaagatctatattggggatgacaaccctctgacattgattgttaaggctcagaatcaaggagaaggtgcctacgaagctgagctcatcgtttccattccactgcaggctgatttcatcggggttgtccgaaacaatgaagccttagcaagactttcctgtgcatttaagacagaaaaccaaactcgccaggtggtatgtgaccttggaaacccaatgaaggctggaactcaactcttagctggtcttcgtttcagtgtgcaccagcagtcagagatggatacttctgtgaaatttgacttacaaatccaaagctcaaatctatttgacaaagtaagcccagttgtatctcacaaagttgatcttgctgttttagctgcagttgagataagaggagtctcgagtcctgatcatatctttcttccgattccaaactgggagcacaaggagaaccctgagactgaagaagatgttgggccagttgttcagcacatctatgagctgagaaacaatggtccaagttcattcagcaaggcaatgctccatcttcagtggccttacaaatataataataacactctgttgtatatccttcattatgatattgatggaccaatgaactgcacttcagatatggagatcaaccctttgagaattaagatctcatctttgcaaacaactgaaaagaatgacacggttgccgggcaaggtgagcgggaccatctcatcactaagcgggatcttgccctcagtgaaggagatattcacactttgggttgtggagttgctcagtgcttgaagattgtctgccaagttgggagattagacagaggaaagagtgcaatcttgtacgtaaagtcattactgtggactgagacttttatgaataaagaaaatcagaatcattcctattctctgaagtcgtctgcttcatttaatgtcatagagtttccttataagaatcttccaattgaggatatcaccaactccacattggttaccactaatgtcacctggggcattcagccagcgcccatgcctgtg

SEQ ID NO: 3830 - DNA, 3264 bp, Homo Sapiens
ttcaacttggacacagaggagctgacagccttccgtgtggacagcgctgggtttggagacagcgtggtccagtatgccaactcctgggtggtggttggagccccccaaaagataacagctgccaaccaaacgggtggcctctaccagtgtggctacagcactggtgcctgtgagcccatcggcctgcaggtgcccccggaggccgtgaacatgtccctgggcctgtccctggcgtctaccaccagcccttcccagctgctggcctgcggccccaccgtgcaccacgagtgcgggaggaacatgtacctcaccggactctgcttcctcctgggccccacccagctcacccagaggctcccggtgtccaggcaggagtgcccaagacaggagcaggacattgtgttcctgatcgatggctcaggcagcatctcctcccgcaactttgccacgatgatgaacttcgtgagagctgtgataagccagttccagagacccagcacccagttttccctgatgcagttctccaacaaattccaaacacacttcactttcgaggaattcaggcgcagctcaaaccccctcagcctgttggcttctgttcaccagctgcaagggtttacatacacggccaccgccatccaaaatgtcgtgcaccgattgttccatgcctcatatggggcccgtagggatgccgccaaaattctcattgtcatcactgatgggaagaaagaaggcgacagcctggattataaggatgtcatccccatggctgatgcagcaggcatcatccgctatgcaattggggttggattagcttttcaaaacagaaattcttggaaagaattaaatgacattgcatcgaagccctcccaggaacacatatttaaagtggaggactttgatgctctgaaagatattcaaaaccaactgaaggagaagatctttgccattgagggtacggagaccacaagcagtagctccttcgaattggagatggcacaggagggcttcagcgctgtgttcacacctgatggccccgttctgggggctgtggggagcttcacctggtctggaggtgccttcctgtaccccccaaatatgagccctaccttcatcaacatgtctcaggagaatgtggacatgagggactcttacctgggttactccaccgagctggccctctggaaaggggtgcagagcctggtcctgggggccccccgctaccagcacaccgggaaggctgtcatcttcacccaggtgtccaggcaatggaggatgaaggccgaagtcacggggactcagatcggctcctacttcggggcctccctctgctccgtggacgtagacagcgacggcagcaccgacctggtcctcatcggggccccccattactacgagcagacccgagggggccaggtgtctgtgtgtcccttgcccagggggtggagaaggtggtggtgtgatgctgttctctacggggagcagggccacccctggggtcgctttggggcggctctgacagtgctgggggatgtgaatggggacaagctgacagacgtggtcatcggggccccaggagagaaggagaaccggggtgctgtctacctgtttcacggagtcttgggacccagcatcagcccctcccacagccagcggatcgcgggctcccagctctcctccaggctgcagtattttgggcaggcactgagcgggggtcaagacctcacccaggatggactggtggacctggctgtgggggcccggggccaggtgctcctgctcaggaccagacctgtgctctgggtgggggtgagcatgcagttcatacctgccgagatccccaggtctgcgtttgagtgtcgggagcaggtggtctctgagcagaccctggtacagtccaacatctgcctttacattgacaaacgttctaagaacctgcttgggagccgtgacctccaaagctctgtgaccttggacctggccctcgaccctggccgcctgagtccccgtgccaccttccaggaaacaaagaaccggagtctgagccgagtccgagtcctcgggctgaaggcacactgtgaaaacttcaacctgctgctcccgagctgcgtggaggactctgtgacccccattaccttgcgtctgaacttcacgctggtgggcaagcccctccttgccttcagaaacctgcggcctatgctggccgccgatgctcagagatacttcacggcctccctaccctttgagaagaactgtggagccgaccatatctgccaggacaatctcggcatctccttcagcttcccaggcttgaagtccctgctggtggggagtaacctggagctgaacgcagaagtgatggtgtggaatgacggggaagactcctacggaaccaccgtcaccttctcccaccccgcaggactgtcctaccgctacgtggcagagggccagaaacaagggcagctgcgttccctgcacctgacatgtgacagcgccccagttgggagccagggcacctggagcaccagctgcagaatcaaccacctcatcttccgtggcggcgcccagatcaccttcttggctacctttgacgtctcccccaaggctgtcctgggagaccggctgcttctgacagccaatgtgagcagtgagaacaacactcccaggaccagcaagaccaccttccagctggagctcccggtgaagtatgctgtctacactgtggttagcagccacgaacaattcaccaaatacctcaacttctcagagtctgaggagaaggaaagccatgtggccatgcacagataccaggtcaataacctgggacagagggacctgcctgtcagcatcaacttctgggtgcctgtggagctgaaccaggaggctgtgtggatggatgtggaggtctcccacccccagaacccatcccttcggtgctcctcagagaaaatcgcacccccagcatctgacttcctggcgcacattcagaagaatcccgtgctggactgctccattgctggctgcctgcggttccgctgtgacgtcccctccttcagcgtccaggaggagctggatttcaccctgaagggcaacctcagctttggctgggtccgccagatattgcagaagaaggtgtcggtcgtgagtgtggctgaaattacgttcgacacatccgtgtactcccagcttccaggacaggaggcatttatgagagctcagacgacaacggtgctggagaagtacaaggtccacaaccccaccccc

SEQ ID NO: 3831 - DNA, 2124 bp, Homo Sapiens
caaacagatgaaaatagatgtttaaaagcaaatgccaaatcatgtggagaatgtatacaagcagggccaaattgtgggtggtgcacaaattcaacatttttacaggaaggaatgcctacttctgcacgatgtgatgatttagaagccttaaaaaagaagggttgccctccagatgacatagaaaatcccagaggctccaaagatataaagaaaaataaaaatgtaaccaaccgtagcaaaggaacagcagagaagctcaagccagaggatattactcagatccaaccacagcagttggttttgcgattaagatcaggggagccacagacatttacattaaaattcaagagagctgaagactatcccattgacctctactaccttatggacctgtcttactcaatgaaagacgatttggagaatgtaaaaagtcttggaacagatctgatgaatgaaatgaggaggattacttcggacttcagaattggatttggctcatttgtggaaaagactgtgatgccttacattagcacaacaccagctaagctcaggaacccttgcacaagtgaacagaactgcaccagcccatttagctacaaaaatgtgctcagtcttactaataaaggagaagtatttaatgaacttgttggaaaacagcgcatatctggaaatttggattctccagaaggtggtttcgatgccatcatgcaagttgcagtttgtggatcactgattggctggaggaatgttacacggctgctggtgttttccacagatgccgggtttcactttgctggagatgggaaacttggtggcattgttttaccaaatgatggacaatgtcacctggaaaataatatgtacacaatgagccattattatgattatccttctattgctcaccttgtccagaaactgagtgaaaataatattcagacaatttttgcagttactgaagaatttcagcctgtttacaaggagctgaaaaacttgatccctaagtcagcagtaggaacattatctgcaaattctagcaatgtaattcagttgatcattgatgcatacaattccctttcctcagaagtcattttggaaaacggcaaattgtcagaaggagtaacaataagttacaaatcttactgcaagaacggggtgaatggaacaggggaaaatggaagaaaatgttccaatatttccattggagatgaggttcaatttgaaattagcataacttcaaataagtgtccaaaaaaggattctgacagctttaaaattaggcctctgggctttacggaggaagtagaggttattcttcagtacatctgtgaatgtgaatgccaaagcgaaggcatccctgaaagtcccaagtgtcatgaaggaaatgggacatttgagtgtggcgcgtgcaggtgcaatgaagggcgtgttggtagacattgtgaatgcagcacagatgaagttaacagtgaagacatggatgcttactgcaggaaagaaaacagttcagaaatctgcagtaacaatggagagtgcgtctgcggacagtgtgtttgtaggaagagggataatacaaatgaaatttattctggcaaattctgcgagtgtgataatttcaactgtgatagatccaatggcttaatttgtggaggaaatggtgtttgcaagtgtcgtgtgtgtgagtgcaaccccaactacactggcagtgcatgtgactgttctttggatactagtacttgtgaagccagcaacggacagatctgcaatggccggggcatctgtgagtgtggtgtctgtaagtgtacagatccgaagtttcaagggcaaacgtgtgagatgtgtcagacctgccttggtgtctgtgctgagcataaagaatgtgttcagtgcagagccttcaataaaggagaaaagaaagacacatgcacacaggaatgttcctattttaacattaccaaggtagaaagtcgggacaaattaccccagccggtccaacctgatcctgtgtcccattgtaaggagaaggatgttgacgactgttggttctattttacgtattcagtgaatgggaacaacgaggtcatggttcatgttgtggagaatccagagtgtcccactggtccagac

SEQ ID NO: 3832 - DNA, 2034 bp, Homo Sapiens
caggagtgcacgaagttcaaggtcagcagctgccgggaatgcatcgagtcggggcccggctgcacctggtgccagaagctgaacttcacagggccgggggatcctgactccattcgctgcgacacccggccacagctgctcatgaggggctgtgcggctgacgacatcatggaccccacaagcctcgctgaaacccaggaagaccacaatgggggccagaagcagctgtccccacaaaaagtgacgctttacctgcgaccaggccaggcagcagcgttcaacgtgaccttccggcgggccaagggctaccccatcgacctgtactatctgatggacctctcctactccatgcttgatgacctcaggaatgtcaagaagctaggtggcgacctgctccgggccctcaacgagatcaccgagtccggccgcattggcttcgggtccttcgtggacaagaccgtgctgccgttcgtgaacacgcaccctgataagctgcgaaacccatgccccaacaaggagaaagagtgccagcccccgtttgccttcaggcacgtgctgaagctgaccaacaactccaaccagtttcagaccgaggtcgggaagcagctgatttccggaaacctggatgcacccgagggtgggctggacgccatgatgcaggtcgccgcctgcccggaggaaatcggctggcgcaacgtcacgcggctgctggtgtttgccactgatgacggcttccatttcgcgggcgacgggaagctgggcgccatcctgacccccaacgacggccgctgtcacctggaggacaacttgtacaagaggagcaacgaattcgactacccatcggtgggccagctggcgcacaagctggctgaaaacaacatccagcccatcttcgcggtgaccagtaggatggtgaagacctacgagaaactcaccgagatcatccccaagtcagccgtgggggagctgtctgaggactccagcaatgtggtccatctcattaagaatgcttacaataaactctcctccagggtattcctggatcacaacgccctccccgacaccctgaaagtcacctacgactccttctgcagcaatggagtgacgcacaggaaccagcccagaggtgactgtgatggcgtgcagatcaatgtcccgatcaccttccaggtgaaggtcacggccacagagtgcatccaggagcagtcgtttgtcatccgggcgctgggcttcacggacatagtgaccgtgcaggtccttccccagtgtgagtgccggtgccgggaccagagcagagaccgcagcctctgccatggcaagggcttcttggagtgcggcatctgcaggtgtgacactggctacattgggaaaaactgtgagtgccagacacagggccggagcagccaggagctggaaggaagctgccggaaggacaacaactccatcatctgctcagggctgggggactgtgtctgcgggcagtgcctgtgccacaccagcgacgtccccggcaagctgatatacgggcagtactgcgagtgtgacaccatcaactgtgagcgctacaacggccaggtctgcggcggcccggggagggggctctgcttctgcgggaagtgccgctgccacccgggctttgagggctcagcgtgccagtgcgagaggaccactgagggctgcctgaacccgcggcgtgttgagtgtagtggtcgtggccggtgccgctgcaacgtatgcgagtgccattcaggctaccagctgcctctgtgccaggagtgccccggctgcccctcaccctgtggcaagtacatctcctgcgccgagtgcctgaagttcgaaaagggcccctttgggaagaactgcagcgcggcgtgtccgggcctgcagctgtcgaacaaccccgtgaagggcaggacctgcaaggagagggactcagagggctgctgggtggcctacacgctggagcagcaggacgggatggaccgctacctcatctatgtggatgagagccgagagtgtgtggcaggccccaac

SEQ ID NO: 3833 - DNA, 2076 bp, Homo Sapiens
gggcccaacatctgtaccacgcgaggtgtgagctcctgccagcagtgcctggctgtgagccccatgtgtgcctggtgctctgatgaggccctgcctctgggctcacctcgctgtgacctgaaggagaatctgctgaaggataactgtgccccagaatccatcgagttcccagtgagtgaggcccgagtactagaggacaggcccctcagcgacaagggctctggagacagctcccaggtcactcaagtcagtccccagaggattgcactccggctccggccagatgattcgaagaatttctccatccaagtgcggcaggtggaggattaccctgtggacatctactacttgatggacctgtcttactccatgaaggatgatctgtggagcatccagaacctgggtaccaagctggccacccagatgcgaaagctcaccagtaacctgcggattggcttcggggcatttgtggacaagcctgtgtcaccatacatgtatatctccccaccagaggccctcgaaaacccctgctatgatatgaagaccacctgcttgcccatgtttggctacaaacacgtgctgacgctaactgaccaggtgacccgcttcaatgaggaagtgaagaagcagagtgtgtcacggaaccgagatgccccagagggtggctttgatgccatcatgcaggctacagtctgtgatgaaaagattggctggaggaatgatgcatcccacttgctggtgtttaccactgatgccaagactcatatagcattggacggaaggctggcaggcattgtccagcctaatgacgggcagtgtcatgttggtagtgacaatcattactctgcctccactaccatggattatccctctttggggctgatgactgagaagctatcccagaaaaacatcaatttgatctttgcagtgactgaaaatgtagtcaatctctatcagaactatagtgagctcatcccagggaccacagttggggttctgtccatggattccagcaatgtcctccagctcattgttgatgcttatgggaaaatccgttctaaagtagagctggaagtgcgtgacctccctgaagagttgtctctatccttcaatgccacctgcctcaacaatgaggtcatccctggcctcaagtcttgtatgggactcaagattggagacacggtgagcttcagcattgaggccaaggtgcgaggctgtccccaggagaaggagaagtcctttaccataaagcccgtgggcttcaaggacagcctgatcgtccaggtcacctttgattgtgactgtgcctgccaggcccaagctgaacctaatagccatcgctgcaacaatggcaatgggacctttgagtgtggggtatgccgttgtgggcctggctggctgggatcccagtgtgagtgctcagaggaggactatcgcccttcccagcaggacgaatgcagcccccgggagggtcagcccgtctgcagccagcggggcgagtgcctctgtggtcaatgtgtctgccacagcagtgactttggcaagatcacgggcaagtactgcgagtgtgacgacttctcctgtgtccgctacaagggggagatgtgctcaggccatggccagtgcagctgtggggactgcctgtgtgactccgactggaccggctactactgcaactgtaccacgcgtactgacacctgcatgtccagcaatgggctgctgtgcagcggccgcggcaagtgtgaatgtggcagctgtgtctgtatccagccgggctcctatggggacacctgtgagaagtgccccacctgcccagatgcctgcacctttaagaaagaatgtgtggagtgtaagaagtttgaccggggagccctacatgacgaaaatacctgcaaccgttactgccgtgacgagattgagtcagtgaaagagcttaaggacactggcaaggatgcagtgaattgtacctataagaatgaggatgactgtgtcgtcagattccagtactatgaagattctagtggaaagtccatcctgtatgtggtagaagagccagagtgtcccaagggccctgac

SEQ ID NO: 3834 - DNA, 2088 bp, Homo Sapiens
ggtctcaacatatgcactagtggaagtgccacctcatgtgaagaatgtctgctaatccacccaaaatgtgcctggtgctccaaagaggacttcggaagcccacggtccatcacctctcggtgtgatctgagggcaaaccttgtcaaaaatggctgtggaggtgagatagagagcccagccagcagcttccatgtcctgaggagcctgcccctcagcagcaagggttcgggctctgcaggctgggacgtcattcagatgacaccacaggagattgccgtgaacctccggcccggtgacaagaccaccttccagctacaggttcgccaggtggaggactatcctgtggacctgtactacctgatggacctctccctgtccatgaaggatgacttggacaatatccggagcctgggcaccaaactcgcggaggagatgaggaagctcaccagcaacttccggttgggatttgggtcttttgttgataaggacatctctcctttctcctacacggcaccgaggtaccagaccaatccgtgcattggttacaagttgtttccaaattgcgtcccctcctttgggttccgccatctgctgcctctcacagacagagtggacagcttcaatgaggaagttcggaaacagagggtgtcccggaaccgagatgcccctgaggggggctttgatgcagtactccaggcagccgtctgcaaggagaagattggctggcgaaaggatgcactgcatttgctggtgttcacaacagatgatgtgccccacatcgcattggatggaaaattgggaggcctggtgcagccacacgatggccagtgccacctgaacgaggccaacgagtacactgcatccaaccagatggactatccatcccttgccttgcttggagagaaattggcagagaacaacatcaacctcatctttgcagtgacaaaaaaccattatatgctgtacaagaattttacagccctgatacctggaacaacggtggagattttagatggagactccaaaaatattattcaactgattattaatgcatacaatagtatccggtctaaagtggagttgtcagtctgggatcagcctgaggatcttaatctcttctttactgctacctgccaagatggggtatcctatcctggtcagaggaagtgtgagggtctgaagattggggacacggcatcttttgaagtatcattggaggcccgaagctgtcccagcagacacacggagcatgtgtttgccctgcggccggtgggattccgggacagcctggaggtgggggtcacctacaactgcacgtgcggctgcagcgtggggctggaacccaacagtgccaggtgcaacgggagcgggacctatgtctgcggcctgtgtgagtgcagccccggctacctgggcaccaggtgcgagtgccaggatggggagaaccagagcgtgtaccagaacctgtgccgggaggcagagggcaagccactgtgcagcgggcgtggggactgcagctgcaaccagtgctcctgcttcgagagcgagttcggcaagatctatgggcctttctgtgagtgcgacaacttctcctgtgccaggaacaagggagtcctctgctcaggccatggcgagtgtcactgcggggaatgcaagtgccatgcaggttacatcggggacaactgtaactgctcgacagacatcagcacatgccggggcagagatggccagatctgcagcgagcgtgggcactgtctctgtgggcagtgccaatgcacggagccgggggcctttggggagatgtgtgagaagtgccccacctgcccggatgcatgcagcaccaagagagattgcgtcgagtgcctgctgctccactctgggaaacctgacaaccagacctgccacagcctatgcagggatgaggtgatcacatgggtggacaccatcgtgaaagatgaccaggaggctgtgctatgtttctacaaaaccgccaaggactgcgtcatgatgttcacctatgtggagctccccagtgggaagtccaacctgaccgtcctcagggagccagagtgtggaaacacccccaac

SEQ ID NO: 3835 - DNA, 2064 bp, Homo Sapiens
ggctgtgccctgggaggtgcagaaacctgtgaagactgcctgcttattggacctcagtgtgcctggtgtgctcaggagaattttactcatccatctggagttggcgaaaggtgtgataccccagcaaaccttttagctaaaggatgtcaattaaacttcatcgaaaaccctgtctcccaagtagaaatacttaaaaataagcctctcagtgtaggcagacagaaaaatagttctgacattgttcagattgcgcctcaaagcttgatccttaagttgagaccaggtggtgcgcagactctgcaggtgcatgtccgccagactgaggactacccggtggatttgtattacctcatggacctctccgcctccatggatgacgacctcaacacaataaaggagctgggctcccggctttccaaagagatgtctaaattaaccagcaactttagactgggcttcggatcttttgtggaaaaacctgtatccccttttgtgaaaacaacaccagaagaaattgccaacccttgcagtagtattccatacttctgtttacctacatttggattcaagcacattttgccattgacaaatgatgctgaaagattcaatgaaattgtgaagaatcagaaaatttctgctaatattgacacacccgaaggtggatttgatgcaattatgcaagctgctgtgtgtaaggaaaaaattggctggcggaatgactccctccacctcctggtctttgtgagtgatgctgattctcattttggaatggacagcaaactagcaggcatcgtcattcctaatgacgggctctgtcacttggacagcaagaatgaatactccatgtcaactgtcttggaatatccaacaattggacaactcattgataaactggtacaaaacaacgtgttattgatcttcgctgtaacccaagaacaagttcatttatatgagaattacgcaaaacttattcctggagctacagtaggtctacttcagaaggactccggaaacattctccagctgatcatctcagcttatgaagaactgcggtctgaggtggaactggaagtattaggagacaccgaaggactcaacttgtcatttacagccatctgtaacaacggtaccctcttccaacaccaaaagaaatgctctcacatgaaagtgggagacacagcttccttcagcgtgactgtgaatatcccacactgcgagagaagaagcaggcacattatcataaagcctgtggggctgggggatgccctggaattacttgtcagcccagaatgcaactgcgactgtcagaaagaagtggaagtgaacagccccaaatgtcaccacgggaacggctctttccagtgtggggcgtgtgcctgccaccctggccacatggggcctcgctgtgagtgtggcgaggacatgctgagcacagattcctgcaaggaggccccagatcatccctcctgcagcggaaggggtgactgctactgtgggcagtgtatctgccacttgtctccctatggaaacatttatgggccttattgccagtgtgacaatttctcctgcgtgagacacaaagggctgctctgcggaggtaacggcgactgtgactgtggtgaatgtgtgtgcaggagcggctggactggcgagtactgcaactgcaccaccagcacggactcctgcgtctctgaagatggagtgctctgcagcgggcgcggggactgtgtttgtggcaagtgtgtttgcacaaaccctggggcctcaggaccaacctgtgaacgatgtcctacctgtggtgacccctgtaactctaaacggagctgcattgagtgccacctgtcagcagctggccaagcccgagaagaatgtgtggacaagtgcaaactagctggtgcgaccatcagtgaagaagaagatttctcaaaggatggttctgtttcctgctctctgcaaggagaaaatgaatgtcttattacattcctaataactacagataatgaggggaaaaccatcattcacagcatcaatgaaaaagattgtccgaagcctccaaacattccc

SEQ ID NO: 3836 - DNA, 2112 bp, Homo Sapiens
gaattggacgccaagatcccatccacaggggatgccacagaatggcggaatcctcacctgtccatgctggggtcctgccagccagccccctcctgccagaagtgcatcctctcacaccccagctgtgcatggtgcaagcaactgaacttcaccgcgtcgggagaggcggaggcgcggcgctgcgcccgacgagaggagctgctggctcgaggctgcccgctggaggagctggaggagccccgcggccagcaggaggtgctgcaggaccagccgctcagccagggcgcccgcggagagggtgccacccagctggcgccgcagcgggtccgggtcacgctgcggcctggggagccccagcagctccaggtccgcttccttcgtgctgagggatacccggtggacctgtactaccttatggacctgagctactccatgaaggacgacctggaacgcgtgcgccagctcgggcacgctctgctggtccggctgcaggaagtcacccattctgtgcgcattggttttggttcctttgtggacaaaacggtgctgccctttgtgagcacagtaccctccaaactgcgccacccctgccccacccggctggagcgctgccagtcaccattcagctttcaccatgtgctgtccctgacgggggacgcacaagccttcgagcgggaggtggggcgccagagtgtgtccggcaatctggactcgcctgaaggtggcttcgatgccattctgcaggctgcactctgccaggagcagattggctggagaaatgtgtcccggctgctggtgttcacttcagacgacacattccatacagctggggacgggaagttgggcggcattttcatgcccagtgatgggcactgccacttggacagcaatggcctctacagtcgcagcacagagtttgactacccttctgtgggtcaggtagcccaggccctctctgcagcaaatatccagcccatctttgctgtcaccagtgccgcactgcctgtctaccaggagctgagtaaactgattcctaagtctgcagttggggagctgagtgaggactccagcaacgtggtacagctcatcatggatgcttataatagcctgtcttccaccgtgacccttgaacactcttcactccctcctggggtccacatttcttacgaatcccagtgtgagggtcctgagaagagggagggtaaggctgaggatcgaggacagtgcaaccacgtccgaatcaaccagacggtgactttctgggtttctctccaagccacccactgcctcccagagccccatctcctgaggctccgggcccttggcttctcagaggagctgattgtggagttgcacacgctgtgtgactgtaattgcagtgacacccagccccaggctccccactgcagtgatggccagggacacctacaatgtggtgtatgcagctgtgcccctggccgcctaggtcggctctgtgagtgctctgtggcagagctgtcctccccagacctggaatctgggtgccgggctcccaatggcacagggcccctgtgcagtggaaagggtcactgtcaatgtggacgctgcagctgcagtggacagagctctgggcatctgtgcgagtgtgacgatgccagctgtgagcgacatgagggcatcctctgcggaggctttggtcgctgccaatgtggagtatgtcactgtcatgccaaccgcacgggcagagcatgcgaatgcagtggggacatggacagttgcatcagtcccgagggagggctctgcagtgggcatggacgctgcaaatgcaaccgctgccagtgcttggacggctactatggtgctctatgcgaccaatgcccaggctgcaagacaccatgcgagagacaccgggactgtgcagagtgtggggccttcaggactggcccactggccaccaactgcagtacagcttgtgcccataccaatgtgaccctggccttggcccctatcttggatgatggctggtgcaaagagcggaccctggacaaccagctgttcttcttcttggtggaggatgacgccagaggcacggtcgtgctcagagtgagaccccaagaaaagggagcagaccac

SEQ ID NO: 3837 - DNA, 1191 bp, Homo Sapiens
gaagacaatagatgtgcatcttcaaatgcagcatcctgtgccaggtgccttgcgctgggtccagaatgtggatggtgtgttcaagaggatttcatttcaggtggatcaagaagtgaacgttgtgatattgtttccaatttaataagcaaaggctgctcagttgattcaatagaatacccatctgtgcatgttataatacccactgaaaatgaaattaatacccaggtgacaccaggagaagtgtctatccagctgcgtccaggagccgaagctaattttatgctgaaagttcatcctctgaagaaatatcctgtggatctttattatcttgttgatgtctcagcatcaatgcacaataatatagaaaaattaaattccgttggaaacgatttatctagaaaaatggcatttttctcccgtgactttcgtcttggatttggctcatacgttgataaaacagtttcaccatacattagcatccaccccgaaaggattcataatcaatgcagtgactacaatttagactgcatgcctccccatggatacatccatgtgctgtctttgacagagaacatcactgagtttgagaaagcagttcatagacagaagatctctggaaacatagatacaccagaaggaggttttgacgccatgcttcaggcagctgtctgtgaaagtcatatcggatggcgaaaagaggctaaaagattgctgctggtgatgacagatcagacgtctcatctcgctcttgatagcaaattggcaggcatagtggtgcccaatgacggaaactgtcatctgaaaaacaacgtctatgtcaaatcgacaaccatggaacacccctcactaggccaactttcagagaaattaatagacaacaacattaatgtcatctttgcagttcaaggaaaacaatttcattggtataaggatcttctacccctcttgccaggcaccattgctggtgaaatagaatcaaaggctgcaaacctcaataatttggtagtggaagcctatcagaagctcatttcagaagtgaaagttcaggtggaaaaccaggtacaaggcatctattttaacattaccgccatctgtccagatgggtccagaaagccaggcatggaaggatgcagaaacgtgacgagcaatgatgaagtatgtgggtgtgcatttttcccttttaaaataaac

SEQ ID NO: 3838 - DNA, 1413 bp, Homo Sapiens
gttcctcaaagcttctcgccatctctgaggagctggccgggcgccgcctgcaggctgtcccgggccgagtcggagcgacgctgccgcgcacctgggcagcccccgggggccgcgctgtgccacggccggggccgctgcgactgcggcgtctgcatctgccacgtgactgagccgggcatgttcttcgggcccctgtgtgagtgccatgagtgggtgtgcgagacctacgacgggagcacctgtgcaggccatggtaagtgtgactgtggcaagtgcaagtgtgaccagggatggtatggggatgcttgccagtacccaactaactgtgacttgacaaagaagaaaagtaaccaaatgtgcaagaattcacaagacatcatctgctctaatgcaggtacatgtcactgtggcaggtgtaagtgtgataattcagatggaagtggacttgtgtatggtaaattttgtgagtgtgacgatagagaatgcatagacgatgaaacagaagaaatatgtggaggccatgggaagtgttactgtggaaactgctactgcaaggctggttggcatggagataaatgtgaattccagtgcgatatcaccccctgggaaagcaagcgaagatgcacgtctccagatggcaaaatctgcagtaacagagggacttgtgtatgtggtgaatgtacctgtcacgatgttgatccgactggggactggggagatattcatggggacacctgtgaatgtgatgagagggactgtagagctgtctatgaccgatattctgatgacttctgttcaggtcatggacagtgtaattgcggaagatgtgactgcaaagcaggctggtatgggaagaagtgtgagcacccacagtcctgcacgctgtcagctgaggagagcatcaggaagtgccagggaagctcggatctgccttgctctgggaggggtaaatgtgaatgtggcaaatgcacctgctatcctccaggagatcgccgggtgtatggcaagacttgtgagtgtgatgatcgccgctgtgaagacctcgatggtgtggtctgtggaggccacggcacatgttcctgtggtcgctgtgtttgtgagagaggatggtttggaaagctctgccaacatccgcggaagtgtaacatgacggaagaacaaagcaagaatctgtgtgaatcagcagatggcatattgtgctcggggaagggttcttgtcattgtgggaagtgcatttgttctgctgaagagtggtatatttctggggagttctgtgactgtgatgacagagactgcgacaaacatgatggtctcatttgtacagggaatggaatatgtagctgtggaaactgtgaatgctgggatggatggaatggaaatgcatgtgaaatctggcttggctcagaatatcct

SEQ ID NO: 3839 - DNA, 813 bp, Homo Sapiens
tgtgttatatgtgacccgtctgtcgtgctggcgctaaagtccctggagaaagattacctgcctggccacctggatgcgaagcatcacaaagccatgatggaaagggtagagaatgccgtgaaggatttccaggaactgtcgcttaatgaggatgcctatatgggggtcgttgatgaggccacactgcaaaaggggtcctggagtttgctgaaggatctgaaacgcatcacagacagtgatgtaaaaggcgatctctttgtgaaggagctattttggatgttgcacttgcaaaaggaaacctttgccacctatgttgctcgattccaaaaagaggcttattgtcccaacaaatgtggtgtgatgttgcaaactctgatctggtgcaagaactgcaaaaaggaggttcacgcttgtcgaaagtcctacgattgcggggagcggaatgtggaagttcctcaaatggaagacatgatcctggactgtgagttaaactggcatcaggcttcggaaggcctcactgattacagcttttacagggtttgggggaacaatacggagaccttggtgtccaaggggaaagaggccaccctgaccaagcccatggtgggtccagaggatgcaggcagctaccgctgcgagctgggctctgtgaattccagcccagccacgatcatcaattttcacgtcacagtgttgcccaaaatgatcaaggaggaaaaaccttctccaaatatcgtaaccccgggggaggcgaccacggagtcgtccataagcctccagcctctgcagcccgagaaaatgctggcaagccgc

SEQ ID NO: 3840 - DNA, 3102 bp, Homo Sapiens
cagttcgagttggagatcctgtccatgcagaacgtgaacggggagctgcagaacgggaactgctgcggcggcgcccggaacccgggagaccgcaagtgcacccgcgacgagtgtgacacatacttcaaagtgtgcctcaaggagtatcagtcccgcgtcacggccggggggccctgcagcttcggctcagggtccacgcctgtcatcgggggcaacaccttcaacctcaaggccagccgcggcaacgaccgcaaccgcatcgtgctgcctttcagtttcgcctggccgaggtcctatacgttgcttgtggaggcgtgggattccagtaatgacaccgttcaacctgacagtattattgaaaaggcttctcactcgggcatgatcaaccccagccggcagtggcagacgctgaagcagaacacgggcgttgcccactttgagtatcagatccgcgtgacctgtgatgactactactatggctttggctgcaataagttctgccgccccagagatgacttctttggacactatgcctgtgaccagaatggcaacaaaacttgcatggaaggctggatgggccccgaatgtaacagagctatttgccgacaaggctgcagtcctaagcatgggtcttgcaaactcccaggtgactgcaggtgccagtatggctggcaaggcctgtactgtgataagtgcatcccacacccgggatgcgtccacggcatctgtaatgagccctggcagtgcctctgtgagaccaactggggcggccagctctgtgacaaagatctcaattactgtgggactcatcagccgtgtctcaacgggggaacttgtagcaacacaggccctgacaaatatcagtgttcctgccctgaggggtattcaggacccaactgtgaaattgctgagcacgcctgcctctctgatccctgtcacaacagaggcagctgtaaggagacctccctgggctttgagtgtgagtgttccccaggctggaccggccccacatgctctacaaacattgatgactgttctcctaataactgttcccacgggggcacctgccaggacctggttaacggatttaagtgtgtgtgccccccacagtggactgggaaaacgtgccagttagatgcaaatgaatgtgaggccaaaccttgtgtaaacgccaaatcctgtaagaatctcattgccagctactactgcgactgtcttcccggctggatgggtcagaattgtgacataaatattaatgactgccttggccagtgtcagaatgacgcctcctgtcgggatttggttaatggttatcgctgtatctgtccacctggctatgcaggcgatcactgtgagagagacatcgatgaatgtgccagcaacccctgtttgaatgggggtcactgtcagaatgaaatcaacagattccagtgtctgtgtcccactggtttctctggaaacctctgtcagctggacatcgattattgtgagcctaatccctgccagaacggtgcccagtgctacaaccgtgccagtgactatttctgcaagtgccccgaggactatgagggcaagaactgctcacacctgaaagaccactgccgcacgaccccctgtgaagtgattgacagctgcacagtggccatggcttccaacgacacacctgaaggggtgcggtatatttcctccaacgtctgtggtcctcacgggaagtgcaagagtcagtcgggaggcaaattcacctgtgactgtaacaaaggcttcacgggaacatactgccatgaaaatattaatgactgtgagagcaacccttgtagaaacggtggcacttgcatcgatggtgtcaactcctacaagtgcatctgtagtgacggctgggagggggcctactgtgaaaccaatattaatgactgcagccagaacccctgccacaatgggggcacgtgtcgcgacctggtcaatgacttctactgtgactgtaaaaatgggtggaaaggaaagacctgccactcacgtgacagtcagtgtgatgaggccacgtgcaacaacggtggcacctgctatgatgagggggatgcttttaagtgcatgtgtcctggcggctgggaaggaacaacctgtaacatagcccgaaacagtagctgcctgcccaacccctgccataatgggggcacatgtgtggtcaacggcgagtcctttacgtgcgtctgcaaggaaggctgggaggggcccatctgtgctcagaataccaatgactgcagccctcatccctgttacaacagcggcacctgtgtggatggagacaactggtaccggtgcgaatgtgccccgggttttgctgggcccgactgcagaataaacatcaatgaatgccagtcttcaccttgtgcctttggagcgacctgtgtggatgagatcaatggctaccggtgtgtctgccctccagggcacagtggtgccaagtgccaggaagtttcagggagaccttgcatcaccatggggagtgtgataccagatggggccaaatgggatgatgactgtaatacctgccagtgcctgaatggacggatcgcctgctcaaaggtctggtgtggccctcgaccttgcctgctccacaaagggcacagcgagtgccccagcgggcagagctgcatccccatcctggacgaccagtgcttcgtccacccctgcactggtgtgggcgagtgtcggtcttccagtctccagccggtgaagacaaagtgcacctctgactcctattaccaggataactgtgcgaacatcacatttacctttaacaaggagatgatgtcaccaggtcttactacggagcacatttgcagtgaattgaggaatttgaatattttgaagaatgtttccgctgaatattcaatctacatcgcttgcgagccttccccttcagcgaacaatgaaatacatgtggccatttctgctgaagatatacgggatgatgggaacccgatcaaggaaatcactgacaaaataatcgatcttgttagtaaacgtgatggaaacagctcgctgattgctgccgttgcagaagtaagagttcagaggcggcctctgaagaacagaacagat

SEQ ID NO: 3841 - DNA, 957 bp, Homo Sapiens
atgggctatttcgagctgcagctgagcgcgctgcggaacgtgaacggggagctgctgagcggcgcctgctgtgacggcgacggccggacaacgcgcgcggggggctgcggccacgacgagtgcgacacgtacgtgcgcgtgtgccttaaggagtaccaggccaaggtgacgcccacggggccctgcagctacggccacggcgccacgcccgtgctgggcggcaactccttctacctgccgccggcgggcgctgcgggggaccgagcgcgggcgcgggcccgggccggcggcgaccaggacccgggcctcgtcgtcatccccttccagttcgcctggccgcgctcctttaccctcatcgtggaggcctgggactgggacaacgataccaccccgaatgaggagctgctgatcgagcgagtgtcgcatgccggcatgatcaacccggaggaccgctggaagagcctgcacttcagcggccacgtggcgcacctggagctgcagatccgcgtgcgctgcgacgagaactactacagcgccacttgcaacaagttctgccggccccgcaacgactttttcggccactacacctgcgaccagtacggcaacaaggcctgcatggacggctggatgggcaaggagtgcaaggaagctgtgtgtaaacaagggtgtaatttgctccacgggggatgcaccgtgcctggggagtgcaggtgcagctacggctggcaagggaggttctgcgatgagtgtgtcccctaccccggctgcgtgcatggcagttgtgtggagccctggcagtgcaactgtgagaccaactggggcggcctgctctgtgacaaagacctgaactactgtggcagccaccacccctgcaccaacggaggcacgtgcatcaacgccgagcctgaccagtaccgctgcacctgccctgacggctactcgggcaggaactgtgag

SEQ ID NO: 3842 - DNA, 630 bp, Homo Sapiens
ttttctgccccaaaagaccaacaagtagtcacagcagtagagtaccaagaggctattttagcctgcaaaaccccaaagaagactgtttcctccagattagagtggaagaaactgggtcggagtgtctcctttgtctactatcaacagactcttcaaggtgattttaaaaatcgagctgagatgatagatttcaatatccggatcaaaaatgtgacaagaagtgatgcggggaaatatcgttgtgaagttagtgccccatctgagcaaggccaaaacctggaagaggatacagtcactctggaagtattagtggctccagcagttccatcatgtgaagtaccctcttctgctctgagtggaactgtggtagagctacgatgtcaagacaaagaagggaatccagctcctgaatacacatggtttaaggatggcatccgtttgctagaaaatcccagacttggctcccaaagcaccaacagctcatacacaatgaatacaaaaactggaactctgcaatttaatactgtttccaaactggacactggagaatattcctgtgaagcccgcaattctgttggatatcgcaggtgtcctgggaaacgaatgcaagtagatgatctcaacataagt

SEQ ID NO: 3843 - DNA, 630 bp, Homo Sapiens
gtaaatctcaaatccagcaatcgaaccccagtggtacaggaatttgaaagtgtggaactgtcttgcatcattacggattcgcagacaagtgaccccaggatcgagtggaagaaaattcaagatgaacaaaccacatatgtgttttttgacaacaaaattcagggagacttggcgggtcgtgcagaaatactggggaagacatccctgaagatctggaatgtgacacggagagactcagccctttatcgctgtgaggtcgttgctcgaaatgaccgcaaggaaattgatgagattgtgatcgagttaactgtgcaagtgaagccagtgacccctgtctgtagagtgccgaaggctgtaccagtaggcaagatggcaacactgcactgccaggagagtgagggccacccccggcctcactacagctggtatcgcaatgatgtaccactgcccacggattccagagccaatcccagatttcgcaattcttctttccacttaaactctgaaacaggcactttggtgttcactgctgttcacaaggacgactctgggcagtactactgcattgcttccaatgacgcaggctcagccaggtgtgaggagcaggagatggaagtctatgacctgaac

SEQ ID NO: 3844 - DNA, 411 bp, Homo Sapiens
caagaagatgaaaggattgttcttgttgacaacaaatgtaagtgtgcccggattacttccaggatcatccgttcttccgaagatcctaatgaggacattgtggagagaaacatccgaattattgttcctctgaacaacagggagaatatctctgatcccacctcaccattgagaaccagatttgtgtaccatttgtctgacctctgtaaaaaatgtgatcctacagaagtggagctggataatcagatagttactgctacccagagcaatatctgtgatgaagacagtgctacagagacctgctacacttatgacagaaacaagtgctacacagctgtggtcccactcgtatatggtggtgagaccaaaatggtggaaacagccttaaccccagatgcctgctatcctgac

SEQ ID NO: 3845 - DNA, 1968 bp, Homo Sapiens
gccggccccggcgcggctgctgcgcggcggctggacgagtcgctgtctgccgggagcgtccagcgcgctcgctgcgcctccaggtgcctgagcctgcagatcactcgcatctccgccttcttccagcacttccagaacaatggttccctggtttggtgccagaatcacaagcaatgttctaagtgcctggagccctgcaaggaatcaggggacctgaggaaacaccagtgccaaagcttttgtgagcctctcttccccaagaagagctacgaatgcttgaccagctgtgagttcctcaaatacatcctgttggtgaagcagggggactgtccggctcctgagaaagccagtggatttgcggccgcctgtgttgaaagctgcgaagttgacaatgagtgctctggggtgaagaaatgttgttcgaatgggtgtggacacacctgtcaagtacccaagactctgtacaaaggtgtccccctgaagcccagaaaagagttacgatttacagaactgcagtctggacagctggaggttaagtggtcctcgaaattcaatatttctattgagcctgtgatctatgtggtacaaagaagatggaattatggaatccatcctagcgaagatgacgccactcactggcagacagtggcccagaccacagacgagcgagttcaactgactgacataagacccagccgatggtaccagtttcgagtggctgctgtgaatgtgcatggaactcgaggcttcactgcccccagcaaacacttccgttcttccaaagatccatctgccccaccagcaccggctaacctccggctggccaactccaccgtcaacagtgatgggagtgtgaccgtcactatagtttgggatctccccgaggagccggacatccctgtgcatcattacaaggtcttttggagctggatggtcagcagtaagtctcttgtcccaacaaagaagaagcggagaaagactacggatgggtttcaaaattctgtgatcctggagaaactccagccagactgtgactatgttgtggaattgcaagccataacgtactggggacagacacggctgaagagtgcaaaggtgtcccttcacttcacatcgacacatgcaaccaacaacaaagaacagcttgtgaaaactagaaaaggtggaattcaaacacaactcccttttcaaagacgacgacccactcgcccgctggaagtcggagctcccttctatcaggatggccaactgcaagttaaagtctactggaagaagacagaagatcccactgtcaaccgatatcatgtgcggtggtttcctgaagcgtgtgcccacaacagaacaaccggatcagaggcatcatctggcatgacccacgaaaattacataattcttcaagatctgtcattttcctgcaagtataaggtgactgtccaaccaatacggccaaaaagtcactccaaggcagaagctgttttcttcactactccaccatgctctgctcttaaggggaagagccacaagcctattggctgcctgggcgaagcaggtcatgttctttctaaggtgctagctaagcctgagaacctttctgcttcattcatcgtccaggatgtgaacatcaccggtcacttttcttggaagatggccaaggccaatctctatcagcccatgactgggtttcaagtgacttgggctgaggtcactacggaaagcagacagaacagcctacccaacagcattatttcacagtcccagattctgccttccgatcattatgtcctaacagtgcccaatctgagaccatctactctttaccgactggaagtgcaagtgctgaccccaggaggggaggggccggccaccatcaagacgttccggacgccggagctcccaccctcttcagcacacagatctcatcttaagcatcgtcatccacatcattacaagccttctccagaaagatac

SEQ ID NO: 3846 - DNA, 822 bp, Homo Sapiens
aggccatccccaggcccagattacctgcggcgcggctggatgcggctgctagcggagggcgagggctgcgctccctgccggccagaagagtgcgccgcgccgcggggctgcctggcgggcagggtgcgcgacgcgtgcggctgctgctgggaatgcgccaacctcgagggccagctctgcgacctggaccccagtgctcacttctacgggcactgcggcgagcagcttgagtgccggctggacacaggcggcgacctgagccgcggagaggtgccggaacctctgtgtgcctgtcgttcgcagagtccgctctgcgggtccgacggtcacacctactcccagatctgccgcctgcaggaggcggcccgcgctcggcccgatgccaacctcactgtggcacacccggggccctgcgaatcggggccccagatcgtgtcacatccatatgacacttggaatgtgacagggcaggatgtgatctttggctgtgaagtgtttgcctaccccatggcctccatcgagtggaggaaggatggcttggacatccagctgccaggggatgacccccacatctctgtgcagtttaggggtggaccccagaggtttgaggtgactggctggctgcagatccaggctgtgcgtcccagtgatgagggcacttaccgctgccttggccgcaatgccctgggtcaagtggaggcccctgctagcttgacagtgctcacacctgaccagctgaactctacaggcatcccccagctgcgatcactaaacctggttcctgaggaggaggctgagagtgaagagaatgacgattactac

SEQ ID NO: 3847 - DNA, 1449 bp, Homo Sapiens
gagaccggcggagaaaggcagctgagcccggagaagagcgaaatatggggacccgggctaaaagcagacgtcgtccttcccgcccgctatttctatattcaggcagtggatacatcagggaataaattcacatcttctccaggcgaaaaggtcttccaggtgaaagtctcagcaccagaggagcaattcactagagttggagtccaggttttagaccgaaaagatgggtccttcatagtaagatacagaatgtatgcaagctacaaaaatctgaaggtggaagttaaattccaagggcaacatgtggccaaatccccatatattttaaaagggccggtttaccatgagaactgtgactgtcctctgcaagatagtgcagcctggctacgggagatgaactgccctgaaaccattgctcagattcagagagatctggcacatttccctgctgtggatccagaaaagattgcagtagaaatcccaaaaagatttggacagaggcagagcctatgtcactacaccttaaaggataacaaggtttatatcaagactcatggtgaacatgtaggttttagaattttcatggatgccatactactttctttgactagaaaggtgaagatgccagatgtggagctctttgttaatttgggagactggcctttggaaaaaaagaaatccaattcaaacatccatccgatcttttcctggtgtggctccacagattccaaggatatcgtgatgcctacgtacgatttgactgattctgttctggaaaccatgggccgggtaagtctggatatgatgtccgtgcaagctaacacgggtcctccctgggaaagcaaaaattccactgccgtctggagagggcgagacagccgcaaagagagactcgagctggttaaactcagtagaaaacacccagaactcatagacgctgctttcaccaactttttcttctttaaacacgatgaaaacctgtatggtcccattgtgaaacatatttcattttttgatttcttcaagcataagtatcaaataaatatcgatggcactgtagcagcttatcgcctgccatatttgctagttggtgacagtgttgtgctgaagcaggattccatctactatgaacatttttacaatgagctgcagccctggaaacactacattccagttaagagcaacctgagcgatctgctagaaaaacttaaatgggcgaaagatcacgatgaagaggccaaaaagatagcaaaagcaggacaagaatttgcaagaaataatctcatgggcgatgacatattctgttattatttcaaacttttccaggaatatgccaatttacaagtgagtgagccccaaatccgagagggcatgaaaagggtagaaccacagactgaggacgacctcttcccttgtacttgccataggaaaaagaccaaagatgaactc

SEQ ID NO: 3848 - DNA, 1461 bp, Homo Sapiens
ggggccccggaggtgctggtcagcgcgccgcggagcctggtgtgggggcccgggctgcaggcggccgtcgtcctgccggtccgctatttctacctgcaggcggtcaactcggagggccagaacctcactcgctctcccgcaggtgaaacaccattcaaagtcgtagtcaaatctctttcacctaaagagttggtccggatacatgtccctaaacctttggacaggaatgatggaacatttttgatgagatataggatgtatgaaactgtcgatgaaggcctgaagatagaggtcctttatggtgatgaacatgtggctcagtctccctatattttgaaaggaccagtgtaccatgagtactgtgagtgtccggaagatcctcaggcctggcagaagactctttcttgtccaaccaaggaaccacagattgcaaaagattttgcttcctttcccagcatcaatctccagcaaatgctaaaagaagtccccaaaaggtttggggatgagagaggtgccattgttcattacacgattctcaataaccatgtttaccggagatctttagggaaatacacagacttcaagatgttctctgatgagattttgttatcattgacaagaaaggtccttctcccagatttagaattttatgttaatcttggagattggcccttggagcatcgaaaagtcaatggaacccctagccccatacctatcatttcatggtgtggctctctggattcaagagatgttgtccttccaacgtatgacatcacccactccatgcttgaagccatgcggggtgttacaaatgatctcctctctattcagggaaatacagggccttcctggatcaataaaacagagagagctttcttcagaggtagagacagcctagaggagaggctccagttggtacagctgtccaaagaaaatcctcagctactagatgcaggaattacaggatatttctttttccaagagaaagaaaaggagcttggaaaagccaagttgatgggtttctttgatttctttaagtacaagtatcaagtaaatgtggatgggaccgtggctgcttacagatatccatatctcatgctgggcgacagtctggttttaaagcaggactcgccatattatgaacatttctacatggcactagaaccttggaagcattatgttccaattaaaagaaatctgagtgatttattagagaaagttaaatgggctaaggaaaatgatgaagaagccaagaagattgcaaaagaaggacagttgatggctagggacctactacagccacacaggctttactgctactattaccaagtactgcagaaatatgccgagcgccagtccagcaaacccgaagtacgtgatggaatggaacttgttcctcagccagaagatagcacagccatctgccagtgccacaggaaaaagccttcaagagaagaactt

SEQ ID NO: 3849 - DNA, 2235 bp, Homo Sapiens
gcctctgtgggtttgcctagtgtttctcttgatctgcccaggctcagcatacaaaaagacatacttacaattaaggctaatacaactcttcaaattacttgcaggggacagagggacttggactggctttggcccaataatcagagtggcagtgagcaaagggtggaggtgactgagtgcagcgatggcctcttctgtaagacactcacaattccaaaagtgatcggaaatgacactggagcctacaagtgcttctaccgggaaactgacttggcctcggtcatttatgtctatgttcaagattacagatctccatttattgcttctgttagtgaccaacatggagtcgtgtacattactgagaacaaaaacaaaactgtggtgattccatgtctcgggtccatttcaaatctcaacgtgtcactttgtgcaagatacccagaaaagagatttgttcctgatggtaacagaatttcctgggacagcaagaagggctttactattcccagctacatgatcagctatgctggcatggtcttctgtgaagcaaaaattaatgatgaaagttaccagtctattatgtacatagttgtcgttgtagggtataggatttatgatgtggttctgagtccgtctcatggaattgaactatctgttggagaaaagcttgtcttaaattgtacagcaagaactgaactaaatgtggggattgacttcaactgggaatacccttcttcgaagcatcagcataagaaacttgtaaaccgagacctaaaaacccagtctgggagtgagatgaagaaatttttgagcaccttaactatagatggtataacccggagtgaccaaggattgtacacctgtgcagcatccagtgggctgatgaccaagaagaacagcacatttgtcagggtccatgaaaaaccttttgttgcttttggaagtggcatggaatctctggtggaagccacggtgggggagcgtgtcagaatccctgcgaagtaccttggttacccacccccagaaataaaatggtataaaaatggaataccccttgagtccaatcacacaattaaagcggggcatgtactgacgattatggaagtgagtgaaagagacacaggaaattacactgtcatccttaccaatcccatttcaaaggagaagcagagccatgtggtctctctggttgtgtatgtcccaccccagattggtgagaaatctctaatctctcctgtggattcctaccagtacggcaccactcaaacgctgacatgtacggtctatgccattcctcccccgcatcacatccactggtattggcagttggaggaagagtgcgccaacgagcccagccatgctgtctcagtgacaaacccatacccttgtgaagaatggagaagtgtggaggacttccagggaggaaataaaattgaagttaataaaaatcaatttgctctaattgaaggaaaaaacaaaactgtaagtacccttgttatccaagcggcaaatgtgtcagctttgtacaaatgtgaagcggtcaacaaagtcgggagaggagagagggtgatctccttccacgtgaccaggggtcctgaaattactttgcaacctgacatgcagcccactgagcaggagagcgtgtctttgtggtgcactgcagacagatctacgtttgagaacctcacatggtacaagcttggcccacagcctctgccaatccatgtgggagagttgcccacacctgtttgcaagaacttggatactctttggaaattgaatgccaccatgttctctaatagcacaaatgacattttgatcatggagcttaagaatgcatccttgcaggaccaaggagactatgtctgccttgctcaagacaggaagaccaagaaaagacattgcgtggtcaggcagctcacagtcctagagcgtgtggcacccacgatcacaggaaacctggagaatcagacgacaagtattggggaaagcatcgaagtctcatgcacggcatctgggaatccccctccacagatcatgtggtttaaagataatgagacccttgtagaagactcaggcattgtattgaaggatgggaaccggaacctcactatccgcagagtgaggaaggaggacgaaggcctctacacctgccaggcatgcagtgttcttggctgtgcaaaagtggaggcatttttcataatagaaggtgcccaggaaaagacgaacttggaa

SEQ ID NO: 3850 - DNA, 996 bp, Homo Sapiens
agaagtgtaaggcaggtctatgaagtacatgattcagatgattggactattcatgacttcgagtgtcccatggaatgtttctgcccacccagttttcctactgctttatattgtgaaaatagaggtctcaaagaaattcctgctattccttcaagaatttggtatctttatcttcaaaacaacctgatagaaaccattcctgaaaagccatttgagaatgccacccagctaagatggataaatctaaacaagaacaaaataaccaactacggaattgaaaaaggagccctaagccagctgaagaagttgctcttcttatttctggaagataatgagctagaggaggtaccttctccattgccaagaagtttagaacaattacaattagctagaaataaggtgtccagaattcctcaagggacctttagcaatctggagaacctgacccttcttgacctacagaacaacaaattagtggacaatgcctttcaaagagacacttttaaaggactcaagaatctcatgcagctaaacatggccaagaatgccctgaggaatatgcctccaagattaccagccaatacaatgcagttgtttttagacaacaattccattgaaggaataccagaaaattattttaatgtgattcctaaagtggcctttttgagactaaatcacaacaaactgtcagatgagggtctcccatcaagaggatttgatgtatcatcaattctagatcttcaactgtcgcacaatcaactcacaaaggttccccgaatcagtgctcatctgcagcaccttcaccttgatcataacaaaattaaaagtgtgaatgtctctgtaatatgtcccagcccatccatgctgcctgcagaacgagattccttcagttatggacctcatcttcgctacctccgtctggatggaaatgaaatcaaaccaccaattccaatggctttaatgacctgcttcagacttctgcaggctgtcattatt

SEQ ID NO: 3851 - DNA, 2805 bp, Homo Sapiens
gcccgtaagcagtgcagcgaggggaggacatattccaatgcagtcatttcacctaacttggaaaccaccagaatcatgcgggtgtctcacaccttccctgtcgtagactgcacggccgcttgctgtgacctgtccagctgtgacctggcctggtggttcgagggccgctgctacctggtgagctgcccccacaaagagaactgtgagcccaagaagatgggccccatcaggtcttatctcacttttgtgctccggcctgttcagaggcctgcacagctgctggactatggggacatgatgctgaacaggggctccccctcggggatctggggggactcacctgaggatatcagaaaggacttgccctttctaggcaaagattggggcctagaggagatgtctgagtactcagatgactaccgggagctggagaaggacctcttgcaacccagtggcaagcaggagcccagagggagtgccgagtacacggactggggcctactgccgggcagcgagggggccttcaactcctctgttggagacagtcctgcggtgccagcggagacgcagcaggaccctgagctccattacctgaatgagtcggcttcaacccctgccccaaaactccctgagagaagtgtgttgcttcccttgccgactactccatcttcaggagaggtgttggagaaagaaaaggcttctcagctccaggaacaatccagcaacagctctggaaaagaggttctaatgccttcccatagtcttcctccggcaagcctggagctcagctcagtcaccgtggagaaaagcccagtgctcacagtcaccccggggagtacagagcacagcatcccaacacctcccactagcgcagccccctctgagtccaccccatctgagctacccatatctcctaccactgctcccaggacagtgaaagaacttacggtatcggctggagataacctaattataactttacccgacaatgaagttgaactgaaggcctttgttgcgccagcgccacctgtagaaacaacctacaactatgaatggaatttaataagccaccccacagactaccaaggtgaaataaaacaaggacacaagcaaactcttaacctctctcaattgtccgtcggactttatgtcttcaaagtcactgtttctagtgaaaacgcctttggagaaggatttgtcaatgtcactgttaagcctgccagaagagtcaacctgccacctgtagcagttgtttctccccaactgcaagagctcactttgcctttgacgtcagccctcattgatggcagccaaagtacagatgatactgaaatagtgagttatcattgggaagaaataaacgggcccttcatagaagagaagacttcagttgactctcccgtcttacgcttgtctaaccttgatcctggtaactatagtttcaggttgactgttacagactcggacggagccactaactctacaactgcagccctaatagtgaacaatgctgtggactacccaccagttgctaatgcaggaccaaatcacaccataactttgccccaaaactccatcactttgaatggaaaccagagcagtgacgatcaccagattgtcctctatgagtggtccctgggtcctgggagtgagggcaaacatgtggtcatgcagggagtacagacgccataccttcatttatctgcaatgcaggaaggagattatacatttcagctgaaggtgacagattcttcaaggcaacagtctactgctgtggtgactgtgattgtccagcctgaaaacaatagacctccagtggctgtggccggccctgataaagagctgatcttcccagtggaaagtgctaccctggatgggagcagcagcagcgatgaccacggcattgtcttctaccactgggagcacgtcagaggccccagtgcagtggagatggaaaatattgacaaagcaatagccactgtgactggtctccaggtggggacctaccacttccgtttgacagtgaaagaccagcagggactgagcagcacgtccaccctcactgtggctgtgaagaaggaaaataatagtcctcccagagcccgggctggtggcagacatgttcttgtgcttcccaataattccattactttggatggttcaaggtctactgatgaccaaagaattgtgtcctatctgtggatccgggatggccagagtccagcagctggagatgtcatcgatggctctgaccacagtgtggctctgcagcttacgaatctggtggagggggtgtacactttccacttgcgagtcaccgacagtcagggggcctcggacacagacactgccactgtggaagtgcagccagaccctaggaagagtggcctggtggagctgaccctgcaggttggtgttgggcagctgacagagcagcggaaggacacccttgtgaggcagctggctgtgctgctgaacgtgctggactcggacattaaggtccagaagattcgggcccactcggatctcagcaccgtgattgtgttttatgtacagagcaggccgcctttcaaggttctcaaagctgctgaagtggcccgaaatctgcacatgcggctctcaaaggagaaggctgacttcttgcttttcaaggtcttgagggttgatacagcaggttgccttctgaagtgttctggccatggtcactgcgaccccctcacaaagcgctgcatttgctctcacttatggatggagaaccttatacagcgttatatctgggatggagagagcaactgtgagtggagt

SEQ ID NO: 3852 - DNA, 2646 bp, Homo Sapiens
gagagcaggtgccagcaggggaagacacaatttggagttggcctgagatctgggggagaaaatcacctctggcttcttgaaggaaccccctctctccagtcatgtttggctgcctgctgccaggactctgcctgccatgtcttttggtggctagaagggatgtgcattcaggcagactgcagcaggccccagagctgccgggcttttaggacacactcctccaattccatgctggtgtttttaaaaaaattccaaactgcagatgatttgggctttctacctgaagatgatgtaccacatcttctggggctaggttggaactgggcatcttggaggcagagcccacccagagctgcactcagacctgctgtatcttccagtgaccagcagagcttaatcaggaagcttcagaagagaggtagtcccagtgacgtagttacacctatagtgacacagcattctaaagtgaatgactccaacgaattaggtggtctgactaccagtggctctgcagaggtccacaaggcgattacaatttccagtcccctaaccacagacctgactgcagagctgtctggtgggccaaagaatgtatcagtgcaacctgaaatatcagagggtcttgctactacgcccagcactcaacaagtaaaaagttctgagaaaacccagattgctgtcccccagccagtggctccctcctacagttatgctacccctaccccccaggcctctttccagagcacctcagcaccatacccagttataaaggaactggtggtatctgctggagagagtgtccagataaccctgcctaagaatgaagttcaattaaatgcatatgttctccaagaaccacctaaaggagaaacctacacctacgactggcagctgattactcatcctagagactacagtggagaaatggaagggaaacattcccagatcctcaaactatcgaagctcactccaggcctgtatgaattcaaagtgattgtagagggtcaaaatgcccatggggaaggctatgtgaacgtgacagtcaagccagagccccgtaagaatcggccccccattgctattgtgtcacctcagttccaggagatctctttgccaaccacttctacagtcattgatggcagtcaaagcactgatgatgataaaatcgttcagtaccattgggaagaacttaaggggcctctaagagaagagaagatttctgaagatacagccatattaaaactaagtaaactcgtccctgggaactacactttcagcttgactgtagtagactctgatggagctaccaactctactactgcaaacctgacagtgaacaaagctgtggattacccccctgtggccaacgcaggccccaaccaagtgatcaccctgccccaaaactccatcaccctctttgggaaccagagcactgatgatcatggcatcaccagctatgagtggtcactcagcccaagcagcaaagggaaagtggtggagatgcagggtgttagaacaccaaccttacagctctctgcgatgcaagaaggagactacacttaccagctcacagtgactgacacaataggacagcaggccactgctcaagtgactgttattgtgcaacctgaaaacaataagcctcctcaggcagatgcaggcccagataaagagctgacccttcctgtggatagcacaaccctggatggcagcaagagctcagatgatcagaaaattatctcatatctctgggaaaaaacacagggacctgatggggtgcagctcgagaatgctaacagcagtgttgctactgtgactgggctgcaagtggggacctatgtgttcaccttgactgtcaaagatgagaggaacctgcaaagccagagctctgtgaatgtcattgtcaaagaagaaataaacaaaccacctatagccaagataactgggaatgtggtgattaccctacccacgagcacagcagagctggatggctctaagtcctcagatgacaagggaatagtcagctacctctggactcgagatgaggggagcccagcagcaggggaggtgttaaatcactctgaccatcaccctatcctttttctttcaaacctggttgagggaacctacacttttcacctgaaagtgaccgatgcaaagggtgagagtgacacagaccggaccactgtggaggtgaaacctgatcccaggaaaaacaacctggtggagatcatcttggatatcaacgtcagtcagctaactgagaggctgaaggggatgttcatccgccagattggggtcctcctgggggtgctggattccgacatcattgtgcaaaagattcagccgtacacggagcagagcaccaaaatggtattttttgttcaaaacgagcctccccaccagatcttcaaaggccatgaggtggcagcgatgctcaagagtgagctgcggaagcaaaaggcagactttttgatattcagagccttggaagtcaacactgtcacatgtcagctgaactgttccgaccatggccactgtgactcgttcaccaaacgctgtatctgtgaccctttttggatggagaatttcatcaaggtgcagctgagggatggagacagcaactgtgagtggagcgtgttatat

SEQ ID NO: 3853 - DNA, 672 bp, Homo Sapiens
catgagggagtccacagaaaaccttccctcctggcccacccaggtcgcctggtgaaatcagaagagacagtcatcctgcaatgttggtcagatgtcaggtttgagcacttccttctgcacagagaagggaagtttaaggacactttgcacctcattggagagcaccatgatggggtctccaaagccaacttctccatcggtcccatgatgcaagaccttgcagggacctacagatgctacggttctgttactcactccccctatcagttgtcagctcccagtgaccctctggacatcgtcatcacaggtctatatgagaaaccttctctctcagcccagccgggccccacggttctggcaggagagagcgtgaccttgtcctgcagctcccggagctcctatgacatgtaccatctatccagggagggggaggcccatgaatgtaggttctctgcagggcccaaggtcaacggaacattccaggccgactttcctctgggccctgccacccacggaggaacctacagatgcttcggctctttccgtgactctccatacgagtggtcaaactcgagtgacccactgcttgtttctgtcacaggaaacccttcaaatagttggccttcacccactgaaccaagctctaaaaccggtaacccccgacacctgcac

SEQ ID NO: 3854 - DNA, 672 bp, Homo Sapiens
catgagggagtccacagaaaaccttccctcctggcccacccaggtcccctggtgaaatcagaagagacagtcatcctgcaatgttggtcagatgtcaggtttcagcacttccttctgcacagagaagggaagtttaaggacactttgcacctcattggagagcaccatgatggggtctccaaggccaacttctccatcggtcccatgatgcaagaccttgcagggacctacagatgctacggttctgttactcactccccctatcagttgtcagctcccagtgaccctctggacatcgtcatcacaggtctatatgagaaaccttctctctcagcccagccgggccccacggttctggcaggagagagcgtgaccttgtcctgcagctcccggagctcctatgacatgtaccatctatccagggagggggaggcccatgaacgtaggttctctgcagggcccaaggtcaacggaacattccaggccgactttcctctgggccctgccacccacggaggaacctacagatgcttcggctctttccgtgactctccatacgagtggtcaaactcgagtgacccactgcttgtttctgtcacaggaaacccttcaaatagttggctttcacccactgaaccaagctccgaaaccggtaaccccagacacctgcat

SEQ ID NO: 3855 - DNA, 672 bp, Homo Sapiens; identical to SEQ ID NO: 3854

SEQ ID NO: 3856 - DNA, 663 bp, Homo Sapiens
tgggcacacgtgggtggtcaggacaagcccttctgctctgcctggcccagcgctgtggtgcctcaaggaggacacgtgactcttcggtgtcactatcgtcgtgggtttaacatcttcacgctgtacaagaaagatggggtccctgtccctgagctctacaacagaatattctggaacagtttcctcattagccctgtgaccccagcacacgcagggacctacagatgtcgaggttttcacccgcactcccccactgagtggtcggcacccagcaaccccctggtgatcatggtcacaggtctatatgagaaaccttcgcttacagcccggccgggccccacggttcgcacaggagagaacgtgaccttgtcctgcagctcccagagctcctttgacatctaccatctatccagggagggggaagcccatgaacttaggctccctgcagtgcccagcatcaatggaacattccaggccgacttccctctgggtcctgccacccacggagagacctacagatgcttcggctctttccatggatctccctacgagtggtcagacgcgagtgacccactgcctgtttctgtcacaggaaacccttctagtagttggccttcacccactgaaccaagcttcaaaactggtatcgccagacacctgcat

SEQ ID NO: 3857 - DNA, 651 bp, Homo Sapiens
catgagggtggacaagacaaaccgctgctttccgcgtggcccagtgcggtcgttccacgtggtggccatgtgacgttgctgtgtaggagccgtctgggattcacaatcttttctctttacaaagaagatggggttccagtcccggaactttataacaaaatcttctggaagtcaatattgatggggcctgtgactcctgcacatgctgggacgtataggtgtagggggtctcatccccgtagcccgatcgagtggagtgcgccctctaaccctctggtaatagtcgtcacgggcctgttcggcaaaccgtccctgtctgcacagcctggccctaccgtaaggactggagaaaatgttgcacttagctgttcatcccgttccagcttcgatatgtaccatttgtctcgtgaaggacgtgcccatgaaccaagactacccgctgttccttcagtcgatggaaccttccaggcggacttcccacttggccccgctacgcacggaggcacatatacttgcttcagtagcctacacgacagcccgtacgaatggagtgacccttcagacccattactggtctccgtgacggggaactcttcctcctcatccagtagcccgaccgagcccagttccaaaacgggcattagaaggcac

SEQ ID NO: 3858 - DNA, 651 bp, Homo Sapiens
catgagggtggacaggacaagcccttgctgtctgcctggcccagcgctgtggtgcctcgaggaggacatgtgactcttctgtgtcgctctcgtcttgggtttaccatcttcagtctgtacaaagaagatggggtgcctgtccctgagctctacaacaaaatattctggaagagcatcctcatgggccctgtgacccctgcacacgcagggacctacagatgtcggggttcacacccgcgctcccccattgagtggtcggcacccagcaaccccctggtgatcgtggtcacaggtctatttgggaaaccttcactctcagcccagccgggccccacggttcgcacaggagagaacgtggccttgtcctgcagctccaggagctcatttgacatgtaccatctatccagggaggggagggcccatgaacctaggctccctgcagtgcccagcgtcgatggaacattccaggctgactttcctctgggccctgccacccacggagggacctacacatgcttcagctctctccatgactcaccctatgagtggtcagacccgagtgacccactgcttgtttctgtcacaggaaactcttcaagtagttcatcttcacccactgaaccaagctccaaaactggtatccgcagacac

SEQ ID NO: 3859 - DNA, 672 bp, Homo Sapiens
catgagggagtccacagaaaaccttccctcctggcccacccaggtcccctggtgaaatcagaagagacagtcatcctgcaatgttggtcagatgtcaggtttgagcacttccttctgcacagagaggggaagtataaggacactttgcacctcattggagagcaccatgatggggtctccaaggccaacttctccatcggtcccatgatgcaagaccttgcagggacctacagatgctacggttctgttactcactccccctatcagttgtcagctcccagtgaccctctggacatcgtcatcacaggtctatatgagaaaccttctctctcagcccagccgggccccacggttttggcaggagagagcgtgaccttgtcctgcagctcccggagctcctatgacatgtaccatctatccagggagggggaggcccatgaacgtaggttctctgcagggcccaaggtcaacggaacattccaggccgactttcctctgggccctgccacccacggaggaacctacagatgcttcggctctttccgtgactctccctatgagtggtcaaactcgagtgacccactgcttgtttctgtcacaggaaacccttcaaatagttggccttcacccactgaaccaagctccaaaaccggtaaccccagacacctgcat

SEQ ID NO: 3860 - DNA, 672 bp, Homo Sapiens
cacgaggggtttaggaggaagccatcattattagcccaccctggcaggctagtaaaatcagaggaaacggtgattcttcaatgttggagtgacgttatgtttgaacacttcttattacatagagaagggacgttcaacgatacattaagattgataggagagcacatagacggtgtctccaaagccaacttctcaattgggcgtatgagacaggatttggccggtacctatcgttgttatggcagtgttcctcactccccctaccaattcagcgccccgagcgatccccttgatatagtaatcacaggattatatgagaaacccagtttgtcagcccaaccggggccgaccgttttggcgggcgagtcagtcactttatcatgtagttcctggagctcctatgacatgtatcacctgtccactgaaggtgaagcacatgaaagacgtttttctgccggtcccaaagtgaatgggacatttcaggctgactttccattaggacccgcaacccaagggggaacctacaggtgctttggtagtttccatgattccccctatgagtggtcaaagtcatccgatcccctgttggttagcgttactgggaacccctcaaactcatggccctctcccactgagccgtcctccaaaaccggcaacccgaggcacttacac

SEQ ID NO: 3861 - DNA, 672 bp, Homo Sapiens
caggagggagtccacagaaaaccttccttcctggccctcccaggtcacctggtgaaatcagaagagacagtcatcctgcaatgttggtcggatgtcatgtttgagcacttccttctgcacagagaggggaagtttaacaacactttgcacctcattggagagcaccatgatggggtttccaaggccaacttctccattggtcccatgatgcctgtccttgcaggaacctacagatgctacggttctgttcctcactccccctatcagttgtcagctcccagtgaccctctggacatggtgatcataggtctatatgagaaaccttctctctcagcccagccgggccccacggttcaggcaggagagaatgtgaccttgtcctgcagctcccggagctcctatgacatgtaccatctatccagggaaggggaggcccatgaacgtaggctccctgcagtgcgcagcatcaacggaacattccaggccgactttcctctgggccctgccacccacggagggacctacagatgcttcggctctttccgtgacgctccctacgagtggtcaaactcgagtgatccactgcttgtttccgtcacaggaaacccttcaaatagttggccttcacccactgaaccaagctccaaaaccggtaaccccagacacctacat

SEQ ID NO: 3862 - DNA, 672 bp, Homo Sapiens; identical to SEQ ID NO: 3861

SEQ ID NO: 3863 - DNA, 672 bp, Homo Sapiens
catgagggttttagacgtaaaccgtctctgctagcgcatccaggcccactagttaaaagcgaagagacggtgattttacagtgctggagtgatgttatgtttgaacatttccttcttcacagggagggtacatttaaccacaccttaagacttattggtgagcacatagacggtgtgagcaaaggcaactttagtataggacgtatgacacaagacctagcaggcacatataggtgctatgggtctgtcactcattctccgtaccagctttccgcccccagtgaccccttagacatcgtgattaccggcctgtacgagaagccctcattgccagcacagcccggtccaacagtcttagccggcgagtctgtcacgctgtcttgcagcagcagaagttcctacgatatgtatcatctatcaagagaaggtgaggcccatgagagaaggctaccagcgggaccaaaagtcaacagaactttccaggctgactccccgctagacccggcaacgcacggtggggcgtataggtgctttgggagcttcagagattccccctatgaatggtccaagagttctgatccgcttttagtcagtgtaactggtaatagtagtaactcttggcccagtccgacggaaccttctagcgagacgggaaaccccaggcatttacac

SEQ ID NO: 3864 - DNA, 957 bp, Homo Sapiens
cacatgggtggtcaggacaagcccttcctgtctgcctggcccagcgctgtggtgcctcgcggaggacacgtgactcttcggtgtcactatcgtcataggtttaacaatttcatgctatacaaagaagacagaatccacgttcccatcttccatggcagaatattccaggagggcttcaacatgagccctgtgaccacagcacatgcagggaactacacatgtcggggttcacacccacactcccccactgggtggtcggcacccagcaaccccatggtgatcatggtcacaggaaaccacagaaaaccttccctcctggcccacccaggtcccctggtgaaatcaggagagagagtcatcctgcaatgttggtcagatatcatgtttgagcacttctttctgcacaaagaggggatctctaaggacccctcacgcctcgttggacagatccatgatggggtctccaaggccaatttctccatcggtcccatgatgcttgcccttgcagggacctacagatgctacggttctgttactcacaccccctatcagttgtcagctcccagtgatcccctggacatcgtggtcacaggtccatatgagaaaccttctctctcagcccagccgggccccaaggttcaggcaggagagagcgtgaccttgtcctgtagctcccggagctcctatgacatgtaccatctatccagggaggggggagcccatgaacgtaggctccctgcagtgcgcaaggtcaacagaacattccaggcagatttccctctgggccctgccacccacggagggacctacagatgcttcggctctttccgtcactctccctacgagtggtcagacccgagtgacccactgcttgtttctgtcacaggaaacccttcaagtagttggccttcacccacagaaccaagctccaaatctggtaaccccagacacctgcac

SEQ ID NO: 3865 - DNA, 957 bp, Homo Sapiens
ctcatgggtggtcaggacaaacccttcctgtctgcccggcccagcactgtggtgcctcgaggaggacacgtggctcttcagtgtcactatcgtcgtgggtttaacaatttcatgctgtacaaagaagacagaagccacgttcccatcttccacggcagaatattccaggagagcttcatcatgggccctgtgaccccagcacatgcagggacctacagatgtcggggttcacgcccacactccctcactgggtggtcggcacccagcaaccccctggtgatcatggtcacaggaaaccacagaaaaccttccctcctggcccacccagggcccctgctgaaatcaggagagacagtcatcctgcaatgttggtcagatgtcatgtttgagcacttctttctgcacagagaggggatctctgaggacccctcacgcctcgttggacagatccatgatggggtctccaaggccaacttctccatcggtcccttgatgcctgtccttgcaggaacctacagatgttatggttctgttcctcactccccctatcagttgtcagctcccagtgaccccctggacatcgtgatcacaggtctatatgagaaaccttctctctcagcccagccgggccccacggttcaggcaggagagaacgtgaccttgtcctgtagctcctggagctcctatgacatctaccatctgtccagggaaggggaggcccatgaacgtaggctccgtgcagtgcccaaggtcaacagaacattccaggcagactttcctctgggccctgccacccacggagggacctacagatgcttcggctctttccgtgccctgccctgcgtgtggtcaaactcaagtgacccactgcttgtttctgtcacaggaaacccttcaagtagttggccttcacccacagaaccaagctccaaatctggtatctgcagacacctgcat

SEQ ID NO: 3866 - DNA, 891 bp, Homo Sapiens
caggacaagcccttcctctctgcctggcccggcactgtggtgtctgaaggacaacatgtgactcttcagtgtcgctctcatcttgggtttaacgaattcagtctgtccaaagaagacgggatgcctgtccctgagctctacaacagaatattccggaacagctttctcatgggccctgtgaccccagcacatgcagggacctacagatgttgcagttcacacccacactcccccactgggtggtcggcacccagcaaccctgtggtgatcatggtcacaggagtccacagaaaaccttccctcctggcccacccaggtcccctggtgaaatcgggagagacggtcatcctgcaatgttggtcagatgtcaggtttgagcgcttccttctgcacagagaggggatcactgaggaccccttgcgcctcgttggacagctccacgatgcgggttcccaggtcaactattccatgggtcccatgacacctgcccttgcagggacctacagatgctttggttctgtcactcacttaccctatgagttgtcggctcccagtgaccctctggacatcgtggtcgtaggtctatatgggaaaccttctctctcagcccagccgggccccacggttcaggcaggagagaatgtgaccttgtcctgcagctcccggagcttgtttgacatttaccatctatccagggaggcagaggccggtgaacttaggctcactgcggtgctgagggtcaatggaacattccaggccaacttccctctgggccctgtgacccacggagggaactacagatgcttcggctctttccgtgccctgccccacgcgtggtcagacccgagtgacccactgcccgtttctgtcacaggtaactccagatacctg

SEQ ID NO: 3867 - DNA, 921 bp, Homo Sapiens
cacgaaggggggcaggacaagccctttctgtcagcctggccgtctcctgttgtgtccgagggggagcatgtggccctacagtgcagatccaggttaggttttaacgaattttctctgtctaaggaagacggtatgcctgtgccggaactatacaaccgtgtattccgtaacactgtttttattggtcccgtgaccccagcacacgctggcacttaccgttgtagaggctcacatccgcatttccttactggctggtccgcaccttccaaccccttggtgataatggtaaccggcgtccaccgtaaaccgagtctactggcgcatcccggacccctagttaagagtgaagagactgtgatccttcaatgttggagcgacgtgatgtttgaacacttcctgctgcatagggagggaaaattcaacgacacgttgaggttaacgggggagcttcacgacggggtctcaaaggcgaacttctccatcggcagaatgacccaagacttagccggaacctatcgttgctatgggtctgtcccccactctccatatcagctatctgcgcctagtgatcccctggacatagttattacggggctatgtggcaagccaagtctgtccgcgcagccaaggcccatggttaaagcaggggaatcagtaacattatcatgctctagtcgtagctcatacgatatctatcacctaagcagggagggggaggctcatgagttgagattcccagccgtcccaaaagttaacggtactttccaagcgaatttcccactaggaccggctacccatgggggcacataccgttgttttggcagctttagagactccccctatgagtggtccgatttatcagacccccttcttgtgagcgtaacagactctatgaaggaaaaaggtaaggatgtcatcttg

SEQ ID NO: 3868 - DNA, 957 bp, Homo Sapiens
cacatgggtggtcaggacaagcccttcctgtctgcctggcccagcgctgtggtgcctcgcggaggacacgtgactcttcggtgtcactatcgtcataggtttaacaatttcatgctatacaaagaagacagaatccacgttcccatcttccatggcagaatattccaggagggcttcaacatgagccctgtgaccacagcacatgcagggaactacacatgtcggggttcacacccacactcccccactgggtggtcggcacccagcaaccccatggtgatcatggtcacaggaaaccacagaaaaccttccctcctggcccacccaggtcccctggtgaaatcaggagagagagtcatcctgcaatgttggtcagatatcatgtttgagcacttctttctgcacaaagagtggatctctaaggacccctcacgcctcgttggacagatccatgatggggtctccaaggccaatttctccatcggttccatgatgcgtgcccttgcagggacctacagatgctacggttctgttactcacaccccctatcagttgtcagctcccagtgatcccctggacatcgtggtcacaggtctatatgagaaaccttctctctcagcccagccgggccccaaggttcaggcaggagagagcgtgaccttgtcctgtagctcccggagctcctatgacatgtaccatctatccagggaggggggagcccatgaacgtaggctccctgcagtgcgcaaggtcaacagaacattccaggcagatttccctctgggccctgccacccacggagggacctacagatgcttcggctctttccgtcactctccctacgagtggtcagacccgagtgacccactgcttgtttctgtcacaggaaacccttcaagtagttggccttcacccacagaaccaagctccaaatctggtaacctcagacacctgcac

SEQ ID NO: 3869 - DNA, 1008 bp, Homo Sapiens
caaaagatttgtccgcacgcaggagcacaagataagtttagcttgtccgcttggccatctccagtggtgcccttgggaggtagggttaccctaagctgccactctcatttaaggttcgtgatatggaccatctttcaaactaccgggacacgttctcacgagctgcatactggcttgagtaacaatataacgatatccccggtgacgcccgaacatgcgggaacatatagatgtgtcgggatttacaaacacgcctcaaaatggagtgccgaaagtaactcattaaagattatcgttaccggattgttcacaaaaccctccatatcagcacatccgtcttctctagttcacgcgggtgctagggtatcattaagatgtcactccgagcttgcttttgacgagttcattttgtataaagaagggcacatccaacactcccagcagctggatcagggaatggaagctggcatccattatgtggaggcggtcttctcaatgggtcctgtaacaccagcccatgctggtgcgtaccgttgctgcgggtgtttcagtcacagtcgttacgagtggtcagccccgtccgatccattggatatcgtgataactggtaaatataaaaagccttctctaagtacgcaggtcgaccctatgatgcgtcttggggaaaagctaactttattctgcagctctgagatcagcttcgatcagtatcatttatttaggcatggcgttgcacatgggcaatggctgagtggtggacaaagacatagggaagcattccaggctaacttcagtgtggggagagctacaccagtgcccggagggacatacaggtgttacggatcatttaatgattccccttacaaacctccagtgacgaggtgcaacttcacgcctcaagagacgttaagagtactgctttgtcatagccaaaatccacccctaaatctaacacacttagcattaaaggactcacctgctacttgtatatgtagtttggactctcag

SEQ ID NO: 3870 - DNA, 1449 bp, Homo Sapiens
caagggacccagacccgcttcagccaggagccagctgaccagacggtggtggctggacagcgggccgtgctcccctgtgtgctgctcaactactctggaattgtgcaatggaccaaggacgggctggccctgggcatgggccagggcctcaaagcctggccacggtaccgggttgtgggctccgcagacgctgggcagtacaacctggagatcacagatgctgagctctctgacgacgcctcttacgagtgccaggccacggaggccgccctgcgctctcggcgggccaaactcaccgtgctcatccccccagaggacaccaggattgacggaggccctgtgattctactgcaggcaggcaccccccacaacctcacatgccgggccttcaatgcgaagcctgctgccaccatcatctggttccgggacgggacgcagcaggagggcgctgtggccagcacggaattgctgaaggatgggaagagggagaccaccgtgagccaactgcttattaaccccacggacctggacatagggcgtgtcttcacttgccgaagcatgaacgaagccatccctagtggcaaggagacttccatcgagctggatgtgcaccaccctcctacagtgaccctgtccattgagccacagacggtgcaggagggtgagcgtgttgtctttacctgccaggccacagccaaccccgagatcttgggctacaggtgggccaaagggggtttcttgattgaagacgcccacgagagtcgctatgagacaaatgtggattattcctttttcacggagcctgtgtcttgtgaggttcacaacaaagtgggaagcaccaatgtcagcactttagtaaatgtccactttgctccccggattgtagttgaccccaaacccacaaccacagacattggctctgatgtgacccttacctgtgtctgggttgggaatccccccctcactctcacctggaccaaaaaggactcaaatatggtcctgagtaacagcaaccagctgctgctgaagtcggtgactcaggcagacgctggcacctacacctgccgggccatcgtgcctcgaatcggagtggctgagcgggaggtgccgctctatgtgaacgggccccccatcatctccagtgaggcagtgcagtatgctgtgaggggtgacggtggcaaggtggagtgtttcattgggagcacaccacccccagaccgcatagcatgggcctggaaggagaacttcttggaggtggggaccctggaacgctatacagtggagaggaccaactcaggcagtggggtgctatccacgctcaccatcaacaatgtcatggaggccgactttcagactcactacaactgcaccgcctggaacagcttcgggccaggcacagccatcatccagctggaagagcgagaggtgttacctgtgggcatcatagct

SEQ ID NO: 3871 - DNA, 1410 bp, Homo Sapiens
ggcccgtcgccccatttcctgcaacagccagaggacctggtggtgctgctgggggaggaagcccggctgccgtgtgctctgggcgcctactgggggctagttcagtggactaagagtgggctggccctagggggccaaagggacctaccagggtggtcccggtactggatatcagggaatgcagccaatggccagcatgacctccacattaggcccgtggagctagaggatgaagcatcatatgaatgtcaggctacacaagcaggcctccgctccagaccagcccaactgcacgtgctggtccccccagaagccccccaggtgctgggcggcccctctgtgtctctggttgctggagttcctgcgaacctgacatgtcggagccgtggggatgcccgccctacccctgaattgctgtggttccgagatggggtcctgttggatggagccaccttccatcagaccctgctgaaggaagggacccctgggtcagtggagagcaccttaaccctgcccacaggaagagacacagctatcacactgagcctgcagtaccccccagaggtgactctgtctgcttcgccacacactgtgcaggagggagagaaggtcattttcctgtgccaggccacagcccagcctcctgtcacaggctacaggtgggcaaaagggggctctccggtgctcggggcccgcgggccaaggttagaggtcgtggcagacgcctcgttcctgactgagcccgtgtcctgcgaggtcagcaacgccgtgggtagcgccaaccgcagtactgcgctggatgtgctgtttgggccgattctgcaggcaaagccggagcccgtgtccgtggacgtgggggaagacgcttccttcagctgcgcctggcgcgggaacccgcttccacgggtaacctggacccgccgcggtggcgcgcaggtgctgggctctggagccacactgcgtcttccgtcggtggggcccgaggacgcaggcgactatgtgtgcagagctgaggctgggctatcgggcctgcggggcggcgccgcggaggctcggctgactgtgaacgctcccccagtagtgaccgccctgcactctgcgcctgccttcctgaggggccctgctcgcctccagtgtctggttttcgcctctcccgccccagatgccgtggtctggtcttgggatgagggcttcctggaggcggggtcgcagggccggttcctggtggagacattccctgccccagagagccgcgggggactgggtccgggcctgatctctgtgctacacatttcggggacccaggagtctgactttagcaggagctttaactgcagtgcccggaaccggctgggcgagggaggtgcccaggccagcctgggccgtagagacttgctgcccactgtgcgg

SEQ ID NO: 3872 - DNA, 1542 bp, Homo Sapiens
ctccagaagagaggatgctgtctggtgctgggctacatggccaaggacaagtttcggagaatgaatgaaggccaagtctattccttcagccagcagccccaggaccaggtggtggtgtcgggacagccagtgacgctactttgcgccatccccgaatacgatggcttcgttctgtggatcaaggacggcttggctctgggtgtgggcagggacctctcaagttacccacagtacctggtggtagggaaccacctgtcaggggagcaccacctgaagatcctgagggcagagctgcaagacgatgcggtgtacgagtgccaggccatccaggccgccatccgctcccgccccgcacgcctcacagtcctggtgccgcctgatgaccccgtcatcctggggggccctgtgatcagcctgcgtgcgggggaccctctcaacctcacctgccacgcagacaatgccaagcctgcagcctccatcatctggttgcgaaagggagaggtcatcaatggggccacctactccaagaccctgcttcgggacggcaagcgggagagcatcgtcagcaccctcttcatctcccctggtgacgtggagaatggccagagcatcgtgtgtcgtgccaccaacaaagccatccccggaggaaaggagacgtcggtcaccattgacatccagcaccctccactggtcaacctctcggtggagccacagccagtgctggaggacaacgtcgtcactttccactgctctgcaaaggccaacccagctgtcacccagtacaggtgggccaagcggggccagatcatcaaggaggcatctggagaggtgtacaggaccacagtggactacacgtacttctcagagcccgtctcctgtgaggtgaccaacgccctgggcagcaccaacctcagccgcacggttgacgtctactttgggccccggatgaccacagaaccccaatccttgctcgtggatctgggctctgatgccatcttcagctgcgcctggaccggcaacccatccctgaccatcgtctggatgaagcggggctccggagtggtcctgagcaatgagaagaccctgaccctcaaatccgtgcgccaggaggacgcgggcaagtacgtgtgccgggctgtggtgccccgtgtgggagccggggagagagaggtgaccctgaccgtcaatggaccccccatcatctccagcacccagacccagcacgccctccacggcgagaagggccagatcaagtgcttcatccggagcacgccgccgccggaccgcatcgcctggtcctggaaggagaacgttctggagtcgggcacatcggggcgctatacggtggagaccatcagcaccgaggagggcgtcatctccaccctgaccatcagcaacatcgtgcgggccgacttccagaccatctacaactgcacggcctggaacagcttcggctccgacactgagatcatccggctcaaggagcaaggttcggaaatgaagtcgggagccgggctggaagcagagtctgtgccgatggcc

SEQ ID NO: 3873 - DNA, 1497 bp, Homo Sapiens
caaccatctgtgagtccaggggaaccgtctccaccatccatccatccaggaaaatcagacttaatagtccgcgtgggcgacgagattaggctgttatgcactgatccgggctttgtcaaatggacttttgagatcctggatgaaacgaatgagaataagcagaatgaatggatcacggaaaaggcagaagccaccaacaccggcaaatacacgtgcaccaacaaacacggcttaagcaattccatttatgtgtttgttagagatcctgccaagcttttccttgttgaccgctccttgtatgggaaagaagacaacgacacgctggtccgctgtcctctcacagacccagaagtgaccaattattccctcaaggggtgccaggggaagcctcttcccaaggacttgaggtttattcctgaccccaaggcgggcatcatgatcaaaagtgtgaaacgcgcctaccatcggctctgtctgcattgttctgtggaccaggagggcaagtcagtgctgtcggaaaaattcatcctgaaagtgaggccagccttcaaagctgtgcctgttgtgtctgtgtccaaagcaagctatcttcttagggaaggggaagaattcacagtgacgtgcacaataaaagatgtgtctagttctgtgtactcaacgtggaaaagagaaaacagtcagactaaactacaggagaaatataatagctggcatcacggtgacttcaattatgaacgtcaggcaacgttgactatcagttcagcgagagttaatgattctggagtgttcatgtgttatgccaataatacttttggatcagcaaatgtcacaacaaccttggaagtagtagataaaggattcattaatatcttccccatgataaacactacagtatttgtaaacgatggagaaaatgtagatttgattgttgaatatgaagcattccccaaacctgaacaccagcagtggatctatatgaacagaaccttcactgataaatgggaagattatcccaagtctgagaatgaaagtaatatcagatacgtaagtgaacttcatctaacgagattaaaaggcaccgaaggaggcacttacacattcctagtgtccaattctgacgtcaatgctgccatagcatttaatgtttatgtgaatacaaaaccagaaatcctgacttacgacaggctcgtgaatggcatgctccaatgtgtggcagcaggattcccagagcccacaatagattggtatttttgtccaggaactgagcagagatgctctgcttctgtactgccagtggatgtgcagacactaaactcatctgggccaccgtttggaaagctagtggttcagagttctatagattctagtgcattcaagcacaatggcacggttgaatgtaaggcttacaacgatgtgggcaagacttctgcctattttaactttgcatttaaaggtaacaacaaagagcaaatccatccccacaccctgttcactcct

SEQ ID NO: 3874 - DNA, 495 bp, Homo Sapiens
gaagggatctgcaggaatcgtgtgactaataatgtaaaagacgtcactaaattggtggcaaatcttccaaaagactacatgataaccctcaaatatgtccccgggatggatgttttgccaagtcattgttggataagcgagatggtagtacaattgtcagacagcttgactgatcttctggacaagttttcaaatatttctgaaggcttgagtaattattccatcatagacaaacttgtgaatatagtggatgaccttgtggagtgcgtgaaagaaaactcatctaaggatctaaaaaaatcattcaagagcccagaacccaggctctttactcctgaagaattctttagaatttttaatagatccattgatgccttcaaggactttgtagtggcatctgaaactagtgattgtgtggtttcttcaacattaagtcctgagaaagattccagagtcagtgtcacaaaaccatttatgttaccccctgttgcagcc

SEQ ID NO: 3875 - DNA, 477 bp, Homo Sapiens
cagaaatcatcaatagaaaaatgcagtgtggacattcaacagagcaggaataaaacaacagagagaccgggtctcttaaactgcccaatatattggcagcaactccgagagaaatgcttgttattttctcacactgtcaacccttggaataacagtctagctgattgttccaccaaagaatccagcctgctgcttattcgagataaggatgaattgatacacacacagaacctgatacgtgacaaagcaattctgttttggattggattaaatttttcattatcagaaaagaactggaagtggataaacggctcttttttaaattctaatgacttagaaattagaggtgatgctaaagaaaacagctgtatttccatctcacagacatctgtgtattctgagtactgtagtacagaaatcagatggatctgccaaaaagaactaacacctgtgagaaataaagtgtatcctgactct

SEQ ID NO: 3876 - DNA, 420 bp, Homo Sapiens
ccctctacattaatacagaggcacaacaattcttccctgaatacaagaactcagaaagcacgtcattgtggccattgtcctgaggagtggattacatattccaacagttgttactacattggtaaggaaagaagaacttgggaagagagtttgctggcctgtacttcgaagaactccagtctgctttctatagataatgaagaagaaatgaaatttctgtccatcatttcaccatcctcatggattggtgtgtttcgtaacagcagtcatcatccatgggtgacaatgaatggtttggctttcaaacatgagataaaagactcagataatgctgaacttaactgtgcagtgctacaagtaaatcgacttaaatcagcccagtgtggatcttcaataatatatcattgtaagcataagctt

SEQ ID NO: 3877 - DNA, 414 bp, Homo Sapiens
attcctttcctggagcagaacaattcttccccgaatacaagaacgcagaaagcacgtcattgtggccattgtcctgaggagtggattacatattccaacagttgttattacattggtaaggaaagaagaacttgggaagagagtttgctggcctgtacttcgaagaactccagtctgctttctatagataatgaagaagaaatgaaatttctggccagcattttaccttcctcatggattggtgtgtttcgtaacagcagtcatcatccatgggtgacaataaatggtttggctttcaaacataagataaaagactcagataatgctgaacttaactgtgcagtgctacaagtaaatcgacttaaatcagcccagtgtggatcttcaatgatatatcattgtaagcataagctt

SEQ ID NO: 3878 - DNA, 441 bp, Homo Sapiens
ataccatttttggagcaaaacaacagctcacccaacgcgagaacgcaaaaggcacgtcattgcggccattgtcctgaagagtggatcacttactccaattcttgctattacattgggaaggagaggaggacgtgggaggagtctttacaggcttgcgccagcaaaaacagtagtagtctattatgtatcgacaacgaagaggagatgaaattcttagcatctatcttaccatccagttggataggcgtgtttagaaacagctcacaccatccctgggtcacaattaatggcctggcattcaaacatgagatcaaggactcagatcatgctgagaggaactgtgctatgctacatgtccgtggtttgatctcagaccagtgcggtagctccaggattattagaagaggtttcattatgctaaccaggttggtactaaattca

SEQ ID NO: 3879 - DNA, 444 bp, Homo Sapiens
aaaaattcttttactaaactgagtattgagccagcatttactccaggacccaacatagaactccagaaagactctgactgctgttcttgccaagaaaaatgggttgggtaccggtgcaactgttacttcatttccagtgaacagaaaacttggaacgaaagtcggcatctctgtgcttctcagaaatccagcctgcttcagcttcaaaacacagatgaactggattttatgagctccagtcaacaattttactggattggactctcttacagtgaggagcacaccgcctggttgtgggagaatggctctgcactctcccagtatctatttccatcatttgaaacttttaatacaaagaactgcatagcgtataatccaaatggaaatgctttagatgaatcctgtgaagataaaaatcgttatatctgtaagcaacagctcatt

SEQ ID NO: 3880 - DNA, 519 bp, Homo Sapiens
ttacttgtcagccaaggagtgcttttgaaatgccaaaaggggagttgcagcaatgctacacaatatgaggacactggtgatctgaaagtaaataacggtacacgtcgtaatatttcaaacaaggatctgtgcgcttctcgttcagcagatcaaaccgtattgtgtcaaagtgagtggctgaagtaccaaggcaaatgttgttattggttctccaacgagatgaagtcttggtctgatagctatgtttattgcttggagcgtaagtcacacttgctaattatacacgaccagttagagatggcctttattcagaagaatcttagacagttgaactacgtctggatagggctaaactttacatctctaaaaatgacctggacgtgggtggacggaagccctatagatagcaagatctttttcatcaagggaccagctaaagaaaatagttgcgcagctatcaaagagtctaaaattttcagcgagacttgtagtagcgtgtttaaatggatatgtcagtat

SEQ ID NO: 3881 - DNA, 468 bp, Homo Sapiens
gaccttaaattttggcataagaagatggatttcagtcaaaatgtcaatgtttcatccttatctggtcacaactacctatgcccaaatgattggcttctaaacgaaggtaagtgttactggttctctaccagcttcaaaacgtggaaagaaagtcaacgtgattgtacccagctacaagcgcacctactagttatccagaatcttgacgaactagagttcattcaaaatagtcttaaacccggccacttcgggtggatcgggttatatgtaacatttcagggcaatttatggatgtggatcgatgaacattttctggtgccggagctgtttagcgttatagggcctacggacgacaggagctgcgcggtcataacgggaaattgggtgtattcagaagactgtagttcaacttttaaggggatttgtcaaagagacgcaatactgacacataatggtacttcaggggtt

SEQ ID NO: 3882 - DNA, 408 bp, Homo Sapiens
ctgtgccagggctccaactactccacttgtgccagctgtcctagctgcccagaccgctggatgaaatatggtaaccattgttattatttctcagtggaggaaaaggactggaattctagtctggaattctgcctagccagagactcacacctccttgtgataacggacaatcaggaaatgagcctgctccaagttttcctcagtgaggccttttgctggattggtctgaggaacaattctggctggaggtgggaagatggatcacctctaaacttctcaaggatttcttctaatagctttgtgcagacatgcggtgccatcaacaaaaatggtcttcaagcctcaagctgtgaagttcctttacactgggtgtgtaagaagtgtccctttgcagatcaagctttattc

SEQ ID NO: 3883 - DNA, 432 bp, Homo Sapiens
atatggagtgctgtattcctaaactcattattcaaccaagaagttcaaattcccttgaccgaaagttactgtggcccatgtcctaaaaactggatatgttacaaaaataactgctaccaattttttgatgagagtaaaaactggtatgagagccaggcttcttgtatgtctcaaaatgccagccttctgaaagtatacagcaaagaggaccaggatttacttaaactggtgaagtcatatcattggatgggactagtacacattccaacaaatggatcttggcagtgggaagatggctccattctctcacccaacctactaacaataattgaaatgcagaagggagactgtgcactctatgcctcgagctttaaaggctatatagaaaactgttcaactccaaatacatacatctgcatgcaaaggactgtg

SEQ ID NO: 3884 - DNA, 612 bp, Homo Sapiens
caggccccgaggcaaaagcaaggaagcactggggaggaattccatttccagactggagggagagattcctgcactatgcgtcccagcagcttggggcaaggtgctggagaagtctggcttcgcgtcgactgccgcaacacagaccagacctactggtgtgagtacagggggcagcccagcatgtgccaggcttttgctgctgaccccaaaccttactggaatcaagccctgcaggagctgaggcgccttcaccatgcgtgccagggggccccggtgcttaggccatccgtgtgcagggaggctggaccccaggcccatatgcagcaggtgacttccagcctcaagggcagcccagagcccaaccagcagcctgaggctgggacgccatctctgaggcccaaggccacagtgaaactcacagaagcaacacagctgggaaaggactcgatggaagagctgggaaaagccaaacccaccacccgacccacagccaaacctacccagcctggacccaggcccggagggaatgaggaagcaaagaagaaggcctgggaacattgttggaaacccttccaggccctgtgcgcctttctcatcagcttcttccgaggg

SEQ ID NO: 3885 - DNA, 3303 bp, Homo Sapiens
atccagatccccgaggaatatgaaggacaccatgtgatggagccacctgtcatcacggaacagtctccacggcgcctggttgtcttccccacagatgacatcagcctcaagtgtgaggccagtggcaagcccgaagtgcagttccgctggacgagggatggtgtccacttcaaacccaaggaagagctgggtgtgaccgtgtaccagtcgccccactctggctccttcaccatcacgggcaacaacagcaactttgctcagaggttccagggcatctaccgctgctttgccagcaataagctgggcaccgccatgtcccatgagatccggctcatggccgagggtgcccccaagtggccaaaggagacagtgaagcccgtggaggtggaggaaggggagtcagtggttctgccttgcaaccctcccccaagtgcagagcctctccggatctactggatgaacagcaagatcttgcacatcaagcaggacgagcgggtgacgatgggccagaacggcaacctctactttgccaatgtgctcacctccgacaaccactcagactacatctgccacgcccacttcccaggcaccaggaccatcattcagaaggaacccattgacctccgggtcaaggccaccaacagcatgattgacaggaagccgcgcctgctcttccccaccaactccagcagccacctggtggccttgcaggggcagccattggtcctggagtgcatcgccgagggctttcccacgcccaccatcaaatggctgcgccccagtggccccatgccagccgaccgtgtcacctaccagaaccacaacaagaccctgcagctgctgaaagtgggcgaggaggatgatggcgagtaccgctgcctggccgagaactcactgggcagtgcccggcatgcgtactatgtcaccgtggaggctgccccgtactggctgcacaagccccagagccatctatatgggccaggagagactgcccgcctggactgccaagtccagggcaggccccaaccagaggtcacctggagaatcaacgggatccctgtggaggagctggccaaagaccagaagtaccggattcagcgtggcgccctgatcctgagcaacgtgcagcccagtgacacaatggtgacccaatgtgaggcccgcaaccggcacgggctcttgctggccaatgcctacatctacgttgtccagctgccagccaagatcctgactgcggacaatcagacgtacatggctgtccagggcagcactgcctaccttctgtgcaaggccttcggagcgcctgtgcccagtgttcagtggctggacgaggatgggacaacagtgcttcaggacgaacgcttcttcccctatgccaatgggaccctgggcattcgagacctccaggccaatgacaccggacgctacttctgcctggctgccaatgaccaaaacaatgttaccatcatggctaacctgaaggttaaagatgcaactcagatcactcaggggccccgcagcacaatcgagaagaaaggttccagggtgaccttcacgtgccaggcctcctttgacccctccttgcagcccagcatcacctggcgtggggacggtcgagacctccaggagcttggggacagtgacaagtacttcatagaggatgggcgcctggtcatccacagcctggactacagcgaccagggcaactacagctgcgtggccagtaccgaactggatgtggtggagagtagggcacagctcttggtggtggggagccctgggccggtgccacggctggtgctgtccgacctgcacctgctgacgcagagccaggtgcgcgtgtcctggagtcctgcagaagaccacaatgcccccattgagaaatatgacattgaatttgaggacaaggaaatggcgcctgaaaaatggtacagtctgggcaaggttccagggaaccagacctctaccaccctcaagctgtcgccctatgtccactacacctttagggttactgccataaacaaatatggccccggggagcccagcccggtctctgagactgtggtcacacctgaggcagccccagagaagaaccctgtggatgtgaagggggaaggaaatgagaccaccaatatggtcatcacgtggaagccgctccggtggatggactggaacgccccccaggttcagtaccgcgtgcagtggcgccctcaggggacacgagggccctggcaggagcagattgtcagcgaccccttcctggtggtgtccaacacgtccaccttcgtgccctatgagatcaaagtccaggccgtcaacagccagggcaagggaccagagccccaggtcactatcggctactctggagaggactacccccaggcaatccctgagctggaaggcattgaaatcctcaactcaagtgccgtgctggtcaagtggcggccggtggacctggcccaggtcaagggccacctccgcggatacaatgtgacgtactggagggagggcagtcagaggaagcacagcaagagacatatccacaaagaccatgtggtggtgcccgccaacaccaccagtgtcatcctcagtggcttgcggccctatagctcctaccacctggaggtgcaggcctttaacgggcgaggatcggggcccgccagcgagttcaccttcagcaccccagagggagtgcctggccaccccgaggcgttgcacctggagtgccagtcgaacaccagcctgctgctgcgctggcagcccccactcagccacaacggcgtgctcaccggctacgtgctctcctaccaccccctggatgaggggggcaaggggcaactgtccttcaaccttcgggaccccgaacttcggacacacaacctgaccgatctcagcccccacctgcggtaccgcttccagcttcaggccaccaccaaagagggccctggtgaagccatcgtacgggaaggaggcactatggccttgtctgggatctcagattttggcaacatctcagccacagcgggtgaaaactacagtgtcgtctcctgggtccccaaggagggccagtgcaacttcaggttccatatcttgttcaaagccttgggagaagagaagggtggggcttccctttcgccacagtatgtcagctacaaccagagctcctacacgcagtgggacctgcagcctgacactgactacgagatccacttgtttaaggagaggatgttccggcaccaaatggctgtgaagaccaatggcacaggccgcgtgaggctccctcctgctggcttcgccactgag

SEQ ID NO: 3886 - DNA, 996 bp, Homo Sapiens
gtcccggtggtgtgggcccaggagggggctcctgcccagctcccctgcagccccacaatccccctccaggatctcagccttctgcgaagagcaggggtcacttggcagcatcagccagacagtggcccgcccgctgccgcccccggccatcccctggcccccggccctcacccggcggcgccctcctcctgggggcccaggccccgccgctacacggtgctgagcgtgggtcccggaggcctgcgcagcgggaggctgcccctgcagccccgcgtccagctggatgagcgcggccggcagcgcggggacttctcgctatggctgcgcccagcccggcgcgcggacgccggcgagtaccgcgccgcggtgcacctcagggaccgcgccctctcctgccgcctccgtctgcgcctgggccaggcctcgatgactgccagccccccaggatctctcagagcctccgactgggtcattttgaactgctccttcagccgccctgaccgcccagcctctgtgcattggttccggaaccggggccagggccgagtccctgtccgggagtccccccatcaccacttagcggaaagcttcctcttcctgccccaagtcagccccatggactctgggccctggggctgcatcctcacctacagagatggcttcaacgtctccatcatgtataacctcactgttctgggtctggagcccccaactcccttgacagtgtacgctggagcaggttccagggtggggctgccctgccgcctgcctgctggtgtggggacccggtctttcctcactgccaagtggactcctcctgggggaggccctgacctcctggtgactggagacaatggcgactttacccttcgactagaggatgtgagccaggcccaggctgggacctacacctgccatatccatctgcaggaacagcagctcaatgccactgtcacattggcaatcatcacaggtcagcctcaggtgggaaaggag

SEQ ID NO: 3887 - DNA, 432 bp, Homo Sapiens
caggaggaagatctgcccagaccctccatctcggctgagccaggcaccgtgatccccctggggagccatgtgactttcgtgtgccggggcccggttggggttcaaacattccgcctggagagggagagtagatccacatacaatgatactgaagatgtgtctcaagctagtccatctgagtcagaggccagattccgcattgactcagtaagtgaaggaaatgccgggccttatcgctgcatctattataagccccctaaatggtctgagcagagtgactacctggagctgctggtgaaagaaacctctggaggcccggactccccggacacagagcccggctcctcagctggacccacgcagaggccgtcggacaacagtcacaatgagcatgcacctgcttcccaaggcctgaaagctgagcatctgtat

SEQ ID NO: 3888 - DNA, 393 bp, Homo Sapiens
caggagggggcccttcccagaccctccatctcggctgagccaggcactgtgatctccccggggagccatgtgactttcatgtgccggggcccggttggggttcaaacattccgcctggagagggaggatagagccaagtacaaagatagttataatgtgtttcgacttggtccatctgagtcagaggccagattccacattgactcagtaagtgaaggaaatgccgggctttatcgctgcctctattataagccccctggatggtctgagcacagtgacttcctggagctgctggtgaaagaaagctctggaggcccggactccccggacacagagcccggctcctcagctgggactgtgccaggcactgaagcctccggatttgatgcacca

SEQ ID NO: 3889 - DNA, 7719 bp, Homo Sapiens
tgcttctgctttggcgtttctgatgtctgcagcagcctctcttggcctgttggtcaggtaaacagtatgtccgggtggctggtcaccgacttgatcagtcccaggaagatcccgtctcagcaagatgcactaggcgggcgccatcaggtcagcatcaacaacaccgcggtcatgcagagactggctcccaagtactactgggcagcccccgaggcctaccttggaaataagctgactgcgtttggcggattcctgaaatacacggtgtcctacgatattccggtagagacggtagacagtaacctcatgtcgcatgctgacgtcatcattaagggaaacggactcactttaagcacacaggctgagggtctgtcattgcagccttatgaagagtacctaaacgtggttagacttgtgcctgaaaacttccaagattttcacagcaaaaggcagattgatcgtgaccagctgatgactgtcattgccaatgtgacacatcttttgatcagagccaactacaattctgcaaaaatggctctttacaggttggagtccgtctctctggacatagccagctctaatgccatcgacctggtggtggctgctgatgtggagcactgtgaatgtccgcaaggctacacagggacctcctgtgagtcgtgcctctctggctattaccgcgtggatggaatactctttggaggaatttgtcaaccctgtgaatgccacggccatgcagctgagtgtaatgttcacggcgtttgcattgcgtgtgcgcacaacaccaccggcgtccactgtgagcagtgcttgcccggcttctacggggagccttcccgagggacacctggggactgccagccctgcgcctgccctctcaccatagcctccaacaatttcagccccacctgccacctcaatgatggagatgaagtggtctgtgactggtgtgccccgggctactcaggagcttggtgtgagagatgcgcagatggttactatggaaacccaacagtgcctggcgaatcttgtgttccctgtgactgcagcggcaacgtggacccctcggaggctggtcactgtgactcagtcaccggggagtgcctgaagtgcctggggaacacagatggcgcccactgtgaaaggtgtgctgacgggttctatggggacgctgtgacagccaagaactgccgcgcctgtgaatgccatgtgaaaggctcccattctgccgtgtgccatcttgagaccgggctctgcgactgcaaaccaaacgtgactggacagcagtgtgaccagtgcttgcatggctattatgggctggactcaggccatggctgccggccctgcaactgcagcgtggcaggctccgtgtcagatggctgcacggatgaaggccagtgtcactgtgtcccaggtgtggcagggaaaaggtgtgacaggtgtgcccatggcttctacgcctaccaggatggtagctgtacaccctgtgactgcccacacactcagaatacctgcgacccagaaactggagagtgtgtctgcccccctcacacacagggtgtgaagtgtgaagaatgtgaggatgggcactggggctacgatgcggaggtggggtgccaggcctgcaattgcagtctcgtggggtcgactcatcatcggtgcgatgtggtcaccggccattgccagtgcaagtcaaaatttggtggccgggcctgcgatcagtgttccttgggttacagagactttcccgactgtgttccctgtgactgtgacctgagggggacgtcgggggacgcctgcaacctggagcagggtctctgcggctgtgtggaggaaaccggggcctgcccttgcaaggaaaatgtctttggccctcagtgcaacgaatgtcgagagggcaccttcgctctccgcgcagacaaccccctgggctgcagcccgtgcttctgctccgggctgtcccacctctgctcagagctggaggactacgtgaggaccccagtaacgctgggctccgatcagcctcttctgcgtgtggtttctcagagtaacttgaggggcacgactgagggggtttactaccaggcccccgacttcctgctggatgccgccaccgtccggcagcacatccgtgcagagccgttttactggcggctgccgcagcagttccaaggagaccagctcatggcctatggtggcaaactgaagtacagcgtggccttctattctttggatggcgtcggcacctccaattttgagcctcaagttctcatcaaaggtggtcggatcagaaagcaagtcatttacatggatgcaccagccccagagaatggagtgagacaggaacaagaagtagcaatgagagagaatttttggaaatattttaactctgtttctgaaaaacctgtcacgcgagaggattttatgtctgtcctcagcgatattgagtacatcctcatcaaggcatcgtatggtcaaggattacagcagagcagaatctcagacatttcaatggaggttggcagaaaggctgaaaagctgcacccagaagaagaggttgcatctcttttagagaattgtgtctgtcctcctggcactgtgggattctcatgtcaggactgcgcccctgggtaccacagagggaagctcccagcagggagtgacaggggaccacgccctctggttgctccttgtgttccctgcagttgcaacaaccacagtgacacctgtgaccccaacaccgggaagtgtctgaactgtggcgataacacagcaggtgaccattgtgatgtgtgtacttctggctactacgggaaggtgactggctcagcaagtgactgtgctctgtgtgcctgtcctcacagccctcctgccagttttagtcccacttgtgtcttggaaggggaccacgatttccgttgtgacgcctgtctcctgggctatgaaggaaaacactgtgaaaggtgctcctcgagctattatgggaaccctcaaacaccaggtggcagttgccagaagtgtgactgcaacccgcacggctctgtccacggtgactgtgaccgcacatctgggcagtgcgtttgcaggctgggggcctcggggctccggtgcgatgagtgtgaaccgaggcacattctgatggaaacagattgtgtttcctgtgatgatgagtgtgtaggtgtgctgctgaatgacttggatgagattggtgatgccgttctttctctgaacctcgctggcattatccctgtcccatatggaattttgtcaaacctggaaaatacaactaaatatctccaggaatctttattaaaagaaaatatgcaaaaggacctgggaaaaattaagcttgaaggtgttgcagaagaaacggacaacctgcaaaagaagctcactaggatgttagcgagtacccaaaaggtgaatagggcaactgagagaatcttcaaggagagtcaagacctggccatagccattgagaggctgcagatgagcatcacagaaattatggaaaagacaactttaaatcagactttggatgaagatttcctactacccaattctactcttcagaacatgcaacagaatggtacatctttgctagaaatcatgcagataagagacttcacacagttgcaccaaaatgccacccttgaactcaaggctgctgaagatttattgtcacaaattcaggaaaattaccagaagccgctggaagaattggaggtattgaaagaagcagcaagccacgtcctttcaaagcacaacaatgaactaaaggcggctgaggcgctcgtgagggaagctgaggcaaagatgcaggaaagcaaccacctgctgctcatggtcaatgctaatctgagagaattcagtgataaaaagctgcatgttcaagaagaacaaaatctgacctcagagctcattgtccaaggaagaggattgatagatgctgctgctgcacaaacagatgctgtacaagatgctctagagcacttagaggatcaccaggataagctacttttatggtctgccaaaatcaggcaccacatagatgacctggtcatgcacatgtcccaaaggaacgcagtcgacctggtctacagagctgaggaccatgccgctgagttccagagactagcagatgttctgtacagtggccttgaaaacatcagaaatgtgtccctgaatgccaccagtgcagcctatgtccattacaacatccagagcctgattgaagaatcggaggaactggccagagatgctcacaggactgtgactgagacgagcctgctctcagaatcccttgtttctaacgggaaagcggccgtgcagcgcagctccagatttctaaaagaaggcaacaacctcagcaggaagcttccaggtattgcattggaactgagtgaattgagaaataagacaaacagatttcaagagaatgctgttgaaattaccaggcaaaccaatgaatcactcttgatacttagagcaattcctaaaggtataagagacaagggagccaaaaccaaagagctggccacgtctgcaagccagagcgcggtgagcacgctgagggacgtggcggggctgagccaggagctgctgaacacatctgccagcctgtccagggtcaacaccacattacgagagacacaccagcttctgcaggactccaccatggccactctgttggctggaagaaaagtcaaagacgtggaaactcaagccaaccttttgtttgatcggttgaagcctttgaagatgttagaggagaatctgagcagaaacctatcagaaattaaactgttgatcagccaggcccgcaaacaagcagcttctattaaagtcgccgtgtctgcagacagagattgcatccgggcctaccagcctcagatttcctctaccaactacaataccttaacactaaatgttaagacacaggaacccgataatcttctcttctacctcggtagcagcaccgcttctgatttccttgcagtggagatgcggcgagggagagtggccttcctgtgggacctgggctccgggtccacacgcttggagtttccagactttcccattgatgacaacagatggcacagtatccatgtagccagatttggaaacattggttcactgagtgtaaaggaaatgagctcaaatcaaaagtcaccaacaaaaacaagtaaatcccctgggacagctaatgttctggatgtaaacaattcaacactcatgtttgttggaggtcttggaggacaaatcaagaaatctcctgctgtgaaggttactcattttaaaggctgcttgggggaggccttcctgaatggaaaatccataggcctatggaactatattgaaagggaaggcaagtgccgtgggtgcttcggaagctcccagaatgaagacccttccttccattttgacgggagtgggtactctgtcgtggagaagtcacttccggctaccgtgacccagataatcatgctttttaataccttttcacctaatggacttcttctctacctgggttcatacggcacaaaagactttttatccatcgagctgtttcgtggcagagtgaaggttatgactgacctgggttcaggacccattacccttttgacagacagacgttataacaatggaacctggtacaaaattgccttccagcgaaaccggaagcaaggagtgctagcagttatcgatgcctataacaccagtaataaagaaaccaagcagggcgagactccgggagcatcttctgacctcaaccgcctagacaaggacccgatttatgtgggtggattaccaaggtcaagagttgtaaggagaggtgtcaccaccaaaagctttgtgggctgcatcaagaacctggaaatatccagatcaacctttgacttactcagaaattcctatggagtgagaaaaggctgtttactggagcccatccggagtgttagcttcctgaaaggcggctacattgaattgccacccaaatctttgtcaccagaatcagaatggctggtaacatttgccaccacgaacagcagtggcatcatcctggctgccctcggcggggatgtggagaagcggggtgatcgtgaggaagcacacgtgcccttcttttccgtcatgctgatcggaggcaacattgaggtacatgtcaatcctggggatgggacaggcctgagaaaagctctcctgcacgctcccacgggtacctgcagtgatggacaagcgcattccatctccttggtcaggaatcggagaattatcactgtccaattggatgagaacaatcctgtggaaatgaagttgggcacattagtagaaagcaggacgataaatgtgtccaatctgtacgtcgggggaattccagagggagaggggacgtcactgctcacaatgagaagatcgttccatggctgtatcaaaaacctgatcttcaatttggaacttttggatttcaacagtgcagttggccatgagcaagtcgacctggacacctgctggctgtcagaaaggcctaagctggctcccgatgcagaggacagcaagctcttgccagagccccgggcttttccagaacagtgtgtggtggatgcagctctggagtacgttcccggcgctcaccagtttggtctcacacaaaacagccatttcatcttgccttttaatcagtcggctgtcagaaagaagctctcggttgagctaagcatccgcacgttcgcctccagcggcctgatttactacatggctcatcagaaccaagcagactacgctgtgctccagctgcacgggggccgcctccacttcatgtttgaccttggcaaaggcagaacaaaggtctctcaccctgcactgctcagtgatggcaagtggcacacggtcaagacagactatgttaaaagaaaaggcttcataactgtcgacggccgagagtctcccatggtgactgtggtgggagatggaaccatgctggatgtggagggtttgttctacctaggaggcctgccctcccagtaccaggccaggaaaattggaaatatcacccacagcatccctgcctgcattggggatgtgacggttaacagcaaacagctggacaaggacagcccggtgtctgccttcacggtgaacaggtgctacgcagtggcccaggaaggaacatactttgacggaagcggatatgcagctcttgtcaaagagggctacaaagtccagtcagatgtgaacatcacactggagtttcgaacctcctcgcagaatggcgtcctcctggggatcagcactgccaaagtggatgccattggactagagcttgtggacggcaaggtcttgttccatgtcaacaatggtgctggcaggataacagctgcatatgagcccaaaaccgccactgtgctctgtgatggaaaatggcacactcttcaagctaacaaaagcaaacaccgtatcactctgattgttgacgggaacgcagttggcgctgaaagtccacacacccagtctacctcagtggacaccaacaatcccatttatgttggtggctatcctgctggtgtgaagcaaaaatgcctgcgcagccagacctcgttccgcgggtgtttgaggaagctagctctgattaagagcccgcaggtgcagtcctttgacttcagcagagcgttcgaactgcacggagttttccttcattcctgtcctgggaccgagtcc

SEQ ID NO: 3890 - DNA, 513 bp, Homo Sapiens
tgtgtttgcaatggccatgctgaagtgtgcaatataaacaatcctgaaaaactgtttcggtgtgaatgccagcaccacacctgtggggagacgtgtgatcgctgctgcacagggtacaatcagaggcgctggcggcccgccgcttgggagcagagccacgagtgtgaagcatgcaactgccacggccatgccagcaactgttactatgatccagatgttgagcggcagcaggcaagcttgaatacccagggcatctatgctggtggaggggtctgcattaactgtcagcacaacacagctggagtaaactgtgaacagtgtgctaagggctattaccgcccttatggggttccagtggatgcccctgatggctgcatcccctgcagctgtgaccctgagcatgcggatggctgtgaacagggttcaggccgctgtcactgcaagccaaatttccacggagacaactgtgagaagtgtgcaattggatactacaatttcccattttgcttgaga

SEQ ID NO: 3891 - DNA, 5295 bp, Homo Sapiens
caggaacccgagttcagctacggctgcgcagaaggcagctgctatcccgccacgggcgaccttctcatcggccgagcacagaagctttcggtgacctcgacgtgcgggctgcacaagcccgaaccctactgtatcgtcagccacttgcaggaggacaaaaaatgcttcatatgcaattcccaagatccttatcatgagaccctgaatcctgacagccatctcattgaaaatgtggtcactacatttgctccaaaccgccttaagatttggtggcaatctgaaaatggtgtggaaaatgtaactatccaactggatttggaagcagaattccattttactcatctcataatgactttcaagacattccgtccagctgctatgctgatagaacgatcgtccgactttgggaaaacctggggtgtgtatagatacttcgcctatgactgtgaggcctcgtttccaggcatttcaactggccccatgaaaaaagtcgatgacataatttgtgattctcgatattctgacattgaaccctcaactgaaggagaggtgatatttcgtgctttagatcctgctttcaaaatagaagatccttatagcccaaggatacagaatttattaaaaattaccaacttgagaatcaagtttgtgaaactgcatactttgggagataaccttctggattccaggatggaaatcagagaaaagtattattatgcagtttatgatatggtggttcgaggaaattgcttctgctatggtcatgccagcgaatgtgcccctgtggatggattcaatgaagaagtggaaggaatggttcacggacactgcatgtgcaggcataacaccaagggcttaaactgtgaactctgcatggatttctaccatgatttaccttggagacctgctgaaggccgaaacagcaacgcctgtaaaaaatgtaactgcaatgaacattccatctcttgtcactttgacatggctgtttacctggccacggggaacgtcagcggaggcgtgtgtgatgactgtcagcacaacaccatggggcgcaactgtgagcagtgcaagccgttttactaccagcacccagagagggacatccgagatcctaatttctgtgaacgatgtacgtgtgacccagctggctctcaaaatgagggaatttgtgacagctatactgatttttctactggtctcattgctggccagtgtcggtgtaaattaaatgtggaaggagaacattgtgatgtttgcaaagaaggcttctatgatttaagcagtgaagatccatttggttgtaaatcttgtgcttgcaatcctctgggaacaattcctggagggaatccttgtgattccgagacaggtcactgctactgcaagcgtctggtgacaggacagcattgtgaccagtgcctgccagagcactggggcttaagcaatgatttggatggatgtcgaccatgtgactgtgaccttgggggagccttaaacaacagttgctttgcggagtcaggccagtgctcatgccggcctcacatgattggacgtcagtgcaacgaagtggaacctggttactactttgccaccctggatcactacctctatgaagcggaggaagccaacttggggcctggggttagcatagtggagcggcaatatatccaggaccggattccctcctggactggagccggcttcgtccgagtgcctgaaggggcttatttggagtttttcattgacaacataccatattccatggagtacgacatcctaattcgctacgagccacagctacccgaccactgggaaaaagctgtcatcacagtgcagcgacctggaaggattccaaccagcagccgatgtggtaataccatccccgatgatgacaaccaggtggtgtcattatcaccaggctcaagatatgtcgtccttcctcggccggtgtgctttgagaagggaacaaactacacggtgaggttggagctgcctcagtacacctcctctgatagcgacgtggagagcccctacacgctgatcgattctcttgttctcatgccatactgtaaatcactggacatcttcaccgtgggaggttcaggagatggggtggtcaccaacagtgcctgggaaacctttcagagataccgatgtctagagaacagcagaagcgttgtgaaaacaccgatgacagatgtttgcagaaacatcatctttagcatttctgccctgttacaccagacaggcctggcttgtgaatgcgaccctcagggttcgttaagttccgtgtgtgatcccaacggaggccagtgccagtgccggcccaacgtggttggaagaacctgcaacagatgtgcacctggaacttttggctttggccccagtggatgcaaaccttgtgagtgccatctgcaaggatctgtcaatgccttctgcaatcccgtcactggccagtgccactgtttccagggagtgtatgctcggcagtgtgatcggtgcttacctgggcactggggctttccaagttgccagccctgccagtgcaatggccacgccgatgactgcgacccagtgactggggagtgcttgaactgccaggactacaccatgggtcataactgtgaaaggtgcttggctggttactatggcgaccccatcattgggtcaggagatcactgccgcccttgcccttgcccagatggtcccgacagtggacgccagtttgccaggagctgctaccaagatcctgttactttacagcttgcctgtgtttgtgatcctggatacattggttccagatgtgacgactgtgcctcaggatactttggcaatccatcagaagttggggggtcgtgtcagccttgccagtgtcacaacaacattgacacgacagacccagaagcctgtgacaaggagactgggaggtgtctcaagtgcctgtaccacacggaaggggaacactgtcagttctgccggtttggatactatggtgatgccctccagcaggactgtcgaaagtgtgtctgtaattacctgggcaccgtgcaagagcactgtaacggctctgactgccagtgcgacaaagccactggtcagtgcttgtgtcttcctaatgtgatcgggcagaactgtgaccgctgtgcgcccaatacctggcagctggccagtggcactggctgtgacccatgcaactgcaatgctgctcattccttcgggccatcttgcaatgagttcacggggcagtgccagtgcatgcctgggtttggaggccgcacctgcagcgagtgccaggaactcttctggggagaccccgacgtggagtgccgagcctgtgactgtgaccccaggggcattgagacgccacagtgtgaccagtccacgggccagtgtgtctgcgttgagggtgttgagggtccacgctgtgacaagtgcacgcgagggtactcgggggtcttccctgactgcacaccctgccaccagtgctttgctctctgggatgtgatcattgccgagctgaccaacaggacacacagattcctggagaaagccaaggccttgaagatcagtggtgtgatcgggccttaccgtgagactgtggactcggtggagaggaaagtcagcgagataaaagacatcctggcgcagagccccgcagcagagccactgaaaaacattgggaatctctttgaggaagcagagaaactgattaaagatgttacagaaatgatggctcaagtagaagtgaaattatctgacacaacttcccaaagcaacagcacagccaaagaactggattctctacagacagaagccgaaagcctagacaacactgtgaaagaacttgctgaacaactggaatttatcaaaaactcagatattcggggtgccttggatagcattaccaagtatttccagatgtctcttgaggcagaggagagggtgaatgcctccaccacagaacccaacagcactgtggagcagtcagccctcatgagagacagagtagaagacgtgatgatggagcgagaatcccagttcaaggaaaaacaagaggagcaggctcgcctccttgatgaactggcaggcaagctacaaagcctagacctttcagccgctgccgaaatgacctgtggaacacccccaggggcctcctgttccgagactgaatgtggcgggccaaactgcagaactgacgaaggagagaggaagtgtggggggcctggctgtggtggtctggttactgttgcacacaacgcctggcagaaagccatggacttggaccaagatgtcctgagtgccctggctgaagtggaacagctctccaagatggtctctgaagcaaaactgagggcagatgaggcaaaacaaagtgctgaagacattctgttgaagacaaatgctaccaaagaaaaaatggacaagagcaatgaggagctgagaaatctaatcaagcaaatcagaaactttttgacccaggatagtgctgatttggacagcattgaagcagttgctaatgaagtattgaaaatggagatgcctagcaccccacagcagttacagaacttgacagaagatatacgtgaacgagttgaaagcctttctcaagtagaggttattcttcagcatagtgctgctgacattgccagagctgagatgttgttagaagaagctaaaagagcaagcaaaagtgcaacagatgttaaagtcactgcagatatggtaaaggaagctctggaagaagcagaaaaggcccaggtcgcagcagagaaggcaattaaacaagcagatgaagacattcaaggaacccagaacctgttaacttcgattgagtctgaaacagcagcttctgaggaaaccttgttcaacgcgtcccagcgcatcagcgagttagagaggaatgtggaagaacttaagcggaaagctgcccaaaactccggggaggcagaatatattgaaaaagtagtatatactgtgaagcaaagtgcagaagatgttaagaagactttagatggtgaacttgatgaaaagtataaaaaagtagaaaatttaattgccaaaaaaactgaagagtcagctgatgccagaaggaaagccgaaatgctacaaaatgaagcaaaaactcttttagctcaagcaaatagcaagctgcaactgctcaaagatttagaaagaaaatatgaagacaatcaaagatacttagaagataaagctcaagaattagcaagactggaaggagaagtccgttcactcctaaaggatataagccagaaagttgctgtgtatagcacatgcttg

SEQ ID NO: 3892 - DNA, 3465 bp, Homo Sapiens
caacaagcctgctcccgtggggcctgctatccacctgttggggacctgcttgttgggaggacccggtttctccgagcttcatctacctgtggactgaccaagcctgagacctactgcacccagtatggcgagtggcagatgaaatgctgcaagtgtgactccaggcagcctcacaactactacagtcaccgagtagagaatgtggcttcatcctccggccccatgcgctggtggcagtcccagaatgatgtgaaccctgtctctctgcagctggacctggacaggagattccagcttcaagaagtcatgatggagttccaggggcccatgcctgccggcatgctgattgagcgctcctcagacttcggtaagacctggcgagtgtaccagtacctggctgccgactgcacctccaccttccctcgggtccgccagggtcggcctcagagctggcaggatgttcggtgccagtccctgcctcagaggcctaatgcacgcctaaatggggggaaggtccaacttaaccttatggatttagtgtctgggattccagcaactcaaagtcaaaaaattcaagaggtgggggagatcacaaacttgagagtcaatttcaccaggctggcccctgtgccccaaaggggctaccaccctcccagcgcctactatgctgtgtcccagctccgtctgcaggggagctgcttctgtcacggccatgctgatcgctgcgcacccaagcctggggcctctgcaggcccctccaccgctgtgcaggtccacgatgtctgtgtctgccagcacaacactgccggcccaaattgtgagcgctgtgcacccttctacaacaaccggccctggagaccggcggagggccaggacgcccatgaatgccaaaggtgcgactgcaatgggcactcagagacatgtcactttgaccccgctgtgtttgccgccagccagggggcatatggaggtgtgtgtgacaattgccgggaccacaccgaaggcaagaactgtgagcggtgtcagctgcactatttccggaaccggcgcccgggagcttccattcaggagacctgcatctcctgcgagtgtgatccggatggggcagtgccaggggctccctgtgacccagtgaccgggcagtgtgtgtgcaaggagcatgtgcagggagagcgctgtgacctatgcaagccgggcttcactggactcacctacgccaacccgcagggctgccaccgctgtgactgcaacatcctggggtcccggagggacatgccgtgtgacgaggagagtgggcgctgcctttgtctgcccaacgtggtgggtcccaaatgtgaccagtgtgctccctaccactggaagctggccagtggccagggctgtgaaccgtgtgcctgcgacccgcacaactccctcagcccacagtgcaaccagttcacagggcagtgcccctgtcgggaaggctttggtggcctgatgtgcagcgctgcagccatccgccagtgtccagaccggacctatggagacgtggccacaggatgccgagcctgtgactgtgatttccggggaacagagggcccgggctgcgacaaggcatcaggccgctgcctctgccgccctggcttgaccgggccccgctgtgaccagtgccagcgaggctactgcaatcgctacccggtgtgcgtggcctgccacccttgcttccagacctatgatgcggacctccgggagcaggccctgcgctttggtagactccgcaatgccaccgccagcctgtggtcagggcctgggctggaggaccgtggcctggcctcccggatcctagatgcaaagagtaagattgagcagatccgagcagttctcagcagccccgcagtcacagagcaggaggtggctcaggtggccagtgccatcctctccctcaggcgaactctccagggcctgcagctggatctgcccctggaggaggagacgttgtcccttccgagagacctggagagtcttgacagaagcttcaatggtctccttactatgtatcagaggaagagggagcagtttgaaaaaataagcagtgctgatccttcaggagccttccggatgctgagcacagcctacgagcagtcagcccaggctgctcagcaggtctccgacagctcgcgccttttggaccagctcagggacagccggagagaggcagagaggctggtgcggcaggcgggaggaggaggaggcaccggcagccccaagcttgtggccctgaggctggagatgtcttcgttgcctgacctgacacccaccttcaacaagctctgtggcaactccaggcagatggcttgcaccccaatatcatgccctggtgagctatgtccccaagacaatggcacagcctgtggctcccgctgcaggggtgtccttcccagggccggtggggccttcttgatggcggggcaggtggctgagcagctgcggggcttcaatgcccagctccagcggaccaggcagatgattagggcagccgaggaatctgcctcacagattcaatccagtgcccagcgcttggagacccaggtgagcgccagccgctcccagatggaggaagatgtcagacgcacacggctcctaatccagcaggtccgggacttcctaacagaccccgacactgatgcagccactatccaggaggtcagcgaggccgtgctggccctgtggctgcccacagactcagctactgttctgcagaagatgaatgagatccaggccattgcagccaggctccccaacgtggacttggtgctgtcccagaccaagcaggacattgcgcgtgcccgccggttgcaggctgaggctgaggaagccaggagccgagcccatgcagtggagggccaggtggaagatgtggttgggaacctgcggcaggggacagtggcactgcaggaagctcaggacaccatgcaaggcaccagccgctcccttcggcttatccaggacagggttgctgaggttcagcaggtactgcggccagcagaaaagctggtgacaagcatgaccaagcagctgggtgacttctggacacggatggaggagctccgccaccaagcccggcagcagggggcagaggcagtccaggcccagcagcttgcggaaggtgccagcgagcaggcattgagtgcccaagagggatttgagagaataaaacaaaagtatgctgagttgaaggaccggttgggtcagagttccatgctgggtgagcagggtgcccggatccagagtgtgaagacagaggcagaggagctgtttggggagaccatggagatgatggacaggatgaaagacatggagttggagctgctgcggggcagccaggccatcatgctgcgctcggcggacctgacaggactggagaagcgtgtggagcagatccgtgaccacatcaatgggcgcgtgctctactatgccacctgcaag

SEQ ID NO: 3893 - DNA, 5226 bp, Homo Sapiens
caagatgactgcaacaggggtgcctgtcatcccaccactggtgatctcctggtgggcaggaacacgcagcttatggcttcttctacctgtgggctgagcagagcccagaaatactgcatcctcagttacctggagggggaacaaaaatgcttcatctgtgactctagatttccatatgatccgtatgaccaacccaacagccacaccattgagaatgtcattgtaagttttgaaccagacagagaaaagaaatggtggcaatctgaaaatggtcttgatcatgtcagcatcagactggacttagaggcattatttcggttcagccaccttatcctgacctttaagacttttcggcctgctgcaatgttagttgaacgttccacagactatggacacaactggaaagtgttcaaatattttgcaaaagactgtgccacttcctttcctaacatcacatctggccaggcccagggagtgggagacattgtttgtgactccaaatactcggatattgaaccctcaacaggtggagaggttgttttaaaagttttggatcccagttttgaaattgaaaacccttatagcccctacatccaagaccttgtgacattgacaaacctgaggataaactttaccaagctccacacccttggggatgctttgcttggaaggaggcaaaatgattcccttgataaatactactatgctctgtacgagatgattgttcggggaagctgcttttgcaatggccatgctagcgaatgtcgccctatgcagaagatgcggggagatgttttcagccctcctggaatggttcacggtcagtgtgtgtgtcagcacaatacagatggtccgaactgtgagagatgcaaggacttcttccaggatgctccttggaggccagctgcagacctccaggacaacgcttgcagatcgtgcagctgtaacagccactccagccgctgtcactttgacatgactacgtacctggcaagcggtggcctcagcgggggcgtgtgtgaagactgccagcacaacactgaggggcagcactgcgaccgctgcagacccctcttctacagggacccgctcaagaccatctcagatccctacgcgtgcattccttgtgaatgtgaccccgatgggaccatatctggtggcatttgtgtgagccactctgatcctgccttagggtctgtggctggccagtgcctttgtaaagagaacgtggaaggagccaaatgcgaccagtgcaaacccaaccactatggactaagcgccaccgaccccctgggctgccagccctgcgactgtaacccccttgggagtctgccattcttgacctgtgatgtggatacaggccaatgcttgtgcctgtcatatgtcaccggagcacactgcgaagaatgcactgttggatactggggcctgggaaatcatctccatgggtgttctccctgtgactgtgatattggaggtgcttattctaacgtgtgctcacccaagaatgggcagtgtgaatgccgcccacatgtcactggccgtagctgctctgaaccagcccctggctacttctttgctcctttgaatttctatctctacgaggcagaggaagccacaacactccaaggactggcgcctttgggctcggagacgtttggccagagtcctgctgttcacgttgttttaggagagccagttcctgggaaccctgttacatggactggacctggatttgccagggttctccctggggctggcttgagatttgctgtcaacaacattccctttcctgtggacttcaccattgccattcactatgaaacccagtctgcagctgactggactgtccagattgtggtgaacccccctggagggagtgagcactgcatacccaagactctacagtcaaagcctcagtcttttgccttaccagcggctacgagaatcatgctgcttcccacacccatctgtttagaaccagatgtacaatattccatagatgtctatttttctcagcctttgcaaggagagtcccacgctcattcacatgtcctggtggactctcttggccttattccccaaatcaattcattggagaatttctgcagcaagcaggacttagatgagtatcagcttcacaactgtgttgaaattgcctcagcaatgggacctcaagtgctcccgggtgcctgtgaaaggctgatcatcagcatgtctgccaagctgcatgatggggctgtggcctgcaagtgtcacccccagggctcagtcggatccagctgcagccgacttggaggccagtgccagtgtaaacctcttgtggtcgggcgctgctgtgacaggtgctcaactggaagctatgatttggggcatcacggctgtcacccatgtcactgccatcctcaaggatcaaaggacactgtatgtgaccaagtaacaggacagtgcccctgccatggagaggtgtctggccgccgctgtgatcgctgcctggcaggctactttggatttcccagctgccacccttgcccttgtaataggtttgctgaactttgtgatcctgagacagggtcatgcttcaattgtggaggctttacaactggcagaaactgtgaaaggtgtattgatggttactatggaaatccttcttcaggacagccctgtcgtccttgcctgtgtccagatgatccctcaagcaatcagtattttgcccattcctgttatcagaatctgtggagctcagatgtaatctgcaattgtcttcaaggttatacgggtactcagtgtggagaatgctctactggtttctatggaaatccaagaatttcaggagcaccttgccaaccatgtgcctgcaacaacaacatagatgtaaccgatccagagtcctgcagccgggtaacaggggagtgccttcgatgtttgcacaacactcagggcgcaaactgccagctctgcaaaccaggtcactatggatcagccctcaatcagacctgcagaagatgctcctgccatgcttccggcgtgagtcccatggagtgtccccctggtgggggagcttgcctctgtgaccctgtcactggtgcatgtccttgtctgccgaatgtcacaggcctggcctgtgaccgttgtgctgatggatactggaatctggtccctggcagaggatgtcagtcatgtgactgtgaccctaggacctctcaaagtagccactgtgaccagcttacaggccagtgtccgtgtaaattaggttacggcgggaaacgttgcagtgagtgccaggaaaattattatggtgatccacctgggcgatgcattccatgtgattgtaacagggcaggtacccagaagcccatctgtgatccagacacaggcatgtgccgctgccgggagggtgtcagcggccagagatgtgatcgctgtgcccggggacacagccaggaattccctacttgtcttcaatgtcacttgtgctttgatcagtgggaccacaccatttcttccctctccaaagcggtgcaagggttaatgagactggctgctaacatggaagataaaagagagaccctgcctgtctgtgaggcagacttcaaagacctcagagggaacgtgtctgaaatagaaaggattttgaaacatcctgttttcccatctgggaaattcttaaaagtcaaggattatcatgactctgttagaagacaaatcatgcagctaaatgaacaactgaaagcagtgtatgaatttcaagatctgaaagatacaatagaaagagcaaagaatgaagcagacctcttacttgaagaccttcaggaagaaattgatttgcaatccagtgtccttaatgcaagcattgcggactcctcagaaaacatcaagaaatattatcacatatcatcatctgctgaaaagaaaattaatgaaactagttccaccattaatacctctgcaaatacaaggaatgacttacttaccatcttagatacactaacctcaaaaggaaacttgtcattggaaagattaaagcagattaagataccagatatccaaatattgaatgaaaaggtgtgcggagatccaggaaatgtgccatgtgtgcccttgccctgtggcggtgctctctgcacgggccggaaggggcacaggaagtgtaggggtcccggctgtcacggctccctgaccctctcaacgaatgccctccaaaaagcccaggaagcaaaatccattattcgtaatttggacaaacaggttcgtgggttgaaaaatcagatcgaaagtataagtgaacaggcagaagtctccaaaaacaatgccttacagctgagggaaaaactgggaaatataagaaaccaaagtgactctgaagaagaaaacatcaatcttttcatcaaaaaagtgaaaaactttttgttagaggaaaacgtgcctccagaagacatcgagaaggttgcgaatggtgtgcttgacattcacctaccaattccatcccaaaatctaaccgatgaacttgtcaaaatacagaaacatatgcaactctgtgaggattacaggacagatgaaaacaggttaaatgaagaagcagatggagcccaaaagcttttggtgaaggccaaagcagctgagaaagcagcaaatattctattaaatcttgacaaaacattgaaccagttacaacaagctcaaatcactcaaggacgggcaaactctaccattacacagctgactgccaatataacaaaaataaaaaagaatgtgctgcaggctgaaaatcaaaccagggaaatgaagagtgagctggagttagcaaagcagcgatcagggctggaggatggactttccctgctgcagaccaagttgcaaaggcatcaagaccacgctgtcaatgcgaaagttcaggctgaatctgcccaacaccaggctgggagtcttgagaaggaatttgttgagctgaaaaaacaatatgctattctccaacgtaagacaagcactacaggactaacaaaggagacattaggaaaagttaaacagctaaaagatgcggcagaaaaattggctggagatacagaggccaagataagaagaataacagatttagaaaggaaaatccaagatttgaatctaagtagacaagcaaaagctgatcaactgagaatattggaagatcaagttgttgccattaaaaatgaaattgttgaacaagaaaaaaaatatgctaggtgctatagc

SEQ ID NO: 3894 - DNA, 645 bp, Homo Sapiens
caggcagccatggacgagtgcacggacgagggcgggcggccgcagcgctgcatgcccgagttcgtcaacgccgctttcaacgtgactgtggtggccaccaacacgtgtgggactccgcccgaggaatactgtgtgcagaccggggtgaccggggtcaccaagtcctgtcacctgtgcgacgccgggcagccccacctgcagcacggggcagccttcctgaccgactacaacaaccaggccgacaccacctggtggcaaagccagaccatgctggccggggtgcagtaccccagctccatcaacctcacgctgcacctgggaaaagcttttgacatcacctatgtgcgtctcaagttccacaccagccgcccggagagctttgccatttacaagcgcacacgggaagacgggccctggattccttaccagtactacagtggttcctgcgagaacacctactccaaggcaaaccgcggcttcatcaggacaggaggggacgagcagcaggccttgtgtactgatgaattcagtgacatttctcccctcactgggggcaacgtggccttttctaccctggaaggaaggcccagcgcctataactttgacaatagccctgtgctgcaggtaaattctcacaggttggcc

SEQ ID NO: 3895 - DNA, 3270 bp, Homo Sapiens
acctccaggagggaagtctgtgattgcaatgggaagtccaggcagtgtatctttgatcgggaacttcacagacaaactggtaatggattccgctgcctcaactgcaatgacaacactgatggcattcactgcgagaagtgcaagaatggcttttaccggcacagagaaagggaccgctgtttgccctgcaattgtaactccaaaggttctcttagtgctcgatgtgacaactccggacggtgcagctgtaaaccaggtgtgacaggagccagatgcgaccgatgtctgccaggcttccacatgctcacggatgcggggtgcacccaagaccagagactgctagactccaagtgtgactgtgacccagctggcatcgcagggccctgtgacgcgggccgctgtgtctgcaagccagctgtcactggagaacgctgtgataggtgtcgatcaggttactataatctggatggggggaaccctgagggctgtacccagtgtttctgctatgggcattcagccagctgccgcagctctgcagaatacagtgtccataagatcacctctacctttcatcaagatgttgatggctggaaggctgtccaacgaaatgggtctcctgcaaagctccaatggtcacagcgccatcaagatgtgtttagctcagcccaacgactagaccctgtctattttgtggctcctgccaaatttcttgggaatcaacaggtgagctatggtcaaagcctgtcctttgactaccgtgtggacagaggaggcagacacccatctgcccatgatgtgattctggaaggtgctggtctacggatcacagctcccttgatgccacttggcaagacactgccttgtgggctcaccaagacttacacattcaggttaaatgagcatccaagcaataattggagcccccagctgagttactttgagtatcgaaggttactgcggaatctcacagccctccgcatccgagctacatatggagaatacagtactgggtacattgacaatgtgaccctgatttcagcccgccctgtctctggagccccagcaccctgggttgaacagtgtatatgtcctgttgggtacaaggggcaattctgccaggattgtgcttctggctacaagagagattcagcgagactggggccttttggcacctgtattccttgtaactgtcaagggggaggggcctgtgatccagacacaggagattgttattcaggggatgagaatcctgacattgagtgtgctgactgcccaattggtttctacaacgatccgcacgacccccgcagctgcaagccatgtccctgtcataacgggttcagctgctcagtgatgccggagacggaggaggtggtgtgcaataactgccctcccggggtcaccggtgcccgctgtgagctctgtgctgatggctactttggggacccctttggtgaacatggcccagtgaggccttgtcagccctgtcaatgcaacaacaatgtggaccccagtgcctctgggaattgtgaccggctgacaggcaggtgtttgaagtgtatccacaacacagccggcatctactgcgaccagtgcaaagcaggctacttcggggacccattggctcccaacccagcagacaagtgtcgagcttgcaactgtaaccccatgggctcagagcctgtaggatgtcgaagtgatggcacctgtgtttgcaagccaggatttggtggccccaactgtgagcatggagcattcagctgtccagcttgctataatcaagtgaagattcagatggatcagtttatgcagcagcttcagagaatggaggccctgatttcaaaggctcagggtggtgatggagtagtacctgatacagagctggaaggcaggatgcagcaggctgagcaggcccttcaggacattctgagagatgcccagatttcagaaggtgctagcagatcccttggtctccagttggccaaggtgaggagccaagagaacagctaccagagccgcctggatgacctcaagatgactgtggaaagagttcgggctctgggaagtcagtaccagaaccgagttcgggatactcacaggctcatcactcagatgcagctgagcctggcagaaagtgaagcttccttgggaaacactaacattcctgcctcagaccactacgtggggccaaatggctttaaaagtctggctcaggaggccacaagattagcagaaagccacgttgagtcagccagtaacatggagcaactgacaagggaaactgaggactattccaaacaagccctctcactggtgcgcaaggccctgcatgaaggagtcggaagcggaagcggtagcccggacggtgctgtggtgcaagggcttgtggaaaaattggagaaaaccaagtccctggcccagcagttgacaagggaggccactcaagcggaaattgaagcagataggtcttatcagcacagtctccgcctcctggattcagtgtctcggcttcagggagtcagtgatcagtcctttcaggtggaagaagcaaagaggatcaaacaaaaagcggattcactctcaagcctggtaaccaggcatatggatgagttcaagcgtacacagaagaatctgggaaactggaaagaagaagcacagcagctcttacagaatggaaaaagtgggagagagaaatcagatcagctgctttcccgtgccaatcttgctaaaagcagagcacaagaagcactgagtatgggcaatgccactttttatgaagttgagagcatccttaaaaacctcagagagtttgacctgcaggtggacaacagaaaagcagaagctgaagaagccatgaagagactctcctacatcagccagaaggtttcagatgccagtgacaagacccagcaagcagaaagagccctggggagcgctgctgctgatgcacagagggcaaagaatggggccggggaggccctggaaatctccagtgagattgaacaggagattgggagtctgaacttggaagccaatgtgacagcagatggagccttggccatggaaaagggactggcctctctgaagagtgagatgagggaagtggaaggagagctggaaaggaaggagctggagtttgacacgaatatggatgcagtacagatggtgattacagaagcccagaaggttgataccagagccaagaacgctggggttacaatccaagacacactcaacacattagacggcctcctgcatctgatgggtatg

SEQ ID NO: 3896 - DNA, 618 bp, Homo Sapiens
gcgacgggtcgcctgctgagtgggcagccagtctgccggggagggacacagaggccttgttataaagtcatttacttccatgatacttctcgaagactgaactttgaggaagccaaagaagcctgcaggagggatggaggccagctagtcagcatcgagtctgaagatgaacagaaactgatagaaaagttcattgaaaacctcttgccatctgatggtgacttctggattgggctcaggaggcgtgaggagaaacaaagcaatagcacagcctgccaggacctttatgcttggactgatggcagcatatcacaatttaggaactggtatgtggatgagccgtcctgcggcagcgaggtctgcgtggtcatgtaccatcagccatcggcacccgctggcatcggaggcccctacatgttccagtggaatgatgaccggtgcaacatgaagaacaatttcatttgcaaatattctgatgagaaaccagcagttccttctagagaagctgaaggtgaggaaacagagctgacaacacctgtacttccagaagaaacacaggaagaagatgccaaaaaaacatttaaagaaagtagagaagctgccttgaatctggcctac

SEQ ID NO: 3897 - DNA, 2301 bp, Homo Sapiens
gcagtgggcgacagatgtgaaagaaacgagttccagtgccaagacgggaaatgcatctcctacaagtgggtctgcgatggcagcgctgagtgccaggatggctctgatgagtcccaggagacgtgcttgtctgtcacctgcaaatccggggacttcagctgtgggggccgtgtcaaccgctgcattcctcagttctggaggtgcgatggccaagtggactgcgacaacggctcagacgagcaaggctgtccccccaagacgtgctcccaggacgagtttcgctgccacgatgggaagtgcatctctcggcagttcgtctgtgactcagaccgggactgcttggacggctcagacgaggcctcctgcccggtgctcacctgtggtcccgccagcttccagtgcaacagctccacctgcatcccccagctgtgggcctgcgacaacgaccccgactgcgaagatggctcggatgagtggccgcagcgctgtaggggtctttacgtgttccaaggggacagtagcccctgctcggccttcgagttccactgcctaagtggcgagtgcatccactccagctggcgctgtgatggtggccccgactgcaaggacaaatctgacgaggaaaactgcgctgtggccacctgtcgccctgacgaattccagtgctctgatggaaactgcatccatggcagccggcagtgtgaccgggaatatgactgcaaggacatgagcgatgaagttggctgcgttaatgtgacactctgcgagggacccaacaagttcaagtgtcacagcggcgaatgcatcaccctggacaaagtctgcaacatggctagagactgccgggactggtcagatgaacccatcaaagagtgcgggaccaacgaatgcttggacaacaacggcggctgttcccacgtctgcaatgaccttaagatcggctacgagtgcctgtgccccgacggcttccagctggtggcccagcgaagatgcgaagatatcgatgagtgtcaggatcccgacacctgcagccagctctgcgtgaacctggagggtggctacaagtgccagtgtgaggaaggcttccagctggacccccacacgaaggcctgcaaggctgtgggctccatcgcctacctcttcttcaccaaccggcacgaggtcaggaagatgacgctggaccggagcgagtacaccagcctcatccccaacctgaggaacgtggtcgctctggacacggaggtggccagcaatagaatctactggtctgacctgtcccagagaatgatctgcagcacccagcttgacagagcccacggcgtctcttcctatgacaccgtcatcagcagggacatccaggcccccgacgggctggctgtggactggatccacagcaacatctactggaccgactctgtcctgggcactgtctctgttgcggataccaagggcgtgaagaggaaaacgttattcagggagaacggctccaagccaagggccatcgtggtggatcctgttcatggcttcatgtactggactgactggggaactcccgccaagatcaagaaagggggcctgaatggtgtggacatctactcgctggtgactgaaaacattcagtggcccaatggcatcaccctagatctcctcagtggccgcctctactgggttgactccaaacttcactccatctcaagcatcgatgtcaatgggggcaaccggaagaccatcttggaggatgaaaagaggctggcccaccccttctccttggccgtctttgaggacaaagtattttggacagatatcatcaacgaagccattttcagtgccaaccgcctcacaggttccgatgtcaacttgttggctgaaaacctactgtccccagaggatatggtcctcttccacaacctcacccagccaagaggagtgaactggtgtgagaggaccaccctgagcaatggcggctgccagtatctgtgcctccctgccccgcagatcaacccccactcgcccaagtttacctgcgcctgcccggacggcatgctgctggccagggacatgaggagctgcctcacagaggctgaggctgcagtggccacccaggagacatccaccgtcaggctaaaggtcagctccacagccgtaaggacacagcacacaaccacccggcctgttcccgacacctcccggctgcctggggccacccctgggctcaccacggtggagatagtgacaatgtctcaccaagctctgggcgacgttgctggcagaggaaatgagaagaagcccagtagcgtgagg

SEQ ID NO: 3898 - DNA, 1839 bp, Homo Sapiens
tttaacttgtcatatccaattactccttggagatttaagttgtcttgcatgccaccaaattcaacctatgactacttccttttgcctgctggactctcaaagaatacttcaaattcgaatggacattatgagacagctgttgaacctaagtttaattcaagtggtactcacttttctaacttatccaaaacaactttccactgttgctttcggagtgagcaagatagaaactgctccttatgtgcagacaacattgaaggaaagacatttgtttcaacagtaaattctttagtttttcaacaaatagatgcaaactggaacatacagtgctggctaaaaggagacttaaaattattcatctgttatgtggagtcattatttaagaatctattcaggaattataactataaggtccatcttttatatgttctgcctgaagtgttagaagattcacctctggttccccaaaaaggcagttttcagatggttcactgcaattgcagtgttcatgaatgttgtgaatgtcttgtgcctgtgccaacagccaaactcaacgacactctccttatgtgtttgaaaatcacatctggtggagtaattttccagtcacctctaatgtcagttcagcccataaatatggtgaagcctgatccaccattaggtttgcatatggaaatcacagatgatggtaatttaaagatttcttggtccagcccaccattggtaccatttccacttcaatatcaagtgaaatattcagagaattctacaacagttatcagagaagctgacaagattgtctcagctacatccctgctagtagacagtatacttcctgggtcttcgtatgaggttcaggtgaggggcaagagactggatggcccaggaatctggagtgactggagtactcctcgtgtctttaccacacaagatgtcatatactttccacctaaaattctgacaagtgttgggtctaatgtttcttttcactgcatctataagaaggaaaacaagattgttccctcaaaagagattgtttggtggatgaatttagctgagaaaattcctcaaagccagtatgatgttgtgagtgataatgttagcaaagttacttttttcaatctgaatgaaaccaaacctcgaggaaagtttacctatgatgcagtgtactgctgcaatgaacatgaatgccatcatcgctatgctgaattatatgtgattgatgtcaatatcaatatctcatgtgaaactgatgggtacttaactaaaatgacttgcagatggtcaaccagtacaatccagtcacttgcggaaagcactttgcaattgaggtatcataggagcagcctttactgttctgatattccatctattcatcccatatctgagcccaaagattgctatttgcagagtgatggtttttatgaatgcattttccagccaatcttcctattatctggctacacaatgtggattaggatcaatcactctctaggttcacttgactctccaccaacatgtgtccttcctgattctgtggtgaagccactgcctccatccagtgtgaaagcagaaattactataaacattggattattgaaaatatcttgggaaaagccagtctttccagagaataaccttcaattccagattcgctatggtttaagtggaaaagaagtacaatggaagatgtatgaggtttatgatgcaaaatcaaaatctgtcagtctcccagttccagacttgtgtgcagtctatgctgttcaggtgcgctgtaagaggctagatggactgggatattggagtaattggagcaatccagcctacacagttgtcatg

SEQ ID NO: 3899 - DNA, 1569 bp, Homo Sapiens
aagaaaccagcgaagccaaaatgccctgccgtgtgtacttgtaccaaagataatgctttatgtgagaatgccagatccattccacgcaccgttcctcctgatgttatctcattatcctttgtgagatctggttttactgaaatctcagaagggagttttttattcacgccatcgctgcagctcttgttattcacatcgaactcctttgatgtgatcagtgatgatgcttttattggtcttccacatctagagtatttattcatagaaaacaacaacatcaagtcaatttcaagacatactttccggggactaaagtcattaattcacttgagccttgcaaacaacaatctccagacactcccaaaagatattttcaaaggcctggattctttaacaaatgtggacctgaggggtaattcatttaattgtgactgtaaactgaaatggctagtggaatggcttggccacaccaatgcaactgttgaagacatctactgcgaaggccccccagaatacaagaagcgcaaaatcaatagtctctcctcgaaggatttcgattgcatcattacagaatttgcaaagtctcaagacctgccttatcaatcattgtccatagacactttttcttatttgaatgatgagtatgtagtcatcgctcagccttttactggaaaatgcattttccttgaatgggaccatgtggaaaagaccttccggaattatgacaacattacaggcacatccactgtagtatgcaagcctatagtcattgaaactcagctctatgttattgtggcccagctgtttggtggctctcacatctataagcgagacagttttgcaaataaattcataaaaatccaggatattgaaattctcaaaatccgaaaacccaatgacattgaaacattcaagattgaaaacaactggtactttgttgttgctgacagttcaaaagctggttttactaccatttacaaatggaacggaaacggattctactcccatcaatccttacacgcgtggtacagggacactgatgtggaatatctagaaatagtcagaacacctcagacactcagaacgcctcatttaattctgtctagtagttcccagcgtcctgtaatttatcagtggaacaaagcaacacaattattcactaaccaaactgacattcctaacatggaggatgtgtacgcagtgaagcacttctcagtgaaaggggacgtgtacatttgcttgacaagattcattggtgattccaaagtcatgaaatggggaggctcctcgttccaggatattcagaggatgccatcgcgaggatccatggtgttccagcctcttcaaataaataattaccaatatgcaattcttggaagtgattactcctttactcaagtgtataactgggatgcagagaaagccaaatttgtgaaatttcaggaattaaatgttcaggcaccaagatcattcacacatgtgtccattaataagcgtaattttctttttgcttccagttttaagggaaatacacagatttacaaacatgtcatagttgacttaagcgca

SEQ ID NO: 3900 - DNA, 1551 bp, Homo Sapiens
caggtgaggcggctggcgcgctgccccgccacttgcagctgtaccaaggagtctatcatctgcgtgggctcttcctgggtgcccaggatcgtgccgggcgacatcagctccctgagcctggtaaatgggacgttttcagaaatcaaggaccgaatgttttcccatctgccttctctgcagctgctattgctgaattctaactcattcacgatcatccgggatgatgcttttgctggactttttcatcttgaatacctgttcattgaagggaacaaaatagaaaccatttcaagaaatgcctttcgtggcctccgtgacctgactcacctttctttggccaataaccacataaaagcactaccaagggatgtcttcagtgatttagactctctgattgaactagatttgaggggtaataaatttgaatgtgactgcaaagccaagtggctatacctgtggttgaagatgacaaattccaccgtttctgatgtgctgtgtattggtccaccagagtatcaggaaaagaagctaaatgacgtgaccagctttgactatgaatgcacaactacagattttgttgttcatcagactttaccctaccagtcggtttcagtggatacgttcaactccaagaacgatgtgtacgtggccatcgcgcagcccagcatggagaactgcatggtgctggagtgggaccacattgaaatgaatttccggagctatgacaacattacaggtcagtccatcgtgggctgtaaggccattctcatcgatgatcaggtctttgtggtggtagcccagctcttcggtggctctcacatttacaaatacgacgagagttggaccaaatttgtcaaattccaagacatagaggtctctcgcatttccaagcccaatgacatcgagctgtttcagatcgacgacgagacgttctttgtcatcgcagacagctcaaaggctggtctgtccacagtttataaatggaacagcaaaggattctattcttaccagtcactgcacgagtggttcagggacacggatgcggagtttgttgatatcgatggaaaatcgcatctcatcctgtccagccgctcccaggtccccatcatcctccagtggaataaaagctctaagaagtttgtcccccatggtgacatccccaacatggaggacgtactggctgtgaagagcttccgaatgcaaaataccctctacctttcccttacccgcttcatcggggactcccgggtcatgaggtggaacagtaagcagtttgtggagatccaagctcttccatcccggggggccatgaccctgcagcccttttcttttaaagataatcactacctggccctggggagtgactatacattctctcagatataccagtgggataaagagaagcagctattcaaaaagtttaaggagatttatgtgcaggcgcctcgttcattcacagctgtctccaccgacaggagagatttcttttttgcatccagtttcaaagggaaaacaaagatttttgaacatataattgttgacttaagtttg

SEQ ID NO: 3901 - DNA, 1554 bp, Homo Sapiens
aagaggcccccgaagactcccccttgcccgccatcctgttcatgtactagggatactgcgttctgcgttgatagcaaggccgtaccaagaaacttgccgagcgaagttatcagcttgacgcttgtaaacgctgcgttctccgaaatacaagatggagcttttagtcatttacctctgttgcagtttttactactaaatagtaacaaattcactcttataggagataatgctttcaccgggttatcacaccttcagtatctgttcattgaaaacaacgacatctgggccttatcaaagttcactttcagaggcttaaagagccttacgcatctgtcactggcgaacaataatctacagactttgccaagggacatcttccgtcctttggacatccttaatgaccttgatctgagaggaaattcattaaactgcgattgcaaggtgaaatggcttgtggagtggcttgctcacacaaacaccacggtcgcccctatatattgtgcttctcctcctcgtttccaggaacacaaagtacaggatctgcccttaagagagtttgattgcattaccacggacttcgtgttgtaccagaccctagcgtttcccgcggtaagtgcggagccattcctgtacagctccgatctatatttggcattagcacaacccggtgtatccgcctgtactatattaaaatgggattacgtggaacgtcagctaagagattatgacagaataccggctccatcagcggtacattgtaaaccgatggtagttgatagccagctgtatgtcgtagtagcgcagctttttggaggaagctatatctatcactgggaccccaacactacccgtttcacgagactgcaggacatcgaccctcagagggtcaggaagcctaatgatttagaagctttcagaatagacggtgactggtactttgccgtcgcagatagtagtaaggcaggggcgacgtccctatacagatggcaccagaatggattctactcacaccaggctttacacccttggcatcgtgacacagacttggagtttgtggacggcgagggtaaacccaggctgattgttagcagttcatctcaagccccagttatataccagtggtcaagaactcagaagcagtttgttgctcaaggtgaggttacccaggtcccggatgctcaagctgtcaaacatttccgtgcaggcagggattcctacttatgcctaagtagatacataggggactctaagatcctaaggtgggagggcaccagattttccgaagttcaggccctgccctcaagaggctccttggccttacagccctttttggtcggtgggagaaggtatctagcactaggaagcgacttcagctttacacaaatctaccagtgggatgaaggacgtcaaaaattcgtcagattccaagagctagcagtgcaagcaccgcgtgctttttgttatatgcccgccggcgatgcacagcttctgctagctccttctttcaaaggtcagaccttggtctataggcacatagtagttgacttgagcgcc

SEQ ID NO: 3902 - DNA, 1554 bp, Homo Sapiens
tggagacccccaaagggaaagtgtcccctgcgctgctcctgctctaaagacagcgccctgtgtgagggctccccggacctgcccgtcagcttctctccgaccctgctgtcactctcactcgtcaggacgggagtcacccagctgaaggccggcagcttcctgagaattccgtctctgcacctgctcctcttcacctccaactccttctccgtgattgaggacgatgcatttgcgggcctgtcccacctgcagtacctcttcatcgaggacaatgagattggctccatctctaagaatgccctcagaggacttcgctcgcttacacacctaagcctggccaataaccatctggagaccctccccagattcctgttccgaggcctggacacccttactcacgtggacctccgcgggaacccgttccagtgtgactgccgcgtcctctggctcctgcagtggatgcccaccgtgaatgccagcgtggggaccggcgcctgtgcgggccccgcctccctgagccacatgcagctccaccacctcgaccccaagactttcaagtgcagagccatagagctgtcctggttccagacggtgggggagtcggcactgagcgtagagcccttctcctaccaaggggagcctcacattgtgctggcacagcccttcgccggccgctgcctgattctctcctgggactacagcctgcagcgcttccggcccgaggaagagctgcccgcggcctccgtggtgtcctgcaagccactggtgctgggcccgagcctcttcgtgctggctgcccgcctgtgggggggctcacagctgtgggcccggcccagtcccggcctgcgcctggccccaacgcagaccctggccccgcggcggctgctgcggcccaatgacgccgagctcctgtggctggaagggcaaccctgcttcgtggtggccgatgcctccaaggcgggcagcaccacgctgctgtgccgcgacgggcccggcttttacccgcaccagagcctgcacgcctggcaccgggacacggacgctgaggccctggagctggacggccggccccacctgctgctggcctcggcttcccagcggcccgtgctcttccactggaccggtggccgcttcgagagacgcacagacatccccgaggccgaggatgtctatgccacacgccacttccaggctggtggggacgtgttcctgtgcctcacacgctacattggggactccatggtcatgcgctgggacggctccatgtttcgtctgctgcagcaacttccctcgcgcggtgcccacgtcttccagccactgctcatcgccagggaccagctggccatcctaggcagcgacttcgccttcagccaggtcctccgccttgagcctgacaaggggctcctggagccactgcaggagctggggcctccggccctggtggccccccgtgcctttgcccacatcactatggccggcagacgcttcctctttgctgcttgctttaagggccccacacagatctaccagcatcacgagatcgacctcagtgcc

SEQ ID NO: 3903 - DNA, 1560 bp, Homo Sapiens
gcgccgcctctctgcgcggcgccctgcagctgcgacggcgaccgtcgggtggactgctccgggaaggggctgacggccgtgcccgaggggctcagcgccttcacccaagcgctggatatcagtatgaacaacattactcagttgccagaagatgcatttaagaactttccttttctagaagagctacaattggcgggcaacgacctttcttttatccacccaaaggccttgtctgggttgaaagaactcaaagttctaacgctccagaataatcagttgaaaacagtacccagtgaagccattcgagggctgagtgctttgcagtctttgcgtttagatgccaaccatattacctcagtccccgaggacagttttgaaggacttgttcagttacggcatctgtggctggatgacaacagcttgacggaggtgcctgtgcaccccctcagcaatctgcccaccctacaggcgctgaccctggctctcaacaagatctcaagcatccctgactttgcatttaccaacctttcaagcctggtagttctgcatcttcataacaataaaattagaggcctgagtcaacactgttttgatggactagataacctggagaccttagacttgagttataataacttgggggaatttcctcaggctattaaagcccgtcctagccttaaagagctaggatttcatagtaattctatttctgttatccctgatggagcatttgatggtaatccactcttaagaactatacatttgtatgataatcctctgtcttttgtggggaactcagcatctcacaatttatctgatcttcattccctagtcattcgtggtgcaagcatggtgcagcagttccccaatcttacaggaactgtccacctggaaagtctgactttgacaggtacaaagataagcagcatacctaataatttgtgtcaagaacaaaagatgcttaggactttggacttgtcttacaataatataagagaccttccaagttttaatggttgccatgctctggaagaaatttctttacagcgtaatcaaatctaccaaataaaggaaggcacctttcaaggcctgatatctctaaggattctagatctgagtagaaacctgatacatgaaattcacagtagagcttttgccacacttgggccaataactaacctagatgtaagtttcaatgaattaacttcctttcctacggaaggcccgaatgggctaaatcaactgaaacttgtgggcaacttcaagctgaaagaagccttagcagcaaaagactttgttaacctcaggtctttatcggtaccatatgcttatcagtgctgtgcattttggggttgtgactcttatgcaaatttaaacacagaagataacagcctccaggaccacagtgtggcacaggagaaaggtactgctgatgcagcaaatgtcacaagcactcttgaaaatgaagaacatagtcaaataattatccattgtacaccttcaacaggtgcttttaagccctgtgaatatttactgggaagctggatgattcgtcttact

SEQ ID NO: 3904 - DNA, 1620 bp, Homo Sapiens
ggcagctctcccaggtctggtgtgttgctgaggggctgccccacacactgtcattgcgagcccgacggcaggatgttgctcagggtggactgctccgacctggggctctcggagctgccttccaacctcagcgtcttcacctcctacctagacctcagtatgaacaacatcagtcagctgctcccgaatcccctgcccagtctccgcttcctggaggagttacgtcttgcgggaaacgctctgacatacattcccaagggagcattcactggcctttacagtcttaaagttcttatgctgcagaataatcagctaagacacgtacccacagaagctctgcagaatttgcgaagccttcaatccctgcgtctggatgctaaccacatcagctatgtgcccccaagctgtttcagtggcctgcattccctgaggcacctgtggctggatgacaatgcgttaacagaaatccccgtccaggcttttagaagtttatcggcattgcaagccatgaccttggccctgaacaaaatacaccacataccagactatgcctttggaaacctctccagcttggtagttctacatctccataacaatagaatccactccctgggaaagaaatgctttgatgggctccacagcctagagactttagatttaaattacaataaccttgatgaattccccactgcaattaggacactctccaaccttaaagaactaggatttcatagcaacaatatcaggtcgatacctgagaaagcatttgtaggcaacccttctcttattacaatacatttctatgacaatcccatccaatttgttgggagatctgcttttcaacatttacctgaactaagaacactgactctgaatggtgcctcacaaataactgaatttcctgatttaactggaactgcaaacctggagagtctgactttaactggagcacagatctcatctcttcctcaaaccgtctgcaatcagttacctaatctccaagtgctagatctgtcttacaacctattagaagatttacccagtttttcagtctgccaaaagcttcagaaaattgacctaagacataatgaaatctacgaaattaaagttgacactttccagcagttgcttagcctccgatcgctgaatttggcttggaacaaaattgctattattcaccccaatgcattttccactttgccatccctaataaagctggacctatcgtccaacctcctgtcgtcttttcctataactgggttacatggtttaactcacttaaaattaacaggaaatcatgccttacagagcttgatatcatctgaaaactttccagaactcaaggttatagaaatgccttatgcttaccagtgctgtgcatttggagtgtgtgagaatgcctataagatttctaatcaatggaataaaggtgacaacagcagtatggacgaccttcataagaaagatgctggaatgtttcaggctcaagatgaacgtgaccttgaagatttcctgcttgactttgaggaagacctgaaagcccttcattcagtgcagtgttcaccttccccaggccccttcaaaccctgtgaacacctgcttgatggctggctgatcaga

SEQ ID NO: 3905 - DNA, 1629 bp, Homo Sapiens
gcgccgcaaccaggtcccggtcctacggcctgtccggccccgtgccattgccaggaagacggtattatgttgtctgcggattgttctgaattagggttatctgccgttcccggagatttagacccacttactgcataccttgacttgagtatgaataacctgacagagctgcaaccgggtctatttcatcacttaagattcctagaagagcttagactaagcggaaatcacctgagtcatattcctggtcaagcgtttagcggcctttactcattaaaaattctgatgcttcagaacaatcaattgggaggtatcccggccgaagccttatgggaattacccagcctgcagtctctgagattagatgcgaatctaataagcctagttccggaacgttctttcgaaggtttgagctcactgaggcacctgtggcttgatgataacgctctgaccgagatccccgtgagagcattgaacaacttgccagctcttcaggccatgaccctagcgctgaatcgtatcagtcatattcctgactatgcattccaaaatttaaccagtctagtggtgcttcacttgcacaacaatcgtattcaacatttaggaacacatagctttgagggtctgcacaatctggaaacattggatctgaactataataagctacaggagtttccagtggcgattagaaccctggggaggttgcaagagttgggtttccacaacaacaatataaaggcaatccccgagaaagcgttcatgggtaaccctctactgcagaccatccacttctacgataatccgatacaattcgtggggcgttcagctttccagtatctacccaaattacacacgctttctcttaatggtgccatggatattcaagagttcccggatttgaagggcacaaccagcctagagattctgactctgacgagagcaggaataaggttactgccatcaggaatgtgtcaacaactgcccaggttaagggttttagaacttagccacaaccagattgaggaacttccttcacttcataggtgccagaaactagaggaaatcggattgcaacataaccgtatttgggagataggggccgataccttttcccagctaagttccttacaggctttggacttatcatggaacgcgatcagatctatacatccggaggccttttccaccctacatagtctagttaaactggatttaaccgataatcagctaacgactttgcctttggcaggtctgggcggcctaatgcacctaaagctgaaaggaaatctggccttatcacaggccttttccaaggattcattcccgaaactgaggatcctagaagtgccatatgcctaccaatgctgtccttatggcatgtgtgcctcattcttcaaggcctccggccagtgggaagccgaagaccttcatcttgacgacgaagagtcaagcaagagacccttagggttgctggctagacaggcggaaaaccactatgaccaagacctagatgaactgcagttagaaatggaagactccaagccgcacccttcagttcagtgctcaccgaccccggggcctttcaagccctgcgagtacttgttcgagtcctgggggatcagactagct

SEQ ID NO: 3906 - DNA, 1248 bp, Homo Sapiens
atgattgtttttctggtttttaaacatctcttcagcctcagattgattacaatgttctttctacttcatttcatcgttctgatcaatgtcaaagattttgcactgactcaaggtagcatgatcactccttcatgccaaaaaggatattttccctgtgggaatcttaccaagtgcttaccccgagcttttcactgtgatggcaaggatgactgtgggaacggggcggacgaagagaactgtggtgacactagtggatgggcgaccatatttggcacagtgcatggaaatgctaacagcgtggccttaacacaggagtgctttctaaaacagtatccacaatgctgtgactgcaaagaaactgaattggaatgtgtaaatggtgacttaaagtctgtgccgatgatttctaacaatgtgacattactgtctcttaagaaaaacaaaatccacagtcttccagataaagttttcatcaaatacacaaaacttaaaaagatatttcttcagcataattgcattagacacatatccaggaaagcattttttggattatgtaatctgcaaatattatatctcaaccacaactgcatcacaaccctcagacctggaatattcaaagacttacatcagctaacttggctaattctagatgacaatccaataaccagaatttcacagcgcttgtttacgggattaaattccttgtttttcctgtctatggttaataactacttagaagctcttcccaagcagatgtgtgcccaaatgcctcaactcaactgggtggatttggaaggcaatagaataaagtatctcacaaattctacgtttctgtcgtgcgattcgctcacagtgctgtttctgcctagaaatcaaattggttttgttccagagaagacattttcttcattaaaaaatttaggagaactggatctgtctagcaatacgataacggaactatcacctcacctttttaaagacttgaagcttctacaaaagctgaacctgtcatccaatcctcttatgtatcttcacaagaaccagtttgaaagtcttaaacaacttcagtctctagacctggaaaggatagagattccaaatataaacacacgaatgtttcaacccatgaagaatctttctcacatttatttcaaaaactttcgatactgctcctatgctccccatgtccgaatatgtatgcccttgacggacggcatttcttcatttgaggacctcttggctaacaat

SEQ ID NO: 3907 - DNA, 1011 bp, Homo Sapiens
gaggcgctctgccctgagccctgcaactgcgtgcccgacggcgccctgcgctgccccggccccacggccggtctcactcgactatcacttgcctacctccctgtcaaagtgatcccatctcaagctttcagaggacttaatgaggtcataaaaattgaaatctctcagattgattccctggaaaggatagaagctaatgcctttgacaacctcctcaatttgtctgaaatactgatccagaacaccaaaaatctgagatacattgagcccggagcatttataaatcttccccgattaaaatacttgagcatctgtaacacaggcatcagaaagtttccagatgttacgaaggtcttctcctctgaatcaaatttcattctggaaatttgtgataacttacacataaccaccataccaggaaatgcttttcaagggatgaataatgaatctgtaacactcaaactatatggaaatggatttgaagaagtacaaagtcatgcattcaatgggacgacactgacttcactggagctaaaggaaaacgtacatctggagaagatgcacaatggagccttccgtggggccacagggccgaaaaccttggatatttcttccaccaaattgcaggccctgccgagctatggcctagagtccattcagaggctaattgccacgtcatcctattctctaaaaaaattgccatcaagagaaacatttgtcaatctcctggaggccacgttgacttaccccagccactgctgtgcttttagaaacttgccaacaaaagaacagaatttttcacattccatttctgaaaacttttccaaacaatgtgaaagcacagtaaggaaagtgaataacaaaacactttattcttccatgcttgctgagagtgaactgagtggctgggactatgaatatggtttctgcttacccaagacaccccgatgtgctcctgaaccagatgcttttaatccctgtgaagatattatgggctatgacttccttagg

SEQ ID NO: 3908 - DNA, 540 bp, Homo Sapiens
agccccctccccatcacccctgtcaacgccacctgtgccatacgccacccatgtcacaacaacctcatgaaccagatcaggagccaactggcacagctcaatggcagtgccaatgccctctttattctctattacacagcccagggggagccgttccccaacaacctggacaagctatgtggccccaacgtgacggacttcccgcccttccacgccaacggcacggagaaggccaagctggtggagctgtaccgcatagtcgtgtaccttggcacctccctgggcaacatcacccgggaccagaagatcctcaaccccagtgccctcagcctccacagcaagctcaacgccaccgccgacatcctgcgaggcctccttagcaacgtgctgtgccgcctgtgcagcaagtaccacgtgggccatgtggacgtgacctacggccctgacacctcgggtaaggatgtcttccagaagaagaagctgggctgtcaactcctggggaagtataagcagatcatcgccgtgttggcccaggccttc

SEQ ID NO: 3909 - DNA, 2367 bp, Homo Sapiens
cagaaaaagggggctcctcatgatttgaagtgtgtaactaacaatttgcaagtgtggaactgttcttggaaagcaccctctggaacaggccgtggtactgattatgaagtttgcattgaaaacaggtcccgttcttgttatcagttggagaaaaccagtattaaaattccagctctttcacatggtgattatgaaataacaataaattctctacatgattttggaagttctacaagtaaattcacactaaatgaacaaaacgtttccttaattccagatactccagagatcttgaatttgtctgctgatttctcaacctctacattatacctaaagtggaacgacaggggttcagtttttccacaccgctcaaatgttatctgggaaattaaagttctacgtaaagagagtatggagctcgtaaaattagtgacccacaacacaactctgaatggcaaagatacacttcatcactggagttgggcctcagatatgcccttggaatgtgccattcattttgtggaaattagatgctacattgacaatcttcatttttctggtctcgaagagtggagtgactggagccctgtgaagaacatttcttggatacctgattctcagactaaggtttttcctcaagataaagtgatacttgtaggctcagacataacattttgttgtgtgagtcaagaaaaagtgttatcagcactgattggccatacaaactgccccttgatccatcttgatggggaaaatgttgcaatcaagattcgtaatatttctgtttctgcaagtagtggaacaaatgtagtttttacaaccgaagataacatatttggaaccgttatttttgctggatatccaccagatactcctcaacaactgaattgtgagacacatgatttaaaagaaattatatgtagttggaatccaggaagggtgacagcgttggtgggcccacgtgctacaagctacactttagttgaaagtttttcaggaaaatatgttagacttaaaagagctgaagcacctacaaacgaaagctatcaattattatttcaaatgcttccaaatcaagaaatatataattttactttgaatgctcacaatccgctgggtcgatcacaatcaacaattttagttaatataactgaaaaagtttatccccatactcctacttcattcaaagtgaaggatattaattcaacagctgttaaactttcttggcatttaccaggcaactttgcaaagattaattttttatgtgaaattgaaattaagaaatctaattcagtacaagagcagcggaatgtcacaatcaaaggagtagaaaattcaagttatcttgttgctctggacaagttaaatccatacactctatatacttttcggattcgttgttctactgaaactttctggaaatggagcaaatggagcaataaaaaacaacatttaacaacagaagccagtccttcaaaggggcctgatacttggagagagtggagttctgatggaaaaaatttaataatctattggaagcctttacccattaatgaagctaatggaaaaatactttcctacaatgtatcgtgttcatcagatgaggaaacacagtccctttctgaaatccctgatcctcagcacaaagcagagatacgacttgataagaatgactacatcatcagcgtagtggctaaaaattctgtgggctcatcaccaccttccaaaatagcgagtatggaaattccaaatgatgatctcaaaatagaacaagttgttgggatgggaaaggggattctcctcacctggcattacgaccccaacatgacttgcgactacgtcattaagtggtgtaactcgtctcggtcggaaccatgccttatggactggagaaaagttccctcaaacagcactgaaactgtaatagaatctgatgagtttcgaccaggtataagatataattttttcctgtatggatgcagaaatcaaggatatcaattattacgctccatgattggatatatagaagaattggctcccattgttgcaccaaattttactgttgaggatacttctgcagattcgatattagtaaaatgggaagacattcctgtggaagaacttagaggctttttaagaggatatttgttttactttggaaaaggagaaagagacacatctaagatgagggttttagaatcaggtcgttctgacataaaagttaagaatattactgacatatcccagaagacactgagaattgctgatcttcaaggtaaaacaagttaccacctggtcttgcgagcctatacagatggtggagtgggcccggagaagagtatgtatgtggtgacaaaggaaaattct

SEQ ID NO: 3910 - DNA, 1335 bp, Homo Sapiens
ccccggacccacgtgcaggcagggaccctccccaagcccacactctgggctgagccaggctctgtgatcacccaggggagtcccgtgaccctctggtgtcaggggatcctggagacccaggagtaccgtctgtatagagaaaagaaaacagcaccctggattacacggatcccacaggagattgtgaagaagggccagttccccatcccatccatcacctgggaacacacagggcggtatcgctgtttctacggtagccacactgcaggctggtcagagcccagtgaccccctggagctggtggtgacaggagcctacatcaaacccaccctctcagctctacccagccctgtggtgacctcaggagggaacgtgaccctccattgtgtctcacaggtggcatttggcagcttcattctgtgtaaggaaggagaagatgaacacccacaatgcctgaactcacagccccgtacccatgggtggtcccgggccatcttctctgtgggccccgtgagcccgagtcgcaggtggtcgtacaggtgctatgcttatgactcgaactctccccatgtgtggtctctacccagtgatctcctggagctcctggtcctaggtgtttctaagaagccatcactctcagtgcagccaggtcctatagtggcccctggggagagcctgaccctccagtgtgtttctgatgtcagctacgacagatttgttctgtataaggagggagaacgtgacttcctccagctccctggcccacagccccaggctgggctctcccaggccaacttcaccctgggccctgtgagccgctcctacgggggccagtacagatgctccggtgcatacaacctctcctccgagtggtcggcccccagcgaccccctggacatcctgatcgcaggacagttccgtggcagacccttcatctcggtgcatccgggccccacggtggcctcaggagagaacgtgaccctgctgtgtcagtcatgggggccgttccacactttccttctgaccaaggcgggagcagctgatgcccccctccgtctcagatcaatacacgaatatcctaagtaccaggctgaattccctatgagtcctgtgacctcagcccactcggggacctacaggtgctacggctcactcagctccaacccctacctgctgtctcaccccagtgactccctggagctcatggtctcaggagcagctgagaccctcagcccaccacaaaacaagtccgattccaaggctggagcagctaacaccctcagcccatcacaaaacaagactgcctcacacccccaggattacacagtggagaat

SEQ ID NO: 3911 - DNA, 1227 bp, Homo Sapiens
gggcacctccccaagcccaccctctgggctgagccaggctctgtgatcatccagggaagtcctgtgaccctcaggtgtcaggggagccttcaggctgaggagtaccatctatatagggaaaacaaatcagcatcctgggttagacggatacaagagcctgggaagaatggccagttccccatcccatccatcacctgggaacacgcagggcggtatcactgtcagtactacagccacaatcactcatcagagtacagtgaccccctggagctggtggtgacaggagcctacagcaaacccaccctctcagctctgcccagccctgtggtgaccttaggagggaacgtgaccctccagtgtgtctcacaggtggcatttgacggcttcattctgtgtaaggaaggagaagatgaacacccacaacgcctgaactcccattcccatgcccgtgggtggtcctgggccatcttctccgtgggccccgtgagcccgagtcgcaggtggtcgtacaggtgctatgcttatgactcgaactctccctatgtgtggtctctacccagtgatctcctggagctcctggtcccaggtgtttctaagaagccatcactctcagtgcagccaggtcctatggtggcccctggggagagcctgaccctccagtgtgtctctgatgtcggctacgacagatttgttctgtataaggagggagaacgtgacttcctccagcgccctggttggcagccccaggctgggctctcccaggccaacttcaccctgggccctgtgagcccctcccacgggggccagtacagatgctacagtgcacacaacctctcctccgagtggtcggcccccagtgaccccctggacatcctgatcacaggacagttctatgacagaccctctctctcggtgcagccggtccccacagtagccccaggaaagaacgtgaccctgctgtgtcagtcacgggggcagttccacactttccttctgaccaaggagggggcaggccatcccccactgcatctgagatcagagcaccaagctcagcagaaccaggctgaattccgcatgggtcctgtgacctcagcccacgtggggacctacagatgctacagctcactcagctccaacccctacctgctgtctctccccagtgaccccctggagctcgtggtctcagcatccctaggccaacacccccaggattacacagtggagaat

SEQ ID NO: 3912 - DNA, 1248 bp, Homo Sapiens
gggcccctccccaagcccaccctctgggctgagccaggctctgtgatcacccaagggagtcctgtgaccctcaggtgtcaggggagcctggagacgcaggagtaccatctatatagagaaaagaaaacagcactctggattacacggatcccacaggagcttgtgaagaagggccagttccccatcctatccatcacctgggaacatgcagggcggtattgctgtatctatggcagccacactgtaggcctctcagagagcagtgaccccctggagctggtggtgacaggagcctacagcaaacccaccctctcagctctgcccagccctgtggtgacctcaggagggaatgtgaccatccagtgtgactcacaggtggcatttgatggcttcattctgtgtaaggaaggagaagatgaacacccacaatgcctgaactcccattcccatgcccgtgggtcatcccgggccatcttctccgtgggccccgtgagcccaagtcgcaggtggtcgtacaggtgctatggttatgactcgcgcgctccctatgtgtggtctctacccagtgatctcctggggctcctggtcccaggtgtttctaagaagccatcactctcagtgcagccgggtcctgtcgtggcccctggggagaagctgaccttccagtgtggctctgatgccggctacgacagatttgttctgtacaaggagtggggacgtgacttcctccagcgccctggccggcagccccaggctgggctctcccaggccaacttcaccctgggccctgtgagccgctcctacgggggccagtacacatgctccggtgcatacaacctctcctccgagtggtcggcccccagcgaccccctggacatcctgatcacaggacagatccgtgccagacccttcctctccgtgcggccgggccccacagtggcctcaggagagaacgtgaccctgctgtgtcagtcacagggagggatgcacactttccttttgaccaaggagggggcagctgattccccgctgcgtctaaaatcaaagcgccaatctcataagtaccaggctgaattccccatgagtcctgtgacctcggcccacgcggggacctacaggtgctacggctcactcagctccaacccctacctgctgactcaccccagtgaccccctggagctcgtggtctcaggagcagctgagaccctcagcccaccacaaaacaagtccgactccaaggctggtgag

SEQ ID NO: 3913 - DNA, 1269 bp, Homo Sapiens
gaaaacctacccaaacccatcctgtgggccgagccaggtcccgtgatcacctggcataaccccgtgaccatctggtgtcagggcaccctggaggcccaggggtaccgtctggataaagagggaaactcaatgtcgaggcacatattaaaaacactggagtctgaaaacaaggtcaaactctccatcccatccatgatgtgggaacatgcagggcgatatcactgttactatcagagccctgcaggctggtcagagcccagcgaccccctggagctggtggtgacagcctacagcagacccaccctgtccgccctgccaagccctgtggtaacctcaggagtgaacgtgaccctccggtgtgcctcacggctgggactgggcaggttcactctgattgaggaaggagaccacaggctctcctggaccctgaactcacaccaacacaaccatggaaagttccaggccctgttccccatgggccccctgaccttcagcaacaggggtacattcagatgctacggctatgaaaacaacaccccatacgtgtggtcggaacccagtgaccccctgcagctactggtgtcaggcgtgtctaggaagccctccctcctgaccctgcagggccctgtcgtgacccccggagagaatctgaccctccagtgtggctctgatgtcggctacatcagatacactctgtacaaggagggggccgatggcctcccccagcgccctggccggcagccccaggctgggctctcccaggccaacttcaccctgagccctgtgagccgctcctacgggggccagtacagatgctacggcgcacacaacgtctcctccgagtggtcggcccccagtgaccccctggacatcctgatcgcaggacagatctctgacagaccctccctctcagtgcagccgggccccacggtgacctcaggagagaaggtgaccctgctgtgtcagtcatgggacccgatgttcactttccttctgaccaaggagggggcagcccatcccccgttgcgtctgagatcaatgtacggagctcataagtaccaggctgaattccccatgagtcctgtgacctcagcccacgcggggacctacaggtgctacggctcacgcagctccaacccctacctgctgtctcaccccagtgagcccctggagctcgtggtctcaggagcaactgagaccctcaatccagcacaaaagaagtcagattccaagactgccccacacctccaggattacacagtggagaat

SEQ ID NO: 3914 - DNA, 681 bp, Homo Sapiens
ggaaatttatctaaggctactctatgggcggaaccggggagtgtcatcagcaggggaaactccgtaactatccgttgccaaggtactctggaggcgcaagagtatagactggtgaaagaggggtcacccgaaccctgggatactcaaaatcctctggaacctaagaacaaagcaagatttagcattcctagtatgacagagcatcatgcagggagatataggtgctattactactcacccgcaggttggtctgaacccagtgaccccttagagctagtagtcaccgggttttacaacaaacccactctttctgcattaccgtcccccgtggttacttctggcgagaacgtcactttacagtgcgggtccagactaagatttgaccgtttcattttgacggaggagggtgatcacaagttgagctggactctggatagtcagttgaccccgtccgggcagtttcaggcgcttttccccgttgggccagtaacgcccagccatagatggatgcttcgttgttatggcagtcgtcgtcacatccttcaagtgtggtctgaaccttccgatttgttagagatccccgttagtggagctgctgataatctatcaccatctcagaataagagcgatagcggtaccgcgtcacacttgcaggactatgccgtagagaacttaatcaga

SEQ ID NO: 3915 - DNA, 1314 bp, Homo Sapiens
gggcacctccccaagcccaccctctgggctgaaccaggctctgtgatcacccaggggagtcctgtgaccctcaggtgtcaggggggccaggagacccaggagtaccgtctatatagagaaaagaaaacagcaccctggattacacggatcccacaggagcttgtgaagaagggccagttccccatcccatccatcacctgggaacatgcagggcggtatcgctgttactatggtagcgacactgcaggccgctcagagagcagtgaccccctggagctggtggtgacaggagcctacatcaaacccaccctctcagcccagcccagccccgtggtgaactcaggagggaatgtaaccctccagtgtgactcacaggtggcatttgatggcttcattctgtgtaaggaaggagaagatgaacacccacaatgcctgaactcccagccccatgcccgtgggtcgtcccgcgccatcttctccgtgggccccgtgagcccgagtcgcaggtggtggtacaggtgctatgcttatgactcgaactctccctatgagtggtctctacccagtgatctcctggagctcctggtcctaggtgtttctaagaagccatcactctcagtgcagccaggtcctatcgtggcccctgaggagaccctgactctgcagtgtggctctgatgctggctacaacagatttgttctgtataaggacggggaacgtgacttccttcagctcgctggcgcacagccccaggctgggctctcccaggccaacttcaccctgggccctgtgagccgctcctacgggggccagtacagatgctacggtgcacacaacctctcctccgagtggtcggcccccagcgaccccctggacatcctgatcgcaggacagttctatgacagagtctccctctcggtgcagccgggccccacggtggcctcaggagagaacgtgaccctgctgtgtcagtcacagggatggatgcaaactttccttctgaccaaggagggggcagctgatgacccatggcgtctaagatcaacgtaccaatctcaaaaataccaggctgaattccccatgggtcctgtgacctcagcccatgcggggacctacaggtgctacggctcacagagctccaaaccctacctgctgactcaccccagtgaccccctggagctcgtggtctcaggaccgtctgggggccccagctccccgacaacaggccccacctccacatctggccctgaggaccagcccctcacccccaccgggtcggatccccagagtggtctgggaaggcacctgggggtt

SEQ ID NO: 3916 - DNA, 1320 bp, Homo Sapiens
cagacagggaccatccccaagcccaccctgtgggctgagccagactctgtgatcacccaggggagtcccgtcaccctcagttgtcaggggagccttgaagcccaggagtaccgtctatatagggagaaaaaatcagcatcttggattacacggatacgaccagagcttgtgaagaacggccagttccacatcccatccatcacctgggaacacacagggcgatatggctgtcagtattacagccgcgctcggtggtctgagctcagtgaccccctggtgctggtgatgacaggagcctacccaaaacccaccctctcagcccagcccagccctgtggtgacctcaggaggaagggtgaccctccagtgtgagtcacaggtggcatttggcggcttcattctgtgtaaggaaggagaagatgaacacccacaatgcctgaactcccagccccatgcccgtgggtcgtcccgcgccatcttctccgtgggccccgtgagcccgaatcgcaggtggtcgcacaggtgctatggttatgacttgaactctccctatgtgtggtcttcacccagtgatctcctggagctcctggtcccaggtgtttctaagaagccatcactctcagtgcagccgggtcctgtcgtggcccctggggaaagcctgaccctccagtgtgtctctgatgtcggctatgacagatttgttctgtacaaggagggggaacgtgaccttcgccagctccctggccggcagccccaggctgggctctcccaggccaacttcaccctgggccctgtgagccgctcctacgggggccagtacagatgctacggtgcatacaacctctcctccgagtggtcggcccccagcgaccccctggacatcctgatcacaggacagatccatggcacacccttcatctcagtgcagccaggccccacagtggcctcaggagagaacgtgaccctgctgtgtcagtcatggcggcagttccacactttccttctgaccaaggcgggagcagctgatgccccactccgtctaagatcaatacacgaatatcctaagtaccaggctgaattccccatgagtcctgtgacctcagcccacgcggggacctacaggtgctacggctcactcaactccgacccctacctgctgtctcaccccagtgagcccctggagctcgtggtctcaggaccctccatgggttccagccccccacccaccggtcccatctccacacctgcaggccctgaggaccagcccctcacccccactgggtcggatccccaaagtggtctgggaaggcacctgggggtt

SEQ ID NO: 3917 - DNA, 1260 bp, Homo Sapiens
ggacctttcccaaaacctactctttgggcagagccggggtcagtaataagttgggggagccccgtgaccatttggtgtcagggatctcaagaggcgcaggagtatcgtttacacaaagagggaagtcctgaaccattagatcgtaataacccactggagcctaagaacaaggccaggttctccatccctagcatgacggaacaccatgccggaagatatcgttgccactattactcatcagcgggttggtcagaaccgtcagatccgctagaaatggttatgacaggcgcttattccaaaccgacactaagcgccctgcccagtccggtggttgcatcaggtgggaatatgactctacgttgtggtagccagaagggatatcaccattttgtgttgatgaaggaaggcgagcatcagctaccaaggacattggatagccagcaacttcatagtagagggttccaggccttattccctgttgggccagtcaccccatcacatagatggagattcacgtgttactactactacacgaacaccccgtgggtgtggtcacacccatccgatccgttagagatcctaccctcaggagtatctcgtaagccatcactattaacgcttcaggggccggtgctagctcccggacagtcactgacattacaatgcggtagcgacgtgggttacaataggttcgttctttacaaagagggcgaaagagactttttgcagagaccgggccagcaacctcaggcgggattaagccaggctaatttcaccttaggcccggtatcccctagtaacggcggacagtatcgttgctacggtgctcacaacctgtcatcagagtggtccgcaccaagtgacccgttgaacattcttatggcgggacaaatttacgatacggttagtctttccgcgcagcccggcccgactgttgcgtcaggggagaatgttacgttactgtgtcagtcctggtggcaattcgacacgttccttttgaccaaggaaggtgcggcgcatcctccattacgtctgagatcaatgtacggtgctcataaataccaagccgaatttcctatgagtccggtgacctctgcacatgctggcacgtacaggtgttatgggagctacagttccaacccgcaccttcttagtcacccttcagaaccgcttgagctagtcgtgtccggacatagcggaggttctagtttgccacccacggggccgcctagtaccccgggccttggcagatatctggag

SEQ ID NO: 3918 - DNA, 714 bp, Homo Sapiens
caggcagggcccctccccaaacccaccctctgggctgagccaggctctgtgatcagctgggggaactctgtgaccatctggtgtcaggggaccctggaggctcgggagtaccgtctggataaagaggaaagcccagcaccctgggacagacagaacccactggagcccaagaacaaggccagattctccatcccatccatgacagaggactatgcagggagataccgctgttactatcgcagccctgtaggctggtcacagcccagtgaccccctggagctggtgatgacaggagcctacagtaaacccaccctttcagccctgccgagtcctcttgtgacctcaggaaagagcgtgaccctgctgtgtcagtcacggagcccaatggacactttccttctgatcaaggagcgggcagcccatcccctactgcatctgagatcagagcacggagctcagcagcaccaggctgaattccccatgagtcctgtgacctcagtgcacggggggacctacaggtgcttcagctcacacggcttctcccactacctgctgtcacaccccagtgaccccctggagctcatagtctcaggatccttggagggtcccaggccctcacccacaaggtccgtctcaacagctgcaggccctgaggaccagcccctcatgcctacagggtcagtcccccacagtggtctgagaaggcactgggag

SEQ ID NO: 3919 - DNA, 1305 bp, Homo Sapiens
ggcaccctccccaaacccaccctctgggctgagccagcctctgtgatagctcgggggaagcccgtgaccctctggtgtcaggggcccctggagactgaggagtaccgtctggataaggagggactcccatgggcccggaagagacagaacccactggagcctggagccaaggccaagttccacattccatccacggtgtatgacagtgcagggcgataccgctgctactatgagacccctgcaggctggtcagagcccagtgaccccctggagctggtggcgacaggattctatgcagaacccactcttttagccctgccgagtcctgtggtggcctcaggaggaaatgtgaccctccagtgtgatacactggacggacttctcacgtttgttcttgttgaggaagaacagaagctccccaggaccctgtactcacagaagctccccaaagggccatcccaggccctgttccctgtgggtcccgtgacccccagctgcaggtggaggttcagatgctattactattacaggaaaaaccctcaggtgtggtcgaaccccagtgacctcctggagattctggtcccaggcgtgtctaggaagccctccctcctgatcccgcagggctctgtcgtggcccgcggaggcagcctgaccctgcagtgtcgctctgatgtcggctatgacatattcgttctgtacaaggagggggaacatgacctcgtccagggctctggccagcagccccaggctgggctctcccaggccaacttcaccctgggccctgtgagccgctcccacgggggccagtacagatgctacggtgcacacaacctctcccctaggtggtcggcccccagcgaccccctggacatcctgatcgcaggactgatccctgacatacccgccctctcggtgcagccgggccccaaggtggcctcaggagagaacgtgaccctgctgtgtcagtcatggcatcagatagacactttctttttgaccaaggagggggcagcccatcccccgctgtgtctaaagtcaaagtaccagtcttatagacaccaggctgaattctccatgagtcctgtgacctcagcccagggtggaacctaccgatgctacagcgcaatcaggtcctacccctacctgctgtccagccctagttacccccaggagctcgtggtctcaggaccctctggggatcccagcctctcacctacaggctccacccccacacctggccctgaggaccagcccctcacccccacggggttggatccccagagtggtctgggaaggcacctgggg

SEQ ID NO: 3920 - DNA, 1272 bp, Homo Sapiens
gggcccttccccaaacccaccctctgggctgagccaggctctgtgatcagctgggggagccccgtgaccatctggtgtcaggggagcctggaggcccaggagtaccaactggataaagagggaagcccagagcccttggacagaaataacccactggaacccaagaacaaggccagattctccatcccatccatgacacagcaccatgcagggagataccgctgccactattacagctctgcaggctggtcagagcccagcgaccccctggagctggtgatgacaggattctacaacaaacccaccctctcagccctgcccagccctgtggtggcctcaggggggaatatgaccctccgatgtggctcacagaagggatatcaccattttgttctgatgaaggaaggagaacaccagctcccccggaccctggactcacagcagctccacagtggggggttccaggccctgttccctgtgggccccgtgacccccagccacaggtggaggttcacatgctattactattatacaaacaccccccgggtgtggtcccaccccagtgaccccctggagattctgccctcaggcgtgtctaggaagccctccctcctgaccctgcagggccctgtcctggcccctgggcagagcctgaccctccagtgtggctctgatgtcggctacgacagatttgttctgtataaggagggggaacgtgacttcctccagcgccctggccagcagccccaggctgggctctcccaggccaacttcaccctgggccctgtgagcccctcccacgggggccagtacaggtgctatggtgcacacaacctctcctccgagtggtcggcccccagcgaccccctgaacatcctgatggcaggacagatctatgacaccgtctccctgtcagcacagccgggccccacagtggcctcaggagagaacgtgaccctgctgtgtcagtcacggggttattttgacactttccttctgaccaaagaaggggcagcccatcccccactgcgtctgagatcaatgtacggagctcataagtaccaggctgaattccccatgagtcctgtgacctcagcccacgcggggacctacaggtgctacggctcatacagctccaacccccacctgctgtctttccccagtgagcccctggaactcatggtctcaggacactctggaggctccagcctcccacccacagggccgccctccacacctgcctcacacgccaaggattacacagtggagaat

SEQ ID NO: 3921 - DNA, 1560 bp, Homo Sapiens
tgcccgccccgctgcgagtgctccgcccaggaccgcgctgtgctgtgccaccgcaagcgctttgtggcagtccccgagggcatccccaccgagacgcgcctgctggacctaggcaagaaccgcatcaaaacgctcaaccaggacgagttcgccagcttcccgcacctggaggagctggagctcaacgagaacatcgtgagcgccgtggagcccggcgccttcaacaacctcttcaacctccggacgctgggtctccgcagcaaccgcctgaagctcatcccgctaggcgtcttcactggcctcagcaacctgaccaagctggacatcagcgagaacaagatcgttatcctactggactacatgtttcaggacctgtacaacctcaagtcactggaggttggcgacaatgacctcgtctacatctctcaccgcgccttcagcggcctcaacagcctggagcagctgacgctggagaaatgcaacctgacctccatccccaccgaggcgctgtcccacctgcacggcctcatcgtcctgaggctccggcacctcaacatcaatgccatccgggactactccttcaagaggctgtaccgactcaaggtcttggagatctcccactggccctacttggacaccatgacacccaactgcctctacggcctcaacctgacgtccctgtccatcacacactgcaatctgaccgctgtgccctacctggccgtccgccacctagtctatctccgcttcctcaacctctcctacaaccccatcagcaccattgagggctccatgttgcatgagctgctccggctgcaggagatccagctggtgggcgggcagctggccgtggtggagccctatgccttccgcggcctcaactacctgcgcgtgctcaatgtctctggcaaccagctgaccacactggaggaatcagtcttccactcggtgggcaacctggagacactcatcctggactccaacccgctggcctgcgactgtcggctcctgtgggtgttccggcgccgctggcggctcaacttcaaccggcagcagcccacgtgcgccacgcccgagtttgtccagggcaaggagttcaaggacttccctgatgtgctactgcccaactacttcacctgccgccgcgcccgcatccgggaccgcaaggcccagcaggtgtttgtggacgagggccacacggtgcagtttgtgtgccgggccgatggcgacccgccgcccgccatcctctggctctcaccccgaaagcacctggtctcagccaagagcaatgggcggctcacagtcttccctgatggcacgctggaggtgcgctacgcccaggtacaggacaacggcacgtacctgtgcatcgcggccaacgcgggcggcaacgactccatgcccgcccacctgcatgtgcgcagctactcgcccgactggccccatcagcccaacaagaccttcgctttcatctccaaccagccgggcgagggagaggccaacagcacccgcgccactgtgcctttccccttcgacatcaagaccctcatcatcgccacc

SEQ ID NO: 3922 - DNA, 1554 bp, Homo Sapiens
tgccccgctcgctgtgagtgctctgcccagaacaaatctgttagctgtcacagaaggcgattgatcgccatcccagagggcattcccatcgaaaccaaaatcttggacctcagtaaaaacaggctaaaaagcgtcaaccctgaagaattcatatcatatcctctgctggaagagatagacttgagtgacaacatcattgccaatgtggaaccaggagcattcaacaatctgtttaacctgcgttccctccgcctaaaaggcaatcgtctaaagctggtccctttgggagtattcacggggctgtccaatctcactaagcttgacattagtgagaataagattgtcattttactagactacatgttccaagatctacataacctgaagtctctagaagtgggggacaatgatttggtttatatatcacacagggcattcagtgggcttcttagcttggagcagctcaccctggagaaatgcaacttaacagcagtaccaacagaagccctctcccacctccgcagcctcatcagcctgcatctgaagcatctcaatatcaacaatatgcctgtgtatgcctttaaaagattgttccacctgaaacacctagagattgactattggcctttactggatatgatgcctgccaatagcctctacggtctcaacctcacatccctttcagtcaccaacaccaatctgtctactgtacccttccttgcctttaaacacctggtatacctgactcaccttaacctctcctacaatcccatcagcactattgaagcaggcatgttctctgacctgatccgccttcaggagcttcatatagtgggggcccagcttcgcaccattgagcctcactccttccaagggctccgcttcctacgcgtgctcaatgtgtctcagaacctgctggaaactttggaagagaatgtcttctcctcccctagggctctggaggtcttgagcattaacaacaaccctctggcctgtgactgccgccttctctggatcttgcagcgacagcccaccctgcagtttggtggccagcaacctatgtgtgctggcccagacaccatccgtgagaggtctttcaaggatttccatagcactgccctttctttttactttacctgcaaaaaacccaaaatccgtgaaaagaagttgcagcatctgctagtagatgaagggcagacagtccagctagaatgcagtgcagatggagacccgcagcctgtgatttcctgggtgacaccccgaaggcgtttcatcaccaccaagtccaatggaagagccaccgtgttgggtgatggcaccttggaaatccgctttgcccaggatcaagacagcgggatgtatgtttgcatcgctagcaatgctgctgggaatgataccttcacagcctccttaactgtgaaaggattcgcttcagatcgttttctttatgcgaacaggacccctatgtacatgaccgactccaatgacaccatttccaatggcaccaatgccaatactttttccctggaccttaaaacaatactggtgtctaca

SEQ ID NO: 3923 - DNA, 1521 bp, Homo Sapiens
tgcccagctcgttgcgagtgcactgtgcaaactagggccgtcgcttgcacgagacgtagattgacggcagtaccagacggaataccagccgagacacgtctgctggaacttagtcgtaacagaattcgttgtcttaaccccggggatctggccgcgcttccggccctggaggagctagacttgagcgaaaatgcaatcgcacacgtagagcctggtgcatttgctaacttaccaagattgagagtattgaggttgcgtggcaaccaactgaagttgattccacccggtgttttcacgcgtctagataatcttaccctactagacctgagtgagaacaaattagtcatactgcttgattacacttttcaagacttgcatagtttaaggcgtcttgaggtcggtgacaatgatttagtgttcgtttctagacgtgcatttgccgggcttttggctctagaggagcttactctggagcgttgtaacttgactgcgctgagcggtgaaagtttaggtcatctgaggagtctgggagcattacgtctacgtcacctagccattgcttcactagaggatcagaacttccgtagattgcctgggttattgcatttggaaatcgacaactggcctctgcttgaggaagtggcggcgggatccttgagggggctgaacttgacttccctgtcagtcacccacactaacatcacggctgtgccagccgcggccctgcgtcaccaggcccatcttacctgtcttaacttgtcacacaatcccatctccacagtgcctcgtgggtctttcagagacttggtacgtttacgtgaattgcacctggctggtgcattattggccgttgtggaaccgcaagcattcctagggcttaggcaaattagattgctaaatcttagtaacaacttattaagtacgttagaggaatcaacctttcacagcgtgaacacgttggagacgttaagggttgatggcaacccactggcctgcgactgccgtcttctatggatcgtacaaagaagaaagaccttgaatttcgatggtagacttccagcatgcgcgacaccggccgaagtaagaggggatgctttaaggaacctaccagattcagtactattcgagtacttcgtttgtcgtaaaccaaaaatcagagagaggaggcttcaaagggtgaccgcgacagctggggaagatgtaaggtttttatgcagagctgagggggagccagccccgaccgtcgcctgggtaaccccacaacataggcccgtaaccgcaacgtccgcaggacgtgctcgtgtactaccgggcggtaccctggaaatccaagacgcgcgtcctcaagattcaggcacttatacgtgtgttgcaagtaatgccggtggtaatgacacttattttgcgacgctgacagtacgtccagaacctgctgctaacagaactcccggagaggcgcacaacgagactctagcagcgttgcgtgcgccattagacttaacaaccattctagtttctacg

SEQ ID NO: 3924 - DNA, 1515 bp, Homo Sapiens
ggcagctgccctgctgtgtgtgactgcacctcccagccccaggctgtgctctgtggccacaggcaactggaggctgtacctggaggactcccactggacactgagctcctggacctgagtgggaaccgcctgtgggggctccagcagggaatgctctcccgcctgagcctgctccaggaattggacctcagctacaaccagctctcaacccttgagcctggggccttccatggcctacaaagcctactcaccctgaggctgcagggcaatcggctcagaatcatggggcctggggtcttctcaggcctctctgctctgaccctgctggacctccgcctcaaccagattgttctcttcctagatggagcttttggggagctaggcagcctccagaagctggaggttggggacaaccacctggtatttgtggctccgggggcctttgcagggctagccaagttgagcaccctcaccctggagcgctgcaacctcagcacagtgcctggcctagcccttgcccgtctcccggcactagtggccctaaggcttagagaactggatattgggaggctgccagctggggccctgcgggggctggggcagctcaaggagctggagatccacctctggccatctctggaggctctggaccctgggagcctggttgggctcaatctcagcagcctggccatcactcgctgcaatctgagctcggtgcccttccaagcactgtaccacctcagcttcctcagggtcctggatctgtcccagaatcccatctcagccatcccagcccgaaggctcagccccctggtgcggctccaggagctacgcctgtcaggggcatgcctcacctccattgctgcccatgccttccatggcttgactgccttccacctcctggatgtggcagataacgcccttcagacactagaggaaacagctttcccttctccagacaaactggtcaccttgaggctgtctggcaaccccctaacctgtgactgccgcctcctctggctgctccggctccgccgccacctggactttggcatgtccccccctgcctgtgctggcccccatcatgtccaggggaagagcctgaaggagttttcagacatcctgcctccagggcacttcacctgcaaaccagccctgatccgaaagtcggggcctcgatgggtcattgcagaggagggcgggcatgcggttttctcctgctctggagatggagacccagcccccactgtctcctggatgaggcctcatggggcttggctgggcagggctgggagagtaagggtcctagaggatgggacactggagatccgctcagtgcagctacgggacagaggggcctatgtctgtgtggttagcaatgtcgctgggaatgactccctgaggacctggctggaagtcatccaggtggaaccaccaaacggcacactttctgaccccaacatcaccgtgccagggatcccagggcctttttttctggatagcagaggtgtggcc

SEQ ID NO: 3925 - DNA, 1260 bp, Homo Sapiens; identical to SEQ ID NO: 3367

SEQ ID NO: 3926 - DNA, 747 bp, Homo Sapiens
gacgacccttacaacccctacaagtactctgacgacaacccttattacaactactacgatacttatgaaaggcccagacctgggggcaggtaccggcccggatacggcactggctacttccagtacggtctcccagacctggtggccgacccctactacatccaggcgtccacgtacgtgcagaagatgtccatgtacaacctgagatgcgcggcggaggaaaactgtctggccagtacagcatacagggcagatgtcagagattatgatcacagggtgctgctcagatttccccaaagagtgaaaaaccaagggacatcagatttcttacccagccgaccaagatattcctgggaatggcacagttgtcatcaacattaccacagtatggatgagtttagccactatgacctgcttgatgccaacacccagaggagagtggctgaaggccacaaagcaagtttctgtcttgaagacacatcctgtgactatggctaccacaggcgatttgcatgtactgcacacacacagggattgagtcctggctgttatgatacctatggtgcagacatagactgccagtggattgatattacagatgtaaaacctggaaactatatcctaaaggtcagtgtaaaccccagctacctggttcctgaatctgactataccaacaatgttgtgcgctgtgacattcgctacacaggacatcatgcgtatgcctcaggctgcacaatttcaccgtat

SEQ ID NO: 3927 - DNA, 1440 bp, Homo Sapiens
cggcaggcgccgtccctgcccctgccggggcgcgtgggctcggacaccgtgcgcggccaggcgcggcacccattcggctttggccaggtgcccgacaactggcgcgaggtggccgtcggggacagcacgggcatggcccgggcccgcacctccgtctcccagcaacggcacggggactccgcctcctcggtctcggcttcggccttcgccagcacctaccgccagcagccctcctacccgcagcagttcccctacccgcaggcgcccttcgtcagccagtacgagaactacgaccccgcgtcgcggacctacgaccagggtttcgtgtactaccggcccgcgggcggcggcgtgggcgcgggggcggcggccgtggcctcggcgggggtcatctacccctaccagccccgggcgcgctacgaggagtacggcggcggcgaagagctgcccgagtacccgcctcagggcttctacccggcccccgagaggccctacgtgccgccgccgccgccgccccccgacggcctggaccgccgctactcgcacagtctgtacagcgagggcacccccggcttcgagcaggcctaccctgaccccggtcccgaggcggcgcaggcccatggcggagacccacgcctgggctggtacccgccctacgccaacccgccgcccgaggcgtacgggccgccgcgcgcgctggagccgccctacctgccggtgcgcagctccgacacgcccccgccgggtggggagcggaacggcgcgcagcagggccgcctcagcgtgggcagcgtgtaccggcccaaccagaacggccgcggtctccctgacttggtcccagaccccaactatgtgcaagcatccacttatgtgcagagagcccacctgtactccctgcgctgtgctgcggaggagaagtgtctggccagcacagcctatgcccctgaggccaccgactacgatgtgcgggtgctactgcgcttcccccagcgcgtgaagaaccagggcacagcagacttcctccccaaccggccacggcacacctgggagtggcacagctgccaccagcattaccacagcatggacgagttcagccactacgacctactggatgcagccacaggcaagaaggtggccgagggccacaaggccagtttctgcctggaggacagcacctgtgacttcggcaacctcaagcgctatgcatgcacctctcatacccagggcctgagcccaggctgctatgacacctacaatgcggacatcgactgccagtggatcgacataaccgacgtgcagcctgggaactacatcctcaaggtgcacgtgaacccaaagtatattgttttggagtctgacttcaccaacaacgtggtgagatgcaacattcactacacaggtcgctacgtttctgcaacaaactgcaaaattgtccaatcc

SEQ ID NO: 3928 - DNA, 1887 bp, Homo Sapiens
ggtaacctccctggtgttcactgcggcccaagctccggggcaggccctggttttggcccgggctcgtggagccgctctctcgatcgagccctggaggaggcggcggtcactggggtgctgagcctgagcggccggaaactgagggagtttccccggggagcggccaaccacgacctgacggacaccacccgggcggacctgtcgcgaaatcgcctttcagaaattcctatagaagcatgtcactttgtttctctggaaaatctcaacttgtaccaaaattgtattcgttatattccagaggcaattttaaacctacaagctctaacattcttaaatattagtcggaaccaactgtcaacattgccggtacacttgtgtaatttgccattgaaagtcttaattgctagtaataacaaattggtgtcacttccagaagaaattggacaccttagacatttgatggaacttgatgtgagctgcaatgaaattcaaactataccttcccaaattggtaacctggaggccttgagagaccttaatgtaagaagaaatcacctagtacatttgcctgaagagctggcggagttgcctttgatacggttagacttctcatgcaataaaattaccacaatccctgtttgttatcggaacctcaggcacctacagacgatcaccctagataacaatccactacaatcacctcctgcacagatatgtataaaaggcaaagtccacatatttaaatacctgaacatacaagcttgtaagattgctccagatctgccggattatgataggagaccgttgggttttggctcctgccatgaagaactgtactcaagtcgcccttatggagcccttgattcaggcttcaatagtgtggacagtggtgataagagatggtcagggaatgaacctacagatgaattttcagatctgcctcttcgagtagcagagattactaaagaacaaagactacgaagagaaagccagtaccaagagaaccgcggcagtttggtagtaacaaacggcggagtggaacatgatctggatcagattgactacatagacagctgcaccgcagaggaagaggaggccgaggtgagacagcccaagggaccagacccagacagccttagttcacagtttatggcgtatattgaacagcggcgaatctctcatgagggttcaccagtaaagccagtagccattagggagtttcaaaaaacagaagatatgagaagatacttacatcaaaacagggttccagctgagccatcttccctcctgtcactatcagcaagtcacaatcagctgtcacacacagacctggaacttcatcagagaagggagcagttagtagagcgcactcggagagaggctcagcttgctgccctgcagtatgaggaggagaaaataaggaccaagcagatccagagagatgctgtcctggactttgtcaaacaaaaagcatcacaaagtccacaaaaacagcacccgctcctagatggcgtagatggtgagtgccccttcccatccagaaggtctcagcacactgatgatagtgccttgtgcatgtcgctgtcagggttgaatcaagtgggctgtgctgctaccctgcctcattcttctgccttcacgcctcttaagagtgatgacagacctaatgctctattaagttcacctgcaacagaaacagttcatcattcccctgcatattcttttcctgctgctatccagagaaatcagcctcagcgccctgaaagcttccttttccgagcaggtgtcagggcagaaaccaacaaaggtcatgcttcaccccttcctccatctgctgcacctaccactgattctacagattccataacaggacagaattcaagacag

SEQ ID NO: 3929 - DNA, 714 bp, Homo Sapiens
ccattgatcacacggcaggcggggggccgggccctggtggtggaaggccaggcggtgagcctgcgctgccgagcggtgggtgaccccgagccggtggtgcactgggtggcacctgatgggcggctgctggggaactccagccggacccgggtccggggggacgggacgctggatgtgaccatcaccaccttgagggacagtggcaccttcacttgtatcgcctccaatgctgctggggaagcgacggcgcccgtggaggtgtgcgtggtacctctgcctctgatggcacccccgccggctgccccgccgcctctcaccgagcccggctcctctgacatcgccacgccgggcagaccaggtgccaacgattctgcggctgagcgtcggctcgtggcagccgagctcacctcgaactccgtgctcatccgctggccagcccagaggcctgtgcccggaatacgcatgtaccaggttcagtacaacagttccgttgatgactccctcgtctacaggatgatcccgtccaccagtcagaccttcctggtgaatgacctggcggcgggccgtgcctacgacttgtgcgtgctggcggtctacgacgacggggccacagcgctgccggcaacgcgagtggtgggctgtgtacagttcaccaccgctggggatccggcgccctgccgcccgctgagggcccatttcttgggcggcaccatg

SEQ ID NO: 3930 - DNA, 1542 bp, Homo Sapiens
tgccccaagtactgtgtctgccagaatctgtctgagtcactggggaccctgtgcccctccaaggggctgctctttgtaccccctgatattgaccggcggacagtggagctgcgcctgggcggcaacttcatcatccacatcagccgccaggactttgccaacatgacggggctggtggacctgaccctgtccaggaacaccatcagccacatccagcccttttcctttctggacctcgagagcctccgctccctgcatcttgacagcaatcggctgccaagccttggggaggacaccctccggggcctggtcaacctgcagcaccttatcgtgaacaacaaccagctgggcggcatcgcagatgaggcttttgaggacttcctgctgacattggaggatctggacctctcctacaacaacctccatggcctgccgtgggactccgtgcgacgcatggtcaacctccaccagctgagcctggaccacaacctgctggatcacatcgccgagggcacctttgcagacctgcagaaactggcccgcctggatctcacctccaatcggctgcagaagctgccccctgatcccatctttgcccgctcccaggcttcggctttgacagccacaccctttgccccacccttgtcctttagttttgggggtaacccacttcactgcaattgtgagcttctctggctgcggaggctcgagcgggacgatgacctggaaacctgtggctccccagggggcctcaagggtcgctacttctggcatgtgcgtgaggaggagtttgtgtgcgagccgcctctcatcacccagcacacacacaagttgctggttctggagggccaggcggccacactcaagtgcaaagccattggggaccccagcccccttatccactgggtagcccccgatgaccgcctggtagggaactcctcaaggaccgctgtctatgacaatggcaccctggacatcttcatcaccacatctcaggacagtggtgccttcacctgcattgctgccaatgctgccggagaggccacggccatggtggaggtctccatcgtccagctgccacacctcagcaacagcaccagccgcactgcaccccccaagtcccgcctctcagacatcactggctccagcaagaccagccggggaggtggaggcagtgggggcggagagcctcccaaaagccccccggaacgggctgtgcttgtgtctgaagtgaccaccacctcggccctggtcaagtggtctgtcagcaagtcagcaccccgggtgaagatgtaccagctgcagtacaactgctctgacgatgaggtactgatttacaggatgatcccagcctccaacaaggccttcgtggtcaacaacctggtgtcagggactggctacgacttgtgtgtgctggccatgtgggatgacacagccacgacactcacggccaccaacatcgtgggctgcgcccagttcttcaccaaggctgactacccgcagtgccagtccatgcacagccagattctgggcggcaccatg

SEQ ID NO: 3931 - DNA, 1569 bp, Homo Sapiens
tcatccccaccccagtcagccacacccagcccatgtccccgccgctgccgctgccagacacagtcgctgcccctaagcgtgctgtgcccaggggcaggcctcctgttcgtgccaccctcgctggaccgccgggcagccgagctgcggctggcagacaacttcatcgcctccgtgcgccgccgcgacctggccaacatgacaggcctgctgcatctgagcctgtcgcggaacaccatccgccacgtggctgccggcgccttcgccgacctgcgggccctgcgtgccctgcacctggatggcaaccggctgacctcactgggcgagggccagctgcgcggcctggtcaacttgcgccacctcatcctcagcaacaaccagctggcagcgctggcggccggcgccctggatgattgtgccgagacactggaggacctcgacctctcctacaacaacctcgagcagctgccctgggaggccctgggccgcctgggcaacgtcaacacgttgggcctcgaccacaacctgctggcttctgtgcccgccggcgctttttcccgcctgcacaagctggcccggctggacatgacctccaaccgcctgaccacaatcccacccgacccactcttctcccgcctgcccctgctcgccaggccccggggctcgcccgcctctgccctggtgctggcctttggcgggaaccccctgcactgcaactgcgagctggtgtggctgcgtcgcctggcgcgggaggacgacctcgaggcctgcgcgtccccacctgctctgggcggccgctacttctgggcggtgggcgaggaggagtttgtctgcgagccgcccgtggtgactcaccgctcaccacctctggctgtgcccgcaggtcggccggctgccctgcgctgccgggcagtgggggacccagagccccgtgtgcgttgggtgtcaccccagggccggctgctaggcaactcaagccgtgcccgcgccttccccaatgggacgctggagctgctggtcaccgagccgggtgatggtggcatcttcacctgcattgcggccaatgcagctggcgaggccacagctgctgtggagctgactgtgggtcccccaccacctcctcagctagccaacagcaccagctgtgaccccccgcgggacggggatcctgatgctctcaccccaccctccgctgcctctgcttctgccaaggtggccgacactgggccccctaccgaccgtggcgtccaggtgactgagcacggggccacagctgctcttgtccagtggccggatcagcggcctatcccgggcatccgcatgtaccagatccagtacaacagctcggctgatgacatcctcgtctacaggatgatcccggcggagagccgctcgttcctgctgacggacctggcgtcaggccggacctacgatctgtgcgtgctcgccgtgtatgaggacagcgccacggggctcacggccacgcggcctgtgggctgcgcccgcttctccaccgaacctgcgctgcggccatgcggggcgccgcacgctcccttcctgggcggcacgatg

SEQ ID NO: 3932 - DNA, 1506 bp, Homo Sapiens
tgcccgctgccctgcgtctgccagaacctgtccgagtcgctcagcaccctctgtgcccaccgaggcctgctgtttgtgccgcccaacgtggaccggcgcacagtggagctgcggctggctgacaacttcatccaggccctggggccccctgacttccgcaacatgacgggactggtggacctgacactgtctcgcaatgccatcacccgcattggggcccgcgcctttggggacctcgagagcctgcgttccctccaccttgacggcaacaggctggtggagctgggcaccgggagcctccggggccccgtcaatctgcagcacctcatcctcagcggcaaccagctgggccgcatcgcgccgggagccttcgacgacttcctagagagcctggaggacctggacctgtcctacaacaacctccggcaggtgccctgggccggcatcggcgccatgcctgccctgcacaccctcaacctggaccataaccttattgacgcactgcccccaggcgccttcgcccagctcggtcagctctcccgcctggacctcacctccaaccgcctggccacgctggctccggacccgcttttctctcgtgggcgtgatgcagaggcctctcccgcccccctggtgctgagctttagcgggaaccccctgcactgcaactgtgagctgctgtggctgcggcggctggcgcggccggacgacctggaaacgtgcgcctccccgcccggcctggccggccgctacttctgggcagtgcccgagggcgagttctcctgtgagccgcccctcattgcccgccacacgcagcgcctctgggtgctggaaggccagcgggccacgctgcggtgccgggccctgggtgaccccgcgcctaccatgcactgggtcggtcctgacgaccggttggttggcaactcctcccgagcccgggctttccccaacgggaccttagagattggggtgaccggcgctggggacgctgggggctacacctgcatcgccaccaaccctgctggtgaggccacagcccgagtagaactgcgggtgctggccttgccccatggtgggaacagcagtgccgaggggggccgccccgggccctcggacatcgccgcctccgctcgcactgctgccgagggtgaggggacgctggagtctgagccagccgtgcaggtgacggaggtgaccgccacctcagggctggtgagctggggtcccgggcggccagccgacccagtgtggatgttccaaatccagtacaacagcagcgaagatgagaccctcatctaccggattgtcccagcctccagccaccacttcctgctgaagcacctcgtccccggcgctgactatgacctctgcctgctggccttgtcaccggccgctgggccctctgacctcacggccaccaggctgctgggctgtgcccatttctccacgctgccggcctcgcccctgtgccacgccctgcaggcccacgtgctgggcgggaccctg

SEQ ID NO: 3933 - DNA, 1536 bp, Homo Sapiens
cagatctgtccaaagcgttgtgtctgtcagattttgtctcctaatcttgcaaccctttgtgccaagaaagggcttttatttgttccaccaaacattgacagaagaactgtggaactgcggttggcagacaattttgttacaaatattaaaaggaaagattttgccaatatgaccagcttggtggacctgactctatccaggaatacaataagttttattacacctcatgctttcgctgacctacgaaatttgagggctttgcatttgaatagcaacagattgactaaaattacaaatgatatgttcagtggtctttccaatcttcatcatttgatactgaacaacaatcagctgactttaatttcctctacagcgtttgatgatgtcttcgcccttgaggagctggatctgtcctataataatctagaaaccattccttgggatgctgttgagaagatggttagcttgcatacccttagtttggatcacaatatgattgataacattcctaaggggaccttctcccatttgcacaagatgactcggttagatgtgacatcaaataaattgcagaagctaccacctgaccctctctttcagcgagctcaggtactagcaacctcaggaatcataagcccatctacttttgcattaagttttggtggaaacccattgcattgcaattgtgaattgttgtggttgaggcgtctgtccagagaagatgacttagagacctgtgcttctcctccacttttaactggccgctacttttggtcaattcctgaagaagagtttttgtgtgagcctcctctcattactcgtcatacacatgagatgagagtcctggagggacaaagggcaacactgaggtgcaaagccaggggagaccctgagcctgcaattcactggatttctcctgaagggaagcttatttcaaatgcaacaagatctctggtgtatgataacggaacacttgacattcttatcacaactgtaaaggatacaggtgcttttacctgcattgcttccaatcctgctggggaagcaacacaaatagtggatcttcatataattaagctccctcacttactaaatagtacaaaccatatccatgagcctgatcctggttcttcagatatctcaacttctaccaagtcaggttctaatacaagcagtagtaatggtgatactaaattgagtcaagataaaattgtggtggcagaagctacatcatcaacggcactacttaaatttaattttcaaagaaatatccctggaatacgtatgtttcaaatccagtacaatggtacttatgatgacacccttgtttacagaatgatacctcctacgagcaaaacttttctggtcaataatctggctgctggaactatgtatgacttgtgtgtcttggccatatatgatgatggcatcacttccctcactgccacaagagtcgtgggttgcatccagtttactacggaacaggattatgtgcgttgccatttcatgcagtcccagtttttgggaggcaccatg

SEQ ID NO: 3934 - DNA, 936 bp, Homo Sapiens
gtcaccctgagccccaaagactgccaggtgttccgctcagaccatggcagctccatctcctgtcaaccacctgccgaaatccccggctacctgccagccgacaccgtgcacctggccgtggaattcttcaacctgacccacctgccagccaacctcctccagggcgcctctaagctccaagaattgcacctctccagcaatgggctggaaagcctctcgcccgaattcctgcggccagtgccgcagctgagggtgctggatctaacccgaaacgccctgaccgggctgccctcgggcctcttccaggcctcagccaccctggacaccctggtattgaaagaaaaccagctggaggtcctggaggtctcgtggctacacggcctgaaagctctggggcatctggacctgtctgggaaccgcctccggaaactgccccccgggctgctggccaacttcaccctcctgcgcacccttgaccttggggagaaccagttggagaccttgccacctgacctcctgaggggtccgctgcaattagaacggctacatctagaaggcaacaaattgcaagtactgggaaaagatctcctcttgccgcagccggacctgcgctacctcttcctgaacggcaacaagctggccagggtggcagccggtgccttccagggcctgcggcagctggacatgctggacctctccaataactcactggccagcgtgcccgaggggctctgggcatccctagggcagccaaactgggacatgcgggatggcttcgacatctccggcaacccctggatctgtgaccagaacctgagcgacctctatcgttggcttcaggcccaaaaagacaagatgttttcccagaatgacacgcgctgtgctgggcctgaagccgtgaagggccagacgctcctggcagtggccaagtcccag

SEQ ID NO: 3935 - DNA, 2211 bp, Homo Sapiens
gccggcccgcgggcgccctgcgcggccgcctgcacttgcgctggggactcgctggactgcggtgggcgcgggctggctgcgttgcccggggacctgccctcctggacgcggagcctaaacctgagttacaacaaattctctgagattgaccctgctggttttgaggacttgccgaacctacaggaagtgtacctcaataataatgagttgacagcggtaccatccctgggcgctgcttcatcacatgtcgtctctctctttctgcagcacaacaagattcgcagcgtggaggggagccagctgaaggcctacctttccttagaagtgttagatctgagtttgaacaacatcacggaagtgcggaacacctgctttccacacggaccgcctataaaggagctcaacctggcaggcaatcggattggcaccctggagttgggagcatttgatggtctgtcacggtcgctgctaactcttcgcctgagcaaaaacaggatcacccagcttcctgtaagagcattcaagctacccaggctgacacaactggacctcaatcggaacaggattcggctgatagagggcctcaccttccaggggctcaacagcttggaggtgctgaagcttcagcgaaacaacatcagcaaactgacagatggggccttctggggactgtccaagatgcatgtgctgcacctggagtacaacagcctggtagaagtgaacagcggctcgctctacggcctcacggccctgcatcagctccacctcagcaacaattccatcgctcgcattcaccgcaagggctggagcttctgccagaagctgcatgagttggtcctgtccttcaacaacctgacacggctggacgaggagagcctggccgagctgagcagcctgagtgtcctgcgtctcagccacaattccatcagccacattgcggagggtgccttcaagggactcaggagcctgcgagtcttggatctggaccataacgagatttcgggcacaatagaggacacgagcggcgccttctcagggctcgacagcctcagcaagctccttttattagagccatcccagtctgctggctgcagctccccgtcccagccccatatgtctgctgggggaaggactctgtttggaaacaagatcaagtctgtggctaagagagcattctcggggctggaaggcctggagcacctgaaccttggagggaatgcgatcagatctgtccagtttgatgcctttgtgaagatgaagaatcttaaagagctccatatcagcagcgacagcttcctgtgtgactgccagctgaagtggctgcccccgtggctaattggcaggatgctgcaggcctttgtgacagccacctgtgcccacccagaatcactgaagggtcagagcattttctctgtgccaccagagagtttcgtgtgcgatgacttcctgaagccacagatcatcacccagccagaaaccaccatggctatggtgggcaaggacatccggtttacatgctcagcagccagcagcagcagctcccccatgacctttgcctggaagaaagacaatgaagtcctgaccaatgcagacatggagaactttgtccacgtccacgcgcaggacggggaagtgatggagtacaccaccatcctgcacctccgtcaggtcactttcgggcacgagggccgctaccaatgtgtcatcaccaaccactttggctccacctattcacataaggccaggctcaccgtgaatgtgttgccatcattcaccaaaacgccccacgacataaccatccggaccaccaccatggcccgcctcgaatgtgctgccacaggtcacccaaaccctcagattgcctggcagaaggatggaggcacggatttccccgctgcccagaccccatccttggtggtccccttggaagaccgtgtggtatctgtgggagaaacagtggccctccaatgcaaagccacggggaaccctccgccccgcatcacctggttcaagggggaccgcccgctgagcctcactgagcggcaccacttgacccctgacaaccagctcctggtggttcagaacgtggtggcagaggatgcgggccgatatacctgtgagatgtccaacaccctgggcacggagcgagctcacagccagctgagcgtcctgcccgcagcaggctgcaggaaggatgggaccacggtaggc

SEQ ID NO: 3936 - DNA, 2301 bp, Homo Sapiens
ggtctctgccccgcgccctgctcctgccgcattcctctcctggactgcagtcgcaggaaattgcccgcaccgagctggagggcgctgtcgggcttgctgccccccgacaccgctatcctggatttcagtcataatcggttgtctaactggaacatcagcttggaatcacaaacattacaggaagtgaaaatgaattacaatgaactaacagaaatcccgtattttggagaacctacatctaatattactctactttcattagtccataatataatcccagaaataaatgcacaggcactccagttttaccctgctctggagagtttagacctcagctcaaatataatatcagaaatcaagacatcttcatttcctcgcatgcagcttaaatacctgaatttaagtaataacagaataaccaccttggaggctggttgcttcgataatttatcaagttccttattagtggtaaagttaaaccgtaaccgaatgagcatgattccacctaagatcttcaagctgcctcacctccaattcttggaacttaaaagaaacagaattaaaattgtggaaggtcttacattccaagggcttgactccttaagatctttgaaaatgcagcggaatggaattagcaaacttaaggatggagcattttttggcttgaataacatggaagaactagaactggaacacaacaaccttacacgagtaaacaaggggtggttgtatggcttgcgaatgttacagcagctctatgtgagccagaatgctattgaaagaatcagccctgatgcatgggagttctgccaaagactatccgaacttgatttgtcctataaccagctgacccgcctggatgaatctgcctttgtgggtctgagcttattggagagattgaatttaggagacaacagagtcactcatattgctgatggtgtatttagatttctttccaatcttcagacattagacttaagaaacaatgaaatttcatgggccatagaagatgctagtgaagcctttgctggactcacaagtctcactaaactaatcttacaaggaaaccagattaagtcaattacaaagaaagcattcattggtcttgaatcccttgagcatctagatttgaacaataatgctataatgtctatccaagaaaatgctttttctcagactcatttaaaagaactgattctgaacacaagcagtttgctctgtgactgccatttgaagtggctacttcaatggttggttgataataactttcaacattctgtgaatgtaagctgtgcacaccctgaatggctagcagggcaaagcatcctgaatgtggatctgaaagattttgtctgtgatgattttctcaagccacagataaggacacatcctgaaaccataattgctctaagaggcatgaatgtgactctgacgtgcactgcagtgagcagcagtgattcacccatgtccactgtgtggcgcaaagacagtgaaatcctgtatgacgtggatactgagaattttgttcgttattggcagcaagctggagaagctctggaatatactagtatcttacatcttttcaatgtgaatttcacagatgaaggaaaatatcagtgtattgttactaatcactttggttctaattattctcagaaagccaaactgactgtaaatgagatgccatcttttctgaaaacgccaatggatctgactattcgcactggtgccatggccagattagaatgtgctgcagagggacaccctgcacctcagatttcctggcagaaagatggtggtactgactttcctgcggctcgagaaagacgcatgcacgtcatgcccgaggatgacgtcttctttattgccaatgtgaaaatagaagatatgggaatctatagctgcatggcacaaaatacagcaggaggtctctcagcaaatgcttccctaacagtgttagagacaccctcatttattagacccctggaggataagacagtaacccgaggtgaaactgcggtgttacagtgcatagctggagggagtcctgcccctcgtctcaactggactaaagatgatgggcctttgctggtgacagaacgacatttctttgctgcagccaatcagcttctcatcattgtagatgccgggctagaagatgctgggaaatatacctgcattatgtctaacacccttgggacagaacgtggccacatttacctaaatgtcatttcatcccccaattgtgactcttcccagagtagcattgggcatgaagatgatggctggaccacagttggc

SEQ ID NO: 3937 - DNA, 2355 bp, Homo Sapiens
ggccggtccgacagcggcggtcgcggggaactcgggcagccctctggggtagccgccgagcgcccatgccccactacctgccgctgcctcggggacctgctggactgcagtcgtaagcggctagcgcgtcttcccgagccactcccgtcctgggtcgctcggctggacttaagtcacaacagattatctttcatcaaggcaagttccatgagccaccttcaaagccttcgagaagtgaaactgaacaacaatgaattggagaccattccaaatctgggaccagtctcggcaaatattacacttctctccttggctggaaacaggattgttgaaatactccctgaacatctgaaagagtttcagtcccttgaaactttggaccttagcagcaacaatatttcagagctccaaactgcatttccagccctacagctcaaatatctgtatctcaacagcaaccgagtcacatcaatggaacctgggtattttgacaatttggccaacacactccttgtgttaaagctgaacaggaaccgaatctcagctatcccacccaagatgtttaaactgccccaactgcaacatctcgaattgaaccgaaacaagattaaaaatgtagatggactgacattccaaggccttggtgctctgaagtctctgaaaatgcaaagaaatggagtaacgaaacttatggatggagctttttgggggctgagcaacatggaaattttgcagctggaccataacaacctaacagagattaccaaaggctggctttacggcttgctgatgctgcaggaacttcatctcagccaaaatgccatcaacaggatcagccctgatgcctgggagttctgccagaagctcagtgagctggacctaactttcaatcacttatcaaggttagatgattcaagcttccttggcctaagcttactaaatacactgcacattgggaacaacagagtcagctacattgctgattgtgccttccgggggctttccagtttaaagactttggatctgaagaacaatgaaatttcctggactattgaagacatgaatggtgctttctctgggcttgacaaactgaggcgactgatactccaaggaaatcggatccgttctattactaaaaaagccttcactggtttggatgcattggagcatctagacctgagtgacaacgcaatcatgtctttacaaggcaatgcattttcacaaatgaagaaactgcaacaattgcatttaaatacatcaagccttttgtgcgattgccagctaaaatggctcccacagtgggtggcggaaaacaactttcagagctttgtaaatgccagttgtgcccatcctcagctgctaaaaggaagaagcatttttgctgttagcccagatggctttgtgtgtgatgattttcccaaaccccagatcacggttcagccagaaacacagtcggcaataaaaggttccaatttgagtttcatctgctcagctgccagcagcagtgattccccaatgacttttgcttggaaaaaagacaatgaactactgcatgatgctgaaatggaaaattatgcacacctccgggcccaaggtggcgaggtgatggagtataccaccatccttcggctgcgcgaggtggaatttgccagtgaggggaaatatcagtgtgtcatctccaatcactttggttcatcctactctgtcaaagccaagcttacagtaaatatgcttccctcattcaccaagacccccatggatctcaccatccgagctggggccatggcacgcttggagtgtgctgctgtggggcacccagccccccagatagcctggcagaaggatgggggcacagacttcccagctgcacgggagagacgcatgcatgtgatgcccgaggatgacgtgttctttatcgtggatgtgaagatagaggacattggggtatacagctgcacagctcagaacagtgcaggaagtatttcagcaaatgcaactctgactgtcctagaaacaccatcatttttgcggccactgttggaccgaactgtaaccaagggagaaacagccgtcctacagtgcattgctggaggaagccctccccctaaactgaactggaccaaagatgatagcccattggtggtaaccgagaggcacttttttgcagcaggcaatcagcttctgattattgtggactcagatgtcagtgatgctgggaaatacacatgtgagatgtctaacacccttggcactgagagaggaaacgtgcgcctcagtgtgatccccactccaacctgcgactcccctcagatgacagccccatcgttagacgatgacggatgggccactgtgggt

SEQ ID NO: 3938 - DNA, 1368 bp, Homo Sapiens
gctcagcctttctgtctgccaggatgcacttgctcagaggagagttttggcaggactctgcagtgcacatctgtctccttgggaaagatccctgggaacctttctgaagagttcaagcaagtgagaattgaaaattcacccttatttgagatgccccaagggtctttcatcaacatgagcaccttggaatacctctggctcaattttaacaatatcagtgtgatccacctaggagccctggaacacctgccagaactgagggagctgagactggaggggaacaagctctgctcagtaccatggacagcgttccgtgccacccctctcctgagggtcttggatctcaaacgcaacaagattgatgcactccctgagctggctcttcaattcttggtcagcctgacctaccttgacctatcctccaataggcttacagttgtatccaagagtgtcttcctgaactggccagcctaccagaaatgccggcagcctgactgtggggctgagattctctccagcctggtggtggccctgcatgacaacccctgggtatgtgactgtcgcctaagggggcttgtccagtttgtcaagtccattaccctcccagtcatcctggtgaattcctacctgatatgtcagggccctctgtccaaggcagggcagctttttcatgaaactgagcttagtgcttgcatgaagccacagatctcaacccccagtgccaatatcaccatccgggcaggacagaatgtgaccctgcgatgcttggcacaggccagcccctcaccatccattgcatggacttatcccctgagtatgtggagagaatttgatggattgctgggaggcaaacacctgacaccagtgttgacatcttctactggagaagacactgctctgtcagagctggccatacctgctgcccacctggtagacagtggtaattacacctgcatggcctccaactccattggcaagagcaaccttgtaatctctctccatgtccagcctgcccaggccctacatgcacctgattctctttccatcccctcggagggcaatgcctacattgacctgcgggttgtcaagcagacagtgcatgggattttgctggagtggcttgcagtggctgacacctctaaggaggagtggttcaccctctacattgcatcggatgaagccttcaggaaggaggtggttcacattggccccggaatcaatacttatgctgtggatgacctccttcctggcacaaaatatgaggcctgcctcagcctagagggccagcctccacaccagggccagtgtgtagcttttgtaacaggcagagatgctggtgggctagaggcacgtgagcacctcctgcat

SEQ ID NO: 3939 - DNA, 987 bp, Homo Sapiens
ccatcagtgatgacctcagccaccaaaatcatgtctgctctgggcagtaatgttctactgcggtgtgatgccactggcttccccaccccacagatcacatggaccagatctgacagctcgccagttaattatacagtaatacaagaatctccagaggaaggagtcagatggtccataatgagcttgacaggcatttcttccaaagacgctggggattacaaatgtaaggccaaaaatctggctgggatgtcagaagctgtggttactgtgacagtgcttggcattaccacaactccaataccaccagacacttctgaaagaactggagatcatcctgagtgggatgtccagccgggatctggaagatctacatctgtatctagcgcatcatcatatctttggtcctcttccttctcccccacatcttctttttctgcttctactttgtctcctccctctactgcttccttctctttatctcctttctcctcctccactgtttcttcaaccacaactctgagcacaagcatctcagcaagtaccaccatggccaacaagcgatcattccagctccaccaaggtgggaaaagaaatttaaaggtggcaaagaatggaagtaagcttcctccagccagcacaagtaagaaagaagagctggcattgttggatcaaacaatgcttacggagacaaatgccacaatagaaaacctcagggtggtcagtgagactaaagagagtgtgacattgatgtggaatatgatcaacaccacacataactctgcagtgactgtgttgtattccaagtatggtgggaaggacctgctgctgttgaatgcagactccagcaagaaccaagtaaccatagatggcttggaacctggtgggcaatacatggcctgtgtctgtccaaaaggagtgcctccccagaaagaccaatgcatcaccttttctactgaaagagttgaaggagatgattctcaatggtct

SEQ ID NO: 3940 - DNA, 1239 bp, Homo Sapiens
gccttgccgcccgcggcgccgctgtccgaactgcacgcgcagctgtcgggcgtggagcagctgctggaggagttccgccggcaactgcagcaggagcggcctcaggaggagctggagctggagctgcgcgcgggcggcggcccccaggaggactgcccaggccggggcagcggcggctacagcgcaatgcctgacgccatcatccgcaccaaggactccctggcggcgggtgccagcttcctgcgggcgccggcggccgtgcggggctggcggcaatgcgtggcggcctgctgctccgagccgcgctgctccgtggccgtggtggagctgccccggcgccccgcgcccccggcagccgtgctcggctgctacctcttcaactgcacggcgcgcggccgcaacgtctgcaagttcgcgctgcacagcggctacagcagctacagcctcagccgcgcgccggacggcgccgccctggccaccgcgcgcgcctcgccccggcaggaaaaggatgcgcctccacttagcaaggctgggcaggatgtggttctgcatctgcccacagacggggtggttctagacggccgcgagagcacagatgaccacgccatcgtccagtatgagtgggcactgctgcagggggacccgtcagtggacatgaaggtgcctcaatcaggaaccctgaagctgtcccacctacaggagggaacctacaccttccagctgaccgtgacggacactgccgggcagagaagctctgacaacgtgtcagtgacagtgcttcgcgcagcctactccacaggaggatgtttgcacacttgctcacgctaccacttcttctgtgacgatggctgctgcattgacatcacgctcgcctgcgatggagtgcagcagtgtcctgatgggtctgatgaagacttctgccagaatctgggcctggaccacaagatggtaacccacacggcagctagtcctgccctgccaagaaccacagggccgagtgaagatgcagggggtgactccttggtggaaaagtctcagaaagccactgccccaaacaagccacctgcattatcaaacacagagaagaggaatcattccgccttttggggaccagagagtcaaatcattcctgtgatgccagatagtagttcctcagggaagaacagaaaagaggaaagttatatatttgagtcaaagggtgatggaggaggaggggaacacccagccccagaaacaggt

SEQ ID NO: 3941 - DNA, 5115 bp, Homo Sapiens
agcagccccgagtgtgcttgtggtcggagccacttcacatgtgcagtgagtgctcttggagagtgtacctgcatccctgcccagtggcagtgtgatggagacaatgactgcggggaccacagcgatgaggatggatgtatactacctacctgttcccctcttgactttcactgtgacaatggcaagtgcatccgccgctcctgggtgtgtgacggggacaacgactgtgaggatgactcggatgagcaggactgtcccccccgggagtgtgaggaggacgagtttccctgccagaatggctactgcatccggagtctgtggcactgcgatggtgacaatgactgtggcgacaacagcgatgagcagtgtgacatgcgcaagtgctccgacaaggagttccgctgtagtgacggaagctgcattgctgagcattggtactgcgacggtgacaccgactgcaaagatggctccgatgaggagaactgtccctcagcagtgccagcgcccccctgcaacctggaggagttccagtgtgcctatggacgctgcatcctcgacatctaccactgcgatggcgacgatgactgtggagactggtcagacgagtctgactgctcctcccaccagccctgccgctctggggagttcatgtgtgacagtggcctgtgcatcaatgcaggctggcgctgcgatggtgacgcggactgtgatgaccagtctgatgagcgcaactgcaccacctccatgtgtacggcagaacagttccgctgtcactcaggccgctgtgtccgcctgtcctggcgctgtgatggggaggacgactgtgcagacaacagcgatgaagagaactgtgagaatacaggaagcccccaatgtgccttggaccagttcctgtgttggaatgggcgctgcattgggcagaggaagctgtgcaacggggtcaacgactgtggtgacaacagcgacgaaagcccacagcagaattgccggccccggacgggtgaggagaactgcaatgttaacaacggtggctgtgcccagaagtgccagatggtgcggggggcagtgcagtgtacctgccacacaggctaccggctcacagaggatgggcacacgtgccaagatgtgaatgaatgtgccgaggaggggtattgcagccagggctgcaccaacagcgaaggggctttccaatgctggtgtgaaacaggctatgaactacggcccgaccggcgcagctgcaaggctctggggccagagcctgtgctgctgttcgccaatcgcatcgacatccggcaggtgctgccacaccgctctgagtacacactgctgcttaacaacctggagaatgccattgcccttgatttccaccaccgccgcgagcttgtcttctggtcagatgtcaccctggaccggatcctccgtgccaacctcaacggcagcaacgtggaggaggttgtgtctactgggctggagagcccagggggcctggctgtggattgggtccatgacaaactctactggaccgactcaggcacctcgaggattgaggtggccaatctggacggggcccaccggaaggtgttgctgtggcagaacctggagaagccccgggccattgccttgcatcccatggagggtaccatttactggacagactggggcaacaccccccgtattgaggcctccagcatggatggctctggacgccgcatcattgccgatacccatctcttctggcccaatggcctcaccatcgactatgccgggcgccgtatgtactgggtggatgctaagcaccatgtcatcgagagggccaatctggatgggagtcaccgtaaggctgtcattagccagggcctcccgcatcccttcgccatcacagtgtttgaagacagcctgtactggacagactggcacaccaagagcatcaatagcgctaacaaatttacggggaagaaccaggaaatcattcgcaacaaactccacttccctatggacatccacaccttgcacccccagcgccaacctgcagggaaaaaccgctgtggggacaacaacggaggctgcacgcacctgtgtctgcccagtggccagaactacacctgtgcctgccccactggcttccgcaagatcagcagccacgcctgtgcccagagtcttgacaagttcctgctttttgcccgaaggatggacatccgtcgaatcagctttgacacagaggacctgtctgatgatgtcatcccactggctgacgtgcgcagtgctgtggcccttgactgggactcccgggatgaccacgtgtactggacagatgtcagcactgataccatcagcagggccaagtgggatggaacaggacaggaggtggtagtggataccagtttggagagcccagctggcctggccattgattgggtcaccaacaaactgtactggacagatgcaggtacagaccggattgaagtagccaacacagatggcagcatgagaacagtactcatctgggagaaccttgatcgtcctcgggacatcgtggtggaacccatgggcgggtacatgtattggactgactggggtgcgagccccaagattgaacgagctggcatggatgcctcaggccgccaagtcattatctcttctaatctgacctggcctaatgggttagctattgattatgggtcccagcgtctatactgggctgacgccggcatgaagacaattgaatttgctggactggatggcagtaagaggaaggtgctgattggaagccagctcccccacccatttgggctgaccctctatggagagcgcatctattggactgactggcagaccaagagcatacagagcgctgaccggctgacagggctggaccgggagactctgcaggagaacctggaaaacctaatggacatccatgtcttccaccgccgccggcccccagtgtctacaccatgtgctatggagaatggcggctgtagccacctgtgtcttaggtccccaaatccaagcggattcagctgtacctgccccacaggcatcaacctgctgtctgatggcaagacctgctcaccaggcatgaacagtttcctcatcttcgccaggaggatagacattcgcatggtctccctggacatcccttattttgctgatgtggtggtaccaatcaacattaccatgaagaacaccattgccgttggagtagacccccaggaaggaaaggtgtactggtctgacagcacactgcacaggatcagtcgtgccaatctggatggctcacagcatgaggacatcatcaccacagggctacagaccacagatgggctcgcggttgatgccattggccggaaagtatactggacagacacgggaacaaaccggattgaagtgggcaacctggacgggtccatgcggaaagtgttggtgtggcagaaccttgacagtccccgggccatcgtactgtaccatgagatggggtttatgtactggacagactggggggagaatgccaagttagagcggtccggaatggatggctcagaccgcgcggtgctcatcaacaacaacctaggatggcccaatggactgactgtggacaaggccagctcccaactgctatgggccgatgcccacaccgagcgaattgaggctgctgacctgaatggtgccaatcggcatacattggtgtcaccggtgcagcacccatatggcctcaccctgctcgactcctatatctactggactgactggcagactcggagcatccaccgtgctgacaagggtactggcagcaatgtcatcctcgtgaggtccaacctgccaggcctcatggacatgcaggctgtggaccgggcacagccactaggttttaacaagtgcggctcgagaaatggcggctgctcccacctctgcttgcctcggccttctggcttctcctgtgcctgccccactggcatccagctgaagggagatgggaagacctgtgatccctctcctgagacctacctgctcttctccagccgtggctccatccggcgtatctcactggacaccagtgaccacaccgatgtgcatgtccctgttcctgagctcaacaatgtcatctccctggactatgacagcgtggatggaaaggtctattacacagatgtgttcctggatgttatcaggcgagcagacctgaacggcagcaacatggagacagtgatcgggcgagggctgaagaccactgacgggctggcagtggactgggtggccaggaacctgtactggacagacacaggtcgaaataccattgaggcgtccaggctggatggttcctgccgcaaagtactgatcaacaatagcctggatgagccccgggccattgctgttttccccaggaaggggtacctcttctggacagactggggccacattgccaagatcgaacgggcaaacttggatggttctgagcggaaggtcctcatcaacacagacctgggttggcccaatggccttaccctggactatgatacccgcaggatctactgggtggatgcgcatctggaccggatcgagagtgctgacctcaatgggaaactgcggcaggtcttggtcggccatgtgtcccacccctttgccctcacacagcaagacaggtggatctactggacagactggcagaccaagtcaatccagcgtgttgacaaatactcaggccggaacaaggagacagtgctggcaaatgtggaaggactcatggatatcatcgtggtttcccctcagcggcagacagggaccaatgcctgtggtgtgaacaatggtggctgcacccacctctgctttgccagagcctcggacttcgtatgtgcctgtcctgacgaacctgatagccagccctgctcccttgtgcctggcctggtaccaccagctcctagggctactggcatgagtgaaaagagcccagtgctacccaacacaccacctaccaccttgtattcttcaaccacccggacccgcacgtctctggaggaggtggaaggaagatgctctgaaagggatgccaggctgggcctctgtgcacgttccaatgacgctgttcctgctgctccaggggaaggacttcatatcagc

SEQ ID NO: 3942 - DNA, 2223 bp, Homo Sapiens
gaggccttcttggtcttcaccagcagagccgccatccacaggatctccctcgagaccaataacaacgacgtggccatcccgctcacgggcgtcaaggaggcctcagccctggactttgatgtgtccaacaaccacatctactggacagacgtcagcctgaagaccatcagccgcgccttcatgaacgggagctcggtggagcacgtggtggagtttggccttgactaccccgagggcatggccgttgactggatgggcaagaacctctactgggccgacactgggaccaacagaatcgaagtggcgcggctggacgggcagttccggcaagtcctcgtgtggagggacttggacaacccgaggtcgctggccctggatcccaccaagggctacatctactggaccgagtggggcggcaagccgaggatcgtgcgggccttcatggacgggaccaactgcatgacgctggtggacaaggtgggccgggccaacgacctcaccattgactacgctgaccagcgcctctactggaccgacctggacaccaacatgatcgagtcgtccaacatgctgggtcaggagcgggtcgtgattgccgacgatctcccgcacccgttcggtctgacgcagtacagcgattatatctactggacagactggaatctgcacagcattgagcgggccgacaagactagcggccggaaccgcaccctcatccagggccacctggacttcgtgatggacatcctggtgttccactcctcccgccaggatggcctcaatgactgtatgcacaacaacgggcagtgtgggcagctgtgccttgccatccccggcggccaccgctgcggctgcgcctcacactacaccctggaccccagcagccgcaactgcagcccgcccaccaccttcttgctgttcagccagaaatctgccatcagtcggatgatcccggacgaccagcacagcccggatctcatcctgcccctgcatggactgaggaacgtcaaagccatcgactatgacccactggacaagttcatctactgggtggatgggcgccagaacatcaagcgagccaaggacgacgggacccagccctttgttttgacctctctgagccaaggccaaaacccagacaggcagccccacgacctcagcatcgacatctacagccggacactgttctggacgtgcgaggccaccaataccatcaacgtccacaggctgagcggggaagccatgggggtggtgctgcgtggggaccgcgacaagcccagggccatcgtcgtcaacgcggagcgagggtacctgtacttcaccaacatgcaggaccgggcagccaagatcgaacgcgcagccctggacggcaccgagcgcgaggtcctcttcaccaccggcctcatccgccctgtggccctggtggtagacaacacactgggcaagctgttctgggtggacgcggacctgaagcgcattgagagctgtgacctgtcaggggccaaccgcctgaccctggaggacgccaacatcgtgcagcctctgggcctgaccatccttggcaagcatctctactggatcgaccgccagcagcagatgatcgagcgtgtggagaagaccaccggggacaagcggactcgcatccagggccgtgtcgcccacctcactggcatccatgcagtggaggaagtcagcctggaggagttctcagcccacccatgtgcccgtgacaatggtggctgctcccacatctgtattgccaagggtgatgggacaccacggtgctcatgcccagtccacctcgtgctcctgcagaacctgctgacctgtggagagccgcccacctgctccccggaccagtttgcatgtgccacaggggagatcgactgtatccccggggcctggcgctgtgacggctttcccgagtgcgatgaccagagcgacgaggagggctgccccgtgtgctccgccgcccagttcccctgcgcgcggggtcagtgtgtggacctgcgcctgcgctgcgacggcgaggcagactgtcaggaccgctcagacgaggcggactgtgacgccatctgcctgcccaaccagttccggtgtgcgagcggccagtgtgtcctcatcaaacagcagtgcgactccttccccgactgtatcgacggctccgacgagctcatgtgtgaaatcaccaagccgccctcagacgacagcccggcccacagc

SEQ ID NO: 3943 - DNA, 4053 bp, Homo Sapiens
gcccctttgttgctttatgcaaacagacgggacttgcgattggttgatgctacaaatggcaaagagaatgctacgattgtagttggaggcttggaggatgcagctgcggtggactttgtgtttagtcatggcttgatatactggagtgatgtcagcgaagaagccattaaacgaacagaatttaacaaaactgagagtgtgcagaatgttgttgtttctggattattgtcccccgatgggctggcatgtgattggcttggagaaaaattgtactggacagattctgaaactaatcggattgaagtttctaatttagatggatctttacgaaaagttttattttggcaagagttggatcaacccagagctattgccttagatccttcaagtgggttcatgtactggacagactggggagaagtgccaaagatagaacgtgctggaatggatggttcaagtcgcttcattataataaacagtgaaatttactggccaaatggactgactttggattatgaagaacaaaagctttattgggcagatgcaaaacttaatttcatccacaaatcaaatctggatggaacaaatcggcaggcagtggttaaaggttcccttccacatccttttgccttgacgttatttgaggacatattgtactggactgactggagcacacactccattttggcttgcaacaagtatactggtgagggtctgcgtgaaatccattctgacatcttctctcccatggatatacatgccttcagccaacagaggcagccaaatgccacaaatccatgtggaattgacaatgggggttgttcccatttgtgtttgatgtctccagtcaagcctttttatcagtgtgcttgccccactggggtcaaactcctggagaatggaaaaacctgcaaagatggtgccacagaattattgcttttagctcgaaggacagacttgagacgcatttctttggatacaccagattttacagacattgttctgcagttagaagacatccgtcatgccattgccatagattacgatcctgtggaaggctacatctactggactgatgatgaagtgagggccatacgccgttcatttatagatggatctggcagtcagtttgtggtcactgctcaaattgcccatcctgatggtattgctgtggactgggttgcacgaaatctttattggacagacactggcactgatcgaatagaagtgacaaggctcaatgggaccatgaggaagatcttgatttcagaggacttagaggaaccccgggctattgtgttagatcccatggttgggtacatgtattggactgactggggagaaattccgaaaattgagcgagcagctctggatggttctgaccgtgtagtattggttaacacttctcttggttggccaaatggtttagccttggattatgatgaaggcaaaatatactggggagatgccaaaacagacaagattgaggttatgaatactgatggcactgggagacgagtactagtggaagacaaaattcctcacatatttggatttactttgttgggtgactatgtttactggactgactggcagaggcgtagcattgaaagagttcataaacgaagtgcagagagggaagtgatcatagatcagctgcctgacctcatgggcctaaaggctacaaatgttcatcgagtgattggttccaacccctgtgctgaggaaaacgggggatgtagccatctctgcctctatagacctcagggccttcgctgtgcttgccctattggctttgaactcatcagtgacatgaagacctgcattgtcccagaggctttccttttgttttcacggagagcagatatcagacgaatttctctggaaacaaacaataataatgtggctattccactcactggtgtcaaagaagcttctgctttggattttgatgtgacagacaaccgaatttattggactgatatatcactcaagaccatcagcagagcctttatgaatggcagtgcactggaacatgtggtagaattcggcttagattatccagaaggcatggcagtagactggcttgggaagaacttgtactgggcagacacaggaacgaatcgaattgaggtgtcaaagttggatgggcagcaccgacaagttttggtgtggaaagacctagatagtcccagagctctcgcgttggaccctgccgaaggatttatgtattggactgaatggggtggaaaacctaagatagacagagctgcaatggatggaagtgaacgtactaccttagttccaaatgtggggcgggcaaacggcctaactattgattatgctaaaaggaggctttattggacagacctggacaccaacttaatagaatcttcaaatatgcttgggctcaaccgtgaagttatagcagatgacttgcctcatccttttggcttaactcagtaccaagattatatctactggacggactggagccgacgcagcattgagcgtgccaacaaaaccagtggccaaaaccgcaccatcattcagggccatttggattatgtgatggacatcctcgtctttcactcatctcgacagtcagggtggaatgaatgtgcttccagcaatgggcactgctcccacctctgcttggctgtgccagttgggggttttgtttgtggatgccctgcccactactctcttaatgctgacaacaggacttgtagtgctcctacgactttcctgctcttcagtcaaaagagtgccatcaaccgcatggtgattgatgaacaacagagccccgacatcatccttcccatccacagccttcggaatgtccgggccattgactatgacccactggacaagcaactctattggattgactcacgacaaaacatgatccgaaaggcacaagaagatggcagccagggctttactgtggttgtgagctcagttccgagtcagaacctggaaatacaaccctatgacctcagcattgatatttacagccgctacatctactggacttgtgaggctaccaatgtcattaatgtgacaagattagatgggagatcagttggagtggtgctgaaaggcgagcaggacagacctcgagccgttgtggtaaacccagagaaagggtatatgtattttaccaatcttcaggaaaggtctcctaaaattgaacgggctgctttggatgggacagaacgggaggtcctctttttcagtggcttaagtaaaccaattgctttagcccttgatagcaggctgggcaagctcttttgggctgattcagatctccggcgaattgaaagcagtgatctctcaggtgctaaccggatagtattagaagactccaatatcttgcagcctgtgggacttactgtgtttgaaaactggctctattggattgataaacagcagcaaatgattgaaaaaattgacatgacaggtcgagagggtagaaccaaagtccaagctcgaattgcccagcttagtgacattcatgcagtaaaggagctgaaccttcaagaatacagacagcacccttgtgctcaggataatggtggctgttcacatatttgtcttgtaaagggggatggtactacaaggtgttcttgccccatgcacctggttctacttcaagatgagctatcatgtggagaacctccaacatgttctcctcagcagtttacttgtttcacgggggaaattgactgtatccctgtggcttggcggtgcgatgggtttactgaatgtgaagaccacagtgatgaactcaattgtcctgtatgctcagagtcccagttccagtgtgccagtgggcagtgtattgatggtgccctccgatgcaatggagatgcaaactgccaggacaaatcagatgagaagaactgtgaagtgctttgtttaattgatcagttccgctgtgccaatggtcagtgcattggaaagcacaagaagtgtgatcataatgtggattgcagtgacaagtcagatgaactggattgttatccgactgaagaaccagcaccacaggcc

SEQ ID NO: 3944 - DNA, 2355 bp, Homo Sapiens
gggccggccaaggagtgcgaaaaggaccaattccagtgccggaacgagcgctgcatcccctctgtgtggagatgcgacgaggacgatgactgcttagaccacagcgacgaggacgactgccccaagaagacctgtgcagacagtgacttcacctgtgacaacggccactgcatccacgaacggtggaagtgtgacggcgaggaggagtgtcctgatggctccgatgagtccgaggccacttgcaccaagcaggtgtgtcctgcagagaagctgagctgtggacccaccagccacaagtgtgtacctgcctcgtggcgctgcgacggggagaaggactgcgagggtggagcggatgaggccggctgtgctaccttgtgcgccccgcacgagttccagtgcggcaaccgctcgtgcctggccgccgtgttcgtgtgcgacggcgacgacgactgtggtgacggcagcgatgagcgcggctgtgcagacccggcctgcgggccccgcgagttccgctgcggcggcgatggcggcggcgcctgcatcccggagcgctgggtctgcgaccgccagtttgactgcgaggaccgctcggacgaggcagccgagctctgcggccgtccgggccccggggccacgtccgcgcccgccgcctgcgccaccgcctcccagttcgcctgccgcagcggcgagtgcgtgcacctgggctggcgctgcgacggcgaccgcgactgcaaagacaaatcggacgaggccgactgcccactgggcacctgccgtggggacgagttccagtgtggggatgggacatgtgtccttgcaatcaagcactgcaaccaggagcaggactgtccagatgggagtgatgaagctggctgcctacaggggctgaacgagtgtctgcacaacaatggcggctgctcacacatctgcactgacctcaagattggctttgaatgcacgtgcccagcaggcttccagctcctggaccagaagacctgtggcgacattgatgagtgcaaggacccagatgcctgcagccagatctgtgtcaattacaagggctattttaagtgtgagtgctaccctggctacgagatggacctactgaccaagaactgcaaggctgctgctggcaagagcccatccctaatcttcaccaaccggcacgaggtgcggaggatcgacctggtgaagcggaactattcacgcctcatccccatgctcaagaatgtcgtggcactagatgtggaagttgccaccaatcgcatctactggtgtgacctctcctaccgtaagatctatagcgcctacatggacaaggccagtgacccgaaagagcaggaggtcctcattgacgagcagttgcactctccagagggcctggcagtggactgggtccacaagcacatctactggactgactcgggcaataagaccatctcagtggccacagttgatggtggccgccgacgcactctcttcagccgtaacctcagtgaaccccgggccatcgctgttgaccccctgcgagggttcatgtattggtctgactggggggaccaggccaagattgagaaatctgggctcaacggtgtggaccggcaaacactggtgtcagacaatattgaatggcccaacggaatcaccctggatctgctgagccagcgcttgtactgggtagactccaagctacaccaactgtccagcattgacttcagtggaggcaacagaaagacgctgatctcctccactgacttcctgagccacccttttgggatagctgtgtttgaggacaaggtgttctggacagacctggagaacgaggccattttcagtgcaaatcggctcaatggcctggaaatctccatcctggctgagaacctcaacaacccacatgacattgtcatcttccatgagctgaagcagccaagagctccagatgcctgtgagctgagtgtccagcctaatggaggctgtgaatacctgtgccttcctgctcctcagatctccagccactctcccaagtacacatgtgcctgtcctgacacaatgtggctgggtccagacatgaagaggtgctaccgagcacctcaatctacctcaactacgacgttagcttctaccatgacgaggacagtacctgccaccacaagagcccccgggaccaccgtccacagatccacctaccagaaccacagcacagagacaccaagcctgacagctgcagtcccaagctcagttagtgtccccagggctcccagcatcagcccgtctaccctaagccctgcaaccagcaaccactcccagcactatgcaaatgaagacagtaagatgggctcaacagtcactgccgct

SEQ ID NO: 3945 - DNA, 1551 bp, Homo Sapiens
taccatggctgccctagcgagtgtacctgctccagggcctcccaggtggagtgcaccggggcacgcattgtggcagtgcccacccctctgccctggaacgccatgagcctgcagatcctcaacacgcacatcactgaactcaatgagtccccgttcctcaatatctcagccctcatcgccctgaggattgagaagaatgagctgtcgcgcatcacgcctggggccttccgaaacctgggctcgctgcgctatctcagcctcgccaacaacaagctgcaggttctgcccatcggcctcttccagggcctggacagcctcgagtctctccttctgtccagtaaccagctgttgcagatccagccggcccacttctcccagtgcagcaacctcaaggagctgcagttgcacggcaaccacctggaatacatccctgacggagccttcgaccacctggtaggactcacgaagctcaatctgggcaagaatagcctcacccacatctcacccagggtcttccagcacctgggcaacctccaggtcctccggctgtatgagaacaggctcacggatatccccatgggcacttttgatgggcttgttaacctgcaggaactggctctgcagcagaaccagattggactgctctcccctggtctcttccacaacaaccacaacctccagagactctacctgtccaacaaccacatctcccagctgccacccagcgtcttcatgcagctgccccagctcaaccgtcttactctctttgggaattccctgaaggagctctctccggggatcttcgggcccatgcccaacctgcgggagctttggctctatgacaaccacatctcttctctacccgacaatgtcttcagcaacctccgccagttgcaggtcctgattcttagccgcaatcagatcagcttcatctccccgggtgccttcaacgggctaacggagcttcgggagctgtccctccacaccaacgcactgcaggacctggacgggaacgtcttccgcatgttggccaacctgcagaacatctccctgcagaacaaccgcctcagacagctcccagggaatatcttcgccaacgtcaatggcctcatggccatccagctgcagaacaaccagctggagaacttgcccctcggcatcttcgatcacctggggaaactgtgtgagctgcggctgtatgacaatccctggaggtgtgactcagacatccttccgctccgcaactggctcctgctcaaccagcctaggttagggacggacactgtacctgtgtgtttcagcccagccaatgtccgaggccagtccctcattatcatcaatgtcaacgttgctgttccaagcgtccatgtccccgaggtgcctagttacccagaaacaccatggtacccagacacacccagttaccctgacaccacatccgtctcttctaccactgagctaaccagccctgtggaagactacactgatctgactaccattcaggtcactgatgaccgcagcgtttggggcatgacccaggcccagagcggg

SEQ ID NO: 3946 - DNA, 1269 bp, Homo Sapiens
cgcaaagcaagcccaggcagtgtgagaagccgagtgaatcatggccgggcgggtggaggccggagaggctccaacccggtcaaacgctacgcaccaggcctcccgtgtgacgtgtacacatatctccatgagaaatacttagattgtcaagaaagaaaattagtttatgtgctgcctggttggcctcaggatttgctgcacatgctgctagcaagaaacaagatccgcacattgaagaacaacatgttttccaagtttaaaaagctgaaaagcctggatctgcagcagaatgagatctctaaaattgagagtgaggcgttctttggtttaaacaaactcaccaccctcttactgcagcacaaccagatcaaagtcttgacggaggaagtgttcatttacacacctctcttgagctacctgcgtctttatgacaacccctggcactgtacttgtgagatagaaacgcttatttcaatgttgcagattcccaggaaccggaatttggggaactacgccaagtgtgaaagtccacaagaacaaaaaaataaaaaactgcggcagataaaatctgaacagttgtgtaatgaagaagaaaaggaacaattggacccgaaaccccaagtgtcagggagacccccagtcatcaagcctgaggtggactcaactttttgccacaattatgtgtttcccatacaaacactggactgcaaaaggaaagagttgaaaaaagtgccaaacaacatccctccagatattgttaaacttgacttgtcatacaataaaatcaaccaacttcgacccaaggaatttgaagatgttcatgagctgaagaaattaaacctcagcagcaatggcattgaattcatcgatcctgccgcttttttagggctcacacatttagaagaattagatttatcaaacaacagtctgcaaaactttgactatggcgtattagaagacttgtattttttgaaactcttgtggctcagagataacccttggagatgtgactacaacattcactacctctactactggttaaagcaccactacaatgtccattttaatggcctggaatgcaaaacgcctgaagaatacaaaggatggtctgtgggaaaatatattagaagttactatgaagaatgccccaaagacaagttaccagcatatcctgagtcatttgaccaagacacagaagatgatgaatgggaaaaaaaacatagagatcacaccgcaaagaagcaaagcgtaataattactatagtagga

SEQ ID NO: 3947 - DNA, 738 bp, Homo Sapiens
tctaaaagagaagtccaatgtaattttactgaaaaaaattataccttgattccagcagatatcaagaaagatgttactatacttgatctcagttataaccaaattactcttaatggtacagacacaagagttctacagacatactttttactcacagagctctatttgattgagaacaaggttactatcttacataataacggttttggtaacctctccagtctagaaattttaaatatctgtagaaactccatctatgtaattcaacagggtgcatttttaggcttaaataaactaaaacagttatatctctgccaaaacaaaatagaacaactgaatgctgatgtatttgtgcctctaagaagcctaaaacttctgaatctgcaaggcaatttgattagctatttggatgtaccaccactatttcatctggaattaataactttatatggaaacctatggaactgctcttgcagtctatttaatttgcagaactggttgaacacatcaaatgtgacattagaaaatgagaacatcaccatgtgtagctaccccaacagcctgcagagctacaatatcaaaacagtacctcataaggctgaatgccactcaaaatttccttcatcagtaactgaagatctttatattcattttcagcccatcagcaattcaatatttaatagctcttcgaacaacttaacaagaaattcagaacatgaacctcttggaaaaagttgg

SEQ ID NO: 3948 - DNA, 1515 bp, Homo Sapiens
ttctgcccctctcaatgcagctgcagcctccatatcatgggtgatggcagcaaggccaggacagtagtgtgcaacgaccccgacatgaccctgcccccggcgtccatccccccggacacctccagactgcgcctggagcggacggccatacgcagggttcctggcgaggccttcaggcccctgggccgcctggagcagctgtggctgccttacaacgccctcagcgagctcaacgccctcatgctgcggggcctgcgacgcctgcgggagctgcggctgcccgggaaccgcctggccgccttcccctgggcggcgctcagggacgcccccaagctgcggctgctggacctgcaggccaaccgcctctcggctgtgcccgctgaggccgcgcgcttcctggagaacctcaccttcctcgacctctccagcaaccagctgatgaggctcccgcaggagctcatcgtctcctgggctcacctggagaccggtatctttcctcccggccaccaccccaggcgggtcctagggctacaggacaacccctgggcatgtgactgccgactctatgacctggttcatcttttggatggctgggccccaaacttggccttcattgagactgaactgagatgtgccagcccacgtagcctggccggagtggccttcagccagcttgaactgaggaagtgccagggcccagagctccatccaggagtggccagcatcaggtcccttttgggtggcacagcactgctacgctgtggagctactggagtccctgggcccgagatgagctggaggagggccaatggcaggccccttaatggtacagtgcaccaggaagtctccagtgacggcacgagctggactctgctgggcctgcctgcagtgtcccaccttgactccggagactacatctgccaagccaagaacttcctgggagcctctgaaactgttatctccttgattgtcactgagccaccgacttccacagaacacagtgggagcccaggagcactatgggcaaggacaggtggcggaggggaagctgctgcttacaacaacaagctggtggccaggcatgtcccccagattcccaaacccgctgtcctggccactggaccctctgtgcccagcacaaaggaggagctgacccttgagcacttccagatggatgccctgggagagctctctgatgggcgggcaggaccctcagaggcacgaatggtgaggtctgtgaaggtggtgggggacacttaccacagcgtgtccttggtgtggaaggcaccccaggctaagaacacaactgccttcagtgtcctctacgcggtctttgggcagcacagcatgcggcgggtgattgtgcagcctgggaagaccagagtgaccatcactgggctgttgcccaagaccaagtatgtggcgtgtgtctgtgtgcagggcctggtgccccggaaggagcagtgtgttattttctccaccaatgaagtggtggatgctgagaacactcagcag

SEQ ID NO: 3949 - DNA, 1155 bp, Homo Sapiens
gccggctgcccagcagcctgccgctgctacagcgccacggtggagtgtggcgccctgcggttgcgcgtcgtcccgctgggaatcccgccagggacgcagacactgttcctgcaggacaacaacatcgcccgcctagagccgggagccctggcgccactcgccgctctgcgccggctctacctgcacaacaacagcctgcgcgccctggaggccggcgccttccgcgcgcagccgcgcctgctggagctggcgctcactagcaaccggctgcgcggcttgcgcagcggcgccttcgtaggcctggcccagctgcgcgtgctctacctggcgggcaaccagctggcgcggctgctggatttcaccttcttgcacctgccgcgactgcaggagcttcacctgcaagaaaacagcattgagctgctggaggaccaggctctagcggggctgtcctccctagcactgctggacctcagcaggaaccagctgggcaccatcagccgagaggccctgcagcccctggccagtctgcaagtcctgcgcctcacagagaacccatggcgctgtgactgcgccctgcactggctgggtgcctggatcaaggagggcggccagcggctgctcacctccagggacaggaagatcatgtgtgcagagcccccgcgcctggcgctccagagtctcctggacgtatcccacagcagcctcatctgcattccgccctctgtccacgtgcagccgctggagctcacagccaacctgggtgaggacctgcgggttgcctgccaagcctccggctacccgcagccattggtgacctggagaaaggtgccccagcctcgcgagggccggccgcgagcccaggcccagctagaaggcgggttgctgggcctgggcggacactcggcatccgacacgggcagcggcatgctcttcctcagcaacatcacgctggcgcacgccggtaagtacgagtgcgaggcctccaacgccggcggcgctgcccgcgtgcccttccggctcctggtcaacgcgtcccggcagcagccgcagcagcccgcgcaaccgccgcctccggccgcccgccccgccggcagcgagccccggcccgaggcgggcagcatggccttccgcgccctgggcgtggccacacagacg

SEQ ID NO: 3950 - DNA, 435 bp, Homo Sapiens
ctagaaccgtcgtgcaccgtgtcctccgcggatgtggactggaacgcggagttcagtgccacgtgcctgaatttcagtggcctcagcctgagcctgcctcacaaccagtctctgcgggccagcaacgtgattctccttgacctgtctgggaacggcctgcgagagcttccagtgaccttctttgcccacctgcagaagcttgaggtcctgaacgtgctacgcaaccccttgtctcgtgtggatggggcgctggccgcccgctgtgaccttgacctgcaggccgactgcaactgtgccctggagtcctggcacgacatccgccgagacaactgctctggccagaagcctctgctctgctgggacacaaccagctcccagcacaacctctctgccttcctggaggtcagctgcgcccctggcctggcctctgcaact

SEQ ID NO: 3951 - DNA, 705 bp, Homo Sapiens
caggtctcagcaaccgcgagcccatcaggctctctaggcgcccctgattgccctgaggtatgtacgtgcgttccggggggtttagctagttgtagtgcgctgagcctacctgccgtgccccctggcctaagcctaagattgcgtgcgcttttgttagaccataacagagtgagagccctgccgcccggtgccttcgcaggcgccggggcgctgcaaaggttggatctgagggagaacgggcttcattcagtccatgtgagagcgttttggggcttaggtgcgcttcagctactggatttgtccgcaaatcaacttgaggccctagccccaggcacttttgccccacttagggccttgcgtaatctgagtctggctggcaatcgtctagcgaggcttgaacccgcagcattgggtgcgctaccactattgagatcacttagcctacaggataatgagcttgccgcgctagcgccagggctgctggggagacttcccgcgcttgacgctctgcacttgcgtggcaacccgtggggctgcggctgcgccttgaggcccctatgtgcgtggctgaggagacatccgctaccagcatcagaagccgagactgttctttgcgtttggccgggtagactgactctatcaccactaacggccttttctgacgcggctttttcccactgcgctcaacctttagcattaagagac

SEQ ID NO: 3952 - DNA, 516 bp, Homo Sapiens
tgcccacagccctgccggtgccctgaccacgcaggggctgtggctgtcttctgcagcttgcggggccttcaggaggtccccgaggacatcccggccaacaccgtgctcctgaagctcgatgccaacaagatctcccacctcccggacggggccttccagcacctgcaccggctcagggagctggatctgtctcacaacgccatcgaggccatcggctccgccaccttcgcgggcctggccgggggcctgcggctgctggacctgtcttacaaccgcatccagaggatccccaaggacgccctgggcaaactcagcgccaagatacgcctgtcccacaaccccctgcactgcgagtgcgccctgcaggaggccctgtgggagctgaagctggaccccgactctgtggacgagatcgcctgccacacctcagtgcaggaggagtttgtggggaagcctctggttcaggctctggatgcgggtgccagcctctgcagcgtcccccacaggaccacagac

SEQ ID NO: 3953 - DNA, 1824 bp, Homo Sapiens
caccaagacaaagtgccctgtaagatggtggacaagaaggtctcgtgccaggttctgggcctgctccaggtcccctcggtgctcccgccagacactgagacccttgatctatctgggaaccagctgcggagtatcctggcctcacccctgggcttctacacggcacttcgtcacctggacctgagcaccaatgagatcagcttcctccagccaggagccttccaggccctgacccacctggagcacctcagcctggctcacaaccggctggcgatggccactgcgctgagtgctggtggcctgggccccctgccacgcgtgacctccctggacctgtctgggaacagcctgtacagcggcctgctggagcggctgctgggggaggcacccagcctgcataccctctcactggcggagaacagtctgactcgcctcacccgccacaccttccgggacatgcctgcgctggagcagcttgacctgcatagcaacgtgctgatggacatcgaggatggcgccttcgagggtctgccccgcctgacccatctcaacctctccaggaattccctcacctgcatctccgacttcagcctccagcagctgcgggtgctagacctgagctgcaacagcatcgaggcctttcagacggcctcccagccccaggctgagttccagctcacctggcttgacctgcgggagaacaaactgctccatttccccgacctggccgcgctcccgagactcatctacctgaacttgtccaacaacctcatccggctccccacagggccaccccaggacagcaagggcatccacgcaccttccgagggctggtcagccctgcccctctcagcccccagcgggaatgccagcggccgccccctttcccagctcttgaatctggatttgagctacaatgagattgagctcatccccgacagctttcttgagcacctgacctccctgtgcttcctgaacctcagcagaaactgcttgcggacctttgaggcccggcgcttaggctccctgccctgcctgatgctccttgacttaagccacaatgccctggagacactggaactgggcgccagagccctggggtctctgcggacgctgctcctacagggcaatgccctgcgggacctgcccccatacacctttgccaatctggccagcctgcagcggctcaacctgcaggggaaccgagtcagcccctgtggggggccagatgagcctggcccctccggctgtgtggccttctccggcatcacctccctccgcagcctgagcctggtggataatgagatagagctgctcagggcaggggccttcctccacaccccactgactgagctggacctttcttccaatcctgggctggaggtggccacgggggccttgggaggcctggaggcctccttggaggtcctggcactgcagggcaacgggctgatggtcctgcaggtggacctgccctgcttcatctgcctcaagcggctcaatcttgccgagaaccgcctgagccaccttcccgcctggacacaggctgtgtcactggaggtgctggacctgcgaaacaacagcttcagcctcctgccaggcagtgccatgggtggcctggagaccagcctccggcgcctctacctgcaggggaatccactcagctgctgcggcaatggctggctggcagcccagctgcaccagggccgtgtggacgtggacgccacccaggacctgatctgccgcttcagctcccaggaggaggtgtccctgagccacgtgcgtcccgaagactgtgagaaggggggactgaagaacatcaac

SEQ ID NO: 3954 - DNA, 4641 bp, Homo Sapiens
gaggctcagcctctggagtgggtcaaggacccgctccagctcacctctaatcccctggggccgcctgactcctggtcttcccactcctcccatttcccacgggaatctccccatgcgcctactctcccagcagacccgtgggactttgatcacctggggccctctgcttcctcagagatgccagccccaccccaggaatcgactgaaaatttggttccattcctggacacctgggattcagctggagagcagcccctggagccagagcagttcttggcttcacagcaggatttaaaggacaagctgagtccacaggaaagactccctgtttcgcccaagaagctgaagaaagatccagctcagcgttggagccttgctgagattattggaattacacgccaattatccacacctcagagtcagaaacagactttgcagaatgaatattccagtacagatacaccgtatcccggtagcctgcctccagaactccgggtgaagtcagatgagcctccagggccctctgagcaagttggaccttctcaattccatctagagcccgaaactcaaaatccagagacccttgaagacatccagtcctcttcactccagcaagaagccccagcacagcttccacagctccttgaggaagaaccttcttcaatgcagcaggaggccccagctctgcctccagagtcctctatggagagtctaactctaccgaatcatgaggtgtcagttcaacctccaggtgaggatcaagcttattatcacttgcccaacattacagttaaacctgcagatgtggaggttaccataacttcagagcctaccaatgagacagaatcttcccaagcccagcaggagaccccaattcagtttccagaggaggtggaaccttctgcaacccaacaggaggccccaattgagcctccagtttctcctatggagcatgaactttccatcagtgagcagcagcagccagttcagccttctgagtcttctagggaggtcgaatcttctctgacccagcaggagaccccaggtcagcctccagaacatcatgaagtcacagtttcacctccaggtcaccatcaaactcatcatttagattcacccagtgtctctgtgaagcctccagacgtgcagctcaccatagcagcagagcctagtgcagaggtgggaacttctctagtccaccaggaggctacagctcggctctcagggtcaggtaatgatgtagaacctcccgccatccagcacgggggcccacctctgcttccagagtcatcagaagaagctggacctttagcagttcaacaggagacttcatttcaatctccggaacctattaataatgagaacccctctccaacccagcaggaggctgcagctgagcatccacagaccgctgaggagggtgagtcttccctaacccatcaggaggccccagctcagactccagagttccctaatgtagttgtagctcaacctccagagcattcacacctgactcaagccacagttcaacctttggatctggggtttaccatcactccagaatccatgacagaggttgaactttctccaaccatgaaggagaccccaactcagcctcctaagaaagttgtaccccaacttcgagtatatcaaggggtaacaaatccaacaccaggtcaggatcaagctcagcatccagtgtcacccagcgttacagttcaacttttggacctgggacttaccatcactccagaacccactacggaggttggacattctacagccccgaagaggactatagtttctccaaagcatcctgaggtgacacttcctcatccagaccaggttcagactcagcattcacacctgactcgagccacagttcaacctttggacctggggtttaccatcactccaaaatccatgacagaggttgaaccttctacagccctgatgactacagctcctcctccaggacaccctgaggtgacacttccaccttcagacaagggtcaggctcagcattcacacctgactcaagccaccgttcaacctctggacctggagcttaccataactacaaaacctactacagaggttaaaccatctccaaccacagaggagacctcaactcagcctccagacctgggacttgccatcattccagaacccactacagagactggacattctacagccctggagaagactacagctcctcatccagaccgggttcagactctgcatcaaagcctgactgaagtcacaggtccacctactgaactagaacctgctcaggattcactggtgcagtctgaaagttacacccaaaataaggctttaactgcaccagaggaacacaaggcctccacaagcaccaacatatgtgagctctgtacctgcggagatgagatgttgtcatgtattgatctcaacccagagcagaggctccgccaagtgcctgtgccagagcccaacacccacaatggcaccttcaccatcttaaatttccaaggaaactatatttcttacattgatggaaatgtatggaaagcatacagttggactgagaaactaattctcagagaaaataacttgactgaattacacaaggattcatttgaaggcctgctatccctccagtatttagatttatcctgcaataaaatacagtctattgaaagacatacatttgaaccactaccatttttgaagtttataaatcttagttgcaatgtaattacagaactcagctttggaacatttcaggcctggcacggaatgcagtttttacataagttaattctcaatcacaatcctctgacaactgttgaagatccgtatctctttaaattgccagcattaaaatatctagacatgggaacaacgctagtcccacttacaacacttaagaacattctcatgatgactgttgaactggaaaaactgatcttacctagccatatggcctgctgcctctgccaatttaaaaacagcattgaggctgtctgcaagacagtcaagctgcattgcaacagtgcatgtctgacaaacaccacacattgtcctgaagaagcatcggtagggaatccagaaggagcgttcatgaaggtgttacaagcccggaagaactacacaagcactgagctgattgttgagccagaggagccctcagacagcagtggcatcaacttgtcaggctttgggagtgagcagctagacaccaatgacgagagtgattttatcagtacactaagttacatcttgccttatttctcagcggtaaacctagatgtgaaatcactgttactaccgttcattaaactgccaaccacaggaaacagcctggcaaagattcaaactgtaggccaaaaccggcagagagtgaagagagtcctcatgggcccaaggagcatccagaaaaggcacttcaaagaggtaggaaggcagagcatcaggagggaacagggtgcccaggcatctgtggagaacgctgccgaagaaaaaaggctcacgagtccagccccaagggaggtggaacagccccacacacagcaggggcctgagaagttagcgggaaacgccgtctacaccaagccttcgttcacccaagagcataaggcagcagtctctgtgctgaaacccttctccaagggcgcgccttctacctccagccctgcaaaagccctaccacaggtgagagacagatcgaaagacttaacccacgctatttccattttagaaagtgcaaaggctagagttacaaatacgaagacgtctaaaccaatcgtacatgccagaaaaaaataccgctttcacaaaactcgctcccacgtgacccacagaacaaccaaagtcaaaaagagtccaaaggtcagaaagaaaagttatctgagtagactgatgctcgcaaacaggcttccattctctgcagcgaagagcctcataaattccccttcacaaggggctttttcatccttaggagacctgagtcctcaagaaaacccttttctggaagtatctgctctttcagaacattttatagggaagaataatacaaaacacacaactgcaagaaatgcctttgaagaaaatgattttatggaaaacactaacatgccagaaggaaccatctctgaaaacacaaactacaatcatcctcctgaggcagattccgctgggactgcattcaacttagggccaactgttaaacaaactgagacaaaatgggaatacaacaacgtgggcactgacctgtcccccgagcccaaaagcttcaattacccattgctctcgtccccaggtgatcagtttgaaattcagctaacccagcagctacagtcccttatccccaacaacaatgtgagaaggctcattgctcatgttatccggaccttgaagatggactgctctggggcccatgtgcaagtgacctgtgccaagctcatctccaggacaggccacctgatgaagcttctcagtgggcagcaggaagtaaaggcatccaagatagaatgggatacggaccaatggaagattgagaactacattaatgagagcacagaagcccagagtgaacagaaagagaagtcgcttgagctcaaaaaagaagttccaggatatggctatactgacaaactc

SEQ ID NO: 3955 - DNA, 4638 bp, Homo Sapiens
gaggctcagcctctggagtgggtcaaggacccgctccagctgacccctaaccccctggggccgcctgagccctggtcttcccactcctcccatttcccacgggaatctccccatgcgcctactctcccagcagacccgtgggactttgatcacctggggccctctgcttcctcagagatgccagccccaccccaggaatcgactgaaaatttggttccattcctggacacctgggattcagctggagagctgcccctggagccagagcagttcttggcttcacagcaggatttaaaggacaagctgagtccacaggaaaggctccctgtttcgcccaagaagctgaagaaagatccagctcagcgttggagccttgctgagattattggaattatacaccaattatccacacctcagagtcagaaacagactttgcagaatgaatattccagtacagatacaccgtatcccggtagcctgcctccagaactccgggtgaagtcagatgagcctccagggccctctgagcaagttggaccttctcaattccatctagagcccgaaactcaaaatccagagacccttgaagacatccagtcctcttcactccagcaagaagccccagcacagcttccacagctccttgaggaagaaccttcttcaatgcagcaggaggccccagctctgcctccagagtcctctatggagagtctaactctaccgaatcatgaggtgtcagttcaacctccaggtgaggatcaagcttattatcacttgcccaacattacagttaaacctgcagatgtggaggttaccataacttcagagcctaccaatgagacagaatcttcccaagcccagcaggagaccccaattcagtttccagaggaggtggaaccttctgcaacccaacaggaggccccaattgagcctccagttcctcctatggagcatgaactttccatcagtgagcagcagcagccagttcagccttctgagtcttctagggaggtcgaatcttctccgacccagcaggagaccccaggtcagcctccagaacatcatgaagtcacagtttcacctccaggtcaccatcaaactcatcatttagcttcacccagtgtctctgtgaagcctccagacgtgcagctcaccatagcagcagagcctagtgcagaggtgggaacttctctagtccaccaggaggctacaactcggctctcagggtcaggtaatgatgtagaacctcccgccatccagcacgggggcccacctctgcttccagagtcatcagaagaagctggacctttagcagttcaacaggagacttcatttcaatctccggaacctattaataatgagaacccctctccaacccagcaggaggctgcagctgagcatccacagaccgctgaggagggtgagtcttccctaacccatcaggaggccccagctcagactccagagttccctaatgtagttgtagctcaacctccagagcattcacacctgactcaagccacagttcaacctttggatctggggtttaccatcactccagaatccatgacagaggttgaactttctccaaccatgaaggagaccccaactcagcctcctaagaaagttgtaccccaacttcgagtatatcaaggggtaacaaatccaacaccaggtcaggatcaagctcagcatccagtgtcacccagcgttacagttcaacttttggacctgggacttaccatcactccagaacccactacggaggttggacattctacacccccgaagaggactatagtttctccaaagcatcctgaggtgacacttccacatccagaccaggttcagactcagcattcacacctgactcgagccacagttcaacctttggacctggggtttaccatcactccaaaatccatgacagaggttgaaccttctacagccctgatgactacagctcctcctccaggacaccctgaggtgacacttccaccttcagacaagggtcaggctcagcattcacacctgactcaagccaccgttcaacctctggacctggagcttaccataactacaaaacctactacagaggttaaaccatctccaaccacggaggagacctcaactcagcttccagacctgggacttgccatcattccagaacccactacagagactggacattctacagccctggagaagactacagctcctcgtccagaccgggttcagactctgcatcgaagcctgactgaagtcacaggtccacctactgaactagaacctgctcaggattcactggttcagtctgaaagttacacccaaaataaggctttaactgcaccagaggaacacaaggcctccacaagcaccaacatatgtgagctctgtacctgcggagatgagatgttgtcatgtattgatctcaacccagagcagaggctccgccaagtgcctgtgccagagcccaacacccacaatggcaccttcaccatcttaaatttccaaggaaactatatttcttacattgatggaaatgtatggaaagcatacagttggaccgagaaactaattctcagagaaaataacttgactgaattacacaaggattcatttgaaggcctgctatccctccagtatttagatttatcctgcaataaaatacagtctattgaaagacatacatttgaaccactaccatttttgaagtttataaatcttagttgcaatgtaattacagaactcagctttggaacatttcaggcctggcacggaatgcagtttttacataagttaattctcaatcacaatcctctgacaactgttgaagatccatatctctttaaattgccagcattaaaatatctagacatgggaacaacgctagtcccacttacaacacttaagaacattctcatgatgactgttgaactggaaaaactgatcgtacctagccatatggcctgctgcctctgccaatttaaaaacagcattgaggctgtctgcaagacagtcaagctgcattgcaacagtgcatgtctgacaaacaccacacattgtcctgaagaagcatctgtagggaatccagaaggagcgttcatgaaggtgttacaagcccggaagaattacacaagcactgagctgactattgagccggaggagccctcagacagcagtggcatcaacttgtcaggctttgggagtgagcagctagacaccaatgacgagagtgatgttaccagtacactaagttacatcttaccttatttctcagccgttaacctagatgtgaaatcactgttactaccgttcattaaactgccaaccacaggaaacagcctggcaaagattcaaactgtaggcaaaaaccggcagagactgaatagagtcctcatgggcccaaggagcatccagaaaaggcacttcaaagaggtaggaaggcagagcatcaggagggaacagggtgcccaggcatctgtggagaacactgccgaagaaaaaaggctcggaagtccagccccaagggagctgaaacagcctcacacacagcaggggcctgagaagttagcgggaaacgccgtctacaccaagccttcgttcacccaagagcataaggcagcagtctctgtgctgaaacccttctccaagggcgcgccttctacctccagccctgcaaaagccctaccacaggtgagagacagatggaaagacttaacccacgctatttccattttagaaagtgcaaaggctagagttacaaatatgaagacatctaaacccatcgtacattccagaaaaaaataccgctttcacaaaactcgctcccgcatgacccacagaacacccaaggtcaaaaagagtccaaaggtcagaaagaaaagttatctgagtagactgatgctctcaaacaggcttccgttctctgcagcgaagagcctcataaattccccttcacaaggggctttttcatccttaagagacctgagtcctcaagaaaatccttttctggaagtatctgctccttcagaacattttatagaaaacaataatacaaaagacacaactgcaagaaatgcctttgaagaaaatgtttttatggaaaacactaacatgccagaaggaaccatctctgaaaacgcaaactacaatcatcctcctgaggcagattccgctgggactgcattcaacttagggccaactgttaaacaaactgagacaaaatgggaatacaacaacgtgggcactgacctgtcccccgagcccaaaagcttcaattacccattgctctcgtccccaggtgatcagtttgaaattcagctaacccagcagctgcagtccgttatccccaacaacaatgtgagaaggctcattgctcatgttatccggaccttgaagatggactgctctggggcccatgtgcaagtgacctgtgccaagctcgtctccaggacaggccacctgatgaagcttctcagtgggcagcaggaagtaaaggcatccaagatagaatgggatacggaccaatggaagactgagaactacattaatgagagcacagaagcccagagtgaacagaaagagaagtcgcttgagttcacaaaagaacttccaggatatggctataccaaaaaa

SEQ ID NO: 3956 - DNA, 2481 bp, Homo Sapiens
ctggtgtgggtcaaggacccgctccagctgacctctaaccccctggggccacctgagccctggtcttcccgctcctcccatctcccatgggaatctccccatgcacctgctcccccagcagccccgggggactttgattacctggggccctctgcttcttcgcagatgtcagccctgcctcaggaaccaactgaaaatttggctccattcctgaaggaattggattcagctggagagctgcccctggggccagagccgttcttggctgcacatcaggacttaaatgacaagcggactccagaagaaaggctcccagaggtggttccgcttctcaaccgggatcagaaccaggccctagttcagcttcctcgcctcaagtgggttcaaactacagatctagatcgggctgcaggtcatcaggcagatgaaatacttgttccactagacagtaaggtttcaagaccaaccaaatttgttgtttcgcccaagaacctgaagaaagatctagctgaacgttggagccttcctgagattgttgggattccacaccaattatccaaacctcagcgtcagaaacagactttgccagatgattatttgagtatggacacactgtatcccggcagcctacctccagaactccgggtgaacgcagatgagcctccagggcctcctgagcaagttggactttctcaattccatctagagcccaaaagtcaaaatccagagacccttgaagacatccagtcctcttcactccaggaagaagccccagcgcagcttctacagctccctcaggaggtagaaccttcaacccagcaggaggccccagctctgcctccagagtcctctatggagagtctagctcaaactccactgaatcatgaagtgacagttcaacctccaggtgaggatcaagctcattataatttgcccaagtttacagtcaaacctgcagatgtggaggttaccatgacttcagagcctaaaaatgagacagaatctacccaagcccagcaggaggccccaattcagcctcccgaggaggcggaaccttcttctacagccctgaggactacagatcctcctccagaacaccctgaggtgacacttccaccttcagacaagggtcaggctcagcattcacacctgactgaagccacagttcaacctctggacctggagcttagcataactacagagcctactacagaggttaaaccgtctccaaccacggaggaaacctcagctcagcctccagacccggggcttgccataactccagaacccactacagagattggacattccacagccctggagaagactagagctcctcatccagaccaggttcagactctgcatcgaagcctgactgaagtcacaggtccacctacaaagttagaatcttcgcaggattcattggtgcagtctgaaactgcaccagaggaacagaaggcctccacaagcaccaacatatgtgagctctgcacctgcggagatgagactctgtcatgtgttggtctcagcccaaagcagaggctccgccaagtgcctgtgccagagcccgacacctacaatggcatcttcaccaccttaaatttccaaggaaactatatttcataccttgatggaaatgtatggaaagcatacagttggaccgagaaactaattctcagtgaaaattatttgactgaattacctaaggattcatttgaaggcctgctatacctccagtatttaattctcaatcgcaatcctctgactactgtcgaagatccatatctctttgaactgccggcattaaaatatctagacatgggaacaacacacatcacacttacaacacttaagaacattctcacgatgactgttgaactggaaaaactgatcttacctagccatatggcctgctgcctctgccaatttaaaaatagcattgaggctgtctgcaagacagtcaagctgcattgcaacactgcatgtctgactaacagcatacattgtcctgaagaagcatctgtagggaatccagaaggagcgttcatgaagatgttacaagcccggaagcagcacatgagcactcagctgactattgagtcggaggcgccctcagacagcagtggcatcaacttgtcaggctttgggggtgatcagcttgaaattcagctaaccgagcagctacggtccctcatccccaacgaggatgtgagaaagttcatgtctcatgttatccggaccttgaaaatggaatgttcagaaacacatgtgcaagggagctgtgccaagctcatgttgcgaacaggcctcctgatgaagcttctcagcgagcagcaggaagcaaaggcattgaatgtagaatgggatacggaccaacaaaaaacaaattatattaatgagaacatggaacagaatgaacagaaagagcagaagtcaagtgagctcatgaaagaagttccaggagatgactataagaacaaa

SEQ ID NO: 3957 - DNA, 666 bp, Homo Sapiens
tgtccagcaggctgcgcctgtaccgatccccacacggttgactgtcgtgataggggactgccatcagttccagatccgttccctcttgatgtaaggaagctgttggtcgccggtaatcgtatccagaggattccggaagatttttttattttctacggcgacttagtttacttagatttccgtaacaacagcttgagatctttagaggagggaacattctcaggttccgcgaagttagtgttccttgatctaagttacaataacctaactcaattaggggcaggtgcgttcaggtctgccggacgtttagtcaagttatcattagccaacaataatctggtcggggttcacgaagatgcatttgaaacgcttgaaagcctacaagttttagagttaaacgacaacaatctacgttccctatccgtggctgcccttgcagcactacccgcgttgagatcccttaggttggatggcaatccgtggttgtgcgattgtgattttgcacacctgttctcttggatccaggaaaatgctagcaagctaccaaagggattggacgagattcagtgcagcctgcctatggagtcccgtcgtataagtctgagagagctttcagaagctagtttctccgagtgcaggttttcactttcccttactgacttatgt

SEQ ID NO: 3958 - DNA, 513 bp, Homo Sapiens
tgtcccaagggctgtctttgttcttcctctgggggtttaaatgtcacctgtagcaatgcaaatctcaaggaaatacctagagatcttcctcctgaaacagtcttactgtatctggactccaatcagatcacatctattcccaatgaaatttttaaggacctccatcaactgagagttctcaacctgtccaaaaatggcattgagtttatcgatgagcatgccttcaaaggagtagctgaaaccttgcagactctggacttgtccgacaatcggattcaaagtgtgcacaaaaatgccttcaataacctgaaggccagggccagaattgccaacaacccctggcactgcgactgtactctacagcaagttctgaggagcatggcgtccaatcatgagacagcccacaacgtgatctgtaaaacgtccgtgttggatgaacatgctggcagaccattcctcaatgctgccaacgacgctgacctttgtaacctccctaaaaaaactaccgattat

SEQ ID NO: 3959 - DNA, 549 bp, Homo Sapiens
gtgccctcaccgcaagtgccgcccagagggtgctacgtggcaaaggaggcaggggaacgtacttttcgttgcagccaggcgggcctttccgcagtgccttctgggataccgaacgacaccaggaagctataccttgacgctaatcagttagccagtgttcccgcaggagccttccagcatttgccagtgctggaagagttagacctttcccataatgctctggcacatctgtcaggtgctgcgtttcaaggacttgagggcacccttagacacctagatctatccgcaaaccagttagcgtccgtcccggttgaagcattcgttggtttgcagatacaagtaaatctatctgcaaatccctggcactgtgattgcgccttacaagaagttctaagacaagttaggttagtaccgggtaccggaaccggaatcgtgtgtgggtcaggtgcgagacctgatcttgtgggccaagaatttcttctgttggcgggtgaagaagaattatgtggtagcggttggggcggagccaggagaagtacagacgtggca

SEQ ID NO: 3960 - DNA, 1467 bp, Homo Sapiens
gcctcagccgggccccagaactgcccctccgtctgctcgtgcagtaaccagttcagcaaggtggtgtgcacgcgccggggcctctccgaggtcccgcagggtattccctcgaacacccggtacctcaacctcatggagaacaacatccagatgatccaggccgacaccttccgccacctccaccacctggaggtcctgcagttgggcaggaactccatccggcagattgaggtgggggccttcaacggcctggccagcctcaacaccctggagctgttcgacaactggctgacagtcatccctagcggggcctttgaatacctgtccaagctgcgggagctctggcttcgcaacaaccccatcgaaagcatcccctcttacgccttcaaccgggtgccctccctcatgcgcctggacttgggggagctcaagaagctggagtatatctctgagggagcttttgaggggctgttcaacctcaagtatctgaacttgggcatgtgcaacattaaagacatgcccaatctcacccccctggtggggctggaggagctggagatgtcagggaaccacttccctgagatcaggcctggctccttccatggcctgagctccctcaagaagctctgggtcatgaactcacaggtcagcctgattgagcggaatgcttttgacgggctggcttcacttgtggaactcaacttggcccacaataacctctcttctttgccccatgacctctttaccccgctgaggtacctggtggagttgcatctacaccacaacccttggaactgtgattgtgacattctgtggctagcctggtggcttcgagagtatatacccaccaattccacctgctgtggccgctgtcatgctcccatgcacatgcgaggccgctacctcgtggaggtggaccaggcctccttccagtgctctgcccccttcatcatggacgcacctcgagacctcaacatttctgagggtcggatggcagaacttaagtgtcggactccccctatgtcctccgtgaagtggttgctgcccaatgggacagtgctcagccacgcctcccgccacccaaggatctctgtcctcaacgacggcaccttgaacttttcccacgtgctgctttcagacactggggtgtacacatgcatggtgaccaatgttgcaggcaactccaacgcctcggcctacctcaatgtgagcacggctgagcttaacacctccaactacagcttcttcaccacagtaacagtggagaccacggagatctcgcctgaggacacaacgcgaaagtacaagcctgttcctaccacgtccactggttaccagccggcatataccacctctaccacggtgctcattcagactacccgtgtgcccaagcaggtggcagtacccgcgacagacaccactgacaagatgcagaccagcctggatgaagtcatgaagaccaccaag

SEQ ID NO: 3961 - DNA, 1623 bp, Homo Sapiens
gccggtggaggtggagtggccgtgacgtctgccgccggagggggctccccgccggccacctcctgccccgtggcctgctcctgcagcaaccaggccagccgggtgatctgcacacggagagacctggccgaggtcccagccagcatcccggtcaacacgcggtacctgaacctgcaagagaacggcatccaggtgatccggacggacacgttcaagcacctgcggcacctggagattctgcagctgagcaagaacctggtgcgcaagatcgaggtgggcgccttcaacgggctgcccagcctcaacacgctggagctttttgacaaccggctgaccacggtgcccacgcaggccttcgagtacctgtccaagctgcgggagctctggctgcggaacaaccccatcgagagcatcccctcctacgccttcaaccgcgtgccctcgctgcggcgcctggacctgggcgagctcaagcggctggaatacatctcggaggcggccttcgaggggctggtcaacctgcgctacctcaacctgggcatgtgcaacctcaaggacatccccaacctgacggccctggtgcgcctggaggagctggagctgtcgggcaaccggctggacctgatccgcccgggctccttccagggtctcaccagcctgcgcaagctgtggctcatgcacgcccaggtagccaccatcgagcgcaacgccttcgacgacctcaagtcgctggaggagctcaacctgtcccacaacaacctgatgtcgctgccccacgacctcttcacgcccctgcaccgcctcgagcgcgtgcacctcaaccacaacccctggcattgcaactgcgacgtgctctggctgagctggtggctcaaggagacggtgcccagcaacacgacgtgctgcgcccgctgtcatgcgcccgccggcctcaaggggcgctacattggggagctggaccagtcgcatttcacctgctatgcgcccgtcatcgtggagccgcccacggacctcaacgtcaccgagggcatggctgccgagctcaaatgccgcacgggcacctccatgacctccgtcaactggctgacgcccaacggcaccctcatgacccacggctcctaccgcgtgcgcatctccgtcctgcatgacggcacgcttaacttcaccaacgtcaccgtgcaggacacgggccagtacacgtgcatggtgacgaactcagccggcaacaccaccgcctcggccacgctcaacgtctcggccgtggaccccgtggcggccgggggcaccggcagcggcgggggcggccctgggggcagtggtggtgttggagggggcagtggcggctacacctacttcaccacggtgaccgtggagaccctggagacgcagcccggagaggaggccctgcagccgcgggggacggagaaggaaccgccagggcccacgacagacggtgtctggggtgggggccggcctggggacgcggccggccctgcctcgtcttctaccacggcacccgccccgcgctcctcgcggcccacggagaaggcgttcacggtgcccatcacggatgtgacggagaacgccctcaaggacctggacgacgtcatgaagaccaccaaa

SEQ ID NO: 3962 - DNA, 1449 bp, Homo Sapiens
cagacctgcccttctgtgtgctcctgcagcaaccagttcagcaaggtgatttgtgttcggaaaaacctgcgtgaggttccggatggcatctccaccaacacacggctgctgaacctccatgagaaccaaatccagatcatcaaagtgaacagcttcaagcacttgagacacttggaaatcctacagttgagtaggaaccatatcagaaccattgaaattggggctttcaatggtctggcgaacctcaacactctggaactctttgacaatcgtcttactaccatcccgaatggagcttttgtatacttgtctaaactgaaggagctctggttgcgaaacaaccccattgaaagcatcccttcttatgcttttaacagaattccttctttgcgccgactagacttaggggaattgaaaagactttcatacatctcagaaggtgcctttgaaggtctgtccaacttgaggtatttgaaccttgccatgtgcaaccttcgggaaatccctaacctcacaccgctcataaaactagatgagctggatctttctgggaatcatttatctgccatcaggcctggctctttccagggtttgatgcaccttcaaaaactgtggatgatacagtcccagattcaagtgattgaacggaatgcctttgacaaccttcagtcactagtggagatcaacctggcacacaataatctaacattactgcctcatgacctcttcactcccttgcatcatctagagcggatacatttacatcacaacccttggaactgtaactgtgacatactgtggctcagctggtggataaaagacatggccccgtcgaacacagcttgttgtgcccggtgtaacactcctcccaatctaaaggggaggtacattggagagctcgaccagaattacttcacatgctatgctccggtgattgtggagccccctgcagacctcaatgtcactgaaggcatggcagctgagctgaaatgtcgggcctccacatccctgacatctgtatcttggattactccaaatggaacagtcatgacacatggggcgtacaaagtgcggatagctgtgctcagtgatggtacgttaaatttcacaaatgtaactgtgcaagatacaggcatgtacacatgtatggtgagtaattccgttgggaatactactgcttcagccaccctgaatgttactgcagcaaccactactcctttctcttacttttcaaccgtcacagtagagactatggaaccgtctcaggatgaggcacggaccacagataacaatgtgggtcccactccagtggtcgactgggagaccaccaatgtgaccacctctctcacaccacagagcacaaggtcgacagagaaaaccttcaccatcccagtgactgatataaacagtgggatcccaggaattgatgaggtcatgaagactaccaaa

SEQ ID NO: 3963 - DNA, 663 bp, Homo Sapiens
tcaaagtgtccaaataattgtctgtgtcaagcccaagaagtaatctgcacagggaagcagttaaccgaatacccccttgacatacccctgaacacccggaggctgttcctgaacgagaacagaatcactagtttgccagcaatgcatctaggactcctcagtgaccttgtttatttggactgtcagaacaaccggattcgagaggtgatggattataccttcatcggggtcttcaaactcatctaccttgacctcagctccaacaacctaacctcgatctccccattcactttctcggtgctcagcaacctggtgcagctgaacattgccaacaaccctcacctgttatcgcttcacaagttcacctttgccaacaccacctctttgaggtacctggacctcagaaataccggcttgcagaccctggacagtgctgccttataccacctcactactctggagaccctgtttctgagtggaaacccctggaagtgcaactgctctttcctggacttcgccatcttcttaatagtgttccatatggacccctcagatgatctaaatgccacatgtgtggagcccacagagctgacagggtggcccatcacccgggtggggaacccactccgatacatgtgcatcacgcacctggaccacaaagac

SEQ ID NO: 3964 - DNA, 672 bp, Homo Sapiens
ggcaccagctgccccgtcctttgcacatgccgtaaccaggtggtggattgtagcagccagcggctattctccgtgcccccagacctgccaatggacacccgaaacctcagcctggcccacaaccgcatcacagcagtgccgcctggctacctcacatgctacatggagctccaggtgctggatttgcacaacaactccttaatggagctgccccggggcctcttcctccatgccaagcgcttggcacacttggacctgagctacaacaatttcagccatgtgccagccgacatgttccaggaggcccatgggctagtccacatcgacctgagccacaacccctggctgcggagggtgcatccccaggcctttcagggcctcatgcagctccgagacctggacctcagttatgggggcctggccttcctcagcctggaggctcttgagggcctaccggggctggtgaccctgcagatcggtggcaatccctgggtgtgtggctgcaccatggaacccctgctgaagtggctgcgaaaccggatccagcgctgtacagcagattctcagctggctgagtgccggggccctcctgaagtcgagggcgccccgctcttctcactcactgaggagagcttcaaggcctgccacctgaccctgaccctggatgattac

SEQ ID NO: 3965 - DNA, 1326 bp, Homo Sapiens
tctcttgtagcattgtatttggataattctaacattctgtatgtatatccaaaagcctttgttcaattgaggcatctatattttctatttctaaataataatttcatcaaacgcttagatcctggaatatttaagggacttttaaatcttcgtaatttatatttacagtataatcaggtatcttttgttccgagaggagtatttaatgatctagtttcagttcagtacttaaatctacaaaggaatcgcctcactgtccttgggagtggtacctttgttggtatggttgctcttcggatacttgatttatcaaacaataacattttgaggatatcagaatcaggctttcaacatcttgaaaaccttgcttgtttgtatttaggaagtaataatttaacaaaagtaccatcaaatgcctttgaagtacttaaaagtcttagaagactttctttgtctcataatcctattgaagcaatacagccctttgcatttaaaggacttgccaatctggaatacctcctcctgaaaaattcaagaattaggaatgttactagggatgggtttagtggaattaataatcttaaacatttgatcttaagtcataatgatttagagaatttaaattctgacacattcagtttgttaaagaatttaatttaccttaagttagatagaaacagaataattagcattgataatgatacatttgaaaatatgggagcatctttgaagatccttaatctgtcatttaataatcttacagccttgcatccaagggtccttaagccgttgtcttcattgattcatcttcaggcaaattctaatccttgggaatgtaactgcaaacttttgggccttcgagactggctagcatcttcagccattactctaaacatctattgtcagaatcccccatccatgcgtggcagagcattacgttatattaacattacaaattgtgttacatcttcaataaatgtatccagagcttgggctgttgtaaaatctcctcatattcatcacaagactactgcgctaatgatggcctggcataaagtaaccacaaatggcagtcctctggaaaatactgagactgagaacattactttctgggaacgaattcctacttcacctgctggtagattttttcaagagaatgcctttggtaatccattagagactacagcagtgttacctgtgcaaatacaacttactacttctgttaccttgaacttggaaaaaaacagtgctctaccgaatgatgctgcttcaatgtcagggaaaacatctctaatttgtacacaagaagttgagaagttgaatgag

SEQ ID NO: 3966 - DNA, 234 bp, Homo Sapiens
caggtcacccaagacaagatgatctgcctgccttgtaagtgggtcaccaaggactcctgcaatgattcgttccggggctgggcagcccctggcccggagcccacctaccccaactccaccattctgccgacccctgacacgggccccacaggcatcaagtatgacctggaccggcaccagtacaactacgtggacgctgtgtgctatgagaaccgactgcactggtttgccaag

SEQ ID NO: 3967 - DNA, 219 bp, Homo Sapiens
ctgacgcagagcagggttctgtgctgtcttccatgcaaagtggaatttgacaatcactgtgccgtgccttgggacatcctgaaagccagcatgaacacatcctctaatcctgggacaccgcttccgctccccctccgaattcagaatgacctccaccgacagcagtactcctatattgatgccgtctgttacgagaaacagctccattggtttgcaaag

SEQ ID NO: 3968 - DNA, 246 bp, Homo Sapiens
acacttcaggttatgcaggataaaatcatatgtctaccgaagcgtgtccaaccagctcaaaatcattcctcattgagcaatgtaagccaagccgtcgcctccaccaccccgctgccccccccaaagccttcacctgctaatccgattacggtcgaaatgaaaggcttgaaaacagacttggacctgcaacaatacagtttcataaatcaaatgtgttacgaaagagcccttcattggtacgcgaaa

SEQ ID NO: 3969 - DNA, 360 bp, Homo Sapiens
accatgcaacttaccaaagatcaggtggtctgtttgccagtattgccatctcctgtaaattcaaaggcacatacaccaccaggaaatgccgaggtcaccaccaacatcccaaagatggaagcagccaccaaccaagaccaagatgggcggacaacaaacgacatttcctttgggacatctgctgtgacacctgacatacctctcagagccacatatcctcgcacagatttcgcacttccaaatcaggaggcaaagaaagagaagaaagatccaacaggtcgaaaaacaaacttggattttcagcaatatgtatttattaatcaaatgtgttaccatctggcccttccgtggtattctaag

SEQ ID NO: 3970 - DNA, 1818 bp, Homo Sapiens
tccatacagaatagtgagtgtccacaactttgcgtatgtgaaattcgtccctggtttaccccacagtcaacttacagagaagccaccactgttgattgcaatgacctccgcttaacaaggattcccagtaacctctctagtgacacacaagtgcttctcttacagagcaataacatcgcgaagactgtggatgagctgcagcagcttttcaacttgactgaactagatttctcccaaaacaactttactaacattaaggaggtcgggctggcaaacctaacccagctcacaacgctgcatttggaggaaaatcagattaccgagatgactgattactgtctacaagacctcagcaaccttcaagaactctacatcaaccacaaccaaattagcactatttctgctcatgcttttgcaggcttaaaaaatctattaaggctccacctgaactccaacaaattgaaagttattgatagtcgctggtttgattctacacccaacctggaaattctcatgatcggagaaaaccctgtgattggaattctggatatgaacttcaaacccctcgcaaatttgagaagcttagttttggcaggaatgtatctcactgatattcctggaaatgctttggtgggtctggatagccttgagagcctgtctttttatgataacaaactggttaaagtccctcaacttgccctgcaaaaagttccaagtttgaaattcttagacctcaacaaaaaccccattcacaaaatccaagaaggggacttcaaaaatatgcttcggttaaaagaactgggaatcaacaatatgggcgagctcgtttctgtcgaccgctatgccctggataacttgcctgaactcacaaagctggaagccaccaataaccctaaactctcttacatccaccgcttggctttccgaagtgtccctgctctggaaagcttgatgctgaacaacaatgccttgaatgccatttaccaaaagacagtcgaatccctccccaatctgcgtgagatcagtatccatagcaatcccctcaggtgtgactgtgtgatccactggattaactccaacaaaaccaacatccgcttcatggagcccctgtccatgttctgtgccatgccgcccgaatataaagggcaccaggtgaaggaagttttaatccaggattcgagtgaacagtgcctcccaatgatatctcacgacagcttcccaaatcgtttaaacgtggatatcggcacgacggttttcctagactgtcgagccatggctgagccagaacctgaaatttactgggtcactcccattggaaataagataactgtggaaaccctttcagataaatacaagctaagtagcgaaggtaccttggaaatatctaacatacaaattgaagactcaggaagatacacatgtgttgcccagaatgtccaaggggcagacactcgggtggcaacaattaaggttaacgggacccttctggatggtacccaggtgctaaaaatatacgtcaagcagacagaatcccattccatcttagtgtcctggaaagttaattccaatgtcatgacgtcaaacttaaaatggtcgtctgccaccatgaagattgataaccctcacataacatatactgccagggtcccagtcgatgtccatgaatacaacctaacgcatctgcagccttccacagattatgaagtgtgtctcacagtgtccaatattcatcagcagactcaaaagtcatgcgtaaatgtcacaaccaaaaatgccgccttcgcagtggacatctctgatcaagaaaccagtacagcc

SEQ ID NO: 3971 - DNA, 1818 bp, Homo Sapiens
gtagataaaaaagtggattgtccacggttatgtacgtgtgaaatcaggccttggtttacacccagatccatttatatggaagcatctacagtggattgtaatgatttaggtcttttaactttcccagccagattgccagctaacacacagattcttctcctacagactaacaatattgcaaaaattgaatactccacagactttccagtaaaccttactagcctggatttatctcaaaacaatttatcttcagtcaccaatattaatgtaaaaaagatgcctcagctcctttctgtgtacctagaggaaaacaaacttactgaactgcctgaaaaatgtctgtccgaactgagcaacttacaagaactctatattaatcacaacttgctttctacaatttcacctggagcctttattggcctacataatcttcttcgacttcatctcaattcaaatagattgcagatgatcaacagtaagtggtttgatgctcttccaaatctagagattctgatgattggggaaaatccaattatcagaatcaaagacatgaactttaagcctcttatcaatcttcgcagcctggttatagctggtataaacctcacagaaataccagataacgccttggttggactggaaaacttagaaagcatctctttttacgataacaggcttattaaagtaccccatgttgctcttcaaaaagttgtaaatctcaaatttttggatctaaataaaaatcctattaatagaatacgaaggggtgattttagcaatatgctacacttaaaagagttggggataaataatatgcctgagctgatttccatcgatagtcttgctgtggataacctgccagatttaagaaaaatagaagctactaacaaccctagattgtcttacattcaccccaatgcatttttcagactccccaagctggaatcactcatgctgaacagcaatgctctcagtgccctgtaccatggtaccattgagtctctgccaaacctcaaggaaatcagcatacacagtaaccccatcaggtgtgactgtgtcatccgttggatgaacatgaacaaaaccaacattcgattcatggagccagattcactgttttgcgtggacccacctgaattccaaggtcagaatgttcggcaagtgcatttcagggacatgatggaaatttgtctccctcttatagctcctgagagctttccttctaatctaaatgtagaagctgggagctatgtttcctttcactgtagagctactgcagaaccacagcctgaaatctactggataacaccttctggtcaaaaactcttgcctaataccctgacagacaagttctatgtccattctgagggaacactagatataaatggcgtaactcccaaagaagggggtttatatacttgtatagcaactaacctagttggcgctgacttgaagtctgttatgatcaaagtggatggatcttttccacaagataacaatggctctttgaatattaaaataagagatattcatgccaattcagttttggtgtcctggaaagcaagttctaaaattctcaaatctagtgttaaatggacagcctttgtcaagactgaaaattctcatgctgcgcaaagtgctcgaataccatctgatgtcaaggtatataatcttactcatctgaatccatcaactgagtataaaatttgtattgatattcccaccatctatcagaaaaacagaaaaaaatgtgtaaatgtcaccaccaaaggtttgcaccctgatcaaaaagagtatgaaaagaataataccacaaca

SEQ ID NO: 3972 - DNA, 1983 bp, Homo Sapiens
gaccctccccaggagaaggtcccgctcttccgggtcactcagcagggcccctgggggagcagtggcagcaacgccaccgactcgccctgcgaggggctgcccgccgcggatgcgacggccttgaccctggcgaaccgcaacctggagcgcctgcccggctgcctaccgcgcacactgcgcagcctcgacgccagccacaacctgctgcgcgccctgagcacttccgagctcggccacctggagcagctgcaggtgctgaccctgcgccacaaccgcatcgccgcgctgcgctggggcccgggtgggccggcggggctgcacaccctggacctcagctacaaccagctggccgctctgctgccgtgcaccgggcccgcgctgagcagcctccgcgccctggcgctcgccgggaatccgctgcgggcgctgcagccccgggccttcgcctgcttccccgcgctgcaactcctcaacctctcctgcaccgcgctgggtcgcggagcccaggggggcatcgccgaggcggcgttcgctggagaggatggcgcgcccctggtcacgctcgaagtcctggatctcagcggcacgttccttgaacgggttgagtcagggtggatcagagacctgccgaagctcacatccctctacctgaggaagatgcctcggctgacgaccctggagggggacattttcaagatgacccccaacctgcagcagctggactgtcaggactccccagcacttgcttctgtcgccacacacatctttcaagatactccacatctacaggtccttctgttccagaactgcaacttgagttccttccctccttggaccctggattcctcccaggtcctatcgatcaacctctttggcaaccccctcacttgcagttgtgacttgtcttggctcctcacggatgcaaagagaactgtcctaagcagggcagcagacactatgtgcgcgccagctgcgggatccagcggccccttctcagcctccctgtcactctcccagctgcccggagtgtgccagtccgaccaaagcaccactctcggggcttcacacccaccttgcttcaaccgctccacctacgcacagggtaccaccgtcgcgcccagcgcagcccccgccacccggcctgcgggagaccagcagagtgtctccaaggcccctaacgtgggctctcgcacgatagctgcatggccgcacagcgatgcacgggaggggactgccccctccacgaccaactctgtagcaggtcacagcaactccagcgttttccccagggctgccagcaccaccaggacccagcaccgaggagaacatgcccccgagcttgtccttgagcctgatatctcagctgcctccaccccactggccagcaagctcctgggccccttccctacctcgtgggaccgcagcataagctcgcctcagcccggccagaggacacacgccacaccccaagcccccaacccgagtctttccgagggcgagattccagtcttgctgctggacgactacagtgaggaggaggaagggaggaaggaggaggtgggaacgcctcaccaggacgtcccctgtgattaccatccctgcaagcacctgcagaccccgtgcgcggagctgcagaggcggtggcggtgccggtgccccggcctcagcggggaagacaccatcccagacccgcccaggctgcagggggtgacggagaccacggacacgtcggcgctggtccactggtgtgcccccaactcggtagtgcatgggtaccagatccgctactctgcggagggctgggcggggaaccagtcggtggtgggggtcatctacgccacggcccggcagcaccctctgtacgggctgtcgccgggcaccacctaccgcgtgtgcgtgctggcggccaacagggcgggcttgagccagccacggtcttcgggctggaggagcccgtgcgccgccttcaccaccaagcccagc

SEQ ID NO: 3973 - DNA, 516 bp, Homo Sapiens
ttggcccctcaagactttgaagaagaggaggcagatgagactgagacggcgtggccgcctttgccggctgtcccctgcgactacgaccactgccgacacctgcaggtgccctgcaaggagctacagagggtcgggccggcggcctgcctgtgcccaggactctccagccccgcccagccgcccgacccgccgcgcatgggagaagtgcgcattgcggccgaagagggccgcgcagtggtccactggtgtgcccccttctccccggtcctccactactggctgctgctttgggacggcagcgaggctgcgcagaaggggcccccgctgaacgctacggtccgcagagccgaactgaaggggctgaagccagggggcatttatgtcgtttgcgtagtggccgctaacgaggccggggcaagccgcgtgccccaggctggaggagagggcctcgagggggccgacatccctgccttcgggccttgcagccgccttgcggtgccgcccaacccccgcact

SEQ ID NO: 3974 - DNA, 1836 bp, Homo Sapiens
gctgtgcccgtggtaccctggcatgttccctgcccccctcagtgtgcctgccagatccggccctggtatacgccccgctcgtcctaccgcgaggctaccactgtggactgcaatgacctattcctgacggcagtccccccggcactccccgcaggcacacagaccctgctcctgcagagcaacagcattgtccgtgtggaccagagtgagctgggctacctggccaatctcacagagctggacctgtcccagaacagcttttcggatgcccgagactgtgatttccatgccctgccccagctgctgagcctgcacctagaggagaaccagctgacccggctggaggaccacagctttgcagggctggccagcctacaggaactctatctcaaccacaaccagctctaccgcatcgcccccagggccttttctggcctcagcaacttgctgcggctgcacctcaactccaacctcctgagggccattgacagccgctggtttgaaatgctgcccaacttggagatactcatgattggcggcaacaaggtagatgccatcctggacatgaacttccggcccctggccaacctgcgtagcctggtgctagcaggcatgaacctgcgggagatctccgactatgccctggaggggctgcaaagcctggagagcctctccttctatgacaaccagctggcccgggtgcccaggcgggcactggaacaggtgcccgggctcaagttcctagacctcaacaagaacccgctccagcgggtagggccgggggactttgccaacatgctgcaccttaaggagctgggactgaacaacatggaggagctggtctccatcgacaagtttgccctggtgaacctccccgagctgaccaagctggacatcaccaataacccacggctgtccttcatccacccccgcgccttccaccacctgccccagatggagaccctcatgctcaacaacaacgctctcagtgccttgcaccagcagacggcggagtccctgcccaacctgcaggaggtaggtctccacggcaaccccatccgctgtgactgtgtcatccgctgggccaatgccacgggcacccgtgtccgcttcatcgagccgcaatccaccctgtgtgcggagcctccggacctccagcgcctcccggtccgtgaggtgcccttccgggagatgacggaccactgtttgcccctcatctccccacgaagcttccccccaagcctccaggtagccagtggagagagcatggtgctgcattgccgggcactggccgaacccgaacccgagatctactgggtcactccagctgggcttcgactgacacctgcccatgcaggcaggaggtaccgggtgtaccccgaggggaccctggagctgcggagggtgacagcagaagaggcggggctatacacctgtgtggcccagaacctggtgggggctgacactaagacggttagtgtggttgtgggccgtgctctcctccagccaggcagggacgaaggacaggggctggagctccgggtgcaggagacccacccctatcacatcctgctatcttgggtcaccccacccaacacagtgtccaccaacctcacctggtccagtgcctcctccctccggggccagggggccacagctctggcccgcctgcctcggggaacccacagctacaacattacccgcctccttcaggccacggagtactgggcctgcctgcaagtggcctttgctgatgcccacacccagttggcttgtgtatgggccaggaccaaagaggccacttcttgccacagagccttaggggaccgtcctggg

SEQ ID NO: 3975 - DNA, 1179 bp, Homo Sapiens
gcccccagcgggtgcccgcagctgtgccggtgcgaggggcggctgctgtactgcgaggcgctcaacctcaccgaggcgccccacaacctgtccggcctgctgggcttgtccctgcgctacaacagcctctcggagctgcgcgccggccagttcacggggttaatgcagctcacgtggctctatctggatcacaatcacatctgctccgtgcagggggacgcctttcagaaactgcgccgagttaaggaactcacgctgagttccaaccagatcacccaactgcccaacaccaccttccggcccatgcccaacctgcgcagcgtggacctctcgtacaacaagctgcaggcgctcgcgcccgacctcttccacgggctgcggaagctcaccacgctgcatatgcgggccaacgccatccagtttgtgcccgtgcgcatcttccaggactgccgcagcctcaagtttctcgacatcggatacaatcagctcaagagtctggcgcgcaactctttcgccggcttgtttaagctcaccgagctgcacctcgagcacaacgacttggtcaaggtgaacttcgcccacttcccgcgcctcatctccctgcactcgctctgcctgcggaggaacaaggtggccattgtggtcagctcgctggactgggtttggaacctggagaaaatggacttgtcgggcaacgagatcgagtacatggagccccatgtgttcgagaccgtgccgcacctgcagtccctgcagctggactccaaccgcctcacctacatcgagccccggatcctcaactcttggaagtccctgacaagcatcaccctggccgggaacctgtgggattgcgggcgcaacgtgtgtgccctagcctcgtggctcagcaacttccaggggcgctacgatggcaacttgcagtgcgccagcccggagtacgcacagggcgaggacgtcctggacgccgtgtacgccttccacctgtgcgaggatggggccgagcccaccagcggccacctgctctcggccgtcaccaaccgcagtgatctggggccccctgccagctcggccaccacgctcgcggacggcggggaggggcagcacgacggcacattcgagcctgccaccgtggctcttccaggcggcgagcacgccgagaacgccgtgcagatccacaag

(The sequence listing continues in the following parts.)

What is claimed is:

1. A method of identifying at least one polypeptide which binds to at least one antibody, wherein the method comprises:
(a) contacting a library of display cells or particles with a sample comprising at least one antibody, wherein the library of display cells comprises a plurality of cells or particles wherein together the plurality of cells or particles comprises nucleic acid molecules for expression of a plurality of extracellular proteins, secreted proteins or a combination thereof;
wherein each cell or particle of the plurality of cells or particles comprises a barcoded nucleic acid molecule, wherein each nucleic acid molecule comprises
i) a nucleotide sequence encoding a polypeptide of interest for display on the surface of the cell or particle; and
ii) a unique nucleotide barcode sequence;
(b) isolating one or more antibody-bound cell or particle;
(c) isolating at least one barcoded nucleic acid molecule from at least one cell or particle of step (b); and
(d) identifying the barcoded nucleic acid molecule, thereby identifying the associated encoded polypeptide as an antigen for binding by at least one antibody in the sample.

2. The method of claim 1, wherein the method of isolating one or more antibody-bound cell or particle comprises high-throughput magnetic separation.

3. The method of claim 1, wherein the method further comprises the step of:
(b′) expanding the one or more isolated antibody-bound cell or particle.

4. The method of claim 1, wherein the method of identifying the barcoded nucleic acid molecule comprises at least one selected from the group consisting of amplifying the barcoded nucleic acid molecule and sequencing the barcoded nucleic acid molecule.

5. The method of claim 1, comprising:
in step (b), isolating multiple antibody bound cells,
in step (c), isolating the barcoded nucleic acid molecules from the cells of step (b), and
in step (d), sequencing the isolated barcoded nucleic acid molecules, and identifying the associated encoded polypeptide as an antigen for binding by the antibody based on an enrichment of the number of reads of the associated barcode in the sequencing data as compared to a threshold level.

6. The method of claim 3, wherein the threshold level is selected from the group consisting of a predetermined threshold level, a statistically determined threshold, and a threshold level determined using z-scores.

7. The method of claim 1, wherein the library of display cells or particles comprises a library of barcoded nucleic acid molecules encoding at least one selected from an extracellular domain of a protein, an extracellular protein, and a secreted protein.

8. The method of claim 7, wherein the library of barcoded nucleic acid molecules comprises a plurality of nucleic acid molecules which together encode the human exoproteome.

9. The method of claim 7, wherein the library of barcoded nucleic acid molecules comprises at least one nucleic acid molecule encoding at least one polypeptide sequence selected from SEQ ID NO:1-3092.

10. The method of claim 7, wherein the library of barcoded nucleic acid molecules comprises a plurality of nucleic acid molecules which together encode each of SEQ ID NO:1-3092.

11. The method of claim 7, wherein the library of barcoded nucleic acid molecules comprises at least one nucleic acid molecule comprising a nucleotide sequence selected from SEQ ID NO:3093-6185.

12. The method of claim 7, wherein the library of barcoded nucleic acid molecules comprises a plurality of nucleic acid molecules which together comprise each of SEQ ID NO:3093-6185.

13. The method of claim 1, wherein the sample comprises a biological sample selected from the group consisting of a body fluid, blood, serum, plasma, cerebrospinal fluid, tissue, and any combination thereof.

14. The method of claim 1, wherein the sample comprises at least one antibody purified from a biological sample selected from the group consisting of a body fluid, blood, serum, plasma, cerebrospinal fluid, tissue, and any combination thereof.

15. The method of claim 14, wherein at least one antibody is purified from a biological sample by at least one selected from the group consisting of:
(a) affinity purification for a specific antibody isotype of interest, and
(b) contacting the sample with a control cell or particle comprising an empty expression plasmid.

16. The method of claim 1, wherein the sample is from a subject diagnosed as having a disease or disorder, and whereby the antigen for binding by at least one antibody is a disease-associated antigen.

17. The method of claim 1, wherein the antibody is an autoantibody.

18. The method of claim 1, wherein the antibody is associated with an autoimmune disease or disorder, cancer, inflammatory disease or disorder, metabolic disease or disorder, neurodegenerative disease or disorder, organ tissue rejection, organ transplant rejection, or any combination thereof.

19. A method of preventing or treating a disease or disorder in a subject in need thereof; the method comprising administering a therapeutic agent to the subject, wherein the therapeutic agent comprises an agent for modifying the level or reactivity of at least one antibody which interacts with at least one antigen selected from the group consisting of the antigens as set forth in SEQ ID NO:1-3092.

20. The method of claim 19, wherein the antigen is identified as a target for at least one antibody according to the method of claim 1.

21. The method of claim 19, wherein the at least one antigen is selected from the group consisting of an antigen as set forth in Table 3, and further wherein the disease or disorder is the disease or disorder associated with the antigen as set forth in Table 3.

22. The method of claim 21, wherein the therapeutic agent comprises an agent for decreasing the level or reactivity of at least one antibody with at least one disease-associated antigen selected from the group consisting of the antigens as set forth in Table 3.

23. The method of claim 19, wherein the at least one antigen is selected from the group consisting of an antigen as set forth in Table 6, and further wherein the disease or disorder is the disease or disorder associated with the antigen as set forth in Table 6.

23. The method of claim 19, wherein the therapeutic agent comprises a therapeutically effective amount of at least agent that reduces or eliminates at least one antibody.

24. The method of claim 23, wherein the therapeutic agent comprises a composition comprising an antigen selected from the group consisting of an antigen as set forth in SEQ ID NO:1-3092 linked to a domain for endocytosis and degradation.

25. The method of claim 23, wherein the therapeutic agent comprises a composition comprising an antigen selected from the group consisting of an antigen as set forth in Table 6 linked to a domain for endocytosis and degradation.

26. The method of claim 24, wherein the domain for endocytosis and degradation comprises an asialoglycoprotein receptor binding domain.

27. The method of claim 23, wherein the agent that reduces or eliminates at least one antibody comprises a molecule for targeting and destruction of at least one antibody-expressing cell.

28. The method of claim 27, wherein the agent comprises a chimeric antigen receptor (CAR) T cell expressing an antigen selected from the group consisting of an antigen as set forth in SEQ ID NO:1-3092, or a fragment thereof.

29. The method of claim 28, wherein the CAR T cell expresses an antigen selected from the group consisting of an antigen as set forth in Table 6.

30. The method of claim 19, wherein the therapeutic agent comprises an agent for increasing the level or reactivity of at least one antibody with at least one disease-associated antigen selected from the group consisting of the antigens as set forth in Table 3.

31. The method of claim 30, wherein the at least one antigen is selected from the group consisting of an antigen as set forth in Table 5, and further wherein the disease or disorder is the disease or disorder associated with the antigen as set forth in Table 5.

32. The method of claim 30, wherein the therapeutic agent comprises a therapeutically effective amount of at least one antibody, or fragment thereof, wherein the antibody specifically binds to a disease-associated antigen.

33. The method of claim 19, wherein the disease or disorder is selected from the group consisting of an autoimmune disease or disorder, cancer, inflammatory disease or disorder, metabolic disease or disorder, neurodegenerative disease or disorder, organ tissue rejection, organ transplant rejection, or any combination thereof.

34. The method of claim 19, wherein the disease or disorder is selected from the group consisting of antineutrophil cytoplasmic antibody (ANCA)-associated vasculitis, autoimmune polyendocrinopathy candidiasis ecto-dermal dystrophy, antiphospholipid antibody syndrome, chronic inflammatory demyelinating polyradiculoneuropathy, cutaneous lupus erythematosus, COVID-19, drug-induced lupus, dermatomyositis, glomerulonephritis, a disease or disorder associated with kidney transplant, malaria, mixed connective tissue disease, myasthenia gravis, malignant melanoma, neuromyelitis optica, non-small cell lung cancer, pediatric autoimmune neuropsychiatric disorders associated with streptococcal infections, systemic lupus erythematosus, sjogren's syndrome, scleroderma, susac syndrome, undifferentiated connective tissue disease, and any combination thereof.

35. A method of diagnosing, assessing the prognosis, or assessing the effectiveness of treatment of a disease or disorder in a subject in need thereof; the method comprising assessing the level or reactivity of at least one antibody which interacts with at least one antigen selected from the group consisting of an antigen as set forth in SEQ ID NO:1-3092.

36. The method of claim 35, wherein the at least one antigen is selected from the group consisting of an antigen as set forth in Table 3, and further wherein the disease or disorder is the disease or disorder associated with the antigen as set forth in Table 3.

37. The method of claim 35, wherein the at least one antigen is selected from the group consisting of an antigen as set forth in Table 4, and further wherein the disease or disorder is the disease or disorder associated with the antigen as set forth in Table 4.

38. The method of claim 35, wherein the disease or disorder is selected from the group consisting of an autoimmune disease or disorder, cancer, inflammatory disease or disorder, metabolic disease or disorder, neurodegenerative disease or disorder, organ tissue rejection, organ transplant rejection, or any combination thereof.

39. The method of claim 35, wherein the disease or disorder is selected from the group consisting of antineutrophil cytoplasmic antibody (ANCA)-associated vasculitis, autoimmune polyendocrinopathy candidiasis ecto-dermal dystrophy, antiphospholipid antibody syndrome, chronic inflammatory demyelinating polyradiculoneuropathy, cutaneous lupus erythematosus, COVID-19, drug-induced lupus, dermatomyositis, glomerulonephritis, a disease or disorder associated with kidney transplant, malaria, mixed connective tissue disease, myasthenia gravis, malignant melanoma, neuromyelitis optica, non-small cell lung cancer, pediatric autoimmune neuropsychiatric disorders associated with streptococcal infections, systemic lupus erythematosus, sjogren's syndrome, scleroderma, susac syndrome, undifferentiated connective tissue disease, and any combination thereof.

40. A composition comprising an antigen selected from the group consisting of an antigen as set forth in SEQ ID NO:1-3092, or a fragment thereof, linked to a domain for endocytosis, degradation, or a combination thereof.

41. The composition of claim 40, wherein the composition comprises an antigen selected from the group consisting of an antigen as set forth in Table 6 linked to a domain for endocytosis, degradation, or a combination thereof.

42. The composition of claim 40, wherein the domain for endocytosis, degradation, or a combination thereof comprises an asialoglycoprotein receptor binding domain.

43. A composition for targeting and destruction of at least one antibody-expressing cell comprising an antigen selected from the group consisting of an antigen as set forth in SEQ ID NO:1-3092, or a fragment thereof.

44. The composition of claim 43, wherein the agent comprises a chimeric antigen receptor (CAR) T cell expressing an antigen as set forth in SEQ ID NO:1-3092, or a fragment thereof.

45. The composition of claim 44, wherein the CAR T cell expresses an antigen selected from the group consisting of an antigen as set forth in Table 6.
